(19) United States
(12) Patent Application Publication
(10) Pub. No.: US 2007/0277258 A1
(43) Pub. Date: Nov. 29, 2007

(54) Nucleic acid molecules and other molecules associated with plants

(76) Inventors: Dane K. Fisher, O'Fallon, MO (US); Raghunath V. Lalgudi, Arlington, MA (US)

Correspondence Address: ARNOLD & PORTER, LLP, 555 TWELFTH STREET, N.W., ATTN: IP DOCKETING, WASHINGTON, DC, 20004, US

(21) Appl. No.: 11/227,183

(22) Filed: Sep. 16, 2005

Related U.S. Application Data
(62) Division of application No. 09/619,643, filed on Jul. 19, 2000, now abandoned.

(51) Int. Cl. A01H 5/00; C07H 21/04; C07K 14/415

(52) U.S. Cl. 800/278; 800/312; 800/320.1; 530/370; 536/23.6

(57) ABSTRACT

The present invention is in the field of plant biochemistry. More specifically the invention relates to nucleic acid molecules that encode proteins and fragments of proteins produced in plant cells, in particular, maize plants. The invention also relates to proteins and fragments of proteins so encoded and antibodies capable of binding the proteins. The invention also relates to methods of using the nucleic acid molecules, proteins and fragments of proteins.

### FIELD OF THE INVENTION

[0001] The present invention is in the field of plant biochemistry. More specifically the invention relates to nucleic acid molecules that encode proteins and fragments of proteins produced in plant cells, in particular, maize plants. The invention also relates to proteins and fragments of proteins so encoded and antibodies capable of binding the proteins. The invention also relates to methods of using the nucleic acid molecules, proteins and fragments of proteins.

### BACKGROUND OF THE INVENTION

### I. Expressed Sequence Tag Nucleic Acid Molecules

[0002] Expressed sequence tags, or ESTs, are short sequences of randomly selected clones from a cDNA (or complementary DNA) library which are representative of the cDNA inserts of these randomly selected clones. McCombie, et al., Nature Genetics, 1:124-130 (1992); Kurata et al., Nature Genetics, 8: 365-372 (1994); Okubo, et al., Nature Genetics, 2: 173-179 (1992), all of which references are incorporated herein in their entirety.

[0003] Using conventional methodologies, cDNA libraries can be constructed from the mRNA (messenger RNA) of a given tissue or organism using poly dT primers and reverse transcriptase (Efstratiadis, et al., Cell 7:279-288 (1976), the entirety of which is herein incorporated by reference; Higuchi, et al., Proc. Natl. Acad. Sci (U.S.A.) 73:3146-3150 (1976), the entirety of which is herein incorporated by reference; Maniatis, et al., Cell 8:163 (1976) the entirety of which is herein incorporated by reference; Land, et al., Nucleic Acids Res. 9:2251-2266 (1981), the entirety of which is herein incorporated by reference; Okayama, et al., Mol. Cell. Biol. 2:161-170 (1982), the entirety of which is herein incorporated by reference; Gubler, et al., Gene 25:263 (1983), the entirety of which is herein incorporated by reference).

[0004] Several methods may be employed to obtain full-length cDNA constructs. For example, terminal transferase can be used to add homopolymeric tails of dC residues to the free 3′ hydroxyl groups (Land, et al., Nucleic Acids Res. 9:2251-2266 (1981), the entirety of which is herein incorporated by reference). This tail can then be hybridized by a poly dG oligo which can act as a primer for the synthesis of full length second strand cDNA. Okayama and Berg, report a method for obtaining full length cDNA constructs. This method has been simplified by using synthetic primer-adapters that have both homopolymeric tails for priming the synthesis of the first and second strands and restriction sites for cloning into plasmids (Coleclough, et al., Gene 34:305-314 (1985), the entirety of which is herein incorporated by reference) and bacteriophage vectors (Krawinkel, et al., Nucleic Acids Res. 14:1913 (1986), the entirety of which is herein incorporated by reference; and Han, et al., Nucleic Acids Res. 15:6304 (1987), the entirety of which is herein incorporated by reference).

[0005] These strategies have been coupled with additional strategies for isolating rare mRNA populations. For example, a typical mammalian cell contains between 10,000 and 30,000 different mRNA sequences. Davidson, Gene Activity in Early Development, 2nd ed., Academic Press, New York (1976). The number of clones required to achieve a given probability that a low-abundance mRNA will be present in a cDNA library is N=(n(1−P))/(ln(1−1/n)) where N is the number of clones required, P is the probability desired, and 1/n is the fractional proportion of the total mRNA that is represented by a single rare mRNA. (Sambrook, et al., Molecular Cloning: A Laboratory Manual, 2nd ed., Cold Spring Harbor Laboratory Press (1989), the entirety of which is herein incorporated by reference.).

[0006] A method to enrich preparations of mRNA for sequences of interest is to fractionate by size. One such method is to fractionate by electrophoresis through an agarose gel (Pennica, et al., Nature 301:214-221 (1983), the entirety of which is herein incorporated by reference). Another such method employs sucrose gradient centrifugation in the presence of an agent, such as methylmercuric hydroxide, that denatures secondary structure in RNA (Schweinfest, et al., Proc. Natl. Acad. Sci. (U.S.A.) 79:4997-5000 (1982), the entirety of which is herein incorporated by reference).

[0007] A frequently adopted method is to construct equalized or normalized cDNA libraries (Ko, Nucleic Acids Res. 18:5705-5711 (1990), the entirety of which is herein incorporated by reference; Patanjali, S. R. et al., Proc. Natl. Acad. Sci. (U.S.A.) 88:1943-1947 (1991), the entirety of which is herein incorporated by reference). Typically, the cDNA population is normalized by subtractive hybridization. Schmid, et al., J. Neurochem. 48:307-312 (1987) the entirety of which is herein incorporated by reference; Fargnoli et al., Anal. Biochem. 187:364-373 (1990) the entirety of which is herein incorporated by reference; Travis, et al., Proc. Natl. Acad. Sci (U.S.A.) 85:1696-1700 (1988) the entirety of which is herein incorporated by reference; Kato, Eur. J. Neurosci. 2:704 (1990); and Schweinfest, et al., Genet. Anal. Tech. Appl. 7:64 (1990), the entirety of which is herein incorporated by reference). Subtraction represents another method for reducing the population of certain sequences in the cDNA library. Swaroop, et al., Nucleic Acids Res. 19:1954 (1991), the entirety of which is herein incorporated by reference).

[0008] ESTs can be sequenced by a number of methods. Two basic methods may be used for DNA sequencing, the chain termination method of Sanger et al., Proc. Natl. Acad. Sci. (U.S.A.) 74: 5463-5467 (1977), the entirety of which is herein incorporated by reference and the chemical degradation method of Maxam and Gilbert, Proc. Nat. Acad. Sci. (U.S.A.) 74: 560-564 (1977), the entirety of which is herein incorporated by reference. Automation and advances in technology such as the replacement of radioisotopes with fluorescence-based sequencing have reduced the effort required to sequence DNA (Craxton, Methods, 2: 20-26 (1991), the entirety of which is herein incorporated by reference; Ju et al., Proc. Natl. Acad. Sci. (U.S.A.) 92: 4347-4351 (1995), the entirety of which is herein incorporated by reference; Tabor and Richardson, Proc. Natl. Acad. Sci. (U.S.A.) 92: 6339-6343 (1995), the entirety of which is herein incorporated by reference). Automated sequencers are available from, for example, Pharmacia Biotech, Inc., Piscataway, N.J. (Pharmacia ALF), LI-COR, Inc., Lincoln, Neb. (LI-COR 4,000) and Millipore, Bedford, Mass. (Millipore BaseStation).

[0009] In addition, advances in capillary gel electrophoresis have also reduced the effort required to sequence DNA and such advances provide a rapid high resolution approach for sequencing DNA samples (Swerdlow and Gesteland, Nucleic Acids Res. 18:1415-1419 (1990); Smith, Nature 349:812-813 (1991); Luckey et al., Methods Enzymol. 218:154-172 (1993); Lu et al., J. Chromatog. A. 680:497-501 (1994); Carson et al., Anal. Chem. 65:3219-3226 (1993); Huang et al., Anal. Chem. 64:2149-2154 (1992); Kheterpal et al., Electrophoresis 17:1852-1859 (1996); Quesada and Zhang, Electrophoresis 17:1841-1851 (1996); Baba, Yakugaku Zasshi 117:265-281 (1997), all of which are herein incorporated by reference in their entirety).

[0010] ESTs longer than 150 bases have been found to be useful for similarity searches and mapping. (Adams, et al., Science 252:1651-1656 (1991), herein incorporated by reference.) EST sequences normally range from 150-450 bases. This is the length of sequence information that is routinely and reliably generated using single run sequence data. Typically, only single run sequence data is obtained from the cDNA library, Adams, et al., Science 252:1651-1656 (1991). Automated single run sequencing typically results in an approximately 2-3% error or base ambiguity rate. (Boguski, et al., Nature Genetics, 4:332-333 (1993), the entirety of which is herein incorporated by reference).

[0011] EST databases have been constructed or partially constructed from, for example, C. elegans (McCombrie, et al., Nature Genetics 1:124-131 (1992), human liver cell line HepG2 (Okubo, et al., Nature Genetics 2:173-179 (1992)), human brain RNA (Adams, et al., Science 252:1651-1656 (1991); Adams, et al., Nature 355:632-635 (1992)), Arabidopsis, (Newman, et al., Plant Physiol. 106:1241-1255 (1994)); and rice (Kurata, et al., Nature Genetics 8:365-372 (1994).

### II. Sequence Comparisons

[0012] A characteristic feature of a protein or DNA sequence is that it can be compared with other known protein or DNA sequences. Sequence comparisons can be undertaken by determining the similarity of the test or query sequence with sequences in publicly available or propriety databases (“similarity analysis”) or by searching for certain motifs (“intrinsic sequence analysis”)(e.g. cis elements)(Coulson, Trends in Biotechnology, 12: 76-80 (1994), the entirety of which is herein incorporated by reference; Birren, et al., Genome Analysis, 1: 543-559 (1997), the entirety of which is herein incorporated by reference).

[0013] Similarity analysis includes database search and alignment. Examples of public databases include the DNA Database of Japan (DDBJ)(http://www.ddbj.nig.acjp/); Genebank (http://www.ncbi.nlm.nih.gov/web/Genbank/Index.htlm): and the European Molecular Biology Laboratory Nucleic Acid Sequence Database (EMBL) (http://www.ebi.ac.uk/ebi_docs/embl_db.html). A number of different search algorithms have been developed, one example of which are the suite of programs referred to as BLAST programs. There are five implementations of BLAST, three designed for nucleotide sequences queries (BLASTN, BLASTX, and TBLASTX) and two designed for protein sequence queries (BLASTP and TBLASTN) (Coulson, Trends in Biotechnology, 12: 76-80 (1994); Birren, et al., Genome Analysis, 1: 543-559 (1997)).

[0014] BLASTN takes a nucleotide sequence (the query sequence) and its reverse complement and searches them against a nucleotide sequence database. BLASTN was designed for speed, not maximum sensitivity, and may not find distantly related coding sequences. BLASTX takes a nucleotide sequence, translates it in three forward reading frames and three reverse complement reading frames, and then compares the six translations against a protein sequence database. BLASTX is useful for sensitive analysis of preliminary (single-pass) sequence data and is tolerant of sequencing errors (Gish and States, Nature Genetics, 3: 266-272 (1993), the entirety of which is herein incorporated by reference). BLASTN and BLASTX may be used in concert for analyzing EST data (Coulson, Trends in Biotechnology, 12: 76-80 (1994); Birren, et al., Genome Analysis, 1: 543-559 (1997).

[0015] Given a coding nucleotide sequence and the protein it encodes, it is often preferable to use the protein as the query sequence to search a database because of the greatly increased sensitivity to detect more subtle relationships. This is due to the larger alphabet of proteins (20 amino acids) compared with the alphabet of nucleic acid sequences (4 bases), where it is far easier to obtain a match by chance. In addition, with nucleotide alignments, only a match (positive score) or a mismatch (negative score) is obtained, but with proteins, the presence of conservative amino acid substitutions can be taken into account. Here, a mismatch may yield a positive score if the non-identical residue has physical/chemical properties similar to the one it replaced. Various scoring matrices are used to supply the substitution scores of all possible amino acid pairs. A general purpose scoring system is the BLOSUM62 matrix (Henikoff and Henikoff, Proteins, 17: 49-61 (1993), the entirety of which is herein incorporated by reference), which is currently the default choice for BLAST programs. BLOSUM62 is tailored for alignments of moderately diverged sequences and thus may not yield the best results under all conditions. Altschul, J. Mol. Biol. 36: 290-300 (1993), the entirety of which is herein incorporated by reference, uses a combination of three matrices to cover all contingencies. This may improve sensitivity, but at the expense of slower searches. In practice, a single BLOSUM62 matrix is often used but others (PAM40 and PAM250) may be attempted when additional analysis is necessary. Low PAM matrices are directed at detecting very strong but localized sequence similarities, whereas high PAM matrices are directed at detecting long but weak alignments between very distantly related sequences.

[0016] Homologues in other organisms are available that can be used for comparative sequence analysis. Multiple alignments are performed to study similarities and differences in a group of related sequences. CLUSTAL W is a multiple sequence alignment package available that performs progressive multiple sequence alignments based on the method of Feng and Doolittle, J. Mol. Evol. 25: 351-360 (1987), the entirety of which is herein incorporated by reference. Each pair of sequences is aligned and the distance between each pair is calculated; from this distance matrix, a guide tree is calculated, and all of the sequences are progressively aligned based on this tree. A feature of the program is its sensitivity to the effect of gaps on the alignment; gap penalties are varied to encourage the insertion of gaps in probable loop regions instead of in the middle of structured regions. Users can specify gap penalties, choose between a number of scoring matrices, or supply their own scoring matrix for both the pairwise alignments and the multiple alignments. CLUSTAL W for UNIX and VMS systems is available at: ftp.ebi.ac.uk. Another program is MACAW (Schuler et al., Proteins, Struct. Func. Genet, 9:180-190 (1991), the entirety of which is herein incorporated by reference, for which both Macintosh and Microsoft Windows versions are available. MACAW uses a graphical interface, provides a choice of several alignment algorithms, and is available by anonymous ftp at: ncbi.nlm.nih.gov (directory/pub/macaw).

[0017] Sequence motifs are derived from multiple alignments and can be used to examine individual sequences or an entire database for subtle patterns. With motifs, it is sometimes possible to detect distant relationships that may not be demonstrable based on comparisons of primary sequences alone. Currently, the largest collection of sequence motifs in the world is PROSIE (Bairoch and Bucher, Nucleic Acid Research, 22: 3583-3589 (1994), the entirety of which is herein incorporated by reference.) PROSITE may be accessed via either the ExPASy server on the World Wide Web or anonymous ftp site. Many commercial sequence analysis packages also provide search programs that use PROSITE data.

[0018] A resource for searching protein motifs is the BLOCKS E-mail server developed by S. Henikoff, Trends Biochem Sci., 18:2.67-268 (1993), the entirety of which is herein incorporated by reference; Henikoff and Henikoff, Nucleic Acid Research, 19:6565-6572 (1991), the entirety of which is herein incorporated by reference; Henikoff and Henikoff, Proteins, 17: 49-61 (1993). BLOCKS searches a protein or nucleotide sequence against a database of protein motifs or “blocks.” Blocks are defined as short, ungapped multiple alignments that represent highly conserved protein patterns. The blocks themselves are derived from entries in PROSITE as well as other sources. Either a protein or nucleotide query can be submitted to the BLOCKS server; if a nucleotide sequence is submitted, the sequence is translated in all six reading frames and motifs are sought in these conceptual translations. Once the search is completed, the server will return a ranked list of significant matches, along with an alignment of the query sequence to the matched BLOCKS entries.

[0019] Conserved protein domains can be represented by two-dimensional matrices, which measure either the frequency or probability of the occurrences of each amino acid residue and deletions or insertions in each position of the domain. This type of model, when used to search against protein databases, is sensitive and usually yields more accurate results than simple motif searches. Two popular implementations of this approach are profile searches (such as GCG program ProfileSearch) and Hidden Markov Models (HMMs)(Krough et al., J. Mol. Biol. 235:1501-1531 (1994); Eddy, Current Opinion in Structural Biology 6:361-365 (1996), both of which are herein incorporated by reference in their entirety). In both cases, a large number of common protein domains have been converted into profiles, as present in the PROSITE library, or HHM models, as in the Pfam protein domain library (Sonnhammer et al., Proteins 28:405-420 (1997), the entirety of which is herein incorporated by reference). Pfam contains more than 500 HMM models for enzymes, transcription factors, signal transduction molecules, and structural proteins. Protein databases can be queried with these profiles or HMM models, which will identify proteins containing the domain of interest. For example, HMMSW or HMMFS, two programs in a public domain package called HMMER (Sonnhammer et al., Proteins 28:405-420 (1997)) can be used.

[0020] PROSITE and BLOCKS represent collected families of protein motifs. Thus, searching these databases entails submitting a single sequence to determine whether or not that sequence is similar to the members of an established family. Programs working in the opposite direction compare a collection of sequences with individual entries in the protein databases. An example of such a program is the Motif Search Tool, or MoST (Tatusov et al. Proc. Natl. Acad. Sci. 91: 12091-12095 (1994), the entirety of which is herein incorporated by reference.) On the basis of an aligned set of input sequences, a weight matrix is calculated by using one of four methods (selected by the user); a weight matrix is simply a representation, position by position in an alignment, of how likely a particular amino acid will appear. The calculated weight matrix is then used to search the databases. To increase sensitivity, newly found sequences are added to the original data set, the weight matrix is recalculated, and the search is performed again. This procedure continues until no new sequences are found.

### SUMMARY OF THE INVENTION

[0021] The present invention provides a substantially purified nucleic acid molecule that encodes a maize protein or fragment thereof comprising a nucleic acid sequence selected from the group consisting of SEQ ID NO: 1 through SEQ ID NO: 32236.

[0022] The present invention also provides one or more substantially purified nucleic acid molecules comprising a nucleic acid sequence selected from the group consisting of SEQ ID NO: 1 through SEQ ID NO:32236 or complements thereof.

[0023] The present invention also provides a substantially purified maize protein or fragment thereof, wherein said maize protein is encoded by a nucleic acid molecule that comprises a nucleic acid sequence selected from the group consisting of SEQ ID NO: 1 through SEQ ID NO: 32236.

[0024] The present invention further provides a substantially purified protein, peptide, or fragment thereof encoded by a nucleic acid sequence which specifically hybridizes to a nucleic acid molecule comprising a nucleic acid sequence selected from the group consisting of a complement of SEQ ID NO: 1 through SEQ ID NO:32236.

[0025] The present invention further provides a substantially purified antibody capable of specifically binding to a protein or fragment thereof encoded by a nucleic acid sequence which specifically hybridizes to a nucleic acid molecule having a nucleic acid sequence selected from the group consisting of a complement of SEQ ID NO:1 through SEQ ID NO:32236.

[0026] The present invention also provides a transformed plant transformed to contain a nucleic acid molecule which comprises: (A) an exogenous promoter region which functions in plant cells to cause the production of an mRNA molecule; which is linked to (B) a structural nucleic acid molecule, wherein said structural nucleic acid molecule comprises a nucleic acid molecule that encodes a protein, peptide, or fragment thereof which hybridizes to a nucleic acid sequence selected from the group consisting of a complement of SEQ ID NO:1 through SEQ ID NO:32236 expressed in an effective amount to produce a desirable agronomic effect; which is linked to (C) a 3′ non-translated sequence that functions in plant cells to cause the termination of transcription and the addition of polyadenylated ribonucleotides to the 3′ end of the mRNA sequence.

[0027] The present invention also provides a transformed plant cell containing a nucleic acid molecule whose non-transcribed strand encodes a protein or fragment thereof, wherein the transcribed strand of said nucleic acid is complementary to a nucleic acid molecule that encodes a protein or fragment thereof. The present invention also provides bacterial, viral, microbial, and plant cells comprising a nucleic acid molecule of the present invention The present invention also provides a method of producing a plant containing one or more proteins encoded by sequences comprising SEQ ID NO:1 or complement thereof through SEQ ID NO:32236 or complements thereof, expressed in a sufficient amount and/or fashion to produce a desirable agronomic effect.

[0028] In accomplishing the foregoing, there is provided, in accordance with one aspect of the present invention, methods of producing genetically transformed plants, comprising the steps of:
[0029] (a) inserting into the genome of a plant cell a recombinant, double-stranded DNA molecule comprising
   [0030] (I) a promoter which functions in plant cells to cause the production of an RNA sequence,
   [0031] (ii) a structural DNA sequence that causes the production of an RNA sequence which encodes a desired protein.
   [0032] (iii) a 3′ non-translated DNA sequence which functions in plant cells to cause the addition of polyadenylated nucleotides to the 3′ end of RNA sequence; where the promoter is homologous or heterologous with respect to the coding sequence and adapted to cause sufficient expression of a protein in desired plant tissues to enhance the agronomic utility of a plant transformed with said gene.
[0033] (b) obtaining a transformed plant cell with said nucleic acid molecule that encodes one or more proteins, wherein said nucleic acid molecule is transcribed and results in expression of said protein(s); and
[0034] (c) regenerating from the transformed plant cell a genetically transformed plant

[0035] The present invention also encompasses differentiated plants, seeds, and progeny comprising said transformed plant cells and which exhibit novel properties of agronomic significance.

[0036] The present invention also provides a method of producing a plant containing reduced levels of a protein comprising: (A) transforming a plant cell with a nucleic acid molecule that encodes a protein, wherein said nucleic acid molecule is transcribed and results in co-suppression of endogenous protein synthesis activity, and (B) regenerating plants and producing subsequent progeny from the transformed plant.

[0037] The present invention also provides a method of determining an association between a polymorphism and a plant trait comprising: (A) hybridizing a nucleic acid molecule specific for a polymorphism to genetic material of a plant, wherein said nucleic acid molecule comprising a nucleic acid sequence selected from the group consisting of SEQ ID NO: 1 through SEQ ID NO:32236 or complements thereof; and (B) calculating the degree of association between the polymorphism and the plant trait.

[0038] The present invention also provides a method of isolating a genetic region, or nucleic acid that encodes a protein or fragment thereof comprising: (A) incubating under conditions permitting nucleic acid hybridization: a marker nucleic acid molecule, preferably an EST, with a complementary nucleic acid molecule obtained from a plant cell or plant tissue; (B) permitting hybridization between said marker nucleic acid molecule, preferably an EST, and said complementary nucleic acid molecule obtained from said plant cell or plant tissue; and (C) isolating said complementary nucleic acid molecule.

[0039] The present invention also provides a method for determining a level or pattern in a plant cell of a protein in a plant comprising: (A) incubating, under conditions permitting nucleic acid hybridization, a marker nucleic acid molecule, the marker nucleic acid molecule selected from the group of marker nucleic acid molecules which specifically hybridize to a nucleic acid molecule having the nucleic acid sequence selected from the group consisting of SEQ ID NO: 1 through SEQ ID NO: 32236 or complements thereof or fragments of either, with a complementary nucleic acid molecule obtained from the plant cell or plant tissue, wherein nucleic acid hybridization between the marker nucleic acid molecule and the complementary nucleic acid molecule obtained from the plant cell or plant tissue permits the detection of an mRNA for the enzyme; (B) permitting hybridization between the marker nucleic acid molecule and the complementary nucleic acid molecule obtained from the plant cell or plant tissue; and (C) detecting the level or pattern of the complementary nucleic acid, wherein the detection of the complementary nucleic acid is predictive of the level or pattern of the protein.

[0040] The present invention also provides a method for determining the level or pattern of a protein in a plant cell or plant tissue comprising: (A) incubating under conditions permitting nucleic acid hybridization: a marker nucleic acid molecule, the marker nucleic acid molecule comprising a nucleotide sequence selected from the group consisting of SEQ ID NO: 1 through SEQ ID NO:32236 or complements thereof, with a complementary nucleic acid molecule obtained from a plant cell or plant tissue, wherein nucleic acid hybridization between the marker nucleic acid molecule, and the complementary nucleic acid molecule obtained from the plant cell or plant tissue permits the detection of said protein; (B) permitting hybridization between the marker nucleic acid molecule and the complementary nucleic acid molecule obtained from the plant cell or plant tissue; and (C) detecting the level or pattern of the complementary nucleic acid, wherein the detection of said complementary nucleic acid is predictive of the level or pattern of the protein synthesis.

[0041] The present invention also provides a method for determining a level or pattern of a protein in a plant cell or plant tissue which comprises assaying the concentration of a molecule, whose concentration is dependent upon the expression of a gene, the gene having a nucleic acid sequence which specifically hybridizes to a protein marker nucleic acid molecule, the molecule being present in a plant cell or plant tissue, in comparison to the concentration of that molecule present in a plant cell or plant tissue with a known level or pattern of said protein, wherein an assayed concentration of the molecule is compared to the assayed concentration of the molecule in a plant cell or plant tissue with a known level or pattern of said protein.

[0042] The present invention also provides a method of determining a mutation in a plant whose presence is predictive of a mutation affecting a level or pattern of a protein comprising the steps: (A) incubating, under conditions permitting nucleic acid hybridization, a marker nucleic acid, the marker nucleic acid selected from the group of marker nucleic acid molecules which specifically hybridize to a nucleic acid molecule consisting of the nucleic acid sequence selected from the group consisting of SEQ ID NO: 1 through SEQ ID NO: 32236 or complements thereof or fragments of either and a complementary nucleic acid molecule obtained from the plant, wherein nucleic acid hybridization between the marker nucleic acid molecule and the complementary nucleic acid molecule obtained from the plant permits the detection of a polymorphism whose presence is predictive of a mutation affecting the level or pattern of the protein in the plant; (B) permitting hybridization between the marker nucleic acid molecule and the complementary nucleic acid molecule obtained from the plant; and (C) detecting the presence of the polymorphism, wherein the detection of the polymorphism is predictive of the mutation.

[0043] The present invention also provides a method for determining a mutation in a plant whose presence is predictive of a mutation affecting the level or pattern of protein synthesis comprising the steps: (A) incubating under conditions permitting nucleic acid hybridization: a marker nucleic acid molecule, the marker nucleic acid molecule comprising a nucleic acid molecule that is linked to gene, the gene having a nucleic acid sequence which specifically hybridizes to a sequence selected from the group consisting of SEQ ID NO: 1 through SEQ ID NO:32236 and complements thereof, and a complementary nucleic acid molecule obtained from a plant tissue or plant cell of the plant, wherein nucleic acid hybridization between the marker nucleic acid molecule and the complementary nucleic acid molecule obtained from the plant permits the detection of a polymorphism whose presence is predictive of a mutation affecting said level or pattern of a protein synthesis in the plant; (B) permitting hybridization between said marker nucleic acid molecule and said complementary nucleic acid molecule obtained from said plant; and; (C) detecting the presence of the polymorphism, wherein the detection of the polymorphism is predictive of the mutation.

[0044] The present invention also provides a method for reducing expression of a protein in a plant cell, the method comprising: growing a transformed plant cell containing a nucleic acid molecule whose non-transcribed strand encodes a protein or fragment thereof, wherein the transcribed strand of said nucleic acid is complementary to a nucleic acid molecule that encodes the protein in said plant cell, and whereby the strand that is complementary to the nucleic acid molecule that encodes the protein reduces or depresses expression of the protein.

[0045] The present invention provides maize nucleic acid molecules for use as molecular tags to isolate genetic regions (i.e. promoters and flanking sequences), isolate genes, map genes, and determine gene function. The present invention further provides maize nucleic acid molecules for use in determining if genes are members of a particular gene family.

[0046] The present invention also provides a method of obtaining full length genes using maize ESTs or complements thereof or fragments of either.

[0047] The present invention also provides a method of isolating promoters and flanking sequences using maize ESTs or complements thereof or fragments of either.

[0048] The present invention also provides maize ESTs or complements thereof or fragments of either for use in marker-assisted breeding programs.

[0049] The present invention also provides a method of identifying tissues comprising hybridizing nucleic acids from the tissue with maize ESTs or complements thereof or fragments of either.

[0050] The present invention also provides a method for production of antibodies targeted against the proteins, peptides, or fragments produced by the disclosed or complements thereof or fragments of either.

[0051] The present invention also provides a method for the transformation and regeneration of plants comprising sequences hybridizable to the disclosed ESTs or complements thereof or fragments of either.

[0052] The present invention also provides a method of modifying plant protein expression by inserting in a chimeric gene sense or antisense constructs of the maize ESTs.

### DETAILED DESCRIPTION OF THE INVENTION

### Agents

[0053] (a) Nucleic Acid Molecules

[0054] Agents of the present invention include nucleic acid molecules and more specifically EST nucleic acid molecules or nucleic acid fragment molecules thereof. Fragment EST nucleic acid molecules may encode significant portion(s) of, or indeed most of, the EST nucleic acid molecule. Alternatively, the fragments may comprise smaller oligonucleotides (having from about 15 to about 250 nucleotide residues, and more preferably, about 15 to about 30 nucleotide residues).

[0055] A subset of the nucleic acid molecules of the present invention includes nucleic acid molecules that are marker molecules. Another subset of the nucleic acid molecules of the present invention include nucleic acid molecules that encode a protein or fragment thereof. Another subset of the nucleic acid molecules of the present invention are EST molecules.

[0056] The term “substantially purified”, as used herein, refers to a molecule separated from substantially all other molecules normally associated with it in its native state. More preferably a substantially purified molecule is the predominant species present in a preparation. A substantially purified molecule may be greater than 60% free, preferably 75% free, more preferably 90% free, and most preferably 95% free from the other molecules (exclusive of solvent) present in the natural mixture. The term “substantially purified” is not intended to encompass molecules present in their native state.

[0057] The agents of the present invention will preferably be “biologically active” with respect to either a structural attribute, such as the capacity of a nucleic acid to hybridize to another nucleic acid molecule, or the ability of a protein to be bound by antibody (or to compete with another molecule for such binding). Alternatively, such an attribute may be catalytic, and thus involve the capacity of the agent to mediate a chemical reaction or response.

[0058] The agents of the present invention may also be recombinant. As used herein, the term recombinant means any agent (e.g. DNA, peptide etc.), that is, or results, however indirect, from human manipulation of a nucleic acid molecule.

[0059] It is understood that the agents of the present invention may be labeled with reagents that facilitate detection of the agent (e.g. fluorescent labels (Prober, et al., Science 238:336-340 (1987); Albarella et al., EP 144914, chemical labels (Sheldon et al., U.S. Pat. No. 4,582,789; Albarella et al., U.S. Pat. No. 4,563,417, modified bases (Miyoshi et al., EP 119448, all of which are hereby incorporated by reference in their entirety).

[0060] It is further understood, that the present invention provides bacterial, viral, microbial, and plant cells comprising the agents of the present invention.

[0061] Nucleic acid molecules or fragment thereof of the present invention are capable of specifically hybridizing to other nucleic acid molecules under certain circumstances. As used herein, two nucleic acid molecules are said to be capable of specifically hybridizing to one another if the two molecules are capable of forming an anti-parallel, double-stranded nucleic acid structure. A nucleic acid molecule is said to be the “complement” of another nucleic acid molecule if they exhibit complete complementarity. As used herein, molecules are said to exhibit “complete complementarity” when every nucleotide of one of the molecules is complementary to a nucleotide of the other. Two molecules are said to be “minimally complementary” if they can hybridize to one another with sufficient stability to permit them to remain annealed to one another under at least conventional “low-stringency” conditions. Similarly, the molecules are said to be “complementary” if they can hybridize to one another with sufficient stability to permit them to remain annealed to one another under conventional “high-stringency” conditions. Conventional stringency conditions are described by Sambrook, et al., In: Molecular Cloning, A Laboratory Manual, 2nd Edition, Cold Spring Harbor Press, Cold Spring Harbor, N.Y. (1989), and by Haymes, et al. In: Nucleic Acid Hybridization, A Practical Approach, IRL Press, Washington, D.C. (1985), the entirety of which is herein incorporated by reference. Departures from complete complementarity are therefore permissible, as long as such departures do not completely preclude the capacity of the molecules to form a double-stranded structure. Thus, in order for an nucleic acid molecule or fragment of the present invention to serve as a primer or probe it need only be sufficiently complementary in sequence to be able to form a stable double-stranded structure under the particular solvent and salt concentrations employed.

[0062] Appropriate stringency conditions which promote DNA hybridization are, for example, 6.0×sodium chloride/sodium citrate (SSC) at about 45° C., followed by a wash of 2.0×SSC at 50° C., are known to those skilled in the art or can be found in Current Protocols in Molecular Biology, John Wiley & Sons, N.Y. (1989), 6.3.1-6.3.6. For example, the salt concentration in the wash step can be selected from a low stringency of about 2.0×SSC at 50° C. to a high stringency of about 0.2×SSC at 50° C. In addition, the temperature in the wash step can be increased from low stringency conditions at room temperature, about 22° C., to high stringency conditions at about 65° C. Both temperature and salt may be varied, or either the temperature or the salt concentration may be held constant while the other variable is changed.

[0063] In a preferred embodiment, a nucleic acid of the present invention will specifically hybridize to one or more of the nucleic acid molecules set forth in SEQ ID NO: 1 through SEQ ID NO: 32236 or complements thereof under moderately stringent conditions, for example, at about 2.0×SSC and about 65° C.

[0064] In a particularly preferred embodiment, a nucleic acid of the present invention will include those nucleic acid molecules that specifically hybridize to one or more of the nucleic acid molecules set forth in SEQ ID NO:1 through SEQ ID NO: 32236 or complements thereof under high stringency conditions.

[0065] In one aspect of the present invention, the nucleic acid molecules of the present invention have one or more of the nucleic acid sequences set forth in SEQ ID NO: 1 through SEQ ID NO:32236 or complements thereof. In another aspect of the present invention, one or more of the nucleic acid molecules of the present invention share between 100% and 90% sequence identity with one or more of the nucleic acid sequences set forth in SEQ ID NO: 1 through SEQ ID NO:32236 or complements thereof. In a further aspect of the present invention, one or more of the nucleic acid molecules of the present invention share between 100% and 95% sequence identity with one or more of the nucleic acid sequences set forth in SEQ ID NO: 1 through SEQ ID NO:32236 or complements thereof. In a more preferred aspect of the present invention, one or more of the nucleic acid molecules of the present invention share between 100% and 98% sequence identity with one or more of the nucleic acid sequences set forth in SEQ ID NO: 1 through SEQ ID NO:32236 or complements thereof. In an even more preferred aspect of the present invention, one or more of the nucleic acid molecules of the present invention share between 100% and 99% sequence identity with one or more of the sequences set forth in SEQ ID NO: 1 through SEQ ID NO:32236 or complements thereof. In a further, even more preferred aspect of the present invention, one or more of the nucleic acid molecules of the present invention exhibit 100% sequence identity with one or more nucleic acid molecules present within the cDNA libraries LIB3115, LIB3116, LIB3117, LIB3118, LIB3150, LB3151, LIB3152, LIB3153, LIB3154, LIB3180, LIB3181, and LIB3182 (Monsanto Company, St. Louis, Mo., United States of America).

[0066] In a preferred embodiment of the present invention, a maize protein or fragment thereof of the present invention is a homologue of another plant protein. In another preferred embodiment of the present invention, a maize protein or fragment thereof of the present invention is a homologue of a fungal protein. In another preferred embodiment of the present invention, a maize protein or fragment thereof of the present invention is a homologue of a mammalian protein. In another preferred embodiment of the present invention, a maize protein or fragment thereof of the present invention is a homologue of an algal protein. In another preferred embodiment of the present invention, a maize protein or fragment thereof of the present invention is a homologue of a bacterial protein. In another preferred embodiment of the present invention, a maize protein or fragment thereof of the present invention is a homologue of a soybean protein.

[0067] In a preferred embodiment of the present invention, the nucleic molecule of the present invention encodes a maize protein or fragment thereof where a maize protein or fragment thereof exhibits a BLAST probability score of greater than 1E-12, preferably a BLAST probability score of between about 1E-30 and about 1E-12, even more preferably a BLAST probability score of greater than 1E-30 with its homologue.

[0068] In another preferred embodiment of the present invention, the nucleic acid molecule encoding a maize protein or fragment thereof exhibits a % identity with its homologue of between about 25% and about 40%, more preferably of between about 40% and about 70%, even more preferably of between about 70% and about 90% and even more preferably between about 90% and 99%. In another preferred embodiment, of the present invention, a maize protein or fragment thereof exhibits a % identity with its homologue of 100%.

[0069] In a preferred embodiment of the present invention, the nucleic acid molecule of the present invention encodes a maize protein or fragment thereof where the maize protein exhibits a BLAST score of greater than 120, preferably a BLAST score of between about 1450 and about 120, even more preferably a BLAST score of greater than 1450 with its homologue.

[0070] Nucleic acid molecules of the present invention also include non-maize homologues. Preferred non-maize homologues are selected from the group consisting of alfalfa, Arabidopsis, barley, Brassica, broccoli, cabbage, citrus, cotton, garlic, oat, oilseed rape, onion, canola, flax, an ornamental plant, pea, peanut, pepper, potato, rice, rye, sorghum, soybean strawberry, sugarcane, sugarbeet, tomato, wheat, poplar, pine, fir, eucalyptus, apple, lettuce, lentils, grape, banana, tea, turf grasses, sunflower, oil palm and Phaseolus.

[0071] The degeneracy of the genetic code, which allows different nucleic acid sequences to code for the same protein or peptide, is known in the literature. (U.S. Pat. No. 4,757,006, the entirety of which is herein incorporated by reference).

[0072] In an aspect of the present invention, one or more of the nucleic acid molecules of the present invention differ in nucleic acid sequence from those encoding a maize protein or fragment thereof in SEQ ID NO: 1 through SEQ ID NO: 32236 due to the degeneracy in the genetic code in that they encode the same protein but differ in nucleic acid sequence.

[0073] In another further aspect of the present invention, one or more of the nucleic acid molecules of the present invention differ in nucleic acid sequence from those encoding a maize protein or fragment thereof in SEQ ID NO: 1 through SEQ ID NO: 32236 due to fact that the different nucleic acid sequences encode a protein having one or more conservative amino acid residues. It is understood that codons capable of coding for such conservative substitutions are known in the art.

[0074] It is well known in the art that one or more amino acids in a native sequence can be substituted with another amino acid(s), the charge and polarity of which are similar to that of the native amino acid, i.e., a conservative amino acid substitution, resulting in a silent change. Conserved substitutes for an amino acid within the native polypeptide sequence can be selected from other members of the class to which the naturally occurring amino acid belongs. Amino acids can be divided into the following four groups: (1) acidic amino acids, (2) basic amino acids, (3) neutral polar amino acids, and (4) neutral nonpolar amino acids. Representative amino acids within these various groups include, but are not limited to, (1) acidic (negatively charged) amino acids such as aspartic acid and glutamic acid; (2) basic (positively charged) amino acids such as arginine, histidine, and lysine; (3) neutral polar amino acids such as glycine, serine, threonine, cysteine, cystine, tyrosine, asparagine, and glutamine; and (4) neutral nonpolar (hydrophobic) amino acids such as alanine, leucine, isoleucine, valine, proline, phenylalanine, tryptophan, and methionine.

[0075] Conservative amino acid changes within the native polypeptides sequence can be made by substituting one amino acid within one of these groups with another amino acid within the same group. Biologically functional equivalents of the proteins or fragments thereof of the present invention can have 10 or fewer conservative amino acid changes, more preferably seven or fewer conservative amino acid changes, and most preferably five or fewer conservative amino acid changes. The encoding nucleotide sequence will thus have corresponding base substitutions, permitting it to encode biologically functional equivalent forms of the proteins or fragments of the present invention.

[0076] It is understood that certain amino acids may be substituted for other amino acids in a protein structure without appreciable loss of interactive binding capacity with structures such as, for example, antigen-binding regions of antibodies or binding sites on substrate molecules. Because it is the interactive capacity and nature of a protein that defines that protein's biological functional activity, certain amino acid sequence substitutions can be made in a protein sequence and, of course, its underlying DNA coding sequence and, nevertheless, obtain a protein with like properties. It is thus contemplated by the inventors that various changes may be made in the peptide sequences of the proteins or fragments of the present invention, or corresponding DNA sequences that encode said peptides, without appreciable loss of their biological utility or activity. It is understood that codons capable of coding for such amino acid changes are known in the art.

[0077] In making such changes, the hydropathic index of amino acids may be considered. The importance of the hydropathic amino acid index in conferring interactive biological function on a protein is generally understood in the art (Kyte and Doolittle, J. Mol. Biol. 157, 105-132 (1982), herein incorporated by reference in its entirety). It is accepted that the relative hydropathic character of the amino acid contributes to the secondary structure of the resultant protein, which in turn defines the interaction of the protein with other molecules, for example, enzymes, substrates, receptors, DNA, antibodies, antigens, and the like.

[0078] Each amino acid has been assigned a hydropathic index on the basis of its hydrophobicity and charge characteristics (Kyte and Doolittle, 1982); these are isoleucine (+4.5), valine (+4.2), leucine (+3.8), phenylalanine (+2.8), cysteine/cystine (+2.5), methionine (+1.9), alanine (+1.8), glycine (−0.4), threonine (−0.7), serine (−0.8), tryptophan (−0.9), tyrosine (−1.3), proline (−1.6), histidine (−3.2), glutamate (−3.5), glutamine (−3.5), aspartate (−3.5), asparagine (−3.5), lysine (−3.9), and arginine (−4.5).

[0079] In making such changes, the substitution of amino acids whose hydropathic indices are within −2 is preferred, those which are within ±1 are particularly preferred, and those within ±0.5 are even more particularly preferred.

[0080] It is also understood in the art that the substitution of like amino acids can be made effectively on the basis of hydrophilicity. U.S. Pat. No. 4,554,101, incorporated herein by reference in its entirety, states that the greatest local average hydrophilicity of a protein, as govern by the hydrophilicity of its adjacent amino acids, correlates with a biological property of the protein.

[0081] As detailed in U.S. Pat. No. 4,554,101, the following hydrophilicity values have been assigned to amino acid residues: arginine (+3.0), lysine (+3.0), aspartate (+3.0+1), glutamate (+3.0±1), serine (+0.3), asparagine (+0.2), glutamine (+0.2), glycine (0), threonine (−0.4), proline (−0.5±1), alanine (−0.5), histidine (−0.5), cysteine (−1.0), methionine (−1.3), valine (−1.5), leucine (−1.8), isoleucine (−1.8), tyrosine (−2.3), phenylalanine (−2.5), and tryptophan (−3.4).

[0082] In making such changes, the substitution of amino acids whose hydrophilicity values are within ±2 is preferred, those which are within ±1 are particularly preferred, and those within ±0.5 are even more particularly preferred. In a further aspect of the present invention, one or more of the nucleic acid molecules of the present invention differ in nucleic acid sequence from those encoding a maize protein or fragment thereof set forth in SEQ ID NO: 1 through SEQ ID NO: 32236 or fragment thereof due to the fact that one or more codons encoding an amino acid has been substituted for a codon that encodes a nonessential substitution of the amino acid originally encoded.

[0083] One aspect of the present invention concerns markers that include nucleic acid molecules SEQ ID NO: 1 through SEQ ID NO: 32236 or complements thereof or fragments of either that can act as markers or other nucleic acid molecules of the present invention that can act as markers. Genetic markers of the present invention include “dominant” or “codominant” markers “Codominant markers” reveal the presence of two or more alleles (two per diploid individual) at a locus. “Dominant markers” reveal the presence of only a single allele per locus. The presence of the dominant marker phenotype (e.g., a band of DNA) is an indication that one allele is present in either the homozygous or heterozygous condition. The absence of the dominant marker phenotype (e.g. absence of a DNA band) is merely evidence that “some other” undefined allele is present. In the case of populations where individuals are predominantly homozygous and loci are predominately dimorphic, dominant and codominant markers can be equally valuable. As populations become more heterozygous and multi-allelic, codominant markers often become more informative of the genotype than dominant markers. Marker molecules can be, for example, capable of detecting polymorphisms such as single nucleotide polymorphisms (SNPs).

[0084] SNPs are single base changes in genomic DNA sequence. They occur at greater frequency and are spaced with a greater uniformity throughout a genome than other reported forms of polymorphism. The greater frequency and uniformity of SNPs means that there is greater probability that such a polymorphism will be found near or in a genetic locus of interest than would be the case for other polymorphisms. SNPs are located in protein-coding regions and noncoding regions of a genome. Some of these SNPs may result in defective or variant protein expression (e.g., as a results of mutations or defective splicing). Analysis (genotyping) of characterized SNPs can require only a plus/minus assay rather than a lengthy measurement, permitting easier automation.

[0085] SNPs can be characterized using any of a variety of methods. Such methods include the direct or indirect sequencing of the site, the use of restriction enzymes (Botstein et al., Am. J. Hum. Genet. 32:314-331 (1980), the entirety of which is herein incorporated reference; Konieczny and Ausubel, Plant J. 4:403-410 (1993), the entirety of which is herein incorporated by reference), enzymatic and chemical mismatch assays (Myers et al., Nature 313:495-498 (1985), the entirety of which is herein incorporated by reference), allele-specific PCR (Newton et al., Nucl. Acids Res. 17:2503-2516 (1989), the entirety of which is herein incorporated by reference; Wu et al., Proc. Natl. Acad. Sci. (U.S.A.) 86:2757-2760 (1989), the entirety of which is herein incorporated by reference), ligase chain reaction (Barany, Proc. Natl. Acad. Sci. (U.S.A.) 88:189-193 (1991), the entirety of which is herein incorporated by reference), single-strand conformation polymorphism analysis (Labrune et al., Am. J. Hum. Genet. 48: 1115-1120 (1991), the entirety of which is herein incorporated by reference), primer-directed nucleotide incorporation assays (Kuppuswami et al., Proc. Natl. Acad. Sci. USA 88:1143-1147 (1991), the entirety of which is herein incorporated by reference), dideoxy fingerprinting (Sarkar et al., Genomics 13:441-443 (1992), the entirety of which is herein incorporated by reference), solid-phase ELISA-based oligonucleotide ligation assays (Nikiforov et al., Nucl. Acids Res. 22:4167-4175 (1994), the entirety of which is herein incorporated by reference), oligonucleotide fluorescence-quenching assays (Lvak et al., PCR Methods Appl. 4:357-362 (1995), the entirety of which is herein incorporated by reference), 5′-nuclease allele-specific hybridization TaqMan assay (Livak et al., Nature Genet. 9:341-342 (1995), the entirety of which is herein incorporated by reference), template-directed dye-terminator incorporation (TDI) assay (Chen and Kwok, Nucl. Acids Res. 25:347-353 (1997), the entirety of which is herein incorporated by reference), allele-specific molecular beacon assay (Tyagi et al., Nature Biotech. 16: 49-53 (1998), the entirety of which is herein incorporated by reference), PinPoint assay (Haff and Smirnov, Genome Res. 7: 378-388 (1997), the entirety of which is herein incorporated by reference) and dCAPS analysis (Neff et al., Plant J. 14:387-392 (1998), the entirety of which is herein incorporated by reference).

[0086] Additional markers, such as AFLP markers, RFLP markers and RAPD markers, can be utilized (Walton, Seed World 22-29 (July, 1993), the entirety of which is herein incorporated by reference; Burow and Blake, Molecular Dissection of Complex Traits, 13-29, Paterson (ed.), CRC Press, New York (1988), the entirety of which is herein incorporated by reference). DNA markers can be developed from nucleic acid molecules using restriction endonucleases, the PCR and/or DNA sequence information. RFLP markers result from single base changes or insertions/deletions. These codominant markers are highly abundant in plant genomes, have a medium level of polymorphism and are developed by a combination of restriction endonuclease digestion and Southern blotting hybridization. CAPS are similarly developed from restriction nuclease digestion but only of specific PCR products. These markers are also codominant, have a medium level of polymorphism and are highly abundant in the genome. The CAPS result from single base changes and insertions/deletions.

[0087] Another marker type, RAPDs, are developed from DNA amplification with random primers and result from single base changes and insertions/deletions in plant genomes. They are dominant markers with a medium level of polymorphisms and are highly abundant. AFLP markers require using the PCR on a subset of restriction fragments from extended adapter primers. These markers are both dominant and codominant are highly abundant in genomes and exhibit a medium level of polymorphism.

[0088] SSRs require DNA sequence information. These codominant markers result from repeat length changes, are highly polymorphic and do not exhibit as high a degree of abundance in the genome as CAPS, AFLPs and RAPDs, SNPs also require DNA sequence information. These codominant markers result from single base substitutions. They are highly abundant and exhibit a medium of polymorphism (Rafalski et al., In: Nonmammalian Genomic Analysis, Birren and Lai (ed.), Academic Press, San Diego, Calif., pp. 75-134 (1996), the entirety of which is herein incorporated by reference). It is understood that a nucleic acid molecule of the present invention may be used as a marker.

[0089] A PCR probe is a nucleic acid molecule capable of initiating a polymerase activity while in a double-stranded structure with another nucleic acid. Various methods for determining the structure of PCR probes and PCR techniques exist in the art. Computer generated searches using programs such as Primer3 (www-genome.wi.mit.edu/cgi-bin/primer/primer3.cgi), STSPipeline (www-genome.wi.mit.edu/cgi-bin/www-STS Pipeline), or GeneUp (Pesole et al., BioTechniques 25:112-123 (1998) the entirety of which is herein incorporated by reference), for example, can be used to identify potential PCR primers.

[0090] It is understood that a fragment of one or more of the nucleic acid molecules of the present invention may be a probe and specifically a PCR probe.

[0091] (b) Protein and Peptide Molecules

[0092] A class of agents comprises one or more of the protein or peptide molecules encoded by SEQ ID NO: 1 through SEQ ID NO:32236 or one or more of the protein or fragment thereof or peptide molecules encoded by other nucleic acid agents of the present invention. As used herein, the term “protein molecule” or “peptide molecule” includes any molecule that comprises five or more amino acids. It is well know in the art that proteins may undergo modification, including post-translational modifications, such as, but not limited to, disulfide bond formation, glycosylation, phosphorylation, or oligomerization. Thus, as used herein, the term “protein molecule” or “peptide molecule” includes any protein molecule that is modified by any biological or non-biological process. The terms “amino acid” and “amino acids” refer to all naturally occurring L-amino acids. This definition is meant to include norleucine, ornithine, homocysteine, and homoserine.

[0093] One or more of the protein or fragment of peptide molecules may be produced via chemical synthesis, or more preferably, by expression in a suitable bacterial or eukaryotic host. Suitable methods for expression are described by Sambrook, et al., (In: Molecular Cloning, A Laboratory Manual, 2nd Edition, Cold Spring Harbor Press, Cold Spring Harbor, N.Y. (1989)), or similar texts.

[0094] A “protein fragment” is a peptide or polypeptide molecule whose amino acid sequence comprises a subset of the amino acid sequence of that protein. A protein or fragment thereof that comprises one or more additional peptide regions not derived from that protein is a “fusion” protein. Such molecules may be derivatized to contain carbohydrate or other moieties (such as keyhole limpet hemocyanin, etc.). Fusion protein or peptide molecule of the present invention are preferably produced via recombinant means.

[0095] Another class of agents comprise protein or peptide molecules encoded by SEQ ID NO: 1 through SEQ ID NO:32236 or complements thereof or, fragments or fusions thereof in which non-essential, or not relevant, amino acid residues have been added, replaced, or deleted. An example of such a homologue is the homologue protein of all non-maize plant species, including but not limited to alfalfa, Arabidopsis, barley, Brassica, broccoli, cabbage, citrus, cotton, garlic, oat, oilseed rape, onion, canola, flax, an ornamental plant, pea, peanut, pepper, potato, rice, rye, sorghum, soybean, strawberry, sugarcane, sugarbeet, tomato, wheat, poplar, pine, fir, eucalyptus, apple, lettuce, peas, lentils, grape, banana, tea, turf grasses, etc. Particularly preferred non-maize plants to utilize for the isolation of homologues would include alfalfa, Arabidopsis, barley, cotton, oat, oilseed rape, rice, canola, ornamentals, soybean, sugarcane, sugarbeet, tomato, potato, wheat, and turf grasses. Such a homologue can be obtained by any of a variety of methods. Most preferably, as indicated above, one or more of the disclosed sequences (SEQ ID NO: 1 through SEQ ID NO:32236 or complements thereof) will be used to define a pair of primers that may be used to isolate the homologue-encoding nucleic acid molecules from any desired species. Such molecules can be expressed to yield homologues by recombinant means.

[0096] (c) Antibodies

[0097] One aspect of the present invention concerns antibodies, single-chain antigen binding molecules, or other proteins that specifically bind to one or more of the protein or peptide molecules of the present invention and their homologues, fusions or fragments. Such antibodies may be used to quantitatively or qualitatively detect the protein or peptide molecules of the present invention. As used herein, an antibody or peptide is said to “specifically bind” to a protein or peptide molecule of the present invention if such binding is not competitively inhibited by the presence of non-related molecules.

[0098] Nucleic acid molecules that encode all or part of the protein of the present invention can be expressed, via recombinant means, to yield protein or peptides that can in turn be used to elicit antibodies that are capable of binding the expressed protein or peptide. Such antibodies may be used in immunoassays for that protein. Such protein-encoding molecules, or their fragments may be a “fusion” molecule (ie., a part of a larger nucleic acid molecule) such that, upon expression, a fusion protein is produced. It is understood that any of the nucleic acid molecules of the present invention may be expressed, via recombinant means, to yield proteins or peptides encoded by these nucleic acid molecules.

[0099] The antibodies that specifically bind proteins and protein fragments of the present invention may be polyclonal or monoclonal, and may comprise intact immunoglobulins, or antigen binding portions of immunoglobulins (such as (F(ab′), F(ab′)₂) fragments, or single-chain immunoglobulins producible, for example, via recombinant means). It is understood that practitioners are familiar with the standard resource materials which describe specific conditions and procedures for the construction, manipulation and isolation of antibodies (see, for example, Harlow and Lane, In Antibodies: A Laboratory Manual, Cold Spring Harbor Press, Cold Spring Harbor, New York (1988), the entirety of which is herein incorporated by reference).

[0100] Murine monoclonal antibodies are particularly preferred. BALB/c mice are preferred for this purpose, however, equivalent strains may also be used. The animals are preferably immunized with approximately 25 μg of purified protein (or fragment thereof) that has been emulsified a suitable adjuvant (such as TiterMax adjuvant (Vaxcel, Norcross, Ga.)). Immunization is preferably conducted at two intramuscular sites, one intraperitoneal site, and one subcutaneous site at the base of the tail. An additional i.v. injection of approximately 25 μg of antigen is preferably given in normal saline three weeks later. After approximately 11 days following the second injection, the mice may be bled and the blood screened for the presence of anti-protein or peptide antibodies. Preferably, a direct binding Enzyme-Linked Immunoassay (ELSA) is employed for this purpose.

[0101] More preferably, the mouse having the highest antibody titer is given a third i.v. injection of approximately 25 μg of the same protein or fragment. The splenic leukocytes from this animal may be recovered 3 days later, and are then permitted to fuse, most preferably, using polyethylene glycol, with cells of a suitable myeloma cell line (such as, for example, the P3X63Ag8.653 myeloma cell line). Hybridoma cells are selected by culturing the cells under “HAT” (hypoxanthine-aminopterin-thymine) selection for about one week. The resulting clones may then be screened for their capacity to produce monoclonal antibodies (“mAbs), preferably by direct ELISA.

[0102] In one embodiment, anti-protein or peptide monoclonal antibodies are isolated using a fusion of a protein, protein fragment, or peptide of the present invention, or conjugate of a protein, protein fragment, or peptide of the present invention, as immunogens. Thus, for example, a group of mice can be immunized using a fusion protein emulsified in Freund's complete adjuvant (e.g. approximately 50 μg of antigen per immunization). At three week intervals, an identical amount of antigen is emulsified in Freund's incomplete adjuvant and used to immunize the animals. Ten days following the third immunization, serum samples are taken and evaluated for the presence of antibody. If antibody titers are too low, a fourth booster can be employed. Polysera capable of binding the protein or peptide can also be obtained using this method.

[0103] In a preferred procedure for obtaining monoclonal antibodies, the spleens of the above-described immunized mice are removed, disrupted, and immune splenocytes are isolated over a ficoll gradient. The isolated splenocytes are fused, using polyethylene glycol with BALB/c-derived HGPRT (hypoxanthine guanine phosphoribosyl transferase) deficient P3x63xAg8.653 plasmacytoma cells. The fused cells are plated into 96-well microtiter plates and screened for hybridoma fusion cells by their capacity to grow in culture medium supplemented with hypothanthine, aminopterin and thymidine for approximately 2-3 weeks.

[0104] Hybridoma cells that arise from such incubation are preferably screened for their capacity to produce an immunoglobulin that binds to a protein of interest. An indirect ELISA may be used for this purpose. In brief, the supernatants of hybridomas are incubated in microtiter wells that contain immobilized protein. After washing, the titer of bound immunoglobulin can be determined using, for example, a goat anti-mouse antibody conjugated to horseradish peroxidase. After additional washing, the amount of immobilized enzyme is determined (for example through the use of a chromogenic substrate). Such screening is performed as quickly as possible after the identification of the hybridoma in order to ensure that a desired clone is not overgrown by non-secreting neighbors. Desirably, the fusion plates are screened several times since the rates of hybridoma growth vary. In a preferred sub-embodiment, a different antigenic form of immunogen may be used to screen the hybridoma. Thus, for example, the splenocytes may be immunized with one immunogen, but the resulting hybridomas can be screened using a different immunogen. It is understood that any of the protein or peptide molecules of the present invention may be used to raise antibodies.

[0105] As discussed below, such antibody molecules or their fragments may be used for diagnostic purposes. Where the antibodies are intended for diagnostic purposes, it may be desirable to derivatize them, for example with a ligand group (such as biotin) or a detectable marker group (such as a fluorescent group, a radioisotope or an enzyme).

[0106] The ability to produce antibodies that bind the protein or peptide molecules of the present invention permits the identification of mimetic compounds of those molecules. A “mimetic compound” is a compound that is not that compound, or a fragment of that compound, but which nonetheless exhibits an ability to specifically bind to antibodies directed against that compound.

[0107] It is understood that any of the agents of the present invention can be substantially purified and/or be biologically active and/or recombinant.

[0108] Uses of the Agents of the Invention

[0109] The nucleic acid molecules and fragments thereof of the present invention from the normalized cDNA libraries LIB3115 and LIB3116 are isolated from maize (RX601, Asgrow Seed Company, Des Moines, Iowa U.S.A.) pooled leaf tissue harvested from field grown plants at Asgrow research stations. Leaves are the carbohydrate factories of crop plants, therefore, the ESTs of the present invention will find great use in the isolation of a variety of agronomically significant genes, including but not limited to genes that are necessary for the interception and transformation of light energy via photosynthesis linked with plant growth, quality and yield. Genes isolated using the disclosed ESTs would also be involved in pathways, including but not limited to, of light and dark respiration, of CO₂ assimilation, and of nitrogen metabolism linked to fruiting and mobilization and distribution of nitrogen. The ESTs of the present invention also can enable the acquisition of molecular markers, which can be used in, including but not limited to, breeding schemes, genetic and molecular mapping, and cloning of agronomically significant genes.

[0110] The nucleic acid molecules and fragments thereof of the present invention from the normalized cDNA libraries LIB3117 and LIB3118 are isolated from maize (RX601, Asgrow Seed Company, Des Moines, Iowa U.S.A ) pooled kernels from plants at 15 to 20 days after pollination. Ubraries from this tissue can enable the acquisition of a variety of agronomically significant genes expressed at this kernel development stage. The ESTs of the present invention can enable the acquisition of, but are not limited to genes that regulate protein, early kernel development, cell division, amyloplast biogenesis, starch biosynthesis, sucrose biosynthesis, carbon transport, oils, amino acids, sterols, minerals, isoflavones, saponins, vitamins, tocopherols, antinutrient components, carbohydrates, kernel cytokinin metabolism and seed regulatory elements. Such genes are associated with plant growth, quality and yield, and could also serve as links in important developmental, metabolic, and catabolic pathways. The ESTs of the present invention also can enable the acquisition of kernel specific promoters and cis-regulatory elements which will be useful to express agronomically significant genes in these tissues and/or other tissues. The ESTs of the present invention also can enable the acquisition of molecular markers, which can be used in, including but not limited to, breeding schemes, genetic and molecular mapping, and cloning of agronomically significant genes.

[0111] The nucleic acid molecules and fragments thereof of the present invention from the cDNA libraries LIB3150, LIB33151, LIB3152, LIB3153, LIB3154, LIB3180, LIB3181, LIB3182 are isolated from Zea mays endosperm tissue. Libraries from this tissue can enable the acquisition of a variety of agronomically significant genes involved in endosperm carbohydrate metabolism and highly expressed during early-maize endosperm development. The ESTs of the present invention can enable the acquisition of, including but not limited to genes that regulate protein, oils, amino acids, sterols, minerals, isoflavones, saponins, vitamins, tocopherols, antinutrient components, carbohydrates, starch metabolism and seed regulatory elements. Such genes are associated with plant growth, quality and yield, and could also serve as links in important developmental, metabolic, and catabolic pathways. The ESTs of the present invention also can enable the acquisition of endosperm-specific promoters and cis-regulatory elements which will be useful to express agronomically significant genes in these tissues and/or other tissues. The ESTs of the present invention also can enable the acquisition of molecular markers, which can be used in, including but not limited to, breeding schemes, genetic and molecular mapping, and cloning of agronomically significant genes.

[0112] Nucleic acid molecules and fragments thereof of the present invention may be employed to obtain other nucleic acid molecules. Such molecules include the nucleic acid molecules of other plants or other organisms (e.g., alfalfa, rice, potato, cotton, oat, rye, barley, maize, wheat, Arabidopsis, Brassica, etc.) including the nucleic acid molecules that encode, in whole or in part, protein homologues of other plant species or other organisms, and sequences of genetic elements such as promoters and transcriptional regulatory elements. Such molecules can be readily obtained by using the above-described nucleic acid molecules or fragments thereof to screen cDNA or genomic libraries obtained from such plant species. Methods for forming such libraries are well known in the art. Such homologue molecules may differ in their nucleotide sequences from those found in one or more of SEQ ID NO:1 through SEQ ID NO:32236 or complements thereof because complete complementarity is not needed for stable hybridization. The nucleic acid molecules of the present invention therefore also include molecules that, although capable of specifically hybridizing with the nucleic acid molecules may lack “complete complementarity.”

[0113] Any of a variety of methods may be used to obtain one or more of the above-described nucleic acid molecules (Zamechik et al., Proc. Natl. Acad Sci. (U.S.A.) 83:4143-4146 (1986), the entirety of which is herein incorporated by reference; Goodchild et al., Proc. Natl. Acad. Sci. (U.S.A.) 85:5507-5511 (1988), the entirety of which is herein incorporated by reference; Wickstrom et al., Proc. Natl. Acad Sci. (U.S.A.) 85:1028-1032 (1988), the entirety of which is herein incorporated by reference; Holt, et al., Molec. Cell. Biol. 8:963-973 (1988), the entirety of which is herein incorporated by reference; Gerwirtz, et al., Science 242:1303-1306 (1988), the entirety of which is herein incorporated by reference; Anfossi, et al., Proc. Natl. Acad. Sci. (U.S.A.) 86:3379-3383 (1989), the entirety of which is herein incorporated by reference; Becker, et al., EMBO J. 8:3685-3691 (1989); the entirety of which is herein incorporated by reference). Automated nucleic acid synthesizers may be employed for this purpose. In lieu of such synthesis, the disclosed nucleic acid molecules may be used to define a pair of primers that can be used with the polymerase chain reaction (Mullis, et al., Cold Spring Harbor Symp. Quant. Biol. 51:263-273 (1986); Erlich et al., EP 50,424; EP 84,796, EP 258,017, EP 237,362; Mullis, EP 201,184; Mullis et al., U.S. Pat. No. 4,683,202; Erlich, U.S. Pat. No. 4,582,788; and Saiki, R. et al., U.S. Pat. No. 4,683,194, all of which are hereby incorporated by reference in their entirety) to amplify and obtain any desired nucleic acid molecule or fragment.

[0114] Promoter sequence(s) and other genetic elements including but not limited to transcriptional regulatory elements associated with one or more of the disclosed nucleic acid sequences can also be obtained using the disclosed nucleic acid sequences provided herein.

[0115] In one embodiment, such sequences are obtained by incubating EST nucleic acid molecules or preferably fragments thereof with members of genomic libraries (e.g. maize and soybean) and recovering clones that hybridize to the EST nucleic acid molecule or fragment thereof. In a second embodiment, methods of “chromosome walking,” or inverse PCR may be used to obtain such sequences (Frohman, et al., Proc. Natl. Acad. Sci. (U.S.A.) 85:8998-9002 (1988); Ohara, et al., Proc. Natl. Acad. Sci. (U.S.A.) 86: 5673-5677 (1989); Pang et al., Biotechniques, 22(6); 1046-1048 (1977); Huang et al., Methods Mol. Biol. 69: 89-96 (1977); Hartl et al., Methods Mol. Biol. 58: 293-301 (1996), all of which are hereby incorporated by reference in their entirety). In one embodiment, the disclosed nucleic acid molecules are used to identify cDNAs whose analogous genes contain promoters with desirable expression patterns. The nucleic acid molecules isolated from the library of the present invention are used to isolate promoters of tissue-enhanced, tissue-specific, developmentally- or environmentally-regulated expression profiles. Isolation and functional analysis of the 5′ flanking promoter sequences of these genes from genomic libraries, for example, using genomic screening methods and PCR techniques would result in the isolation of useful promoters and transcriptional regulatory elements. These methods are known to those of skill in the art and have been described (See for example Birren et al., Genome Analysis:Analyzing DNA, 1, (1997), Cold Spring Harbor Laboratory Press, Cold Spring Harbor, N.Y., the entirety of which is herein incorporated by reference).

[0116] Promoters obtained utilizing the nucleic acid molecules of the present invention could also be modified to affect their control characteristics. Examples of such modifications would include but are not limited to enhancer sequences as reported by Kay et al., Science 236:1299 (1987), herein incorporated by reference in its entirety. Such genetic elements could be used to enhance gene expression of new and existing traits for crop improvements.

[0117] The nucleic acid molecules of the present invention may be used to isolate promoters of tissue enhanced tissue specific, cell-specific, cell -type, developmentally or environmentally regulated expression profiles. Isolation and functional analysis of the 5′ flanking promoter sequences of these genes from genomic libraries, for example, using genomic screening methods and PCR techniques would result in the isolation of useful promoters and transcriptional regulatory elements. These methods are known to those of skill in the art and have been described (See, for example, Birren et. al., Genome Analysis: Analyzing DNA, 1, Cold Spring Harbor Laboratory Press, Cold Spring Harbor, N.Y. (1997), the entirety of which is herein incorporated by reference). Promoters obtained utilizing the nucleic acid molecules of the present invention could also be modified to affect their control characteristics. Examples of such modifications would include but are not limited to enhancer sequences as reported by Kay, et al Science 236:1299 (1987), herein incorporated reference in its entirety. Such genetic elements could be used to enhance gene expression of new and existing traits for crop improvements.

[0118] In an aspect of the present invention, one or more of the nucleic molecules of the present invention are used to determine whether a plant (preferably maize) has a mutation affecting the level (i.e., the concentration of mRNA in a sample, etc.) or pattern (i.e., the kinetics of expression, rate of decomposition, stability profile, etc.) of the expression encoded in part or whole by one or more of the nucleic acid molecules of the present invention (collectively, the “Expression Response” of a cell or tissue). As used herein, the Expression Response manifested by a cell or tissue is said to be “altered” if it differs from the Expression Response of cells or tissues of plants not exhibiting the phenotype. To determine whether a Expression Response is altered, the Expression Response manifested by the cell or tissue of the plant exhibiting the phenotype is compared with that of a similar cell or tissue sample of a plant not exhibiting the phenotype. As will be appreciated, it is not necessary to re-determine the Expression Response of the cell or tissue sample of plants not exhibiting the phenotype each time such a comparison is made; rather, the Expression Response of a particular plant may be compared with previously obtained values of normal plants. As used herein, the phenotype of the organism is any of one or more characteristics of an organism (e.g. disease resistance, pest tolerance, environmental tolerance, male sterility, yield, quality improvements, etc.). A change in genotype or phenotype may be transient or permanent. Also as used herein, a tissue sample is any sample that comprises more than one cell. In a preferred aspect, a tissue sample comprises cells that share a common characteristic (e.g. derived from leaf, root, or pollen etc).

[0119] In one sub-aspect, such an analysis is conducted by determining the presence and/or identity of polymorphism(s) by one or more of the nucleic acid molecules of the present invention and more specifically, one or more of the EST nucleic acid molecules or fragments thereof which are associated with phenotype, or a predisposition to phenotype.

[0120] Any of a variety of molecules can be used to identify such polymorphism(s). In one embodiment, one or more of the EST nucleic acid molecules (or a sub-fragment thereof) may be employed as a marker nucleic acid molecule to identify such polymorphism(s). Alternatively, such polymorphisms can be detected through the use of a marker nucleic acid molecule or a marker protein that is genetically linked to (i.e., a polynucleotide that co-segregates with) such polymorphism(s).

[0121] In an alternative embodiment, such polymorphisms can be detected through the use of a marker nucleic acid molecule that is physically linked to such polymorphism(s). For this purpose, marker nucleic acid molecules comprising a nucleotide sequence of a polynucleotide located within 1 mb of the polymorphism(s), and more preferably within 100 kb of the polymorphism(s), and most preferably within 10 kb of the polymorphism(s) can be employed.

[0122] The genomes of animals and plants naturally undergo spontaneous mutation in the course of their continuing evolution (Gusella, Ann. Rev. Biochem. 55:831-854 (1986)). A “polymorphism” is a variation or difference in the sequence of the gene or its flanking regions that arises in some of the members of a species. The variant sequence and the “original” sequence co-exist in the species' population. In some instances, such co-existence is in stable or quasi-stable equilibrium.

[0123] A polymorphism is thus said to be “allelic,” in that, due to the existence of the polymorphism, some members of a species may have the original sequence (i.e., the original “allele”) whereas other members may have the variant sequence (i.e., the variant “allele”). In the simplest case, only one variant sequence may exist, and the polymorphism is thus said to be di-allelic. In other cases, the species' population may contain multiple alleles, and the polymorphism is termed tri-allelic, etc. A single gene may have multiple different unrelated polymorphisms. For example, it may have a di-allelic polymorphism at one site, and a multi-allelic polymorphism at another site.

[0124] The variation that defines the polymorphism may range from a single nucleotide variation to the insertion or deletion of extended regions within a gene. In some cases, the DNA sequence variations are in regions of the genome that are characterized by short tandem repeats (STRs) that include tandem di- or tri-nucleotide repeated motifs of nucleotides. Polymorphisms characterized by such tandem repeats are referred to as “variable number tandem repeat” (“VNTR”) polymorphisms. VNTRs have been used in identity analysis (Weber, U.S. Pat. No. 5,075,217; Armour, et al., FEBS Lett. 307:113-115 (1992); Jones, et al., Eur. J. Haematol. 39: 144-147 (1987); Horn, et al., PCT Application WO91/14003; Jeffreys, European Patent Application 370,719; Jeffreys, U.S. Pat. No. 5,699,082; Jeffreys. et al., Amer. J. Hum. Genet. 39:11-24 (1986); Jeffreys. et al., Nature 316:76-79 (1985); Gray, et al., Proc. R. Acad. Soc. Lond 243:241-253 (1991); Moore, et al., Genomics 10:654-660 (1991); Jeffreys, et al., Anim. Genet. 18:1-15 (1987); Hillel, et al., Anim. Genet. 20:145-155 (1989); Hillel, et al., Genet. 124:783-789 (1990), all of which are herein incorporated by reference in their entirety).

[0125] The detection of polymorphic sites in a sample of DNA may be facilitated through the use of nucleic acid amplification methods. Such methods specifically increase the concentration of polynucleotides that span the polymorphic site, or include that site and sequences located either distal or proximal to it. Such amplified molecules can be readily detected by gel electrophoresis or other means.

[0126] The most preferred method of achieving such amplification employs the polymerase chain reaction (“PCR”) (Mullis, et al., Cold Spring Harbor Symp. Quant. Biol. 51:263-273 (1986); Erlich, et al., European Patent Appln. 50,424; European Patent Appln. 84,796, European Patent Application 258,017, European Patent Appln. 237,362; Mullis, European Patent Appln. 201,184; Mullis, et al., U.S. Pat. No. 4,683,202; Erlich., U.S. Pat. No. 4,582,788; and Saiki, et al., U.S. Pat. No. 4,683,194, all of which are herein incorporated by reference), using primer pairs that are capable of hybridizing to the proximal sequences that define a polymorphism in its double-stranded form.

[0127] In lieu of PCR, alternative methods, such as the “Ligase Chain Reaction” (“LCR”) may be used (Barany, Proc. Natl. Acad. Sci. (U.S.A.) 88:189-193 (1991), the entirety of which is herein incorporated by reference). LCR uses two pairs of oligonucleotide probes to exponentially amplify a specific target. The sequences of each pair of oligonucleotides is selected to permit the pair to hybridize to abutting sequences of the same strand of the target. Such hybridization forms a substrate for a template-dependent ligase. As with PCR, the resulting products thus serve as a template in subsequent cycles and an exponential amplification of the desired sequence is obtained.

[0128] LCR can be performed with oligonucleotides having the proximal and distal sequences of the same strand of a polymorphic site. In one embodiment, either oligonucleotide will be designed to include the actual polymorphic site of the polymorphism. In such an embodiment, the reaction conditions are selected such that the oligonucleotides can be ligated together only if the target molecule either contains or lacks the specific nucleotide that is complementary to the polymorphic site present on the oligonucleotide. Alternatively, the oligonucleotides may be selected such that they do not include the polymorphic site (see, Segev, PCT Application WO 90/01069, the entirety of which is herein incorporated by reference).

[0129] The “Oligonucleotide Ligation Assay” (“OLA”) may alternatively be employed (Landegren, et al., Science 241:1077-1080 (1988), the entirety of which is herein incorporated by reference). The OLA protocol uses two oligonucleotides which are designed to be capable of hybridizing to abutting sequences of a single strand of a target. OLA, like LCR, is particularly suited for the detection of point mutations. Unlike LCR, however, OLA results in “linear” rather than exponential amplification of the target sequence.

[0130] Nickerson, et al. have described a nucleic acid detection assay that combines attributes of PCR and OLA (Nickerson, et al., Proc. Natl. Acad. Sci (U.S.A.) 87:8923-8927 (1990), the entirety of which is herein incorporated by reference). In this method, PCR is used to achieve the exponential amplification of target DNA, which is then detected using OLA. In addition to requiring multiple, and separate, processing steps, one problem associated with such combinations is that they inherit all of the problems associated with PCR and OLA.

[0131] Schemes based on ligation of two (or more) oligonucleotides in the presence of nucleic acid having the sequence of the resulting “di-oligonucleotide”, thereby amplifying the di-oligonucleotide, are also known (Wu, et al., Genomics 4:560 (1989), the entirety of which is herein incorporated by reference), and may be readily adapted to the purposes of the present invention.

[0132] Other known nucleic acid amplification procedures, such as allele-specific oligomers, branched DNA technology, transcription-based amplification systems, or isothermal amplification methods may also be used to amplify and analyze such polymorphisms (Malek, et al., U.S. Pat. No. 5,130,238; Davey, et al., European Patent Application 329,822; Schuster et al., U.S. Pat. No. 5,169,766; Miller, et al., PCT Application WO 89/06700; Kwoh, et al., Proc. Natl. Acad. Sci. (U.S.A.) 86:1173-1177 (1989); Gingeras, et al., PCT Application WO 88/10315; Walker, et al., Proc. Natl. Acad Sci. (U.S.A.) 89:392-396 (1992), all of which are herein incorporated by reference in their entirety).

[0133] The identification of a polymorphism can be determined in a variety of ways. By correlating the presence or absence of it in a plant with the presence or absence of a phenotype, it is possible to predict the phenotype of that plant. If a polymorphism creates or destroys a restriction endonuclease cleavage site, or if it results in the loss or insertion of DNA (e.g., a VNTR polymorphism), it will alter the size or profile of the DNA fragments that are generated by digestion with that restriction endonuclease. As such, individuals that possess a variant sequence can be distinguished from those having the original sequence by restriction fragment analysis. Polymorphisms that can be identified in this manner are termed “restriction fragment length polymorphisms” (“RFLPs”). RFLPs have been widely used in human and plant genetic analyses (Glassberg, UK Patent Application 2135774; Skolnick, et al., Cytogen. Cell Genet. 32:58-67 (1982); Botstein, et al., Ann. J. Hum. Genet. 32:314-331 (1980); Fischer, et al. (CT Application WO90/13668); Uhlen, PCT Application WO90/11369).

[0134] Polymorphisms can also be identified by Single Strand Conformation Polymorphism (SSCP) analysis. The SSCP technique is a method capable of identifying most sequence variations in a single strand of DNA, typically between 150 and 250 nucleotides in length (Elles, Methods in Molecular Medicine: Molecular Diagnosis of Genetic Diseases, Humana Press (1996), the entirety of which is herein incorporated by reference); Orita et al., Genomics 5: 874-879 (1989), the entirety of which is herein incorporated by reference). Under denaturing conditions a single strand of DNA will adopt a conformation that is uniquely dependent on its sequence conformation. This conformation usually will be different, even if only a single base is changed. Most conformations have been reported to alter the physical configuration or size sufficiently to be detectable by electrophoresis. A number of protocols have been described for SSCP including, but not limited to Lee et al., Anal. Biochem. 205: 289-293 (1992), the entirety of which is herein incorporated by reference; Suzuki et al., Anal. Biochem. 192: 82-84 (1991), the entirety of which is herein incorporated by reference; Lo et al., Nucleic Acids Research 20: 1005-1009 (1992), the entirety of which is herein incorporated by reference; Sarkar et al., Genomics 13: 441-443 (1992), the entirety of which is herein incorporated by reference). It is understood that one or more of the nucleic acids of the present invention, may be utilized as markers or probes to detect polymorphisms by SSCP analysis.

[0135] Polymorphisms may also be found using a DNA fingerprinting technique called amplified fragment length polymorphism (AFLP), which is based on the selective PCR amplification of restriction fragments from a total digest of genomic DNA to profile that DNA. Vos, et al., Nucleic Acids Res. 23:4407-4414 (1995), the entirety of which is herein incorporated by reference. This method allows for the specific co-amplification of high numbers of restriction fragments, which can be visualized by PCR without knowledge of the nucleic acid sequence.

[0136] AFLP employs basically three steps. Initially, a sample of genomic DNA is cut with restriction enzymes and oligonucleotide adapters are ligated to the restriction fragments of the DNA. The restriction fragments are then amplified using PCR by using the adapter and restriction sequence as target sites for primer annealing. The selective amplification is achieved by the use of primers that extend into the restriction fragments, amplifying only those fragments in which the primer extensions match the nucleotide flanking the restriction sites. These amplified fragments are then visualized on a denaturing polyacrylamide gel.

[0137] AFLP analysis has been performed on Salix (Beismann, et al., Mol. Ecol. 6:989-993 (1997), the entirety of which is herein incorporated by reference); Acinetobacter (Janssen, et al., Int. J. Syst. Bacteriol 47:1179-1187 (1997), the entirety of which is herein incorporated by reference), Aeromonas popoffi (Huys, et al., Int. J. Syst. Bacteriol. 47:1165-1171 (1997), the entirety of which is herein incorporated by reference), rice (McCouch, et al., Plant Mol. Biol. 35:89-99 (1997), the entirety of which is herein incorporated by reference); Nandi, et al., Mol. Gen. Genet. 255:1-8 (1997); Cho, et al., Genome 39:373-378 (1996), herein incorporated by reference), barley (Hordeum vulgare)(Simons, et al., Genomics 44:61-70 (1997), the entirety of which is herein incorporated by reference; Waugh, et al, Mol. Gen. Genet. 255:311-321 (1997), the entirety of which is herein incorporated by reference; Qi, et al., Mol. Gen Genet. 254:330-336 (1997), the entirety of which is herein incorporated by reference; Becker, et al., Mol. Gen. Genet. 249:65-73 (1995), the entirety of which is herein incorporated by reference), potato (Van der Voort, et al., Mol. Gen. Genet. 255:438-447 (1997), the entirety of which is herein incorporated by reference; Meksem, et al., Mol. Gen. Genet. 249:74-81 (1995), the entirety of which is herein incorporated by reference), Phytophthora infestans (Van der Lee, et al., Fungal Genet. Biol. 21:278-291 (1997), the entirety of which is herein incorporated by reference), Bacillus anthracis (Keim, et al., J. Bacteriol. 179:818-824 (1997)), Astragalus cremnophylax (Travis, et al., Mol. Ecol. 5:735-745 (1996), the entirety of which is herein incorporated by reference), Arabidopsis (Cnops, et al., Mol. Gen. Genet. 253:32-41 (1996), the entirety of which is herein incorporated by reference), Escherichia coli (Un, et al., Nucleic Acids Res. 24:3649-3650 (1996), the entirety of which is herein incorporated by reference), Aeromonas (Huys, et al., Int. J. Syst. Bacteriol. 46:572-580 (1996), the entirety of which is herein incorporated by reference), nematode (Folkertsma, et al., Mol. Plant Microbe Interact. 9:47-54 (1996), the entirety of which is herein incorporated by reference), tomato (Thomas, et al., Plant J. 8:785-794 (1995), the entirety of which is herein incorporated by reference), and human (Latorra, et al., PCR Methods Appl. 3:351-358 (1994)). AFLP analysis has also been used for fingerprinting mRNA (Money, et al., Nucleic Acids Res. 24:2616-2617 (1996), the entirety of which is herein incorporated by reference; Bachem, et al., Plant J. 9:745-753 (1996), the entirety of which is herein incorporated by reference). It is understood that one or more of the nucleic acids of the present invention, may be utilized as markers or probes to detect polymorphisms by AFLP analysis for fingerprinting mRNA.

[0138] Polymorphisms may also be found using random amplified polymorphic DNA (RAPD) (Williams et al., Nucl. Acids Res. 18: 6531-6535 (1990), the entirety of which is herein incorporated by reference) and cleaveable amplified polymorphic sequences (CAPS) (Lyamichev et al., Science 260: 778-783 (1993), the entirety of which is herein incorporated by reference). It is understood that one or more of the nucleic acids of the present invention, may be utilized as markers or probes to detect polymorphisms by RAPD or CAPS analysis.

[0139] Polymorphisms are useful, through linkage analysis, to define the genetic distances or physical distances between polymorphic traits. A physical map or ordered array of genomic DNA fragments in the desired region containing the gene may be used to characterize and isolate genes corresponding to desirable traits. For this purpose, yeast artificial chromosomes (YACs), bacterial artificial chromosomes (BACs), and cosmids are appropriate vectors for cloning large segments of DNA molecules. Although fewer clones are needed to make a contig for a specific genomic region by using YACs (Agyare et al., Genome Res. 7: 1-9 (1997), the entirety of which is herein incorporated by reference; James et al., Genomics 32: 425-430 (1996), the entirety of which is herein incorporated by reference), chimerism in the inserted DNA fragment can arise. Cosmids are convenient for handling smaller-size DNA molecules and may be used for transformation in developing transgenic plants. BACs also carry DNA fragments and are less prone to chimerism.

[0140] Through genetic mapping, a fine scale linkage map can be developed using DNA markers and, then, a genomic DNA library of large-sized fragments can be screened with molecular markers linked to the desired trait. Molecular markers are advantageous for agronomic traits that are otherwise difficult to tag, such as resistance to pathogens, insects and nematodes, tolerance to abiotic stress, quality parameters and quantitative traits such as high yield potential.

[0141] The essential requirements for marker-assisted selection in a plant breeding program are: (1) the marker(s) should co-segregate or be closely linked with the desired trait; (2) an efficient means of screening large populations for the molecular marker(s) should be available; and (3) the screening technique should have high reproducibility across laboratories and preferably be economical to use and be user-friendly.

[0142] The genetic linkage of marker molecules can be established by a gene mapping model such as, without limitation, the flanking marker model reported by Lander and Botstein, Genetics 121:185-199 (1989) and the interval mapping, based on maximum likelihood methods described by Lander and Botstein, Genetics 121:185-199 (1989) and implemented in the software package MAPMAKER/QTL (Lincoln and Lander, Mapping Genes Controlling Quantitative Traits Using MAPMAKER/QTL, Whitehead Institute for Biomedical Research, Mass., (1990). Additional software includes Qgene, Version 2.23 (1996), Department of Plant Breeding and Biometry, 266 Emerson Hall, Cornell University, Ithaca, N.Y., the manual of which is herein incorporated by reference in its entirety). Use of Qgene software is a particularly preferred approach.

[0143] A maximum likelihood estimate (MLE) for the presence of a marker is calculated, together with an MLE assuming no QTL effect, to avoid false positives. A log₁₀ of an odds ratio (LOD) is then calculated as: LOD=log₁₀ (MLE for the presence of a QTL/MLE given no linked QTL).

[0144] The LOD score essentially indicates how much more likely the data are to have arisen assuming the presence of a QTL than in its absence. The LOD threshold value for avoiding a false positive with a given confidence, say 95%, depends on the number of markers and the length of the genome. Graphs indicating LOD thresholds are set forth in Lander and Botstein, Genetics 121:185-199 (1989) the entirety of which is herein incorporated by reference and further described by Arús and Moreno-González, Plant Breeding, Hayward et al., (eds.) Chapman & Hall, London, pp. 314-331 (1993), the entirety of which is herein incorporated by reference.

[0145] Additional models can be used. Many modifications and alternative approaches to interval mapping have been reported, including the use of non-parametric methods (Kruglyak and Lander, Genetics 139:1421-1428 (1995), the entirety of which is herein incorporated by reference). Multiple regression methods or models can be also be used, in which the trait is regressed on a large number of markers (Jansen, Biometrics in Plant Breeding, van Oijen and Jansen (eds.), Proceedings of the Ninth Meeting of the Eucarpia Section Biometrics in Plant Breeding, The Netherlands, pp. 116-124 (1994); Weber and Wricke, Advances in Plant Breeding, Blackwell, Berlin, 16 (1994), both of which is herein incorporated by reference in their entirety). Procedures combining interval mapping with regression analysis, whereby the phenotype is regressed onto a single putative QTL at a given marker interval and at the same time onto a number of markers that serve as ‘cofactors,’ have been reported by Jansen and Stam, Genetics 136:1447-1455 (1994), the entirety of which is herein incorporated by reference and Zeng, Genetics 136:1457-1468 (1994) the entirety of which is herein incorporated by reference. Generally, the use of cofactors reduces the bias and sampling error of the estimated QTL positions (Utz and Melchinger, Biometrics in Plant Breeding, van Oijen and Jansen (eds.) Proceedings of the Ninth Meeting of the Eucarpia Section Biometrics in Plant Breeding, The Netherlands, pp. 195-204 (1994), the entirety of which is herein incorporated by reference, thereby improving the precision and efficiency of QTL mapping (Zeng, Genetics 136:1457-1468 (1994)). These models can be extended to multi-environment experiments to analyze genotype-environment interactions (Jansen et al., Theo. Appl. Genet. 91:33-37 (1995), the entirety of which is herein incorporated by reference).

[0146] Selection of an appropriate mapping population is important to map construction. The choice of an appropriate mapping population depends on the type of marker systems employed (Tanksley et al., Molecular mapping plant chromosomes. Chromosome structure and function: Impact of new concepts, Gustafson and Appels (eds.), Plenum Press, New York, pp. 157-173 (1988), the entirety of which is herein incorporated by reference). Consideration must be given to the source of parents (adapted vs. exotic) used in the mapping population. Chromosome pairing and recombination rates can be severely disturbed (suppressed) in wide crosses (adapted x exotic) and generally yield greatly reduced linkage distances. Wide crosses will usually provide segregating populations with a relatively large array of polymorphisms when compared to progeny in a narrow cross (adapted x adapted).

[0147] An F₂ population is the first generation of selfing after the hybrid seed is produced. Usually a single F₁ plant is selfed to generate a population segregating for all the genes in Mendelian (1:2:1) fashion. Maximum genetic information is obtained from a completely classified F₂ population using a codominant marker system (Mather, Measurement of Linkage in Heredity, Methuen and Co., (1938), the entirety of which is herein incorporated by reference). In the case of dominant markers, progeny tests (e.g. F₃, BCF₂) are required to identify the heterozygotes, thus making it equivalent to a completely classified F₂ population. However, this procedure is often prohibitive because of the cost and time involved in progeny testing. Progeny testing of F₂ individuals is often used in map construction where phenotypes do not consistently reflect genotype (e.g. disease resistance) or where trait expression is controlled by a QTl. Segregation data from progeny test populations (e.g. F₃ or BCF₂) can be used in map construction. Marker-assisted selection can then be applied to cross progeny based on marker-trait map associations (F₂, F₃), where linkage groups have not been completely disassociated by recombination events (i.e., maximum disequilibrium).

[0148] Recombinant inbred lines (RIL) (genetically related lines; usually >F₅, developed from continuously selfing F₂ lines towards homozygosity) can be used as a mapping population. Information obtained from dominant markers can be maximized by using REL because all loci are homozygous or nearly so. Under conditions of tight linkage (i.e., about <10% recombination), dominant and co-dominant markers evaluated in RIL populations provide more information per individual than either marker type in backcross populations (Reiter et al., Proc. Natl. Acad. Sci. (U.S.A.) 89:1477-1481 (1992), the entirety of which is herein incorporated by reference). However, as the distance between markers becomes larger (i.e., loci become more independent), the information in RIL populations decreases dramatically when compared to codominant markers.

[0149] Backcross populations (e.g., generated from a cross between a successful variety (recurrent parent) and another variety (donor parent) carrying a trait not present in the former) can be utilized as a mapping population. A series of backcrosses to the recurrent parent can be made to recover most of its desirable traits. Thus a population is created consisting of individuals nearly like the recurrent parent but each individual carries varying amounts or mosaic of genomic regions from the donor parent. Backcross populations can be useful for mapping dominant markers if all loci in the recurrent parent are homozygous and the donor and recurrent parent have contrasting polymorphic marker alleles (Reiter et al., Proc. Natl. Acad. Sci. (U.S.A.) 89:1477-1481 (1992)). Information obtained from backcross populations using either codominant or dominant markers is less than that obtained from F₂ populations because one, rather than two, recombinant gametes are sampled per plant. Backcross populations, however, are more informative (at low marker saturation) when compared to RILs as the distance between linked loci increases in RIL populations (i.e. about 15% recombination). Increased recombination can be beneficial for resolution of tight linkages, but may be undesirable in the construction of maps with low marker saturation.

[0150] Near-isogenic lines (NIL) created by many backcrosses to produce an array of individuals that are nearly identical in genetic composition except for the trait or genomic region under interrogation can be used as a mapping population. In mapping with NILs, only a portion of the polymorphic loci are expected to map to a selected region.

[0151] Bulk segregant analysis (BSA) is a method developed for the rapid identification of linkage between markers and traits of interest (Michelmore et al., Proc. Natl. Acad. Sci. (U.S.A.) 88:9828-9832 (1991), the entirety of which is herein incorporated by reference). In BSA, two bulked DNA samples are drawn from a segregating population originating from a single cross. These bulks contain individuals that are identical for a particular trait (resistant or susceptible to particular disease) or genomic region but arbitrary at unlinked regions (i.e. heterozygous). Regions unlinked to the target region will not differ between the bulked samples of many individuals in BSA.

[0152] It is understood that one or more of the nucleic acid molecules of the present invention may be used as molecular markers. It is also understood that one or more of the protein molecules of the present invention may be used as molecular markers.

[0153] In accordance with this aspect of the present invention, a sample nucleic acid is obtained from plants cells or tissues. Any source of nucleic acid may be used. Preferably, the nucleic acid is genomic DNA. The nucleic acid is subjected to restriction endonuclease digestion. For example, one or more EST nucleic acid molecule or fragment thereof can be used as a probe in accordance with the above-described polymorphic methods. The polymorphism obtained in this approach can then be cloned to identify the mutation at the coding region which alters the protein's structure or regulatory region of the gene which affects its expression level.

[0154] In one aspect of the present invention, an evaluation can be conducted to determine whether a particular mRNA molecule is present. One or more of the nucleic acid molecules of the present invention, preferably one or more of the EST nucleic acid molecules of the present invention are utilized to detect the presence or quantity of the mRNA species. Such molecules are then incubated with cell or tissue extracts of a plant under conditions sufficient to permit nucleic acid hybridization. The detection of double-stranded probe-mRNA hybrid molecules is indicative of the presence of the mRNA; the amount of such hybrid formed is proportional to the amount of mRNA. Thus, such probes may be used to ascertain the level and extent of the mRNA production in a plant's cells or tissues. Such nucleic acid hybridization may be conducted under quantitative conditions (thereby providing a numerical value of the amount of the mRNA present). Alternatively, the assay may be conducted as a qualitative assay that indicates either that the mRNA is present, or that its level exceeds a user set, predefined value.

[0155] A principle of in situ hybridization is that a labeled, single-stranded nucleic acid probe will hybridize to a complementary strand of cellular DNA or RNA and, under the appropriate conditions, these molecules will form a stable hybrid. When nucleic acid hybridization is combined with histological techniques, specific DNA or RNA sequences can be identified within a single cell. An advantage of in situ hybridization over more conventional techniques for the detection of nucleic acids is that it allows an investigator to determine the precise spatial population (Angerer et al., Dev. Biol. 101: 477484 (1984), the entirety of which is herein incorporated by reference; Angerer et al., Dev. Biol. 112: 157-166 (1985), the entirety of which is herein incorporated by reference; Dixon et al., EMBO J. 10: 1317-1324 (1991), the entirety of which is herein incorporated by reference). In situ hybridization may be used to measure the steady-state level of RNA accumulation. It is a sensitive technique and RNA sequences present in as few as 5-10 copies per cell can be detected (Hardin et al., J. Mol. Biol. 202: 417-431.(1989), the entirety of which is herein incorporated by reference). A number of protocols have been devised for in situ hybridization, each with tissue preparation, hybridization, and washing conditions (Meyerowitz, Plant Mol. Biol. Rep. 5: 242-250 (1987), the entirety of which is herein incorporated by reference; Cox and Goldberg, In: Plant Molecular Biology: A Practical Approach (ed. C.H. Shaw), pp. 1-35. IRL Press, Oxford (1988), the entirety of which is herein incorporated by reference; Raikhel et al., In situ RNA hybridization in plant tissues. In Plant Molecular Biology Manual, vol. B9: 1-32. Kluwer Academic Publisher, Dordrecht, Belgium (1989), the entirety of which is herein incorporated by reference).

[0156] In situ hybridization also allows for the localization of proteins within a tissue or cell (Wilkinson, In Situ Hybridization, Oxford University Press, Oxford (1992), the entirety of which is herein incorporated by reference; Langdale, In Situ Hybridization 165-179 In: The Maize Handbook, eds. Freeling and Walbot, Springer-Verlag, New York (1994), the entirety of which is herein incorporated by reference). It is understood that one or more of the molecules of the present invention, preferably one or more of the EST nucleic acid molecules of the present invention or one or more of the antibodies of the present invention may be utilized to detect the level or pattern of a protein or fragment thereof by in situ hybridization.

[0157] Fluorescent in situ hybridization also enables the localization of a particular DNA sequence along a chromosome which is useful, among other uses, for gene mapping, following chromosomes in hybrid lines or detecting chromosomes with translocations, transversions or deletions. In situ hybridization has been used to identify chromosomes in several plant species (Griffor et al., Plant Mol. Biol. 17: 101-109 (1991), the entirety of which is herein incorporated by reference; Gustafson et al., Proc. Nat'l. Acad. Sci. (U.S.A). 87: 1899-1902 (1990), herein incorporated by reference; Mukai and Gill, Genome 34: 448-452. (1991); Schwarzacher and Heslop-Harrison, Genome 34: 317-323 (1991); Wang et al., Jpn. J. Genet. 66: 313-316 (1991), the entirety of which is herein incorporated by reference; Parra and Windle, Nature Genetics, 5: 17-21 (1993), the entirety of which is herein incorporated by reference). It is understood that the nucleic acid molecules of the present invention may be used as probes or markers to localize sequences along a chromosome.

[0158] It is also understood that one or more of the molecules of the present invention, preferably one or more of the EST nucleic acid molecules of the present invention or one or more of the antibodies of the present invention may be utilized to detect the expression level or pattern of a protein or MRNA thereof by in situ hybridization.

[0159] Another method to localize the expression of a molecule is tissue printing. Tissue printing provides a way to screen, at the same time on the same membrane many tissue sections from different plants or different developmental stages. Tissue-printing procedures utilize films designed to immobilize proteins and nucleic acids. In essence, a freshly cut section of an organ is pressed gently onto nitrocellulose paper, nylon membrane or polyvinylidene difluoride membrane. Such membranes are commercially available (e.g. Millipore, Bedford, Massachusetts). The contents of the cut cell transfer onto the membrane, and the molecules are immobilized to the membrane. The immobilized molecules form a latent print that can be visualized with appropriate probes. When a plant tissue print is made on nitrocellulose paper, the cell walls leave a physical print that makes the anatomy visible without further treatment (Varner and Taylor, Plant Physiol. 91: 31-33 (1989), the entirety of which is herein incorporated by reference).

[0160] Tissue printing on substrate films is described by Daoust, Exp. Cell Res. 12: 203-211 (1957), the entirety of which is herein incorporated by reference, who detected amylase, protease, ribonuclease, and deoxyribonuclease in animal tissues using starch, gelatin, and agar films. These techniques can be applied to plant tissues (Yomo and Taylor, Planta 112:35-43 (1973); Harris and Chrispeels, Plant Physiol. 56: 292-299 (1975). Advances in membrane technology have increased the range of applications of Daoust's tissue-printing techniques allowing (Cassab and Varner, J. Cell. Biol. 105: 2581-2588 (1987), the entirety of which is herein incorporated by reference; the histochemical localization of various plant enzymes and deoxyribonuclease on nitrocellulose paper and nylon (Spruce et al., Phytochemistry, 26: 2901-2903 (1987), the entirety of which is herein incorporated by reference; Barres et al. Neuron 5: 527-544 (1990), the entirety of which is herein incorporated by reference; the entirety of which is herein incorporated by reference; Reid and Pont-Lezica, Tissue Printing: Tools for the Study of Anatomy, Histochemistry, and Gene Expression, Academic Press, New York, N.Y. (1992), the entirety of which is herein incorporated by reference; Reid et al. Plant Physiol. 93: 160-165 (1990), herein incorporate by reference; Ye et al. Plant J. 1: 175-183 (1991), the entirety of which is herein incorporated by reference).

[0161] It is understood that one or more of the molecules of the present invention, preferably one or more of the EST nucleic acid molecules of the present invention or one or more of the antibodies of the present invention may be utilized to detect the presence or quantity of a protein by tissue printing.

[0162] Further, it is also understood that any of the nucleic acid molecules of the present invention may be used as marker nucleic acids and or probes in connection with methods that require probes or marker nucleic acids. As used herein, a probe is an agent that is utilized to determine an attribute or feature (e.g. presence or absence, location, correlation, etc.) or a molecule, cell, tissue or plant. As used herein, a marker nucleic acid is a nucleic acid molecule that is utilized to determine an attribute or feature (e.g., presence or absence, location, correlation, etc.) or a molecule, cell, tissue or plant.

[0163] A microarray-based method for high-throughput monitoring of plant gene expression may be utilized to measure gene-specific hybridization targets. This ‘chip’-based approach involves using microarrays of nucleic acid molecules as gene-specific hybridization targets to quantitatively measure expression of the corresponding plant genes (Schena et al., Science 270: 467-470 (1995), the entirety of which is herein incorporated by reference; Shalon, Ph.D. Thesis. Stanford University (1996), the entirety of which is herein incorporated by reference). Every nucleotide in a large sequence can be queried at the same time. Hybridization can be used to efficiently analyze large amounts of nucleotide sequence.

[0164] Several microarray methods have been described. One method compares the sequences to be analyzed by hybridization to a set of oligonucleotides representing all possible subsequences (Bains and Smith, J. Theor. Biol. 135: 303 (1989), the entirety of which is herein incorporated by reference). A second method hybridizes the sample to an array of oligonucleotide probes. An array consisting of oligonucleotides complementary to subsequences of a target sequence can be used to determine the identity of a target sequence, measure its amount, and detect differences between the target and a reference sequence. Nucleic acid molecules microarrays may also be screened with protein molecules or fragments thereof to determine nucleic acid molecules that specifically bind protein molecules or fragments thereof.

[0165] The microarray approach may be used with polypeptide targets (U.S. Pat. No. 5,445,934; U.S. Pat. No. 5,143,854; U.S. Pat. No. 5,079,600; U.S. Pat. No. 4,923,901, all of which are herein incorporated by reference in their entirety). Essentially, polypeptides are synthesized on a substrate (microarray) and these polypeptides can be screened with either protein molecules or fragments thereof or nucleic acid molecules in order to screen for either protein molecules or fragments thereof or nucleic acid molecules that specifically bind the target polypeptides. Implementation of these techniques rely on recently developed combinatorial technologies to generate any ordered array of a large number of oligonucleotide probes (Fodor et al., Science 251:767-773 (1991), the entirety of which is herein incorporated by reference).

[0166] It is understood that one or more of the molecules of the present invention, preferably one or more of the nucleic acid molecules or protein molecules or fragments thereof of the present invention may be utilized in a microarray based method.

[0167] In a preferred embodiment of the present invention microarrays may be prepared that comprise nucleic acid molecules where preferably at least 10%, preferably at least 25%, more preferably at least 50% and even more preferably at least 75%, 80%, 85%, 90% or 95% of the nucleic acid molecules located on that array are selected from the group of nucleic acid molecules that specifically hybridize to one or more nucleic acid molecule having a nucleic acid sequence selected from the group of SEQ ID NO: 1 through SEQ ID NO: 32236 or complement thereof or fragments of either.

[0168] A particular preferred microarray embodiment of the present invention is a microarray comprising nucleic acid molecules encoding genes or fragments thereof that are homologues of known genes or nucleic acid molecules that comprise genes or fragment thereof that elicit only limited or no matches to known genes. A further preferred microarray embodiment of the present invention is a microarray comprising nucleic acid molecules having genes or fragments thereof that are homologues of known genes and nucleic acid molecules that comprise genes or fragment thereof that elicit only limited or no matches to known genes. Site-directed mutagenesis may be utilized to modify nucleic acid sequences, particularly as it is a technique that allows one or more of the amino acids encoded by a nucleic acid molecule to be altered (e.g. a threonine to be replaced by a methionine). Three basic methods for site-directed mutagenesis are often employed. These are cassette mutagenesis (Wells et al., Gene 34:315-23 (1985), the entirety of which is herein incorporated by reference), primer extension (Gilliam et al., Gene 12:129-137 (1980), the entirety of which is herein incorporated by reference); Zoller and Smith, Methods Enzymol. 100:468-500 (1983), the entirety of which is herein incorporated by reference; and Dalbadie-McFarland et al., Proc. Natl. Acad. Sci. (U.S.A.) 79:6409-6413 (1982), the entirety of which is herein incorporated by reference) and methods based upon PCR (Scharf et al., Science 233:1076-1078 (1986), the entirety of which is herein incorporated by reference; Higuchi et al., Nucleic Acids Res. 16:7351-7367 (1988), the entirety of which is herein incorporated by reference). Site-directed mutagenesis approaches are also described in European Patent 0 385 962, the entirety of which is herein incorporated by reference, European Patent 0 359 472, the entirety of which is herein incorporated by reference, and PCT Patent Application WO 93/07278, the entirety of which is herein incorporated by reference.

[0169] Site-directed mutagenesis strategies have been applied to plants for both in vitro as well as in vivo site-directed mutagenesis (Lanz et al., J. Biol. Chem. 266:9971-6 (1991); Kovgan and Zhdanov, Biotekhnologiya 5:148-154; No. 207160n, Chemical Abstracts 110:225 (1989); Ge et al., Proc. Natl. Acad. Sci. (U.S.A.) 86:4037-4041 (1989); Zhu et al., J. Biol. Chem. 271:18494-18498 (1996); Chu et al., Biochemistry 33:6150-6157 (1994); Small et al., EMBO J. 11: 1291-1296 (1992); Cho et al., Mol. Biotechnol. 8:13-16 (1997), Kita et al., J. Biol. Chem. 271:26529-26535 (1996); Jin et al., Mol. Microbiol. 7:555-562 (1993); Hatfield and Vierstra, J. Biol. Chem. 267:14799-14803 (1992); Zhao et al., Biochemistry 31:5093-5099 (1992), all of which are herein incorporated by reference in their entirety).

[0170] Any of the nucleic acid molecules of the present invention may either be modified by site-directed mutagenesis or used as, for example, nucleic acid molecules that are used to target other nucleic acid molecules for modification. It is understood that mutants with more than one altered nucleotide can be constructed using techniques that practitioners skilled in the art are familiar with such as isolating restriction fragments and ligating such fragments into an expression vector (see, for example, Sambrook et al., Molecular Cloning: A Laboratory Manual, Cold Spring Harbor Press (1989)).

[0171] Sequence-specific DNA-binding proteins play a role in the regulation of transcription. The isolation of recombinant cDNAs encoding these proteins facilitates the biochemical analysis of their structural and functional properties. Genes encoding such DNA-binding proteins have been isolated using classical genetics (Vollbrecht et al., Nature 350: 241-243 (1991), the entirety of which is herein incorporated by reference) and molecular biochemical approaches, including the screening of recombinant cDNA libraries with antibodies (Landschulz et al., Genes Dev. 2: 786-800 (1988), the entirety of which is herein incorporated by reference) or DNA probes (Bodner et al., Cell 55: 505-518 (1988), the entirety of which is herein incorporated by reference). In addition, an in situ screening procedure has been used and has facilitated the isolation of sequence-specific DNA-binding proteins from various plant species (Gilmartin et al., Plant Cell 4: 839-849 (1992), the entirety of which is herein incorporated by reference; Schindler et al., EMBO J. 11: 1261-1273 (1992) the entirety of which is herein incorporated by reference). An in situ screening protocol does not require the purification of the protein of interest (Vinson et al., Genes Dev. 2: 801-806 (1988), the entirety of which is herein incorporated by reference; Singh et al., Cell 52: 415-423 (1988), the entirety of which is herein incorporated by reference).

[0172] Steps may be employed to characterize DNA-protein interactions. The first is to identify promoter fragments that interact with DNA-binding proteins, to titrate binding activity, to determine the specificity of binding, and to determine whether a given DNA-binding activity can interact with related DNA sequences (Sambrook et al., Molecular Cloning: A Laboratory Manual, 2^{nd} edition. Cold Spring Harbor Laboratory Press, Cold Spring Harbor, N.Y. (1989). Electrophoretic mobility-shift assay is a widely used assay. The assay provides a simple, rapid, and sensitive method for detecting DNA-binding proteins based on the observation that the mobility of a DNA fragment through a nondenaturing, low-ionic strength polyacrylamide gel is retarded upon association with a DNA-binding protein (Fried and Crother, Nucleic Acids Res. 9: 6505-6525 (1981), the entirety of which is herein incorporated by reference). When one or more specific binding activities have been identified, the exact sequence of the DNA bound by the protein may be determined. Several procedures for characterizing protein/DNA-binding sites are used, including methylation and ethylation interference assays ( Maxam and Gilbert, Methods Enzymol. 65: 499-560 (1980), the entirety of which is herein incorporated by reference; Wissman and Hillen, Methods Enzymol. 208: 365-379 (1991), the entirety of which is herein incorporated by reference) and footprinting techniques employing DNase I (Galas and Schmitz, Nucleic Acids Res. 5: 3157-3170 (1978), the entirety of which is herein incorporated by reference), 1,10-phenanthroline-copper ion methods (Sigman et al., Methods Enzymol. 208: 365-379 (1991), the entirety of which is herein incorporated by reference) or hydroxyl radical methods (Dixon et al., Methods Enzymol. 208: 380-413 (1991), the entirety of which is herein incorporated by reference). It is understood that one or more of the nucleic acid molecules of the present invention, preferably one or more of the EST nucleic acid molecules of the present invention may be utilized to identify a protein or fragment thereof that specifically binds to a nucleic acid molecule of the present invention. It is also understood that one or more of the protein molecules or fragments thereof of the present invention may be utilized to identify a nucleic acid molecule that specifically binds to it.

[0173] The two-hybrid system is based on the fact that many cellular functions are carried out by proteins that interact (physically) with one another. Two-hybrid systems have been used to probe the function of new proteins (Chien et al., Proc. Natl. Acad. Sci. (U.S.A.) 88: 9578-9582 (1991) the entirety of which is herein incorporated by reference; Durfee et al., Genes Dev. 7: 555-569 (1993) the entirety of which is herein incorporated by reference; Choi et al., Cell 78: 499-512 (1994), the entirety of which is herein incorporated by reference; Kranz et al., Genes Dev. 8: 313-327 (1994), the entirety of which is herein incorporated by reference).

[0174] Interaction mating techniques have facilitated a number of two-hybrid studies of protein-protein interaction. Interaction mating has been used to examine interactions between small sets of tens of proteins (Finley and Brent, Proc. Natl. Acad. Sci. (U.S.A.) 91: 12098-12984 (1994), the entirety of which is herein incorporated by reference), larger sets of hundreds of proteins, (Bendixen et al., Nucl. Acids Res. 22: 1778-1779 (1994), the entirety of which is herein incorporated by reference) and to comprehensively map proteins encoded by a small genome (Bartel et al., Nature Genetics 12: 72-77 (1996), the entirety of which is herein incorporated by reference). This technique utilizes proteins fused to the DNA-binding domain and proteins fused to the activation domain. They are expressed in two different haploid yeast strains of opposite mating type, and the strains are mated to determine if the two proteins interact. Mating occurs when haploid yeast strains come into contact and result in the fusion of the two haploids into a diploid yeast strain. An interaction can be determined by the activation of a two-hybrid reporter gene in the diploid strain. The primary advantage of this technique is that it reduces the number of yeast transformations needed to test individual interactions. It is understood that the protein-protein interactions of protein or fragments thereof of the present invention may be investigated using the two-hybrid system and that any of the nucleic acid molecules of the present invention that encode such proteins or fragments thereof may be used to transform yeast in the two-hybrid system.

[0175] Synechocystis 6803 is a photosynthetic Cyanobacterium capable of oxygenic photosynthesis as well as heterotrophic growth in the absence of light. The entire genome has been sequenced, and it is reported to have a circular genome size of 3.57 Mbp containing 3168 potential open reading frames. Open reading frames (ORFs) were identified based upon their homology to other reported ORFs and by using ORF identification computer programs. Sixteen hundred potential ORFs were assigned based on their homology to previously identified ORFs. Of these 1600 ORFs, 145 were identical to reported ORFs (Kaneko et al., DNA Research 3:109-36 (1996), herein incorporated by reference in its entirety).

[0176] Several prokaryote promoters have been used in Synechocystis to express heterologous genes including the tac, lac, and lambda phage promoters (Bryant (ed.), The Molecular Biology of Cyanobacteria, Kluwer Academic Publishers, (1994); Ferino and Chauvat, Gene 84:257-266 (1989), both of which are herein incorporated by reference in their entirety). Several bacterial origins of replication such as RSF1010 and ACYC are reported to replicate in Synechocystis (Mermet-Bouvier and Chauvat, Current Microbiology 28:145-148 (1994); Kuhlemeier et al., Mol. Gen. Genet. 184:249-254 (1981), both of which are herein incorporated by reference in their entirety).

[0177] Synechocystis has been used to study gene regulation by gene replacement through homologous recombination or by gene disruption using antibiotic resistance markers (Pakrasi et al., EMBO 7:325-332 (1988), herein incorporated by reference in its entirety). In such gene regulation studies, double reciprocal homologous regions of the host genome flanking the gene of interest recombine to stably integrate the gene of interest into the genome. The gene of interest can be expressed once that gene has been stably integrated into the genome. Biochemical analysis can be performed to study the effect of the replaced or deleted gene.

[0178] It is understood that the agents of the present invention may be employed in a Synechocystis system.

[0179] Exogenous genetic material may be transferred into a plant cell and the plant cell regenerated into a whole, fertile or sterile plant. Exogenous genetic material is any genetic material, whether naturally occurring or otherwise, from any source that is capable of being inserted into any organism. Such genetic material may be transferred into either monocotyledons and dicotyledons including but not limited to the crops, maize and soybean (See specifically, Chistou, Particle Bombardment for Genetic Engineering of Plants, pp. 63-69 (maize), pp 50-60 (soybean), Biotechnology Intelligence Unit. Academic Press, San Diego, Calif. (1996), the entirety of which is herein incorporated by reference and generally Chistou, Particle Bombardment for Genetic Engineering of Plants, Biotechnology Intelligence Unit. Academic Press, San Diego, Calif. (1996), the entirety of which is herein incorporated by reference).

[0180] Transfer of a nucleic acid that encodes for a protein can result in overexpression of that protein in a transformed cell or transgenic plant. One or more of the proteins or fragments thereof encoded by nucleic acid molecules of the present invention may be overexpressed in a transformed cell or transformed plant. Such overexpression may be the result of transient or stable transfer of the exogenous material.

[0181] Exogenous genetic material may be transferred into a plant cell by the use of a DNA vector or construct designed for such a purpose. Design of such a vector is generally within the skill of the art (See, Plant Molecular Biology: A Laboratory Manual eds. Clark, Springer, N.Y. (1997), the entirety of which is herein incorporated by reference).

[0182] A construct or vector may include a plant promoter to express the protein or protein fragment of choice. A number of promoters which are active in plant cells have been described in the literature. These include the nopaline synthase (NOS) promoter (Ebert et al., Proc. Natl. Acad. Sci. (U.S.A.) 84:5745-5749 (1987), the entirety of which is herein incorporated by reference), the octopine synthase (OCS) promoter (which are carried on tumor-inducing plasmids of Agrobacterium tumefaciens), the caulimovirus promoters such as the cauliflower mosaic virus (CaMV) 19S promoter (Lawton et al., Plant Mol. Biol. 9:315-324 (1987), the entirety of which is herein incorporated by reference) and the CAMV 35S promoter (Odell et al., Nature 313:810-812 (1985), the entirety of which is herein incorporated by reference), the figwort mosaic virus 35S-promoter, the light-inducible promoter from the small subunit of ribulose-1,5-bis-phosphate carboxylase (ssRUBISCO), the Adh promoter (Walker et al., Proc. Natl. Acad. Sci. (U.S.A.) 84:6624-6628 (1987), the entirety of which is herein incorporated by reference), the sucrose synthase promoter (Yang et al., Proc. Natl. Acad. Sci. (U.S.A.) 87:4144-4148 (1990), the entirety of which is herein incorporated by reference), the R gene complex promoter (Chandler et al., The Plant Cell 1:1175-1183 (1989), the entirety of which is herein incorporated by reference), and the chlorophyll a/b binding protein gene promoter, etc. These promoters have been used to create DNA constructs which have been expressed in plants; see, e.g., PCT publication WO 84/02913, herein incorporated by reference in its entirety.

[0183] Promoters which are known or are found to cause transcription of DNA in plant cells can be used in the present invention. Such promoters may be obtained from a variety of sources such as plants and plant viruses. It is preferred that the particular promoter selected should be capable of causing sufficient expression to result in the production of an effective amount of a protein to cause the desired phenotype. In addition to promoters which are known to cause transcription of DNA in plant cells, other promoters may be identified for use in the current invention by screening a plant cDNA library for genes which are selectively or preferably expressed in the target tissues or cells.

[0184] For the purpose of expression in source tissues of the plant, such as the leaf, seed, root or stem, it is preferred that the promoters utilized in the present invention have relatively high expression in these specific tissues. For this purpose, one may choose from a number of promoters for genes with tissue- or cell-specific or -enhanced expression. Examples of such promoters reported in the literature include the chloroplast glutamine synthetase GS2 promoter from pea (Edwards et al., Proc. Natl. Acad. Sci. (U.S.A.) 87:3459-3463 (1990), herein incorporated by reference in its entirety), the chloroplast fructose-1,6-biphosphatase (FBPase) promoter from wheat (Lloyd et al., Mol. Gen. Genet. 225:209-216 (1991), herein incorporated by reference in its entirety), the nuclear photosynthetic ST-LS1 promoter from potato (Stockhaus et al., EMBO J. 8:2445-2451 (1989), herein incorporated by reference in its entirety), the phenylalanine ammonia-lyase (PAL) promoter and the chalcone synthase (CHS) promoter from Arabidopsis thaliana. Also reported to be active in photosynthetically active tissues are the ribulose-1,5-bisphosphate carboxylase (RbcS) promoter from eastern larch (Larix laricina), the promoter for the cab gene, cab6, from pine (Yamamoto et al., Plant Cell Physiol. 35:773-778 (1994), herein incorporated by reference in its entirety), the promoter for the Cab-1 gene from wheat (Fejes et al., Plant Mol. Biol. 15:921-932 (1990), herein incorporated by reference in its entirety), the promoter for the CAB-1 gene from spinach (Lubberstedt et al., Plant Physiol. 104:997-1006 (1994), herein incorporated by reference in its entirety), the promoter for the cablR gene from rice (Luan et al., Plant Cell. 4:971-981 (1992), the entirety of which is herein incorporated by reference), the pyruvate, orthophosphate dikinase (PPDK) promoter from maize (Matsuoka et al., Proc. Nat. Acad. Sci. (U.S.A.) 90: 9586-9590 (1993), herein incorporated by reference in its entirety), the promoter for the tobacco Lhcb1*2 gene (Cerdan et al., Plant Mol. Biol. 33: 245-255. (1997), herein incorporated by reference in its entirety), the Arabidopsis thaliana SUC2 sucrose-H+ symporter promoter (Truernit et al., Planta. 196: 564-570 (1995), herein incorporated by reference in its entirety), and the promoter for the thylacoid membrane proteins from spinach (psad, psaF, psae, PC, FNR, atpC, atpD, cab, rbcS). Other promoters for the chlorophyll a/b-binding proteins may also be utilized in the present invention, such as the promoters for LhcB gene and PsbP gene from white mustard (Sinapis alba; Kretsch et al., Plant MoL Biol. 28: 219-229 (1995), the entirety of which is herein incorporated by reference).

[0185] For the purpose of expression in sink tissues of the plant, such as the tuber of the potato plant, the fruit of tomato, or the seed of maize, wheat, rice, and barley, it is preferred that the promoters utilized in the present invention have relatively high expression in these specific tissues. A number of promoters for genes with tuber-specific or -enhanced expression are known, including the class I patatin promoter (Bevan et al., EMBO J. 8: 1899-1906 (1986); Jefferson et al., Plant Mol. Biol. 14: 995-1006 (1990), both of which are herein incorporated by reference in its entirety), the promoter for the potato tuber ADPGPP genes, both the large and small subunits, the sucrose synthase promoter (Salanoubat and Belliard, Gene. 60: 47-56 (1987), Salanoubat and Belliard, Gene. 84: 181-185 (1989), both of which are incorporated by reference in their entirety), the promoter for the major tuber proteins including the 22 kd protein complexes and proteinase inhibitors (Hannapel, Plant Physiol. 101: 703-704 (1993), herein incorporated by reference in its entirety), the promoter for the granule bound starch synthase gene (GBSS) (Visser et al., Plant Mol. Biol. 17: 691-699 (1991), herein incorporated by reference in its entirety), and other class I and II patatins promoters (Koster-Topfer et al., Mol Gen Genet. 219: 390-396 (1989); Mignery et al., Gene. 62: 27-44 (1988), both of which are herein incorporated by reference in their entirety).

[0186] Other promoters can also be used to express a fructose 1,6 bisphosphate aldolase gene in specific tissues, such as seeds or fruits. The promoter for β-conglycinin (Chen et al., Dev. Genet. 10: 112-122 (1989), herein incorporated by reference in its entirety) or other seed-specific promoters such as the napin and phaseolin promoters, can be used. The zeins are a group of storage proteins found in maize endosperm. Genomic clones for zein genes have been isolated (Pedersen et al., Cell 29: 1015-1026 (1982), herein incorporated by reference in its entirety), and the promoters from these clones, including the 15 kD, 16 kD, 19 kD, 22 kD, 27 kD, and gamma genes, could also be used. Other promoters known to function, for example, in maize, include the promoters for the following genes: waxy, Brittle, Shrunken 2, Branching enzymes I and II, starch synthases, debranching enzymes, oleosins, glutelins, and sucrose synthases. A particularly preferred promoter for maize endosperm expression is the promoter for the glutelin gene from rice, more particularly the Osgt-1 promoter (Zheng et al., Mol. Cell Biol. 13: 5829-5842 (1993), herein incorporated by reference in its entirety). Examples of promoters suitable for expression in wheat include those promoters for the ADPglucose pyrophosphorylase (ADPGPP) subunits, the granule bound and other starch synthases, the branching and debranching enzymes, the embryogenesis-abundant proteins, the gliadins, and the glutenins. Examples of such promoters in rice include those promoters for the ADPGPP subunits, the granule bound and other starch synthases, the branching enzymes, the debranching enzymes, sucrose synthases, and the glutelins. A particularly preferred promoter is the promoter for rice glutelin, Osgt-1. Examples of such promoters for barley include those for the ADPGPP subunits, the granule bound and other starch synthases, the branching enzymes, the debranching enzymes, sucrose synthases, the hordeins, the embryo globulins, and the aleurone specific proteins.

[0187] Root specific promoters may also be used. An example of such a promoter is the promoter for the acid chitinase gene (Samac et al., Plant Mol. Biol. 25: 587-596 (1994), the entirety of which is herein incorporated by reference). Expression in root tissue could also be accomplished by utilizing the root specific subdomains of the CaMV35S promoter that have been identified (Lam et al., Proc. Natl. Acad. Sci. (U.S.A.) 86:7890-7894 (1989), herein incorporated by reference in its entirety). Other root cell specific promoters include those reported by Conkling et al. (Conkling et al., Plant Physiol. 93:1203-1211 (1990), the entirety of which is herein incorporated by reference).

[0188] Additional promoters that may be utilized are described, for example, in U.S. Pat. Nos. 5,378,619, 5,391,725, 5,428,147, 5,447,858, 5,608,144, 5,608,144, 5,614,399, 5,633,441, 5,633,435, and 4,633,436, all of which are herein incorporated in their entirety. In addition, a tissue specific enhancer may be used (Fromm et al., The Plant Cell 1:977-984 (1989), the entirety of which is herein incorporated by reference).

[0189] Constructs or vectors may also include, with the coding region of interest, a nucleic acid sequence that acts, in whole or in part, to terminate transcription of that region. For example, such sequences have been isolated including the Tr7 3′ sequence and the nos 3′ sequence (Ingelbrecht et al., The Plant Cell 1:671-680 (1989), the entirety of which is herein incorporated by reference; Bevan et al., Nucleic Acids Res. 11:369-385 (1983), the entirety of which is herein incorporated by reference), or the like.

[0190] A vector or construct may also include regulatory elements. Examples of such include the Adh intron 1 (Callis et al., Genes and Develop. 1:1183-1200 (1987), the entirety of which is herein incorporated by reference), the sucrose synthase intron (Vasil et al., Plant Physiol. 91:1575-1579 (1989), the entirety of which is herein incorporated by reference) and the TMV omega element (Gallie et al., The Plant Cell 1:301-311 (1989), the entirety of which is herein incorporated by reference). These and other regulatory elements may be included when appropriate.

[0191] A vector or construct may also include a selectable marker. Selectable markers may also be used to select for plants or plant cells that contain the exogenous genetic material. Examples of such include, but are not limited to, a neo gene (Potrykus et al., Mol. Gen. Genet. 199:183-188 (1985), the entirety of which is herein incorporated by reference) which codes for kanamycin resistance and can be selected for using kanamycin, G418, etc.; a bar gene which codes for bialaphos resistance; a mutant EPSP synthase gene (Hinchee et al., Bio/Technology 6:915-922 (1988), the entirety of which is herein incorporated by reference) which encodes glyphosate resistance; a nitrilase gene which confers resistance to bromoxynil (Stalker et al., J. Biol. Chem. 263:6310-6314 (1988), the entirety of which is herein incorporated by reference); a mutant acetolactate synthase gene (ALS) which confers imidazolinone or sulphonylurea resistance (European Patent Application 154,204 (Sep. 11, 1985), the entirety of which is herein incorporated by reference); and a methotrexate resistant DHFR gene (Thillet et al., J. Biol. Chem. 263:12500-12508 (1988), the entirety of which is herein incorporated by reference).

[0192] A vector or construct may also include a transit peptide. Incorporation of a suitable chloroplast transit peptide may also be employed (European Patent Application Publication Number 0218571, the entirety of which is herein incorporated by reference). Translational enhancers may also be incorporated as part of the vector DNA. DNA constructs could contain one or more 5′ non-translated leader sequences which may serve to enhance expression of the gene products from the resulting mRNA transcripts. Such sequences may be derived from the promoter selected to express the gene or can be specifically modified to increase translation of the mRNA. Such regions may also be obtained from viral RNAs, from suitable eukaryotic genes, or from a synthetic gene sequence. For a review of optimizing expression of transgenes, see Koziel et al., Plant Mol. Biol. 32:393-405 (1996), the entirety of which is herein incorporated by reference.

[0193] A vector or construct may also include a screenable marker. Screenable markers may be used to monitor expression. Exemplary screenable markers include a β-glucuronidase or uidA gene (GUS) which encodes an enzyme for which various chromogenic substrates are known (Jefferson, Plant Mol. Biol, Rep. 5: 387-405 (1987), the entirety of which is herein incorporated by reference; Jefferson et al., EMBO J. 6: 3901-3907 (1987), the entirety of which is herein incorporated by reference); an R-locus gene, which encodes a product that regulates the production of anthocyanin pigments (red color) in plant tissues ((Dellaporta et al., Stadler Symposium 11:263-282 (1988), the entirety of which is herein incorporated by reference); a β-lactamase gene (Sutcliffe et al., Proc. Natl. Acad. Sci. (U.S.A.) 75: 3737-3741 (1978), the entirety of which is herein incorporated-by reference), a gene which encodes an enzyme for which various chromogenic substrates are known (e.g., PADAC, a chromogenic cephalosporin); a luciferase gene (Ow et al., Science 234: 856-859 (1986), the entirety of which is herein incorporated by reference) a xylE gene (Zukowsky et al., Proc. Natl. Acad. Sci. (U.S.A.) 80:1101-1105 (1983), the entirety of which is herein incorporated by reference) which encodes a catechol dioxygenase that can convert chromogenic catechols; an a-amylase gene (Ikatu et al., Bio/Technol. 8:241-242 (1990), the entirety of which is herein incorporated by reference); a tyrosinase gene (Katz et al., J. Gen. Microbiol. 129:2703-2714 (1983), the entirety of which is herein incorporated by reference) which encodes an enzyme capable of oxidizing tyrosine to DOPA and dopaquinone which in turn condenses to melanin; an α-galactosidase, which will turn a chromogenic α-galactose substrate.

[0194] Included within the terms “selectable or screenable marker genes” are also genes which encode a scriptable marker whose secretion can be detected as a means of identifying or selecting for transformed cells. Examples include markers which encode a secretable antigen that can be identified by antibody interaction, or even secretable enzymes which can be detected catalytically. Secretable proteins fall into a number of classes, including small, diffusible proteins detectable, e.g., by ELISA, small active enzymes detectable in extracellular solution (e.g., α-amylase, β-lactamase, phosphinothricin transferase), or proteins which are inserted or trapped in the cell wall (such as proteins which include a leader sequence such as that found in the expression unit of extension or tobacco PR-S). Other possible selectable and/or screenable marker genes will be apparent to those of skill in the art.

[0195] Methods and compositions for transforming a bacteria and other microorganisms are known in the art (see for example Sambrook et al., Molecular Cloning: A Laboratory Manual, Second Edition, Cold Spring Harbor Laboratory Press, Cold Spring Harbor, N.Y., (1989), the entirety of which is herein incorporated by reference).

[0196] There are many methods for introducing transforming nucleic acid molecules into plant cells. Suitable methods are believed to include virtually any method by which nucleic acid molecules may be introduced into a cell, such as by Agrobacterium infection or direct delivery of nucleic acid molecules such as, for example, by PEG-mediated transformation, by electroporation or by acceleration of DNA coated particles, etc. (Pottykus, Ann. Rev. Plant Physiol. Plant Mol. Biol. 42:205-225 (1991), the entirety of which is herein incorporated by reference; Vasil, Plant Mol. Biol. 25: 925-937 (1994), the entirety of which is herein incorporated by reference. For example, electroporation has been used to transform maize protoplasts (Fromm et al., Nature 312:791-793 (1986), the entirety of which is herein incorporated by reference).

[0197] Other vector systems suitable for introducing transforming DNA into a host plant cell includes but is not limited to binary artificial chromosome (BIBAC) vectors (Hamilton et al., Gene 200:107-116, (1997), the entirety of which is herein incorporated by reference, and transfection with RNA viral vectors (Della-Cioppa et al., Ann. N.Y. Acad. Sci. (1996), 792 (Engineering Plants for Commercial Products and Applications), 57-61, the entirety of which is herein incorporated by reference.

[0198] Technology for introduction of DNA into cells is well known to those of skill in the art. Four general methods for delivering a gene into cells have been described: (1) chemical methods (Graham and van der Eb, Virology, 54:536-539 (1973), the entirety of which is herein incorporated by reference); (2) physical methods such as microinjection (Capecchi, Cell 22:479-488 (1980), electroporation (Wong and Neumann, Biochem. Biophys. Res. Commun., 107:584-587 (1982); Fromm et al., Proc. Natl. Acad. Sci. USA, 82:5824-5828 (1985); U.S. Pat. No. 5,384,253; and the gene gun (Johnston and Tang, Methods Cell Biol. 43:353-365 (1994), all of which the entirety is herein incorporated by reference; (3) viral vectors (Clapp, Clin. Perinatol., 20:155-168 (1993); Lu et al., J. Exp. Med., 178:2089-2096 (1993); Eglitis and Anderson, Biotechniques, 6:608-614 (1988), all of which the entirety is herein incorporated by reference); and (4) receptor-mediated mechanisms (Curiel et al., Hum. Gen. Ther., 3:147-154 (1992); Wagner et al., Proc. Natl. Acad. Sci. USA, 89:6099-6103 (1992), all of which the entirety is herein incorporated by reference).

[0199] Acceleration methods that may be used include, for example, microprojectile bombardment and the like. One example of a method for delivering transforming nucleic acid molecules to plant cells is microprojectile bombardment. This method has been reviewed by Yang and Christou, eds., Particle Bombardment Technology for Gene Transfer, Oxford Press, Oxford, England (1994), the entirety of which is herein incorporated by reference). Non-biological particles (microprojectiles) that may be coated with nucleic acids and delivered into cells by a propelling force. Exemplary particles include those comprised of tungsten, gold, platinum, and the like.

[0200] A particular advantage of microprojectile bombardment, in addition to it being an effective means of reproducibly, and stably transforming monocotyledons, is that neither the isolation of protoplasts (Cristou et al., Plant Physiol. 87:671-674 (1988), the entirety of which is herein incorporated by reference) nor the susceptibility of Agrobacterium infection is required. An illustrative embodiment of a method for delivering DNA into maize cells by acceleration is a biolistics g-particle delivery system, which can be used to propel particles coated with DNA through a screen, such as a stainless steel or Nytex screen, onto a filter surface covered with corn cells cultured in suspension. Gordon-Kamm et al., describes the basic procedure for coating tungsten particles with DNA (Gordon-Kamm et al., Plant Cell 2: 603-618 (1990), the entirety of which is herein incorporated by reference). The screen disperses the tungsten nucleic acid particles so that they are not delivered to the recipient cells in large aggregates. A particle delivery system suitable for use with the present invention is the helium acceleration PDS-1000/He gun which is available from Bio-Rad Laboratories (Bio-Rad, Hercules, Calif.)(Sanford et al., Technique 3:3-16 (1991), the entirety of which is herein incorporated by reference).

[0201] For the bombardment, cells in suspension may be concentrated on filters. Filters containing the cells to be bombarded are positioned at an appropriate distance below the microprojectile stopping plate. If desired, one or more screens are also positioned between the gun and the cells to be bombarded.

[0202] Alternatively, immature embryos or other target cells may be arranged on solid culture medium. The cells to be bombarded are positioned at an appropriate distance below the macroprojectile stopping plate. If desired, one or more screens are also positioned between the acceleration device and the cells to be bombarded. Through the use of techniques set forth herein one may obtain up to 1000 or more foci of cells transiently expressing a marker gene. The number of cells in a focus which express the exogenous gene product 48 hours post-bombardment often range from one to ten and average one to three.

[0203] In bombardment transformation, one may optimize the prebombardment culturing conditions and the bombardment parameters to yield the maximum numbers of stable transformants. Both the physical and biological parameters for bombardment are important in this technology. Physical factors are those that involve manipulating the DNA/microprojectile precipitate or those that affect the flight and velocity of either the macro- or microprojectiles. Biological factors include all steps involved in manipulation of cells before and immediately after bombardment, the osmotic adjustment of target cells to help alleviate the trauma associated with bombardment, and also the nature of the transforming DNA, such as linearized DNA or intact supercoiled plasmids. It is believed that pre-bombardment manipulations are especially important for successful transformation of immature embryos. In another alternative embodiment, plastids can be stably transformed. Methods disclosed for plastid transformation in higher plants include the particle gun delivery of DNA containing a selectable marker and targeting of the DNA to the plastid genome through homologous recombination (Svab et al., Proc. Natl. Acad. Sci. (U.S.A.) 87:8526-8530 (1990); Svab and Maliga, Proc. Natl. Acad. Sci. (U.S.A.) 90:913-917 (1993); Staub and Maliga, EMBO J. 12:601-606 (1993); U.S. Pat. Nos. 5,451,513 and 5,545,818, all of which are herein incorporated by reference in their entirety).

[0204] Accordingly, it is contemplated that one may wish to adjust various aspects of the bombardment parameters in small scale studies to fully optimize the conditions. One may particularly wish to adjust physical parameters such as gap distance, flight distance, tissue distance, and helium pressure. One may also minimize the trauma reduction factors by modifying conditions which influence the physiological state of the recipient cells and which may therefore influence transformation and integration efficiencies. For example, the osmotic state, tissue hydration and the subculture stage or cell cycle of the recipient cells may be adjusted for optimum transformation. The execution of other routine adjustments will be known to those of skill in the art in light of the present disclosure.

[0205] Agrobacterium-mediated transfer is a widely applicable system for introducing genes into plant cells because the DNA can be introduced into whole plant tissues, thereby bypassing the need for regeneration of an intact plant from a protoplast. The use of Agrobacterium-mediated plant integrating vectors to introduce DNA into plant cells is well known in the art. See, for example the methods described (Fraley et al., Biotechnology 3:629-635 (1985); Rogers et al., Meth. In Enzymol, 153:253-277 (1987), both of which are herein incorporated by reference in their entirety. Further, the integration of the Ti-DNA is a relatively precise process resulting in few rearrangements. The region of DNA to be transferred is defined by the border sequences, and intervening DNA is usually inserted into the plant genome as described (Spielmann et al., Mol. Gen. Genet., 205:34 (1986), the entirety of which is herein incorporated by reference).

[0206] Modern Agrobacterium transformation vectors are capable of replication in E. coli as well as Agrobacterium, allowing for convenient manipulations as described (Klee et al., In: Plant DNA Infectious Agents, T. Hohn and J. Schell, eds., Springer-Verlag, New York, pp. 179-203 (1985), the entirety of which is herein incorporated by reference. Moreover, recent technological advances in vectors for Agrobacterium-mediated gene transfer have improved the arrangement of genes and restriction sites in the vectors to facilitate construction of vectors capable of expressing various polypeptide coding genes. The vectors described have convenient multi-linker regions flanked by a promoter and a polyadenylation site for direct expression of inserted polypeptide coding genes and are suitable for present purposes (Rogers et al., Meth. In Enzymol., 153:253-277 (1987), the entirety of which is herein incorporated by reference). In addition, Agrobacterium containing both armed and disarmed Ti genes can be used for the transformations. In those plant strains where Agrobacterium-mediated transformation is efficient, it is the method of choice because of the facile and defined nature of the gene transfer.

[0207] A transgenic plant formed using Agrobacterium transformation methods typically contains a single gene on one chromosome. Such transgenic plants can be referred to as being heterozygous for the added gene. More preferred is a transgenic plant that is homozygous for the added structural gene; i.e., a transgenic plant that contains two added genes, one gene at the same locus on each chromosome of a chromosome pair. A homozygous transgenic plant can be obtained by sexually mating (selfing) an independent segregant transgenic plant that contains a single added gene, germinating some of the seed produced and analyzing the resulting plants produced for the gene of interest.

[0208] It is also to be understood that two different transgenic plants can also be mated to produce offspring that contain two independently segregating added, exogenous genes. Selfing of appropriate progeny can produce plants that are homozygous for both added, exogenous genes that encode a polypeptide of interest. Back-crossing to a parental plant and out-crossing with a non-transgenic plant are also contemplated, as is vegetative propagation.

[0209] Transformation of plant protoplasts can be achieved using methods based on calcium phosphate precipitation, polyethylene glycol treatment, electroporation, and combinations of these treatments. See for example (Potrykus et al., Mol. Gen. Genet., 205:193-200 (1986); Lorz et al., Mol. Gen. Genet., 199:178, (1985); Fromm et al., Nature, 319:791,(1986); Uchimiya et al., Mol. Gen. Genet.:204:204, (1986); Callis et al., Genes and Development, 1183,(1987); Marcotte et al., Nature, 335:454, (1988), all of which the entirety is herein incorporated by reference).

[0210] Application of these systems to different plant strains depends upon the ability to regenerate that particular plant strain from protoplasts. Illustrative methods for the regeneration of cereals from protoplasts are described (Fujimura et al., Plant Tissue Culture Letters, 2:74,(1985); Toriyama et al., Theor Appl. Genet. 205:34. (1986); Yamada et al., Plant Cell Rep., 4:85, (1986); Abdullah et al., Biotechnology, 4:1087, (1986), all of which the entirety is herein incorporated by reference).

[0211] To transform plant strains that cannot be successfully regenerated from protoplasts, other ways to introduce DNA into intact cells or tissues can be utilized. For example, regeneration of cereals from immature embryos or explants can be effected as described (Vasil, Biotechnology, 6:397,(1988), the entirety of which is herein incorporated by reference). In addition, “particle gun” or high-velocity microprojectile technology can be utilized (Vasil et al., Biol/Technology 10:667, (1992), the entirety of which is herein incorporated by reference).

[0212] Using the latter technology, DNA is carried through the cell wall and into the cytoplasm on the surface of small metal particles as described (Klein et al., Nature, 328:70, (1987); Klein et al., Proc. Natl. Acai Sci. USA, 85:8502-8505, (1988); McCabe et al., Biotechnology, 6:923, (1988), all of which the entirety is herein incorporated by reference). The metal particles penetrate through several layers of cells and thus allow the transformation of cells within tissue explants.

[0213] Other methods of cell transformation can also be used and include but are not limited to introduction of DNA into plants by direct DNA transfer into pollen (Zhou et al., Methods in Enzymology, 101:433, (1983); Hess et al., Intern Rev. Cytol., 107:367, (1987); Luo et al., Plant Mol Biol. Reporter, 6:165, (1988), all of which the entirety is herein incorporated by reference), by direct injection of DNA into reproductive organs of a plant (Pena et al., Nature, 325:274, (1987), the entirety of which is herein incorporated by reference), or by direct injection of DNA into the cells of immature embryos followed by the rehydration of dessicated embryos (Neuhaus et al., Theor. Appl. Genet., 75:30, (1987), the entirety of which is herein incorporated by reference).

[0214] The regeneration, development, and cultivation of plants from single plant protoplast transformants or from various transformed explants is well known in the art (Weissbach and Weissbach, In: Methods for Plant Molecular Biology, (Eds.), Academic Press, Inc. San Diego, Calif., (1988), the entirety of which is herein incorporated by reference). This regeneration and growth process typically includes the steps of selection of transformed cells, culturing those individualized cells through the usual stages of embryonic development through the rooted plantlet stage. Transgenic embryos and seeds are similarly regenerated. The resulting transgenic rooted shoots are thereafter planted in an appropriate plant growth medium such as soil.

[0215] The development or regeneration of plants containing the foreign, exogenous gene that encodes a protein of interest is well known in the art. Preferably, the regenerated plants are self-pollinated to provide homozygous transgenic plants, as discussed before. Otherwise, pollen obtained from the regenerated plants is crossed to seed-grown plants of agronomically important lines. Conversely, pollen from plants of these important lines is used to pollinate regenerated plants. A transgenic plant of the present invention containing a desired polypeptide is cultivated using methods well known to one skilled in the art.

[0216] There are a variety of methods for the regeneration of plants from plant tissue. The particular method of regeneration will depend on the starting plant tissue and the particular plant species to be regenerated.

[0217] Methods for transforming dicots, primarily by use of Agrobacterium tumefaciens, and obtaining transgenic plants have been published for cotton (U.S. Pat. No. 5,004,863, U.S. Pat. No. 5,159,135, U.S. Pat. No. 5,518,908, all of which the entirety is herein incorporated by reference); soybean (U.S. Pat. No. 5,569,834, U.S. Pat. No. 5,416,011, McCabe et al., Biotechnology 6:923, (1988), Christou et al., Plant Physiol., 87:671-674 (1988), all of which the entirety is herein incorporated by reference); Brassica ( U.S. Pat. No. 5,463,174, the entirety of which is herein incorporated by reference); peanut (Cheng et al., Plant Cell Rep. 15: 653-657 (1996), McKently et al., Plant Cell Rep. 14:699-703 (1995), all of which the entirety is herein incorporated by reference); papaya (Yang et al., (1996), the entirety of which is herein incorporated by reference); pea (Grant et al., Plant Cell Rep. 15:254-258, (1995), the entirety of which is herein incorporated by reference).

[0218] Transformation of monocotyledons using electroporation, particle bombardment, and Agrobacterium have also been reported. Transformation and plant regeneration have been achieved in asparagus (Bytebier et al., Proc. Natl. Acad. Sci. USA 84:5345, (1987), the entirety of which is herein incorporated by reference); barley (Wan and Lemaux, Plant Physiol 104:37, (1994), the entirety of which is herein incorporated by reference); maize (Rhodes et al., Science 240: 204, (1988), Gordon-Kamm et al., Plant Cell, 2:603, (1990), Fromm et al., Bio/Technology 8:833, (1990), Koziel et al., Bio/Technology 11:194, (1993), Armstrong et al., Crop Science 35:550-557, (1995), all of which the entirety is herein incorporated by reference); oat (Somers et al., Biol/Technology, 10:1589, (1992), the entirety of which is herein incorporated by reference); orchardgrass (Horn et al., Plant Cell Rep. 7:469, (1988), the entirety of which is herein incorporated by reference); rice (Toriyama et al., Theor Appl. Genet. 205:34, (1986); Park et al., Plant Mol. Biol., 32: 1135-1148, (1996); Abediniaetal., Aust. J. Plant Physiol. 24:133-141, (1997); Zhang and Wu, Theor. Appl. Genet. 76:835, (1988); Zhang et al. Plant Cell Rep. 7:379, (1988); Battraw and Hall, Plant Sci. 86:191-202, (1992); Christou et al., Bio/Technology 9:957, (1991), all of which the entirety is herein incorporated by reference); sugarcane (Bower and Birch, Plant J. 2:409, (1992), the entirety of which is herein incorporated by reference); tall fescue (Wang et al., Bio/Technology 10:691, (1992), the entirety of which is herein incorporated by reference), and wheat (Vasil et al., Bio/Technology 10:667, (1992), the entirety of which is herein incorporated by reference; U.S. Pat. No. 5,631,152, the entirety of which is herein incorporated by reference.

[0219] Assays for gene expression based on the transient expression of cloned nucleic acid constructs have been developed by introducing the nucleic acid molecules into plant cells by polyethylene glycol treatment, electroporation, or particle bombardment (Marcotte, et al., Nature, 335: 454-457 (1988), the entirety of which is herein incorporated by reference; Marcotte, et al., Plant Cell, 1: 523-532 (1989), the entirety of which is herein incorporated by reference; McCarty, et al., Cell 66: 895-905 (1991), the entirety of which is herein incorporated by reference; Hattori, et al., Genes Dev. 6: 609-618 (1992), the entirety of which is herein incorporated by reference; Goff, et al., EMBO J. 9: 2517-2522 (1990), the entirety of which is herein incorporated by reference). Transient expression systems may be used to functionally dissect gene constructs (See generally, Mailga et al., Methods in Plant Molecular Biology, Cold Spring Harbor Press (1995)).

[0220] Any of the nucleic acid molecules of the present invention may be introduced into a plant cell in a permanent or transient manner in combination with other genetic elements such as vectors, promoters enhancers etc. Further any of the nucleic acid molecules of the present invention may be introduced into a plant cell in a manner that allows for over expression of the protein or fragment thereof encoded by the nucleic acid molecule.

[0221] Cosuppression is the reduction in expression levels, usually at the level of RNA, of a particular endogenous gene or gene family by the expression of a homologous sense construct that is capable of transcribing mRNA of the same strandedness as the transcript of the endogenous gene (Napoli et al., Plant Cell 2: 279-289 (1990), the entirety of which is herein incorporated by reference; van der Krol et al., Plant Cell 2: 291-299 (1990), the entirety of which is herein incorporated by reference). Cosuppression may result from stable transformation with a single copy nucleic acid molecule that is homologous to a nucleic acid sequence found with the cell (Prolls and Meyer, Plant J. 2:465-475 (1992), the entirety of which is herein incorporated by reference) or with multiple copies of a nucleic acid molecule that is homologous to a nucleic acid sequence found with the cell (Mittlesten et al., Mol. Gen. Genet. 244: 325-330 (1994), the entirety of which is herein incorporated by reference). Genes, even though different, linked to homologous promoters may result in the cosuppression of the linked genes (Vaucheret, C.R. Acad. Sci. III 316: 1471-1483 (1993), the entirety of which is herein incorporated by reference).

[0222] This technique has, for example been applied to generate white flowers from red petunia and tomatoes that do not ripen on the vine. Up to 50% of petunia transformants that contained a sense copy of the chalcone synthase (CHS) gene produced white flowers or floral sectors; this was as a result of the post-transcriptional loss of mRNA encoding CHS (Flavell, Proc. Natl. Acad. Sci. (U.S.A.) 91:3490-3496 (1994)), the entirety of which is herein incorporated by reference). Cosuppression may require the coordinate transcription of the transgene and the endogenous gene, and can be reset by a developmental control mechanism (Jorgensen, Trends Biotechnol, 8:340344 (1990), the entirety of which is herein incorporated by reference; Meins and Kunz, In: Gene Inactivation and Homologous Recombination in Plants (Paszkowski, J., ed.), pp. 335-348. Kluwer Academic, Netherlands (1994), the entirety of which is herein incorporated by reference).

[0223] It is understood that one or more of the nucleic acids of the present invention including those comprising SEQ ID NO:1 through SEQ ID NO:32236 or complement thereof or fragments of either or other nucleic acid molecules of the present invention may be introduced into a plant cell and transcribed using an appropriate promoter with such transcription resulting in the co-suppression of an endogenous protein.

[0224] Antisense approaches are a way of preventing or reducing gene function by targeting the genetic material (Mol et al., FEBS Lett. 268: 427-430 (1990), the entirety of which is herein incorporated by reference). The objective of the anti sense approach is to use a sequence complementary to the target gene to block its expression and create a mutant cell line or organism in which the level of a single chosen protein is selectively reduced or abolished. Antisense techniques have several advantages over other ‘reverse genetic’ approaches. The site of inactivation and its developmental effect can be manipulated by the choice of promoter for antisense genes or by the timing of external application or microinjection. Antisense can manipulate its specificity by selecting either unique regions of the target gene or regions where it shares homology to other related genes (Hiatt et al., In Genetic Engineering, Setlow (ed.), Vol. 11, New York: Plenum 49-63 (1989), the entirety of which is herein incorporated by reference).

[0225] The principle of regulation by antisense RNA is that RNA that is complementary to the target mRNA is introduced into cells, resulting in specific RNA:RNA duplexes being formed by base pairing between the antisense substrate and the target mRNA (Green et al., Annu. Rev. Biochem. 55: 569-597 (1986), the entirety of which is herein incorporated by reference). Under one embodiment, the process involves the introduction and expression of an antisense gene sequence. Such a sequence is one in which part or all of the normal gene sequences are placed under a promoter in inverted orientation so that the ‘wrong’ or complementary strand is transcribed into a noncoding antisense RNA that hybridizes with the target mRNA and interferes with its expression (Takayama and Inouye, Crit. Rev. Biochem. Mol. Biol. 25: 155-184 (1990), the entirety of which is herein incorporated by reference). An antisense vector is constructed by standard procedures and introduced into cells by transformation, transfection, electroporation, microinjection, or by infection, etc. The type of transformation and choice of vector will determine whether expression is transient or stable. The promoter used for the antisense gene may influence the level, timing, tissue, specificity, or inducibility of the antisense inhibition.

[0226] It is understood that protein synthesis activity in a plant cell may be reduced or depressed by growing a transformed plant cell containing a nucleic acid molecule whose non-transcribed strand encodes a protein or fragment thereof.

[0227] Antibodies have been expressed in plants (Hiatt et al., Nature 342:76-78 (1989), the entirety of which is herein incorporated by reference; Conrad and Fielder, Plant Mol. Biol. 26: 1023-1030 (1994), the entirety of which is herein incorporated by reference) cytoplasmic expression of a scFv (single-chain Fv antibodies) has been reported to delay infection by artichoke mottled crinkle virus. Transgenic plants that express antibodies directed against endogenous proteins may exhibit a physiological effect (Philips et al., EMBO J. 16: 4489-4496 (1997), the entirety of which is herein incorporated by reference; Marion-Poll, Trends in Plant Science 2: 447-448 (1997), the entirety of which is herein incorporated by reference). For example, expressed anti-abscisic antibodies reportedly result in a general perturbation of seed development (Philips et al., EMBO J. 16: 4489-4496 (1997)).

[0228] Antibodies that are catalytic may also be expressed in plants (abzymes). The principle behind abzymes is that since antibodies may be raised against many molecules, this recognition ability can be directed toward generating antibodies that bind transition states to force a chemical reaction forward (Persidas, Nature Biotechnology 15:1313-1315 (1997), the entirety of which is herein incorporated by reference; Baca et al., Ann. Rev. Biophys. Biomol. Struct. 26:461-493 (1997), the entirety of which is herein incorporated by reference). The catalytic abilities of abzymes may be enhanced by site directed mutagenesis. Examples of abzymes are, for example, set forth in U.S. Pat. No. 5,658,753; U.S. Pat. No. 5,632,990; U.S. Pat. No. 5,631,137; U.S. Pat. No. 5,602,015; U.S. Pat. No. 5,559,538; U.S. Pat. No. 5,576,174; U.S. Pat. No. 5,500,358; U.S. Pat. No. 5,318,897; U.S. Pat. No. 5,298,409; U.S. Pat. No. 5,258,289 and U.S. Pat. No. 5,194,585, all of which are herein incorporated in their entirety.

[0229] It is understood that any of the antibodies of the present invention may be expressed in plants and that such expression can result in a physiological effect. It is also understood that any of the expressed antibodies may be catalytic.

[0230] In addition to the above discussed procedures, practitioners are familiar with the standard resource materials which describe specific conditions and procedures for the construction, manipulation and isolation of macromolecules (e.g., DNA molecules, plasmids, etc.), generation of recombinant organisms and the screening and isolating of clones, (see for example, Sambrook et al., Molecular Cloning: A Laboratory Manual, Cold Spring Harbor Press (1989); Mailga et al., Methods in Plant Molecular Biology, Cold Spring Harbor Press (1995), the entirety of which is herein incorporated by reference; Birren et al., Genome Analysis: Analyzing DNA, 1, Cold Spring Harbor, N.Y., the entirety of which is herein incorporated by reference).

[0231] The nucleotide sequence provided in SEQ ID NO:1, through SEQ ID NO:32236 or fragment thereof, or complement thereof, or a nucleotide sequence at least 90% identical, preferably 95%, identical even more preferably 99% or 100% identical to the sequence provided in SEQ ID NO:1 through SEQ ID NO:32236 or fragment thereof, or complement thereof, can be “provided” in a variety of mediums to facilitate use fragment thereof. Such a medium can also provide a subset thereof in a form that allows a skilled artisan to examine the sequences.

[0232] In one application of this embodiment, a nucleotide sequence of the present invention can be recorded on computer readable media. As used herein, “computer readable media” refers to any medium that can be read and accessed directly by a computer. Such media include, but are not limited to: magnetic storage media, such as floppy discs, hard disc, storage medium, and magnetic tape: optical storage media such as CD-ROM; electrical storage media such as RAM and ROM; and hybrids of these categories such as magnetic/optical storage media. A skilled artisan can readily appreciate how any of the presently known computer readable mediums can be used to create a manufacture comprising computer readable medium having recorded thereon a nucleotide sequence of the present invention.

[0233] As used herein, “recorded” refers to a process for storing information on computer readable medium. A skilled artisan can readily adopt any of the presently known methods for recording information on computer readable medium to generate media comprising the nucleotide sequence information of the present invention. A variety of data storage structures are available to a skilled artisan for creating a computer readable medium having recorded thereon a nucleotide sequence of the present invention. The choice of the data storage structure will generally be based on the means chosen to access the stored information. In addition, a variety of data processor programs and formats can be used to store the nucleotide sequence information of the present invention on computer readable medium. The sequence information can be represented in a word processing text file, formatted in commercially-available software such as WordPerfect and Microsoft Word, or represented in the form of an ASCII file, stored in a database application, such as DB2, Sybase, Oracle, or the like. A skilled artisan can readily adapt any number of data processor structuring formats (e.g. text file or database) in order to obtain computer readable medium having recorded thereon the nucleotide sequence information of the present invention.

[0234] By providing one or more of nucleotide sequences of the present invention, a skilled artisan can routinely access the sequence information for a variety of purposes. Computer software is publicly available which allows a skilled artisan to access sequence information provided in a computer readable medium. The examples which follow demonstrate how software which implements the BLAST (Altschul et al., J. Mol. Biol. 215:403-410 (1990)) and BLAZE (Brutlag et al., Comp. Chem. 17:203-207 (1993), the entirety of which is herein incorporated by reference) search algorithms on a Sybase system can be used to identify open reading frames (ORFs) within the genome that contain homology to ORFs or proteins from other organisms. Such ORFs are protein-encoding fragments within the sequences of the present invention and are useful in producing commercially important proteins such as enzymes used in amino acid biosynthesis, metabolism, transcription, translation, RNA processing, nucleic acid and a protein degradation, protein modification, and DNA replication, restriction, modification, recombination, and repair.

[0235] The present invention further provides systems, particularly computer-based systems, which contain the sequence information described herein. Such systems are designed to identify commercially important fragments of the nucleic acid molecule of the present invention. As used herein, “a computer-based system” refers to the hardware means, software means, and data storage means used to analyze the nucleotide sequence information of the present invention. The minimum hardware means of the computer-based systems of the present invention comprises a central processing unit (CPU), input means, output means, and data storage means. A skilled artisan can readily appreciate that any one of the currently available computer-based system are suitable for use in the present invention.

[0236] As indicated above, the computer-based systems of the present invention comprise a data storage means having stored therein a nucleotide sequence of the present invention and the necessary hardware means and software means for supporting and implementing a search means. As used herein, “data storage means” refers to memory that can store nucleotide sequence information of the present invention, or a memory access means which can access manufactures having recorded thereon the nucleotide sequence information of the present invention. As used herein, “search means” refers to one or more programs which are implemented on the computer-based system to compare a target sequence or target structural motif with the sequence information stored within the data storage means. Search means are used to identify fragments or regions of the sequence of the present invention that match a particular target sequence or target motif. A variety of known algorithms are disclosed publicly and a variety of commercially available software for conducting search means are available and can be used in the computer-based systems of the present invention. Examples of such software include, but are not limited to, MacPattern (EMBL), BLASTIN and BLASTIX (NCBIA). One of the available algorithms or implementing software packages for conducting homology searches can be adapted for use in the present computer-based systems.

[0237] The most preferred sequence length of a target sequence is from about 10 to 100 amino acids or from about 30 to 300 nucleotide residues. However, it is well recognized that during searches for commercially important fragments of the nucleic acid molecules of the present invention, such as sequence fragments involved in gene expression and protein processing, may be of shorter length.

[0238] As used herein, “a target structural motif,” or “target motif,” refers to any rationally selected sequence or combination of sequences in which the sequences or sequence(s) are chosen based on a three-dimensional configuration which is formed upon the folding of the target motif. There are a variety of target motifs known in the art. Protein target motifs include, but are not limited to, enzymatic active sites and signal sequences. Nucleic acid target motifs include, but are not limited to, promoter sequences, cis elements, hairpin structures and inducible expression elements (protein binding sequences).

[0239] Thus, the present invention further provides an input means for receiving a target sequence, a data storage means for storing the target sequences of the present invention sequence identified using a search means as described above, and an output means for outputting the identified homologous sequences. A variety of structural formats for the input and output means can be used to input and output information in the computer-based systems of the present invention. A preferred format for an output means ranks fragments of the sequence of the present invention by varying degrees of homology to the target sequence or target motif. Such presentation provides a skilled artisan with a ranking of sequences which contain various amounts of the target sequence or target motif and identifies the degree of homology contained in the identified fragment.

[0240] A variety of comparing means can be used to compare a target sequence or target motif with the data storage means to identify sequence fragments sequence of the present invention. For example, implementing software which implement the BLAST and BLAZE algorithms (Altschul et al., J. Mol. Biol. 215:403-410 (1990)) can be used to identify open frames within the nucleic acid molecules of the present invention. A skilled artisan can readily recognize that any one of the publicly available homology search programs can be used as the search means for the computer-based systems of the present invention. Having now generally described the invention, the same will be more readily understood through reference to the following examples which are provided by way of illustration, and are not intended to be limiting of the present invention, unless specified.

### EXAMPLE 1

[0241] The normalized cDNA libraries LIB3115 and LIB3116 are generated from maize (RX601, Asgrow Seed Company, Des Moines, Iowa U.S.A.) pooled leaf tissue harvested from field grown plants at Asgrow research stations. Leaves are harvested at antithesis from open pollinated plants in a field (multiple row) setting. The ear leaves from 10-12 plants are harvested, pooled, frozen in liquid nitrogen and then frozen at −80° C. where they are stored until RNA preparation. RNA is prepared and libraries are constructed as in Example 2.

[0242] The normalized library LIB3115 is prepared from single-stranded plasmid cDNA and the normalized library LIB3116, from double-stranded plasmid cDNA. Single-stranded plasmid cDNA or double-stranded plasmid cDNA representing approximately 1×10⁶ colony forming units is isolated using standard protocols and used as target. Biotinylated genomic corn DNA is used as driver. The biotinylated genomic corn DNA is mixed with the single stranded plasmid cDNA or double stranded plasmid cDNA in a 1:1 molar ratio and allowed to hybridize. Genomic DNA-plasmid cDNA hybrids are captured on Dynabeads M280 streptavidin. The dynabeads with captured hybrids are collected with a magnet. Captured hybrids are eluted in water. The resulting clones are subjected to a second round of hybridization identical to the first. SEQ ID NO: 1 through SEQ ID NO: 2177 are from LIB3115. SEQ ID NO: 2178 through SEQ ID NO: 4013 are from LIB3116.

[0243] The cDNA libraries LIB3117 and LIB3118 are generated from maize (RX601, Asgrow Seed Company, Des Moines, Iowa U.S.A ) pooled kernels from plants at 15 to 20 days after pollination. Samples are collected from field grown material at Asgrow research stations. Whole kernels from hand pollinated (control pollination) plants are harvested as whole ears and immediately frozen on dry ice. Kernels from each of 10-12 ears from each location are pooled and ground together in liquid nitrogen. The harvested tissue is then stored at −80° C. until RNA preparation. RNA is prepared and libraries are constructed as in Example 2.

[0244] The normalized library LIB3117 is prepared from single-stranded plasmid cDNA and the normalized library LIB3118, from double-stranded plasmid cDNA. Single-stranded plasmid cDNA or double-stranded plasmid cDNA representing approximately 1×10⁶ colony forming units is isolated using standard protocols and used as target. Biotinylated genomic corn DNA is used as driver. The biotinylated genomic corn DNA is mixed with the single stranded plasmid cDNA or double stranded plasmid cDNA in a 1:1 molar ratio and allowed to hybridize. Genomic DNA-plasmid cDNA hybrids are captured on Dynabeads M280 streptavidin. The dynabeads with captured hybrids are collected with a magnet. Captured hybrids are eluted in water. The resulting clones are subjected to a second round of hybridization identical to the first. SEQ ID NO: 4014 through SEQ ID NO: 4629 are from LIB3117. SEQ ID NO: 4630 through SEQ ID NO: 7156 are from LIB3118.

[0245] The cDNA library (LIB3150) is prepared from endosperm harvested from 5-8 days after pollination maize plants which are beyond the V10 stage. Zea mays genotype H99 (USDA Maize Genetic Stock Center, Urbana, Ill. U.S.A.) seeds are planted at a depth of approximately 3 cm in soil into 2″-3″ peat pots containing Metro 200 growing medium. After 2-3 weeks growth, they are transplanted into 10″ pots containing the same. Plants are watered daily before transplantation and about 3 times a week after transplantation. Peters 15-16-17 fertilizer is applied three times per week after transplanting at a strength of 150 ppm N. Two to three times during the lifetime of the plant, from transplanting to flowering, a total of 900 mg Fe is added to each pot. Corn plants are grown in a green house in 15 hr day/9 hr night cycles. The daytime temperature is 80 F and the night time temperature is 70 F. Lighting is provided by 1000 W sodium vapor lamps. Whole kernels are collected at 5, 6, 7, and 8 days after pollination and then dissected into embryos and endosperms. After dissection, the endosperm is then immediately frozen in liquid nitrogen and then stored at −80° C. until RNA preparation. RNA preparation and library construction is as in Example 2. SEQ ID NO: 7157 through SEQ ID NO: 16535 are from LIB 3150.

[0246] The cDNA library (LIB3151) is prepared from endosperm harvested from 18 days after pollination maize plants which are beyond the V10 stage. Zea mays genotype H99 (USDA Maize Genetic Stock Center, Urbana, Ill. U.S.A.) seeds are planted at a depth of approximately 3 cm in soil into 2″-3″ peat pots containing Metro 200 growing medium. After 2-3 weeks growth, they are transplanted into 10″ pots containing the same. Plants are watered daily before transplantation and ˜3 times a week after transplantation. Peters 15-16-17 fertilizer is applied three times per week after transplanting at a strength of 150 ppm N. Two to three times during the lifetime of the plant, from transplanting to flowering, a total of 900 mg Fe is added to each pot. Corn plants are grown in a green house in 15 hr day/9 hr night cycles. The daytime temperature is 80 F and the night time temperature is 70 F. Lighting is provided by 1000 W sodium vapor lamps. Whole kernels are collected at 18 days after pollination and then dissected into embryos and endosperms. After dissection, the endosperm is then immediately frozen in liquid nitrogen and then stored at −80° C. until RNA preparation. RNA is prepared and library construction is as in Example 2. SEQ ID NO: 16536 through SEQ ID NO: 20787 are from LIB3151.

[0247] The cDNA library (LIB3152) is prepared from endosperms harvested from 26 DAP maize plants which are beyond the V10 stage. Zea mays genotype H99 (USDA Maize Genetic Stock Center, Urbana, Ill. U.S.A.) seeds are planted at a depth of approximately 3 cm in soil into 2″-3″ peat pots containing Metro 200 growing medium. After 2-3 weeks growth, they are transplanted into 10″ pots containing the same. Plants are watered daily before transplantation and ˜3 times a week after transplantation. Peters 15-16-17 fertilizer is applied three times per week after transplanting at a strength of 150 ppm N. Two to three times during the lifetime of the plant, from transplanting to flowering, a total of 900 mg Fe is added to each pot. Corn plants are grown in a green house in 15 hr day/9 hr night cycles. The daytime temperature is 80 F and the night time temperature is 70 F. Lighting is provided by 1000 W sodium vapor lamps. Whole kernels are collected at 26 days after pollination and then dissected into embryos and endosperms. After dissection, the endosperms are then immediately frozen in liquid nitrogen and then stored at −80° C. until RNA preparation. RNA is prepared and library construction is as in Example 2. SEQ ID NO: 20788 through SEQ ID NO: 24930 are from LIB3152.

[0248] The cDNA library (LIB3180) is prepared from kernels harvested from 10 DAP maize plants which are beyond the V10 stage. Zea mays genotype H99 (USDA Maize Genetic Stock Center, Urbana, Ill. U.S.A.) seeds are planted at a depth of approximately 3 cm in soil into 2″-3″ peat pots containing Metro 200 growing medium. After 2-3 weeks growth, they are transplanted into 10″ pots containing the same. Plants are watered daily before transplantation and ˜3 times a week after transplantation. Peters 15-16-17 fertilizer is applied three times per week after transplanting at a strength of 150 ppm N. Two to three times during the lifetime of the plant, from transplanting to flowering, a total of 900 mg Fe is added to each pot. Corn plants are grown in a green house in 15 hr day/9 hr night cycles. The daytime temperature is 80 F and the night time temperature is 70 F. Lighting is provided by 1000 W sodium vapor lamps. Kernels are collected at 10 days after pollination, immediately frozen in liquid nitrogen and then stored at −80° C. until RNA preparation. RNA is prepared and library construction is as in Example 2. SEQ ID NO: 26366 through SEQ ID NO: 30743 are from LIB3180.

[0249] The cDNA library (LIB3152) is prepared from endosperms harvested from 26 DAP maize plants which are beyond the V10 stage. Zea mays genotype H99 (USDA Maize Genetic Stock Center, Urbana, Ill. U.S.A.) seeds are planted at a depth of approximately 3 cm in soil into 2″-3″ peat pots containing Metro 200 growing medium. After 2-3 weeks growth, they are transplanted into 10″ pots containing the same. Plants are watered daily before transplantation and ˜3 times a week after transplantation. Peters 15-16-17 fertilizer is applied three times per week after transplanting at a strength of 150 ppm N. Two to three times during the lifetime of the plant, from transplanting to flowering, a total of 900 mg Fe is added to each pot. Corn plants are grown in a green house in 15 hr day/9 hr night cycles. The daytime temperature is 80 F and the night time temperature is 70 F. Lighting is provided by 1000 W sodium vapor lamps. Whole kernels are collected at 26 days after pollination and then dissected into embryos and endosperm. After dissection, the endosperm is then immediately frozen in liquid nitrogen and then stored at −80° C. until RNA preparation. RNA is prepared and library construction is as in Example 2. SEQ ID NO: 20788 through SEQ ID NO: 24930 are from LIB3152.

[0250] The subtractive cDNA library LIB3153 is generated by subtracting driver cDNA, which is prepared from kernels harvested from 15 DAP maize plants, from target cDNA, which is prepared from endosperms harvested from 5-8 day after pollination (DAP) maize plants. Zea mays genotype H99 (USDA Maize Genetic Stock Center, Urbana, Ill. U.S.A.) seeds are planted at a depth of approximately 3 cm in soil into 2″-3″ peat pots containing Metro 200 growing medium. After 2-3 weeks growth, they are transplanted into 10″ pots containing the same. Plants are watered daily before transplantation and about 3 times a week after transplantation. Peters 15-16-17 fertilizer is applied three times per week after transplanting at a strength of 150 ppm N. Two to three times during the lifetime of the plant, from transplanting to flowering, a total of 900 mg Fe is added to each pot. Corn plants are grown in a green house in 15 hr day/9 hr night cycles. The daytime temperature is 80 F and the night time temperature is 70 F. Lighting is provided by 1000 W sodium vapor lamps. Whole kernels are collected at 5 to 8 and 15 days after pollination. The 5 to 8 DAP kernels are dissected to separate endosperms from embryos and the harvested endosperms are immediately frozen in liquid nitrogen and then stored at −80° C. until RNA preparation. The 15 DAP kernels are immediately frozen in liquid nitrogen and then stored at −80° C. until RNA preparation. The RNA is purified from the stored tissue and the subtractive cDNA library is constructed as described in Example 2. SEQ ID NO: 24931 through SEQ ID NO: 25680 are from LIB3153.

[0251] The subtractive cDNA library LIB3154 is generated by subtracting driver cDNA, which is prepared from endosperms harvested from 5 to 8 DAP maize plants, from target cDNA, which is prepared from endosperm harvested from 18 day after pollination (DAP) maize plants. Zea mays genotype H99 (USDA Maize Genetic Stock Center, Urbana, Ill. U.S.A.) seeds are planted at a depth of approximately 3 cm in soil into 2″-3″ peat pots containing Metro 200 growing medium. After 2-3 weeks growth, they are transplanted into 10″ pots containing the same. Plants are watered daily before transplantation and about 3 times a week after transplantation. Peters 15-16-17 fertilizer is applied three times per week after transplanting at a strength of 150 ppm N. Two to three times during the lifetime of the plant, from transplanting to flowering, a total of 900 mg Fe is added to each pot. Corn plants are grown in a green house in 15 hr day/9 hr night cycles. The daytime temperature is 80 F and the night time temperature is 70 F. Lighting is provided by 1000 W sodium vapor lamps. Whole kernels are collected both at 5 to 8 DAP and at 18 DAP and then dissected to separate endosperms from embryos. The harvested 5 to 8 DAP and 18 DAP endosperms are immediately frozen in liquid nitrogen and then stored at −80° C. until RNA preparation. The RNA is purified from the stored tissue and the subtractive cDNA library is constructed as described in Example 2. SEQ ID NO: 25681 through SEQ ID NO: 26365 are from LIB3154.

[0252] The subtractive cDNA library LIB3181 is generated by subtracting driver cDNA, which is prepared from kernels harvested from 15 DAP maize plants, from target cDNA, which is prepared from endosperms harvested from 26 day after pollination (DAP) maize plants. Zea mays genotype H99 (USDA Maize Genetic Stock Center, Urbana, Ill. U.S.A.) seeds are planted at a depth of approximately 3 cm in soil into 2″-3″ peat pots containing Metro 200 growing medium. After 2-3 weeks growth, they are transplanted into 10″ pots containing the same. Plants are watered daily before transplantation and about 3 times a week after transplantation. Peters 15-16-17 fertilizer is applied three times per week after transplanting at a strength of 150 ppm N. Two to three times during the lifetime of the plant, from transplanting to flowering, a total of 900 mg Fe is added to each pot. Corn plants are grown in a green house in 15 hr day/19 hr night cycles. The daytime temperature is 80 F and the night time temperature is 70 F. Lighting is provided by 1000 W sodium vapor lamps. Whole kernels are collected at 15 and 26 DAP. The 15 DAP kernels are immediately frozen in liquid nitrogen and then stored at −80° C. until RNA preparation. The harvested 26 DAP kernel is dissected to separate endosperms from embryos and the endosperms are immediately frozen in liquid nitrogen and then stored at −80° C. until RNA preparation. The RNA is purified from the stored tissue and the subtractive cDNA library is constructed as described in Example 2. SEQ ID NO: 30744 through SEQ ID NO: LIB31501 are from LIB3181.

[0253] The subtractive cDNA library LIB3182 is generated by subtracting driver cDNA, which is prepared from endosperm harvested from 26 DAP maize plants, from target cDNA, which is prepared from endosperm harvested from 18 day after pollination (DAP) maize plants. Zea mays genotype H99 (USDA Maize Genetic Stock Center, Urbana, Ill. U.S.A.) seeds are planted at a depth of approximately 3 cm in soil into 2″-3″ peat pots containing Metro 200 growing medium. After 2-3 weeks growth, they are transplanted into 10″ pots containing the same. Plants are watered daily before transplantation and about 3 times a week after transplantation. Peters 15-16-17 fertilizer is applied three times per week after transplanting at a strength of 150 ppm N. Two to three times during the lifetime of the plant, from transplanting to flowering, a total of 900 mg Fe is added to each pot. Corn plants are grown in a green house in 15 hr day/9 hr night cycles. The daytime temperature is 80 F and the night time temperature is 70 F. Lighting is provided by 1000 W sodium vapor lamps. Whole kernels are collected both at 18 and 26 DAP and then dissected to separate endosperm from embryos. The harvested 18 DAP and 26 DAP endosperm is immediately frozen in liquid nitrogen and then stored at −80° C. until RNA preparation. The RNA is purified from the stored tissue and the subtractive cDNA library is constructed as described in Example 2. SEQ ID NO: 31502 through SEQ ID NO: LIB32236 are from LIB3182.

### EXAMPLE 2

[0254] The stored RNA is purified using Trizol reagent from Life Technologies (Gibco BRL, Life Technologies, Gaithersburg, Md. U.S.A.), essentially as recommended by the manufacturer. Poly A+RNA (mRNA) is purified using magnetic oligo dT beads essentially as recommended by the manufacturer (Dynabeads, Dynal Corporation, Lake Success, N.Y. U.S.A.).

[0255] Construction of plant cDNA libraries is well-known in the art and a number of cloning strategies exist. A number of cDNA library construction kits are commercially available. The Superscript™ Plasmid System for cDNA synthesis and Plasmid Cloning (Gibco BRL, Life Technologies, Gaithersburg, Md. U.S.A.) is used, following the conditions suggested by the manufacturer.

### EXAMPLE 3

[0256] The cDNA libraries are plated on LB agar containing the appropriate antibiotics for selection and incubated at 37° for a sufficient time to allow the growth of individual colonies. Single selective media colonies are individually placed in each well of a 96-well microtiter plates containing LB liquid including the selective antibiotics. The plates are incubated overnight at approximately 37° C. with gentle shaking to promote growth of the cultures. The plasmid DNA is isolated from each clone using Qiaprep plasmid isolation kits, using the conditions recommended by the manufacturer (Qiagen Inc., Santa Clara, Calif. U.S.A.).

[0257] Template plasmid DNA clones are used for subsequent sequencing. For sequencing, the ABI PRISM dRhodamine Terminator Cycle Sequencing Ready Reaction Kit with AmpliTaq® DNA Polymerase, FS, is used (PE Applied Biosystems, Foster City, Calif. U.S.A.).

1. A substantially purified nucleic acid molecule that encodes a maize protein or fragment thereof comprising a nucleic acid sequence selected from the group consisting of SEQ ID NO: 6 through SEQ ID NO 4013.

2. A substantially purified maize protein or fragment thereof, wherein said maize protein is encoded by a nucleic acid molecule that comprises a nucleic acid sequence selected from the group consisting of SEQ ID NO: 6 through SEQ ID NO 4013.

3. A transformed plant having a nucleic acid molecule which comprises:
(a) an exogenous promoter region which functions in a plant cell to cause the production of a mRNA molecule;
(b) a structural nucleic acid molecule comprising a nucleic acid sequence selected from the group consisting of SEQ ID NO: 6 through SEQ ID NO 4013 or complements thereof;
(c) a 3′ non-translated sequence that functions in said plant cell to cause termination of transcription and addition of polyadenylated ribonucleotides to a 3′ end of said mRNA molecule.

4. The transformed plant according to claim 3, wherein said structural nucleic acid molecule is a complement of any of the nucleic acid sequences of SEQ ID NO: 6 through SEQ ID NO 4013.

5. The transformed plant according to claim 4, wherein said plant is maize or soybean.

6. The transformed plant according to claim 4, wherein said plant is maize.

7. The transformed plant according to claim 4, wherein said plant is soybean.

The application's sequence listing, which the Patent Office published only in electronic form, follows.

SEQUENCE LISTING (32236 sequences)

SEQ ID NO: 1 - DNA, 429 bp, Zea mays
  Clone ID: LIB3115-015-F5-R1A
gtaaccacagccagccaccaccgcgagaacaagtcgcagccaagagaagtcgtcctcgcgcgcgtctcgatctcccagcgaacgtagagcttgccgtgtgccgtgacttccatggagctactccacgccgtcatccatggagctgcgacgacgacgacgaccaccaccaccaccaccacgagcagcagcgccaccgtcaccagcggcgacgagggcgcccacctgccccaggggtgggccaagaagaagcgctcgcggcgccagcgtctcagaggaggagaacctcgcgctgtgcctgctcatgctctcccgcggcgaccgccaccgcgtccaggcgccggcgccgccggtcccgtccgcggagttcaggtgctccgtctgcgggaaatccttcggctcctaccaggcgctgggggggcaaaagaccag

SEQ ID NO: 2 - DNA, 413 bp, Zea mays
  Clone ID: LIB3115-031-H5-F1A
agtctgtaaatccattggcatcgtcttctcggcgctctttttgttacatcctccaacaaattatggaccaccatgaaatgaagatctcccttcggctatgctcccgaaaggctaatcccttcaatacaggcgctgaagctccagcgatactacaatgattatacaataggcaccttgctcgatccatggcgcagggtgggctgccaccgtgcctagtacaggacgctctggctggccagcaactgatcatgcataggggcacactgcaggccttattggtcattaaactccatcctgtaggccggtagcgcagaggtccggttcggtgagctggagggcagagttcctgcaccgtgtcgcttgacgttcggacggcaatgggacctggcatatccccagggctggaaccggag

SEQ ID NO: 3 - DNA, 365 bp, Zea mays
  Clone ID: LIB3115-012-Q1-K1-D10
cgatgggtcgattgtggttccagagccactaataccctatatgggtggactagagttgctctgggcaaaattcaagtgaccctctacggtcacccgctgttgtgcttgtggacttagaactgtctggctgaagtaaaagttaaaggaaggtcacttctcactacaaatatacactactgaatttcgtgattgggggcttctgtttcataagcagtcgactactctgatctgatctgcatagcattatactggtcggctactctgatctgcatagcactacaaagcttatgtgcatgcattaggccctctatggttcccaagaatcgagtgacatttaaaagtattctaatactccctacattcta

SEQ ID NO: 4 - DNA, 414 bp, Zea mays
  Clone ID: LIB3115-012-Q1-K1-D11
cggacgcgtgggcggacgcgtggggggaaaagataatacaggaattcaaagatggctacaccggggttcttatatcaaccgatgttcttgctcgaggttttgaccaagcacacgttaaccttgtcatcaactacgacatgccaatcaaatttggtacaagagatgaacctgattatgaggtgtacttgcacagaattggcagagctgggcgctttggccggaaaggtgctgtgttcaacttgctgtgtggtcaaaccgattatgttgtgatgaagaagatcgaagactatttccagcacagtgtgccttatgttcggaattggcaacgtgaaaaatattatgaggctgatctcaaggatgcacgtttacttttaagttaccacggaaacttgtggtgtttttgctgaccctgct

SEQ ID NO: 5 - DNA, 333 bp, Zea mays
  Clone ID: LIB3115-012-Q1-K1-D12
tgataatcttgtccatccttggaaacgagggtccacttgggctctttaagggcgcgatccccggcttcttctggattgctcctcttggagcaatgaactttgcaggctatgagcttgccaagaaggcaatgataaaagatgagaaaaattccagtgagtcaacacgagagatcttgccaagaaagcagtgatcaaccatgcaacttttttattttatttttgggtccatgttgcagagaagcaacagaacatctgcctttttttgatattgggaattacattcccgtagggccttgagatggctgtatagtatacattacatgagaaaagtgc

SEQ ID NO: 6 - DNA, 135 bp, Zea mays
  Clone ID: LIB3115-012-Q1-K1-D3
cgccgccgtggtcgccttcgcgcctgggggcctcgctggtggcgcaccctttcttcgctcctcatccttcgggggccttcctgccgcctgggggcttcctctacctcttccgcgcgtccgaccagcctgtcccct

SEQ ID NO: 7 - DNA, 450 bp, Zea mays
  Clone ID: LIB3115-012-Q1-K1-D5
gggtcgacacgcgttcgccagcgttcgtttgagaagctgccggcgggccgccagctggcgcggtcaactgaagcccgcatcacgtccgcgagatcaaacctccggcgcctagtcctcccggagagctcgcaagcacgccgtcttcaaggaaccaaggccgtaccaagttcaccagcaactgagcgcgctgcgggatccgcggatctgttagaagggttctttgctgtgtccttttcccagtcccccaccctacccgcctagtagctagcttgcctgctctataaatccggcgcgccggattgtaaatggcctcttaaatttgatgtcccctgttgtggaatatagttgtatctctccgcttgctatttttctcattctttaggaacttggaaatctggtaattttgccgggagataactaggatcatcacaaattcgcgttgacaacgcg

SEQ ID NO: 8 - DNA, 189 bp, Zea mays
  Clone ID: LIB3115-012-Q1-K1-D6
cggacgcgtgggctgacacgtgttctgactcgttttcctaccgcttccaccttccaactgagggccgggggtgacttccagtcccctccgcatttctcaccgcctttctttccatgtgaggcatcttctctccttctttctttgttctctccccccattcctcctttgactatcgcacaccttcttttt

SEQ ID NO: 9 - DNA, 336 bp, Zea mays
  Clone ID: LIB3115-012-Q1-K1-E1
cacagcaatccacacaagcacttcgacgtcgcacgggcgctgcacacagacacaccaagcgtgggcaccgatggcttactaccaggaggtggactactgctcggaggaggtgaggtcgggggccccggccggctttggccgccacggaagcggcgttcatcagcacgtcgtcaaggagaagttcgaggaggtcgacacggtctcacgcgccggcgccaaccaccaccaccaccaacatggtcaccacggtggccacggctttcttggtgcgcgagaccatggtctaggaagacattaacaccctgaccggcgaggtccacgagcgcagggagagct

SEQ ID NO: 10 - DNA, 265 bp, Zea mays
  Clone ID: LIB3115-012-Q1-K1-E10
gtcgaagaggacatcaacacctgcaccggcgaggtccacgagcgcagggagagcttcctcgcgagggctaactgagccgcccggcggccggcatccacacccgttcgtgcttgcctgcgtgccttatgtatgtctgtggttgactggttgtgcagggtcatcgtacttggctatcgtacgtgcacgcactcagctcctgtacgaattactacaataagctcgtgacctgaataaaacttcttcgtgtaatattaactaaattttg

SEQ ID NO: 11 - DNA, 452 bp, Zea mays
  unsure at all n locations
  Clone ID: LIB3115-012-Q1-K1-E12
aggaggtgaagaatttcctagagaacgcgtataataatgcgaagaccatccttacgaaacacggtaaagagctacatgctctggccaacgcacttcttgagcacgagaccctcacaggagcccagataacgaacatattggcccaggtacgtaacaaacagcaacaagaacatactgtcgaagcaccacagagggccccagcttccccggcatcaccagctgcggcggcagcagctgcagncgccgcggcagcacagcatgcggcagccaaagctaatggagtggctggtatgggatcttagcacatggagcgccccaccggatgtatatttaaccaaacaagcatagctggttcagcgattgacaagtgatgaaggtcatcggatgtattgtatgctaaactgctgcagcaatagaacacactgattgcgtggaagtactcttccatgtgc

SEQ ID NO: 12 - DNA, 207 bp, Zea mays
  Clone ID: LIB3115-012-Q1-K1-E5
gcgcagcattccacacaagcacttctacgtcacacgggctctgcgcacagacacaccaagcgtctgctcgcgagtggcttactaccaggaggtggactactgctcggaggaggtgaggtcggtggccccggccggcttctgccgccacggctgcggcgtccagcagcacgttctcaaggagaattccgaggaggtcgacacggttta

SEQ ID NO: 13 - DNA, 405 bp, Zea mays
  Clone ID: LIB3115-012-Q1-K1-E7
cggacgcgtgggccactccgcgctagctgaggacggtacagcggcacagaggtgcgacgtacgacgactacgacgcaggcgccacacatggcatcccagctctccgccgccgtgccccggttccacggcctccggggctacgccgcgcccaggtccgtggtggcagcgctggcgttcgtgagggtgggcaggaagaggtcgtcgtcgcaaggcatccgctgcgactacatcggcttcgccaccaaccttgatcattgtgacgacgactaccctgatgctgttcgcggggcgggtcgggctggcgccgtccgtgaaccgcatggcgacggcggggctgaagctggaggcgcgcgactccagcctgatacggtgaccccgtcgggttaccctcgcgacacgctggct

SEQ ID NO: 14 - DNA, 286 bp, Zea mays
  Clone ID: LIB3115-012-Q1-K1-E8
caaatctggacgtcgtcgagctgtggcaccaggacgcggcctgtacattgttcttggggggatctcgttttgaaatacaaaacaaacttgttaatgtcacggagtttaacgagatccactgtggtactctactagtatacaatacacgaagaagaaatgaaccatggtagaaaatgactcacattgactattctggcatcaaataaaaaaaaaaatttaatattatttaatttataaaataaaaaataaattataatatttataaaatattaaaaaaaaatatatg

SEQ ID NO: 15 - DNA, 374 bp, Zea mays
  Clone ID: LIB3115-012-Q1-K1-E9
caaatctgtacgtctaccatctgtttttccattactcggcctgtacatttgttcttggtgggaggctcgttttaaatacaaaacaaactttttaatgtcacggtcttttaccagatccactgtagtactctactagttttcaattcactaataataaaataaccatggtataaatttgacctaccattgacctattctttgttttcttttatttaattgaatttgtattcaatactataattcatcttacttattcttataattaattttaactacttttctattatattatagtatttctctttcattactactaatcattatgtatttgtaccctctctcttttgtagattattccacatttctttttatct

SEQ ID NO: 16 - DNA, 311 bp, Zea mays
  Clone ID: LIB3115-012-Q1-K1-F12
tcggtctactgatacagtccaatctacaactaggtttactggtctcccaccggcgacgtctacgtagtttgaaccactgggcttttgatctgttccgtcaccctcgcttggatcctcggcggcggctccctcctcgtctacaacaccagcgccctcttcggcttatgatattcaatgcatgcgcttcttgcgattcgtcgtgtaaaatcatggtgtctgtctataatctaacctccatggatgctcatccttcgtcatgtaacaattattcagttctacttcttcattacattatttttgattcttttata

SEQ ID NO: 17 - DNA, 435 bp, Zea mays
  Clone ID: LIB3115-012-Q1-K1-F6
ctgactcgttttctgactctttgttctacactttttctgactcgttgtcagcggcgtcttcaatgttgtaaaacccaattgttcaaccctacatgatccaacatgcaatcgcaacatgcatcttaccattatcacccttgttcctccaacaaccgtcatccctattacatcatttacctttggtccatttgttggcacataacatcattgcacaacatcttcaacaacttgtgctagcaaaccttgctgcatactctcaacaacatcagtttcttccattcaaccaacctggcttcatagaactctgctgcttatttgcaacaacaattaccattcatccagctagttgcttcctacccccactaattctttcattcaaccaactaacaacattgaactctgctgcttatttacagcagcaacaacttctaccat

SEQ ID NO: 18 - DNA, 454 bp, Zea mays
  Clone ID: LIB3115-012-Q1-K1-F8
cggacgcgtgggccgtgcttgcaaccttgcaaagcaggcctttgatgaggcaatctccgaactagacagcctgggagaggagtcctacaaggacagcactctgatcatgcagctcctgcgtgacaacttgaccctatggacttccgacaccaacgaggacgccggagatgagatcaaggaagcagctgctgcccccaaagaatccgcccccgagggccagtaagacggatccgatctcccgacctgatgcgtgtctgctgatgtcggggagtttaccaggactgtgccgttcttgatttctgatagcttatcttctagtacacctcgtgttgttctcttcgtcacggcgccggtgcgtgtgcgctgaagctgcctgccattgccattgccgctgtttttaattaagcacacactctagatgttatgcccgcatgctatgtttcgattctcaaag

SEQ ID NO: 19 - DNA, 453 bp, Zea mays
  unsure at all n locations
  Clone ID: LIB3115-012-Q1-K1-F9
cccacgcgtccgcagaagctgggaagaaagtggaagaggaatttagcacttgccctctgtcagtcctaatgatgagcgttaagaacaacaccaagatactgaaagcaaacatggcttgttcagtcgggcagcggcagcagaggggatggggccaatgacggaggcggagaggagaacccatcgatttggtggcgtaagtgggagctcatcgaggccgccaccggccggtccacctcttcaataatcgtccttcatcgcccttcagttgacctgagatctagaatgacacaacagaggggcgagggttgttcagtgctttgacatgtgtgcaactattcaagcacaatggttagatgatatccncattcatcttagattattacattgtggtgttcggcttcttcagtcaagcagcaatcatgcaacatgccttactgtagttttttatcaact

SEQ ID NO: 20 - DNA, 448 bp, Zea mays
  Clone ID: LIB3115-012-Q1-K1-G1
tcggcatccacacaagcacttttacgtcgcacggtctctgtacacaaacacaccaagcgtttgcaccaatggcttactaccaggaagtggactactggccggaagaagggaagtccgtggcccctgccggcttctgcccccacagaagcggggtccaacaacacggcgtcaaagagaagttcgaggaggtcgacacggtcttacgcgccggcgccaaccaccaccaccaccaccatggtcaccactgcggccactgctttttggtgctcgagacacatgtcgaggaggacatcaacacctgcaccggcgaggtccacgaacgcagggagagctttcttgccagggctaactgaaccgcccggcggccggcattcacacccgttctgtgccttcctgcgtgccttatttatatctgtggtttgactgggtgttcaaggtcatcgtactt

SEQ ID NO: 21 - DNA, 137 bp, Zea mays
  Clone ID: LIB3115-012-Q1-K1-G10
acgctatgctccactttctgtttactctcattattgccattcttttgctagtgatcaccagagagatttttaaccatctcttacacctgtaccatctcttcttcctcttgttctaaagcccattatatgtttctcac

SEQ ID NO: 22 - DNA, 247 bp, Zea mays
  Clone ID: LIB3115-012-Q1-K1-G11
acgctatgctccagttcctgttgactctcatcatggccattctttggctagtgatcaccacagatattatcaaccagcacttacacctgagcctcggcagcttcctcttgttctagagcctcgatatgttccgccggccctagatcatcatcatgtgccagagcttcgacatgccccacctgcatattatcgcactttggctccatctggtgattcatactatcggtctgttgagaatctggtgcct

SEQ ID NO: 23 - DNA, 461 bp, Zea mays
  Clone ID: LIB3115-012-Q1-K1-G2
cggacgcgtgggcggcggtgcggctgatgcgccgccgtgctcgtgcggcgccgcgtctgaagcgtcctcgtccgaggagtcgccgctcggcagccccatgtccatactctctccaggcgacacgccggagacggtgaagatgcggctgaagcagtgggcgcaggtggttgcgctgtccatgctgagccgccactgagctctccgggccacggtcgccgctaccttgtcgcattgggaggagagagaaaaaacccattcgagatgcacacaacagcagaaggaaggaatctccggcggtcgcctcaagcagaaaaaagaggaagagaaaaaaaatctgttaaggtttggtcatttggtgggccggcgccgcctttcaacttgctcgtcctatcttggactgctagctaatcatctttcttccaccatgattggatgattccggtggagacaaaacatcatgc

SEQ ID NO: 24 - DNA, 438 bp, Zea mays
  Clone ID: LIB3115-012-Q1-K1-G7
gaagactggctccttcttcaagtagaaagcaactctttgctattgctagctaggcgcgaggccggcttatgatcgaggtgggcgcctccaaaatgcattggagctaacgaacagcgtggggcgatcatggcagcagctgccactacatcttataaacttgccatttttattatccctgatccatgtattactcttaatttgtacgtactacaatacggtatctggccaagctcgatatatagctgtgcatgcaaagctttcgtcgatgtttttttttttgaaagaaacaaggtagaaggactagctgtgctcgttaaattaaaaagaatgtgagccaagactagcataacaaggttgttcaaaataaactacacttagtgtgccaaagaagaacttttattgtcggcctatatttataaattgcatatgttttactcc

SEQ ID NO: 25 - DNA, 302 bp, Zea mays
  Clone ID: LIB3115-012-Q1-K1-G8
aacaccctgacaagctaacaacacacgcagcgccgtgcgccatgaggacaaaaaccaaccatcgcattgtgcccctgctgctggtatccatcacactgatcacacaggccgacgtctgcccatacagcccgacgaccgatgcactgtgccactccgccgaacgacatccttcaacaccatgccatgcaagggaatatctatgtcggcgtgaacaaatacgtgaaactgccccgcgaacacgcataagctaatcgcgtacatggacgcgctcaaagaactaacacacgccataatctggacca

SEQ ID NO: 26 - DNA, 449 bp, Zea mays
  Clone ID: LIB3115-012-Q1-K1-G9
gtgtaacctatccacacgacgcattcgcggttcatcggcctcgcatgaaacgagcgtcgagcggaaggtcgaattctcaactctcaagcaccaacttgaatcgatgcgagcgagcgagcagtgttcgccccccatggccatggtcgcgtccacctccttcgcgtaccacaagccgcgtttcgcggtggtgtgcatgaagaacagggacggccgggacagggagcgggacggcaaggagcacaagcaccccttcaaggtcgtcgagatcacgccgcctccgcggtgcctcggcgtccgctgctttcccaccaacatccactgcggcgagagcgtgaccatcgatgggcatgcgtacacggtgtcggcggtgactcaccggtaccagctgcgcaaggtgcggtactagccgagcgagaagcgcctctacgttctcttcaccggcagataca

SEQ ID NO: 27 - DNA, 448 bp, Zea mays
  Clone ID: LIB3115-012-Q1-K1-H1
gctgtctttgctatcaacatatgagaacattattgtcaaagtgcaaggagatgccacagtggatgctgtggttgctaagatcgacgagctgctgggttctatcctggagaagaaaaatgaaatggcgtccagcacatgagcaaggttaaaatgattgggtgcagtgcacatccgacacgttcatgttatgcaagtcacctctcatgataggaacttcttcaggggtatatatctggatcacatgacgacacgtacttttaatgtaagccagtctcacgtaatggaaaattctccatgtggatggggtcaaagcataggaatttgtttcctccaattattaactgtacgcgaatggaagcgacagatcattcgtaagttgtgagggcctcatagatcatcttgtggtgtacatgtattgctgcttgcttgtgaacatacatgttttgtt

SEQ ID NO: 28 - DNA, 247 bp, Zea mays
  unsure at all n locations
  Clone ID: LIB3115-012-Q1-K1-H11
ggaggaggtgaggtcggtggccccggccggcttctgccgccacggcggcggcgtccagcagggcgtcgtcaaggagaagttcgaggaggtcnacacggtcttacgcgccggtgccaaccaccaccaccaccatggtcaccacggcggccacggcttcgtggtgcgcgagaccagggtcgaagaggacatcaacacctgcaccggcgaggtccacgagcgcagggagagcttccttgccagggttaac

SEQ ID NO: 29 - DNA, 318 bp, Zea mays
  Clone ID: LIB3115-012-Q1-K1-H12
gcgcttcatcagccgcatgatgtctgacgtctacgaccaggccaagcatgtctcttacggccgtgtcatatacgagaacggctacgtcaaactctactgccccgctattggcaaacagcttgctgccgaggagatctctgcgcaggttttgaggaacttggtggacgatacatctaactttcttaacgagaaaactacaaaagcagtggttacagtaccatcatacttcaatgattcacaaatgacatcaactaaagatgctgcccgttttgcacgacttgaagttctccgtattataaatgaaccaactgctgcatc

SEQ ID NO: 30 - DNA, 230 bp, Zea mays
  unsure at all n locations
  Clone ID: LIB3115-012-Q1-K1-H6
ccggctttggccgccacggcggcggcgttcagcagggcgtcgtcaaggagaagttcgaggaggtcnacacggtctcacgcgccggtgccaaccaccaccaccaccatggtcaccacggcggccacggcttcgtggtgcgcgagaccagggtcgaagaggacatcaacacctgcaccggcgaggtccacgagcgcatggagagcttcctcgccagggctaactgagccgcc

SEQ ID NO: 31 - DNA, 293 bp, Zea mays
  Clone ID: LIB3115-012-Q1-K1-H8
cccacgcgtccggtctcaccattctaaacatttttcgaatctttgtttttaaaatcaacactcgtatttattgcctgaatcttctttttacccaaccaatcgaccaaggatactttcaaccagggcggtccctctattggttccatactttcctacgccttcttacgcaaatataactatttctatgtgtgcataattttatttccatgactcttttcttacatctgcttgactagaaaaccccttggctttccaaacataatcactttccataacattgtattttcaccagt

SEQ ID NO: 32 - DNA, 455 bp, Zea mays
  Clone ID: LIB3115-012-Q1-K1-H9
cccacgcgtccggtctgaacattctgcgcgaagattggaagcctgttctcaacatcaacactgggatttatggcctgaatcttctttttacgcaaccaaacgacgaggatcctctgaaccacgaagctgcagttgtccttcgtgacaatccaaagatgtttgaggcaaatgtgagaagagccatggctggaggctacgtcggccaacactatttccaaagatgtgcttgacttgatgtggtggtggcttgaaaacgatcaacagagcccctccccctgtatcagcaccagcgcgcccagctttgtgtgcggaaagtacttctggaagcaaaatccaaaccgttcatggtgtgatactgtgatgcatctgttttgcccgctttgtgatgtgtggtatagtggtggtgcataatgacatggaaatgcttctctaactggatcattcattccataaat

SEQ ID NO: 33 - DNA, 161 bp, Zea mays
  unsure at all n locations
  Clone ID: LIB3115-013-P1-K1-A1
gcgttcgtccagcgtncgcgtttctgtcctttttttttattttgggggggcgggcttcaagttaaaaggggacgggcatttattatttgtgaaaaccaatctttttttttttaactcccaaccaaaaaaaggaattggttactttcctctttatttcttta

SEQ ID NO: 34 - DNA, 195 bp, Zea mays
  unsure at all n locations
  Clone ID: LIB3115-013-P1-K1-A11
gcacacancanatacctacgactccagctctgttcttattgagcacctacctagttatncggggcgtggaactcaagaatgtgtggcttgtgaaaaccgactaccgattgaaccatcatggcggcgtctttttatggcctatacaattagggcagcggcttgggctttagggtcgttcacgccaagatcggctgt

SEQ ID NO: 35 - DNA, 365 bp, Zea mays
  Clone ID: LIB3115-013-P1-K1-A12
tccacgcataaccacggaagatcggggctggatcatctgttaccaccccatgatacgcgctacactgtggggcgtgcattccagctctgtctaccacacaaaaacgaattaaccatccattctactttttatactgacgcgcactattaggctcattcgcaatgctaacagatcatagaaaagcatggcgcgtttcgaaaagagtaccagcaaaatacgcacctttcccacaaatactatatcagcgatccaaaagaggtgcacttacacctaattgatttcatcggccgggaaaccacgaaagcccgccaattatctatgggagctttattatggcggctgggctgctaaaaacttgtattttc

SEQ ID NO: 36 - DNA, 306 bp, Zea mays
  Clone ID: LIB3115-013-P1-K1-A4
tcagcattcaaaaacacaccaagcgaagcgctctatcatacgacctaacaccaatgtctaccaagatattatccctccttgcgctggttgcccttttagtgagcgcaacaaatgcgttcattattccacagtgctcacttgctcctagtgccattattccacagttcctcccaccagttacttcaatgggcttcgaacattcagccgtgcaagcctacagtctacaactagcgcttgcggcgagcgccttacatcaaccaatttgcccaattgcaacaacaattcctttggcacatttaaacccta

SEQ ID NO: 37 - DNA, 436 bp, Zea mays
  Clone ID: LIB3115-013-P1-K1-A6
gacgaccttcgcggcggcgggcggcgccgacgtgctgatcgtcgtcccgaggagggcgggcgcgcgggcgcgtcgtctggttccccgcttctgctcgccgcggcggcggcagcggtcggttggtctccgtgcggtccagcggtccggccacgccgccggagatctccgacaaggtgtctgagagcatcaagcatgcggaggagacgtgcgcggactaccataatggcgactccgagtgcgcggcggcgtttgacgaggtggaggagctcaacgccactgtcagccacgcccgcgacagccttaatgagaccaactccaacgacccgctcgagaagtactggatggagaacccggactccgaggagtgccggatctacgacaactatgctatattcgtagctttattgggcgtggaatgatactctcgatcggtgct

SEQ ID NO: 38 - DNA, 57 bp, Zea mays
  Clone ID: LIB3115-013-P1-K1-A7
tcgtccacgcgttcggtaccagcgccttccaggcgttgtgcgcacggaggtggggtt

SEQ ID NO: 39 - DNA, 282 bp, Zea mays
  Clone ID: LIB3115-013-P1-K1-A8
gaaccagctggttatcctcttgcacgttcgctcatgtgcacatcccgtgttagcatcgatggcgaggtgaccattcgagacacacagacacacctacagttgaagcccaaggctttcttccttaacaaggcccactacacctcggattcattgttagtcatcaaacgactttcccttaatgatgtgttctatgaacaaaacacaccctgttaggtttaagtctaatttgtttactatgaataacgcgtttgttgcattccacacccactgcccctttttgct

SEQ ID NO: 40 - DNA, 412 bp, Zea mays
  Clone ID: LIB3115-013-P1-K1-B1
tccacgcgttcgtccacgcgttcgcccacgcgttcggtcttgtgttgttcggagcgggcaggggcacacagccccatcccaatcctagtcgatcttcttcccctcctcaaggaagaaaagaagctgaaccatggggaagagaaagtcagctgctaagccacctcctaagaagcggatggacaagcttgacactgtcttttcctgcccattctgcaaccacgggagtagtgttgagtgccgaattgacatgaagaatctgatttggcgaagcatcttgtagaatctgtcaggaaaacttcagcacaactgttaatgcactcactgagcctattgattatatagtgaatggattgatgagtgtgagccgtgtcaacactcgttgaaggcgaccattattcgtgagcttgcccct

SEQ ID NO: 41 - DNA, 436 bp, Zea mays
  Clone ID: LIB3115-013-P1-K1-B11
cggacgcgtgggcggacgcgtggggaaggtgatggtgaaatgtggaatgatgatgaatctttctttgcttggaaggatgatcccaaaaactatgagaattatcttgaggagttgaaggctgaaagagtatcgaactggttctcgcatcttgctgaaacgtcagacgtgaaagctctaccaaacggtctttcgctgctccttaacaagatgaatcctttgaagagggagcaggtcattgatggcctcaggcagcttcttggttgatcgatggtggcaaagtggagcatgaagccctgtttagttgggaacggattgttctggttgtagtcatgtatttagctgtttaacatgtatttaaatggggggcgttactccacgtcatacggtacaacagcaatcctgatcaaatgattattttattcttaaatcgaagtag

SEQ ID NO: 42 - DNA, 418 bp, Zea mays
  Clone ID: LIB3115-013-P1-K1-B2
aggaaactagaattttgacaacattcttttaaatactttagcggtatccgtgcctatgcatggaggctattcaaattttttgccagaatcaagtgtatgcaataatgctctgccagattattaagtatactagcacctgaggaacagtgtttgacttgggaacttggttgtgttactgtgtaaggttttgctcccctagctgttcacgtctgtattgtctgcgatgtggttttgaagattcagcatcagcgattctgctgtgccttgcatacagtttaaagaatttcggaatgctggatctgccgaagcgatagattcatggttgtttaattaattaatgacaatctcatgtggcttattgactgggacaaattaattatatatttatttttttttttaaattatttttttctttttt

SEQ ID NO: 43 - DNA, 461 bp, Zea mays
  Clone ID: LIB3115-013-P1-K1-B4
tccacgcgtccgccaactagcaacatagaattttcaatagtgtaccaacaatggcagccaaagtgattttgcttccttatgctccttggtctttctgcaagtgctgctaccgcaaccattttcccacaatgctcacaagctcctatagcttcctttcttcccccatacctctcaccagcggtgtcttcagtatgtgaaaacccaattcttcaaccctacaggatccaacaggcaatcgcagcaggcatcttacctttatcacccttgttccttcaacaaccgtcagccctattacagcagttacctctggtgcatttgttggcgcaaaacattaatgcacaacaactacatcatcttgtgcttggaaacctcgctgcctactttcattaacagcaggttctttctttcaccaactggctgcattgaactctgtttcttatttgcaacaacaactaccattt

SEQ ID NO: 44 - DNA, 265 bp, Zea mays
  Clone ID: LIB3115-013-P1-K1-B5
cgggcccatgttcccggaggccaagcccgcctcggcggcggcggcggttagcaggagtgtggtcggggtggacagggggtacctgtcctacgacgagcgagaggacggtttttccgggctaggcgtgcgatgaccttggcggcgtgttctgcgaggcgccgtaccatgacggcgtttcctatgagcttgcgcacgcctgaagaccccgttccatccatttttgtccaccacgctatgtacgtatgtgtgtcagatgtgttacatc

SEQ ID NO: 45 - DNA, 283 bp, Zea mays
  Clone ID: LIB3115-013-P1-K1-B6
gcgaagctgacgagaatcccaagaaacagagctggtgaaattgcattgtcgcaacaggcaagagaagaggagaagaaagaaatggctgcaatacctgcaacgatcccgggctgctgctcttagtcttgcctgcctcagcttgctggccttcctgccttcacaagcagaatgcgcttcaaggtcacggccatggcgcccaaaaatgaaggtgaacctcttccacgagagctggtcgaagcagtggttcggcgcgggcatcttctcggtgggcatcgaggaggtg

SEQ ID NO: 46 - DNA, 167 bp, Zea mays
  Clone ID: LIB3115-013-P1-K1-B8
tcgccacactaacgaacgaactcttgctctgatcacgagctagctgaggtcgacgatgggggctgtgctgaacagcatgaagacgccgcacgtggtggccgtgctgctggtggtggcgctgctggctccgtccgaatgggcggtgatcacctgcggtcaggtggggt

SEQ ID NO: 47 - DNA, 323 bp, Zea mays
  Clone ID: LIB3115-013-P1-K1-B9
ggcgagccgccgagctacctgacgggcgaattcctttgcgactacggctgggacaccgcggggctgtcggcggacccggagacgttcgccaagaaccgggagctggaggtgatccactcccgctgggccatgctgggcgcgctcggctgcgtcttcccggagcttctcgcccgcaacggcgtcaagttcggcgaggccgtgtggttcaaggccggctcccacatcttcagcgagggcgggctggactaccttgggaacccgagcctcatccacgcgcagagcatccttgccatctgggcctgccaggtcgtgctcatgggcgc

SEQ ID NO: 48 - DNA, 191 bp, Zea mays
  Clone ID: LIB3115-013-P1-K1-C1
gcgtcctcgaataaaaatccagacgaaacccataatccccaccgaacgcaacctaaaatctgcccatccctcctcgatccagccccgcggagaagagccatggccgattccgcaaccaacgacgcccccctggtcgccagcaaccagcccacggaggaggaggtgacggtggatagggccccgccaccgaa

SEQ ID NO: 49 - DNA, 212 bp, Zea mays
  Clone ID: LIB3115-013-P1-K1-C10
caggagccctttgagggctatgacttgcatgttctctataatgcttcaagtgagtgtgcatgcgtggggacagaaatgattagcccttgtatattcctatggaaaacttagcccttctactattatctaagtgcatcatgtataccaaaatatggacagaaaaaaccatgtacacagacgcaatttttttaacatcatcatatactttaaaa

SEQ ID NO: 50 - DNA, 325 bp, Zea mays
  Clone ID: LIB3115-013-P1-K1-C11
tgaatgactgccaacgcactgcattctatgtgtggaattggtctggacaccaaagaatttgacgtggatgttatcattgagaccgaccgcacaacggggatgatcgttcttgctgtcctagacgtgccgaacgctgctttcaagaggtaccttgtacagtctcggcgacatgaacgagaagatcattgtcatcttagatttgcgcggaagtaccttcgatgtgtaccttttgaccatctctggtggcgtttttgtcgtgaacgccaccattggtgacacccatatgggtggtgaagattttgattacaccgttgtcaaccacttt

SEQ ID NO: 51 - DNA, 265 bp, Zea mays
  Clone ID: LIB3115-013-P1-K1-C12
gtggtttaacagttgcagcaacctgtggccattacttttctggcaacgcatatgcaaggcgcgtgggggagttcctgaagaataacaagaatgttgttgtgcaaactagacatatgaagatcaattctacaccaccagtgtctgagctagtgcatctcacgcctgccagagctccatctcctgatgaaagacatgtgcatcttttgatataatgatattcatttaaacactcgtctctcttgtagtatgtataaaattaacttat

SEQ ID NO: 52 - DNA, 437 bp, Zea mays
  Clone ID: LIB3115-013-P1-K1-C2
gcggcaagtcgctcgcgccgttcccgcaaggctgcttctactccaacgccctcggagggctcaagtgctacgagaaccccaagcacaaggtcaccgctgtccccgccgacgaagaagagatctgcggtgccactttcaaggtggtggaagggtctactgtcctgacggcgctgcactgatctatcatcatcaggcggaggcgatgcgatgatgatgcagaactttgtacatgcgttggtggatggtggtgtaacatagtggctgccaacaagtcatgctcatgcaaaccgatgaatctatctctgtatcatcgatctcggttgcttgctagtccagacttcagacatggctatatatatatagctggtgctaataaataggaggataatcgtcatatcgatcggttgcgtgtggaatgccaatcatgtgtgtaatct

SEQ ID NO: 53 - DNA, 136 bp, Zea mays
  Clone ID: LIB3115-013-P1-K1-C3
aggaaggaaacaccgccgccgccgcgccttccattccagtactcgcggaggaaaggaacaccagccagggccatggtcacgtcgacgaccggtcatcttcttctgtcctcgtcgatcgatgctgctcttatttttg

SEQ ID NO: 54 - DNA, 409 bp, Zea mays
  Clone ID: LIB3115-013-P1-K1-C4
gaagtttcaactaatcagcttactaggatgaagcctgtatcggtggcactgctcattttgttgaacatgatgtgcatagttgcatactttgatcatggaagctttcctggaacgatggccgaagaaaccaccttgctggcaaattcgtatggaagaaatgaaggaaccaagggcatacatcgtggaagaaagctgatggacgccggtactgattcaaaccgtgggttttctatcagtgatatgcgtcacataatgagctcatgcaaccctcatccttagcttcagctggttgcattccctaaagttcgtacatgtatagccttccactcattatattctgggtattcgacctatatacacatacgggatgtttgagatcgatcgccaggttcttaagatcaagtccctt

SEQ ID NO: 55 - DNA, 132 bp, Zea mays
  Clone ID: LIB3115-013-P1-K1-C9
cgcagtaccgaccgaatcccggtcgacccagcgtccgcagagcccttggggcgaggcctgcttgacgcgaaagcttcagtgagtgtgcttgcctggagacagaaatgtttagccctgaattgcctatgaaga

SEQ ID NO: 56 - DNA, 386 bp, Zea mays
  Clone ID: LIB3115-013-P1-K1-D1
cgacgtcacacgggcgctgctcacagacacaccaagcgtcggcaccaatggcttactaccaggaggtggactactgctcggaggaggtgaggtcggtggccccggccggcttctgccgccacggcggcggcgtccagcagcacgtcgtcaaggagaagttcgaggaggtcgacacggtctcacgcgccggcgccaaccaccaccaccaccatggtcaccacggcggccatggcttcgtggtgcgcgagaccagggtcgatgaggacatcaacacctgcaccggcgaggtccacgagcgcagggagagcttcctcgccagggctaactgagccgcccggcggccggcatccacgcccgttcgtgcttgcctgcgtgccctatgtatg

SEQ ID NO: 57 - DNA, 277 bp, Zea mays
  Clone ID: LIB3115-013-P1-K1-D11
cccacgcgtccgcggacgcgtgggcgggagtggaagctctcgggattgggctgcaaagggccggatgctgcatggagtgaaggctgtgatagcaaacagcttcgagaggattcaccgcagcaatcttgctggcatgggaatcatccctctatgctacaaagcaggggaggatgcacacaccctgggcctaaccggccatgagcgctacacggtacaccttgcaaccaatgtgagtgagatcaagactggccaatatgttaccgagacaactgataat

SEQ ID NO: 58 - DNA, 170 bp, Zea mays
  Clone ID: LIB3115-013-P1-K1-D12
gggatgctgcctggcaaggcctcggtgtcccacctcgtctgtggcgtggggcgctggagcccggtctggttgggttgggaagccctttaaactgttgtcacttgcattttaccttttccatcgctgtttattgtgagtggtcctatatcaatggctggtctcagtggtct

SEQ ID NO: 59 - DNA, 485 bp, Zea mays
  Clone ID: LIB3115-013-P1-K1-D4
aaattaataaataatggaaatagtttttttaattattatttattttattttatttttatattttataatatattaatatttttttataattaaataaattaatattataattatttttattattttaaaaatattattattataaataaataattataaattaataatttattaataattaataaatatttaataatttataaataatatttttaattattttatatttaattattaatttattattaatttataaattataattataattaataaaaatttaaattaattttattaattataatatttttaaaattttatattataatatataatatttatattttatttaaatatttttactattataataaaaatttttaaaaattatttaaatatattataactattaattatattatatttaaaaaaattattttatttgatattaataatatttatataatatacttataatatatata

SEQ ID NO: 60 - DNA, 295 bp, Zea mays
  Clone ID: LIB3115-013-P1-K1-D6
ggcaccccgagctgcgcgtcaactgttcgcactcgggctacgtgatgaccgacatgaccaggcggactgtcctgctgaagcccgctcatggctccgccaacgtcgtctaggtggcgctgctccctgaaggctgacccaccggagctttcttcgctctaggcaaggaggcgcctgtcgtgtgacgctgcctgactgggctggcggtggtggggacttcacggtccggctctagtgcgccttctattcgacttgcctggcgcctgctatatactacctctctgttctctgtgctgtg

SEQ ID NO: 61 - DNA, 364 bp, Zea mays
  Clone ID: LIB3115-013-P1-K1-D7
tcgcccacgcgtccggagaactggggggtgaacggttactacaagatatgcaggggttccagcggtggcaacaagtgcggcgtggatttcatggtctctaccgcgtccgcagtccacgcctcgtaggagtagactctggtcagcggtgataatcgtgattccatatattgtagaactataatccctgctagtaatccatttgtgctgtttatgtatcgaaggcagcaaagatgtgtgaagcggcaatgggatgcttgctgtaaggtaatatgtttagcttgctaggcatgctacacgctattttgttgtagcaacgctttcaccagcttgttacgcttttttttcgacaacatttgtattatat

SEQ ID NO: 62 - DNA, 349 bp, Zea mays
  unsure at all n locations
  Clone ID: LIB3115-013-P1-K1-D9
ccggaacnnaagggccganccaacccacaccgtaccncgaaagaccagcaaataaagctggacatttctctttcccgcttaccttcaacgcattctcagggtgggagctaccaaagatgactggtaccgatttctggtatggaggttctccgtatcattaacgagcccactgctgctgccatcgcctacggtcttgatgccaacgacaagcaggagaagaacgtcctcatcttcgatttgggtggtggtaccttcgatgtctcccttttgaccatctccggtggtgttttcgccgtcaaagccaccgctggtgacacccatcttggttgggaagattttgataacaccc

SEQ ID NO: 63 - DNA, 453 bp, Zea mays
  Clone ID: LIB3115-013-P1-K1-E1
caagcgctgggagcggcgggactacctcggcgtgcacccgcagaagcaggaaggcctgtcgtgcgtgggcctccacgtgccggtgggccggctgcaggccgcggacatgttcgagctggcgcggctcgccgacgagtacggcaccggcgagctccggctcacggtggagcagaacatcgtgctccccaacgtcagcaacgagaggctcgacgcgctgctggcggagccgctgctgcaggagcagcggctctcgccgcggccgtcgatgctgctcagggggctggtggcgtgcacgggcaaccagttctgcgggcaggccatcatcgagaccaaggcgcgggcgctgcatgtggcgcgggaggtggagaagcgcgtggtcgtgccgcggtcggtccgcatgcaactggaccggatgccccaacagctgcggccaggtgcaggggggcggacatc

SEQ ID NO: 64 - DNA, 184 bp, Zea mays
  Clone ID: LIB3115-013-P1-K1-E11
catcaaaaattttatttttctctaacgatatctcaactaccgcggggtttataaccaccgctggatctttaacaccttgactcaaggattgactcctctggaatacaaaagatataactctgctggcctggcttgccattctgatgctgacgacgactccatcattgttaagcaagttgaaaag

SEQ ID NO: 65 - DNA, 288 bp, Zea mays
  Clone ID: LIB3115-013-P1-K1-E3
tgccactcgttcgacggcgtcgacgagaagtgtctagcccctagagcgggtttagttagaggcgtacgggctgtcgttctcgtcggcggcggcttccattatcagtgtttgcgagagcactaccttctgcatgtgtccctagcttttcactctttgcgcgctgtctcgctactccttgtaacatctttttttgtcttgggcctgcacgtttttttcttgttttattttttttttgttttttttagtttttatttttatttttattttatatttatttttttttttttt

SEQ ID NO: 66 - DNA, 172 bp, Zea mays
  Clone ID: LIB3115-013-P1-K1-E5
cagggatgatgtgggaaagctcattcctgcatatcttgctcagggcattcttcaacatgaccggttttaggtcctggaccagaggggagtaagccagctgtttaatctagctacagagaggggccgcaaagctaggcctaacttgtaagtgggcttatgttgagaacacaat

SEQ ID NO: 67 - DNA, 241 bp, Zea mays
  Clone ID: LIB3115-013-P1-K1-E6
accactcctcgctagctgaggacggtacattttgtacataggtgcgacgttcgacggcgacggcgcatgcgccacacatggcatcccagctctccgccgccgtgccccggttccacggccttcggggctacgccgcgcccaggtccgcggtggcagcgctgccgtccgtgagggtgggcaggatgaggtcgtcttcccatgtctttcgttttgtcttcattgtcttcgtctccaactctgt

SEQ ID NO: 68 - DNA, 181 bp, Zea mays
  Clone ID: LIB3115-013-P1-K1-E7
ctccgcgctatgctgaggacggtacagctgctcataggtgcgacgtacgacgacgacgtcgcgggcgccacacatggcattccagctctcctccgccgtgccccggttccacggcctccggggctacgccgcgcccaggtccgcggtggcagcgctgccgtccgtgagggtgggcaggatg

SEQ ID NO: 69 - DNA, 314 bp, Zea mays
  Clone ID: LIB3115-013-P1-K1-E8
taggtatttgtatatccaatgaggggttttgttttcaaacatcaccgcgattttctgggaggggggttacacacattatgaaggactacttcttgtcctgcacaaatcttttatacttaatggctcgttcaattctgctccaaatcaagtttatgcttacataatctatttttactatgtatgttttattcttccacatacattggttttgctttcaattttatgtttttttctttatactaatattaagttcagttcttactgtatatttcctttttttgtaattactaaattctttgttcctttttttattt

SEQ ID NO: 70 - DNA, 430 bp, Zea mays
  unsure at all n locations
  Clone ID: LIB3115-013-P1-K1-E9
ccgaccggaangaagaccggtcgcgcgaccgtaccacacttttgttattcaacaatgggtgtctctcacatcaactttgctgtctaccaacggtggacagcttaagaatctcttgaagcgagatcctaaatcgtatgaagctgagttcgagcaacaataccgccattatgaagcaagtctatccatcttcaagctgaagccagacgacgaggcaaaagatcttggcgacctgatcaacttcatatcccaagtctcgcaatgctttcctcatagaactgctgaattcccaggtcaaatgattgaattgcttgaggagcactatcaagtgctgaatcctgatctgcgcaaaaatatagtacaggcactgattttgcttcgaaacaagaacgtcgtcgataacactcctctgcttcctttgttttttacattg

SEQ ID NO: 71 - DNA, 435 bp, Zea mays
  Clone ID: LIB3115-013-P1-K1-F10
gtcaagatcttggacgaggagttcggaattgttaaggggaccatgacgacgacgcactcgtgcaccggcgaccagaggctgctggacgcgtcccaccgcgacctccggcgggcccgcgcggcggcgctgaacatcgtgccgacgagcacgggcgccgccaaggccgtggcgctggtgctgccgcagctgaaggggaagctgaacggcatcgcgctgcgggtgccgaccccgaacgtgtccgtggtggacctggtgatcaacaccgtgaagactggcatcacggccgactgacgtgaacgcggcgttccgcaagggcgacgccggcccgctgcagggcatcctggatgtcttgcgacttgccgctcgtgttcgccgactttaggtgctccgacgtgttctgcaccattgacgcggtatattcacatggtcatgggc

SEQ ID NO: 72 - DNA, 264 bp, Zea mays
  unsure at all n locations
  Clone ID: LIB3115-013-P1-K1-F12
acggaanaaaatgaccggggggggcgccacctcccaaagaggggtatccgaccgtcaaaaatttttttctaagggcatggatatgaaccaagcgcgggtgtattttaagagatcagactttgactttccacaagaaccagcaaacttggcaatgcgttgctcttatatttttgaaagagattaactctgtaacgcgtgccgaactcaagccattctgtttcgaggtagtaacaaaagacaagacatactacatctcttgcaaaa

SEQ ID NO: 73 - DNA, 398 bp, Zea mays
  Clone ID: LIB3115-013-P1-K1-F2
gaggtggtctgcgagaagcattaacatgacatgtgggaaaggggatctgacatacatatgctgataaaggaaactagagaaaagatggcgaggaccttgggtatgatagtagaagagactgaatctggaacttaagatgattgcaactacaaaacagttaattagggtcattcatccaccatattgttatgaggtacccaaggtgacaatggcttaccagtagttggatcttgcaagttggttccagtgccatattgcgcaagactactgcgactaacaactagagggaatgcggtgttaccttcttctctggatggaagcattactatttgttgttgtgctgagattgcattgtctgcgatggatgtacagtacaggtcgcacttactgaaagcttc

SEQ ID NO: 74 - DNA, 451 bp, Zea mays
  Clone ID: LIB3115-013-P1-K1-F4
cccacgcgtccggtaatactagccaaggaagatttggtatacgatgttgatctagaagctatagctaacttgacagaagggtactcgggtagtgatctcaagaatctttgtgttactgctgctcatcgtcctattagggagattcttgaaaaggagaagaaggagagagcttcagcagaaacagaaaataggccattgcctctgtcgcacactagcaatgatgtccgtgcattaagaataagtgatttcatacatgcgcatgaacaggtgtgtgcaagtgtttcctcagattccagtaacatgaacgagcttgtgcaatggaatgatctctatggagaaggcgggtcaaggaaaaagacaacgcttagctacttcatgtagctgatgttgcaagtatatcgggagaagtgccctggcacaaatcataaatggttggaggcagttgggggtg

SEQ ID NO: 75 - DNA, 88 bp, Zea mays
  Clone ID: LIB3115-013-P1-K1-F6
ctaccggtcctaattcccgttcgaccactcgtccgtacttgtcaattagaagcatacaattttcttttttctaatattaatttacata

SEQ ID NO: 76 - DNA, 360 bp, Zea mays
  Clone ID: LIB3115-013-P1-K1-F7
ggcttcggaaaatgtctgatgacaaggccgtatgagctcggaatgaagtcaaaagactcctcagtgcaggagttatcagagaagtaaagtacccagaatggctagctaacactgttatggtaaaaaaggccaatggcaaatggcgaatgtgtatcgatttcacggatctcaacaaggcttgtccgaaggacgaattcccattgccaaggatagactccttagttgatgcagcagcttcgtcagagcttatgagtcttttagattgttattcatgctatcatcaaatttggatgaagaaggaggatgagccgtataccatgttcataacccctagtggaacatattgttaccttcggatgc

SEQ ID NO: 77 - DNA, 197 bp, Zea mays
  Clone ID: LIB3115-013-P1-K1-F8
catggggccacctccctggcgtgagccctcctaccatgttctttcaaccacagtccttgtcgttctaccagcactctgttcctaaccctagcaccctcttacaactgcatcaatcttttccattcaaccaacttgcttttacaaaccctatagccttctaccaacaacccatcatctttggtgccctcttgtagatt

SEQ ID NO: 78 - DNA, 418 bp, Zea mays
  Clone ID: LIB3115-013-P1-K1-F9
gtcaagatcttggacgaggagttcggaattgttaaggggaccatgacgacgacgcactcgtgcaccggcgaccagaggctgctggacgcgtcccaccgcgacctacggcgggcccgcgcggcggtgctgaacatcgtgccgacgagcacgggcgccgccaaggcctgggcgctggtgctgcctgatctgtaggggaagctgaacggtatctggcttcgggtgcctactccaaacacatacgggggggtcctggagaacaacacctgggcaactgtctttaggacataccacttgggctcgtcactgtcaaaggtcacccatcaactcccatactgacatatctgattctaccaacgagttggttatgttttacaactgtatgatcaccaactacaacggaactaaagactgttttggt

SEQ ID NO: 79 - DNA, 347 bp, Zea mays
  Clone ID: LIB3115-013-P1-K1-G1
caatggagtgcaggcatctgctgtctcggatctttgtgtcgaaacctgagcaacggataaccatcccagagatcaagaaccacccatggttcctgaagaacctgcccatcgagatgaccgacgagtaccagatgaacctacagctagtcgacatgaatgtcccctcgcaaagcctggaggagatcatgtccatcatactggaggcccggaagcccggcgacgggctgaagcatgcgggacagctccccggccttgggagcatggagctggatgacattgatgttgacgacatatacgttgaggacagtggcgactttgtatgtgccttgtgacgcggttcatgctgt

SEQ ID NO: 80 - DNA, 178 bp, Zea mays
  Clone ID: LIB3115-013-P1-K1-G10
cacccaaacaccaacaggaacatttatgataacccgcccaagggagaaaaaaaggagggggagagggaaacgagcaggaaaccgacaaaaggtgggagagaaacaaaaaaacgaccaagacgaagcgagaacacaaaccggacaaaaaaaaaggaacaaagaaacgcccgaaaaagaa

SEQ ID NO: 81 - DNA, 274 bp, Zea mays
  Clone ID: LIB3115-013-P1-K1-G12
ccacccaaacaccaccaggaacacccaacagaaccagcccgagtggaaaaaacagcgcgggcagggggagccgctacagaaaaccaccacccggtgggatagaaacaaagcacgcgaagacgagcgagaaaacgggcggacaaaaaaaaaaaaaccacgggacgcgcgaaaaagaaaaaagccacggcgcacaaggaacagaccacacagcaagaaatacaaacggggccgccgatgccagcaaggaaggcaggaaaacacgacgacgcaagaa

SEQ ID NO: 82 - DNA, 397 bp, Zea mays
  Clone ID: LIB3115-013-P1-K1-G2
cccacgcgtccgctcgattgggaggggagagatgaaggtctcgctcaagggtcgctacgagggcgacaaggccacggtcgccaccagcctcgccgcccccgccggcgacctccgcctcaaggcctctgccaccgaggccgtcttcgccaacgggccttccctccggggcctcaccctcaccctcgagaagcctggagctttcctcgtcgacctcaagccccacaaccaggatgtgcgcttccagttcatgaaatccgcgctcgtgctcgacaagcgcgtcagcctcacctacacccactccaccagccttgcggcgccggcgccggccttccgcaccacgctcgacttgactggcacctttcgaccccgccaacaaggttagcctcttccacacgct

SEQ ID NO: 83 - DNA, 260 bp, Zea mays
  Clone ID: LIB3115-013-P1-K1-G4
acgcatacaaagacattattagactggttatggaatatattatactctactcattgccacttacccgggttggggggaatgccctctgatcaaatccttctttgccctgtacatgttttacgaccagattcgttaattggaggtgcttattatcctgtgacaagccttctcctttattatccttacctacttcgtcagtttatctttattggttctgtactgtacgtggccttagttagaggcgtttcccactcaccttt

SEQ ID NO: 84 - DNA, 141 bp, Zea mays
  Clone ID: LIB3115-013-P1-K1-G5
attttatttcgacccacgcgtggcatattatttcattcatttcctaacatacatcttatctgttaatacctaccaacatataaccatcccgtggatcaacatccacccttcgttcctaaataacctaaccatatttataac

SEQ ID NO: 85 - DNA, 340 bp, Zea mays
  Clone ID: LIB3115-013-P1-K1-G8
aggacattattcgactgggttgggatcatatatacctacacattgccgcttaccagggctggggcgagtgccatctgagcaaatgcagctgtgccctgtgcatggttgaacggcagatcgtgataatggaggggatcatgtgcctgcgagaggccgtctcctatactatgcttacctacttcgtccattaatacggcttggtgctgtaccgcacgtggcccaaggaagaggcgagggccagccgtcattcacgccctgcactgacatagaagaggtgagcgatgtgtaggattatcgcatgctttggcggccttgcactggcataggatttgtctagggc

SEQ ID NO: 86 - DNA, 314 bp, Zea mays
  Clone ID: LIB3115-013-P1-K1-H12
cccacgcgtccgagatcgccccacttgccaagtgtatacgtagccactccgtgagggcttggtggtgcgctcgactcggaaacacgcgttggcgataggaagcgtcttctaggatcctcctgggcggccttgcggctggtggagtgaggtgtccactcagacacgcttttatctgtactactagtctactactactacctcattgtaatataatccttggcattctaaaaaatgccatgcctgctctaattcttctgatcttgcgcaacatacacttcccgctttcgttcgggcgacaacgattattgtaatat

SEQ ID NO: 87 - DNA, 435 bp, Zea mays
  Clone ID: LIB3115-013-P1-K1-H3
tggacgcgtggggggctgctgaaggacggcaaactcaagacgctgatcgactcgaggttcccgctgagcgaggtgagcaaggcgtgggagaagagcatcgagggccatgccactggaaagatcattgtcgagatggcagactgatctgggatgcgtccattgccgatagagacttgcagtagcatccactaggctgttggacactacagggttaaagtcaacagatacgaagtactactagtatctgagtttggtcgtcgtacaaattgttcgtgagtggtgagccagtttattggcttgtttttcttttgttttcagctataaacatgaacttcttgtacagtttatggttttatggcgttgcatgatagatccgcacagttgcattgtaattaaaaaaaaaataaaaaaaaaaaaaagggcggcggtttagag

SEQ ID NO: 88 - DNA, 313 bp, Zea mays
  Clone ID: LIB3115-013-P1-K1-H4
ctgaaagaaccaaaaaataaccagacaatgagcttaacgcttctccagggctactcctccgcgtaggacgacgacgatcccgccgccggcgccggctcttgcacctagctgagcgagtctggtgattcgtcagccgaggaagccggatcggacgaagacgaggagtccgctcctccaaagccgccccccaagctccgccggcgaccaaaccctaatgggggagatgccggctgcagcgactggggcttcttgctgccctccgcgctggaggccttcgatgatgtctcgggaccaccacattttttgaggcaca

SEQ ID NO: 89 - DNA, 283 bp, Zea mays
  Clone ID: LIB3115-013-P1-K1-H5
tcgccttctcccgccgcatccgcagccgcatgaggaccccatcgccggctactcctacatgctgaggcgctaccgggaggacctgttcaaggaggacgactagcgccaggatccgagcgcgcccaaagcgcgcgagcagcaagcggcgactccgccgtcgcagccggagactttcgccacaatgtgggccgtcggctgcccgttcggcgggttctggatgctgaccgtgtccgcgagctcggtcgtcgtggcgcggtcgtccaaacagcccatgtggtgcttc

SEQ ID NO: 90 - DNA, 379 bp, Zea mays
  Clone ID: LIB3115-013-P1-K1-H6
tcgcccactcgttctcgtacgcgtgggttttttttttacagtgcataatgtacatccacgcacgggtcgaataaacagtaatttgtactactactttagaacccattatcaaaagtgaaaacgaaaaaaaaaaagaaaacacagataactaatcaccggtccttctcggggctaacgtcgctgtcccgcccgtccggcgatgccgcgctgtcattcaccgtcacgacgccggcgtccttgcggctcctgtacttgatcagaccgtagagcttcttgatctccctgatcggcgcgtccttggcgaaaccttccccgccccgcggcgactgccccgtcgcgctggccttggacgtttctggtcgtgactcttgccttgttt

SEQ ID NO: 91 - DNA, 251 bp, Zea mays
  Clone ID: LIB3115-013-P1-K1-H8
tcccacacgtcctactagttctacatctcgagctgctccctcttttttcttctctatggatgaggtctaataattacatcatttttttttctttctcttaacactaatttttatattactatttttctccttttaaaaaaaccaacccccaataaaactttctttttccaattcacacacacaccctaaaaaaaacaaaaacaacaccacatccccaataaaccaatttaaataataattatacccttttt

SEQ ID NO: 92 - DNA, 99 bp, Zea mays
  Clone ID: LIB3115-014-P1-K1-A10
aaaaaaaaaaaaaaaaataaaatttaaaaatttaaaaaaaaaaaaaaaaaaaacagagaaataggcaaataaaaatagggggatagaaaaatttaaatg

SEQ ID NO: 93 - DNA, 291 bp, Zea mays
  Clone ID: LIB3115-014-P1-K1-A12
cccaaccaaacccgtcgacactcaccaagtctaggagctcgagggcaccaatcatggccggcgtgaactccagcggcgtcgggctcaagcccgccgcggaagtgcctaaggccgccgccgcctcatcttcggcgaaacgggtgcagctggccgtgcccgagggccgacgtgcctatctgctcggcctggcggccgtcttcgccgctacggtcaccaacgagtcggtcaatgtctaccatcttcgatgagtacctctataagagcaaggtcaactaggagctgaaccacaat

SEQ ID NO: 94 - DNA, 222 bp, Zea mays
  Clone ID: LIB3115-014-P1-K1-A5
gcgcttcgtcgaactcgtttcctccaacccgaactctaaggaggggaaaggggaagccctccggcgtcctttgccctagcatccaggggatcgggactctctgttttgcgcattccatccatggcggaggaatcaggccgtcccttgccaaagtttgtcgaatgggatgtcaacgatccggctttcgcagacggatttactgtcatattcaacaaagccaga

SEQ ID NO: 95 - DNA, 443 bp, Zea mays
  unsure at all n locations
  Clone ID: LIB3115-014-P1-K1-A6
ccgcgttcccccaaccatggcctccttctttgcggacgacggcgccgacgacctnccgcgcgccaccttccaccccttcgactgcgacgacttcggcgccgccgcagccgacgacgctagcgccggcgggtacgcctccttcgccgacggtggcgtcgaggaggtggacgaggagatcaccgtagagtcctacggcgtcccgatccgccacgtctccgggggatactcgccctcgccattctcccccgacctcgagcccaacggcagcgacggcccgaccctgccgccgtccaccgagatggggcgggaggagggaatcctcctccgcgagtggcggaggaaaaatgctatggaacttgagaaaaaagaacagaaggagaaggagctacgtgcccaaataattgctgaagcagaaaaattcaagaaagctttttttgagaaga

SEQ ID NO: 96 - DNA, 372 bp, Zea mays
  Clone ID: LIB3115-014-P1-K1-A9
gcggcacgacctgaaggagacttcgaacatggaggccatctacaccgcgtacataccgccgtgcttgaagcctgataagctcgaacatctggacgctttcgaggacgcccagtcgcgcgccaccttcagagtcccgtctatttagctgtgcacatcgttgacttccgcggaagacttgaagaaattctgttcacttgtcattacattcgtgtgggatttctgatggatttcaatgcttccacggtgaaccctctggacttgtttcaggataggaatctgatgtgaagaatgtacatatgctcgatctgtgtgtttgctgagcgtgtgtggatttggactgctttaggtagtgttcgatgctgtggtattttg

SEQ ID NO: 97 - DNA, 454 bp, Zea mays
  Clone ID: LIB3115-014-P1-K1-B11
ctcctcctagcacagctagcgcctgctccccttcgtctgtgatcatgtcttgcagcagcggcaagtgcaactgcggctccagctgctcctgcggcagctcatgcaactgcatgtcccctgacgtggagaccgccgccgccagcagcatcaagaccatggtcctcgctgcgccgaccaccaaggccagcgccggcggcttcgaggcggccaccgagggcggcggctgcgactgcaacacctgcaactgcggcaccagctgcggctgctcctgctgcagctgcaactgagccggcccgcccggcccggcgatggcgcacgagagtcgagaggacgacgacgacgaggcgtataaatataattaatagcagcgtctaaataagatcctgtcaactgcacccgccattatcgatccatggtcgctcctggggttcatgttcatctgtgtaacgtgctc

SEQ ID NO: 98 - DNA, 284 bp, Zea mays
  Clone ID: LIB3115-014-P1-K1-B12
ttcctcctagcacagctagcgcttgctccctttcgtctgagatcatgacttgcgggagctgggagtgcatctgcggcgtcagcttctcctgctgcagctcatgcaactgcatgttccttgacgtggagaccgccgtcgtcagcatcatcaagaccatggttcttgctgtgccgaccaccaaggccagcgctggcggtttctatgcggtcacctagggcggtggcttcgactgcaacacctgcaactgctgtaccagctgtgctttcttctgttctagctgcaac

SEQ ID NO: 99 - DNA, 330 bp, Zea mays
  Clone ID: LIB3115-014-P1-K1-B2
ggcaggtggagccgcagcaccggtaccaggcgatcttcggcttggtcctccagtccatcctgcagcagcagccgcatagcgggcaggtcgcggggctgttggcggcgcatatagcgcagcaactgacggcgatgtgcggcctgcagcagccgactccatgcccctacgctgctgccggcggtgtcccccactgaagaaactatgtgctgtagtatagccgctggctagctagctagttgagtcatttagcggcgatgattgagtaataatgtgtcacgcatcaccatgggtggcagtgtcagtgtgagcaatgacctgaatgaacaattg

SEQ ID NO: 100 - DNA, 302 bp, Zea mays
  Clone ID: LIB3115-014-P1-K1-B3
ccggcgactacggctgggacaccggctggctgtccgccgaccccgagaccttatccaagaaccgacagctggaggtgatccactccccctggggcatgctcggcgcgctcggctgcgtattgctcgagctgctttccctcaacggcgttaagattggcgaggccggctggtttaagggcggttctcacatcttcaaggagggcgggctggactacctaagaaacctcagtctgattcacgcgcagagcattctttgcatctgggcctcgccaggtcgtgctcatgggtgccgtcgagggcta

SEQ ID NO: 101 - DNA, 331 bp, Zea mays
  Clone ID: LIB3115-014-P1-K1-B4
tcgtgcaggtggagccgtagcaccggtaccaggttatcttcgttttggtcctccagtccatcctggagcagcaggcgcaaagcggccaggtcgcggggctgttggcggcgcatatagcgcagcaactgacggcgatgtgcggcctgcagcagccgactccatgcccctactctgctgtcggcggtgtcctccactgaagaaactatgtgctgtagtatagccgctggctagctagctagttgagtcatttagcggctatgatcgagtaatatcgtgtcacgcatcaccattggtggcagtgtaagtgtgagcaatgacctgaatgaacaat

SEQ ID NO: 102 - DNA, 408 bp, Zea mays
  unsure at all n locations
  Clone ID: LIB3115-014-P1-K1-B5
gccctggacgacccacgcgtggcggctagtgccatttataccacacgttcctccggctctgttactttaatgggctttcgaacacctaggggagcaagggtacaggctacaacaagcgcttgcttcnagcgtcttacaacaaccaattaaccaattgcaacaacaatccttggcacatctaaccatacaaaccatcgtaacacaacagcaacaacagttcctaccagcactgagccaactagatgtggtgaaccccttcgcctacttgcaacatgcagtgcttgcattcaacccacttgctctggcaaacgtagctgtataccaacaacaacaacaattgcaacactttttgccagcgctcattcaacttaccatggtgaaccctggtctccttcctacaacagcaac

SEQ ID NO: 103 - DNA, 380 bp, Zea mays
  unsure at all n locations
  Clone ID: LIB3115-014-P1-K1-B6
actagttctagatcgcgagcgtncgcgggcagcgagaagcggcgaccaagtgcaagattcttttgtttgattcgtatcctttgtttttgttgtaacttctcaagtttttccgttctgcctggccaagtactagcgtcctgctcttctcccaagattgggttgcattgcatgtaaaaaaaaaatgtaacgccggagcagcgacgctttgtgggctggcgaacaggtgtggtatgcctacaatacaaaggctagcaagcagaactggctgggtaaacacacagctctgctttcttcttcttcgacattttcgcaagttttttttgtgtgtgtgtcctgtaaacatcaaggtctcaataaagaaagggaaccgctttttttgt

SEQ ID NO: 104 - DNA, 435 bp, Zea mays
  Clone ID: LIB3115-014-P1-K1-B7
cccggcccagatagatctttcctccgtccttcctcgccttcgccttcgccggcgggagatggccaccatcaccggcgaaccgccccgaccctcctcccctctcgcgctatggcccagactgttgtgctcaaggttggcatgtcctgtgagggctgtgttggagctgtcaagcgggtcctcggcaagatggaaggcgtcgagtcctacgacgtagacatcatggaacagaaggtcaccgtgaagggcaatgtgacacctgacgccgtcctgcaaactgtttccaagactggcaagaagacttcgttctgggaggctgaggccgtgacacgtgaatccgccacacctgccggtgccaccgtctgacaggttcggtgatctggaagtgcccggcaaggcggcaaaaaaaaaaatgggatggtatttagcttggatctg

SEQ ID NO: 105 - DNA, 312 bp, Zea mays
  Clone ID: LIB3115-014-P1-K1-B8
ggcttattgatgatatatatatttagccttgctatggacagaccggaagcataaatgagtgataagagaacaatatcgaggcaccaaatctagcgccggatgccgggtggtcaattacatcgttgcatcgacaggggatgtgataaccatgtaagctgtaatatcagtttacaattctgtatgttgttttaaagttactgttagtgcctgtagtatctgtgtggaactgcaattcttgatggccaaaatcctagtgtcacctttcgaagttccttcttggaacaaccagcatgttgttcagtcattggattg

SEQ ID NO: 106 - DNA, 294 bp, Zea mays
  Clone ID: LIB3115-014-P1-K1-B9
agcaccacaaggttgaggatgtcttgtaactgcgcctcaagcttgggctgaagatgaagatgcaagtgcgtgaagagacaccctgacctggaggagacgagcaccgtcacgcatgtacacacgtcgtcttagggtgagcccagagaagaaagcccgccccgagttactaaaggccaggggcgagaccgataaggtccctcacagctgctgctgtcatggcaactgcaagtgccacccctgcaactgctgatcacatctatcgacgaccatggatatcattcttatctatctaac

SEQ ID NO: 107 - DNA, 100 bp, Zea mays
  Clone ID: LIB3115-014-P1-K1-C1
ggcacagcacataagtgatatacacataacacatgaacggaatgcctctagctccgttttacaggtgtacgcgcatttctaagtaagcttatagttcttt

SEQ ID NO: 108 - DNA, 337 bp, Zea mays
  Clone ID: LIB3115-014-P1-K1-C10
ggatttccttgcgatgacgaacggtttcatgcacgagctcgagcagcctgaatcgaagacccgggtggagacctaccaggaattcatgcaacaacaggaacagcctgcgccggggacccaggtggagggttgagagctgcaatccgctggctgctgatctacatctagtcaattcccatggaggaattgcattggcattggactgtaccgtatctaataggtcacctatatcatttgtgaagatcaggattattcggtctataataactaaacatacaaataaaatgtccaccgaggtttttgttgtaaaaaaaaaaaataagggcggttcgttttt

SEQ ID NO: 109 - DNA, 401 bp, Zea mays
  Clone ID: LIB3115-014-P1-K1-C11
cccacgcgtccgctgtaattaggcttgcacggaagctaccaacaggtgatctgcaggccatcaagaaagctgacgatggcgaggaatccttggacgagaatgacctgacttaaaacgatctcccgagccaaaaggtgcagagaacaaacgtcatagtttgccatcggtgggggaacatctgtaaaaagaagttatgcgagttacgtactaaaaacttgtgggcaacattcccatatctataaacatgaaatttgtagggcccaattatgttgtatccgtactggtggtttggtcatttggtgttaccgaaacagcgaaactttagtggtatgtttatggtgtcctgtgctacatgattcttgcaaatcgagcatggtgtaaaaataatatgttggccaatc

SEQ ID NO: 110 - DNA, 200 bp, Zea mays
  Clone ID: LIB3115-014-P1-K1-C12
gctggacgcgtgccaccgtgactttcggctgttccgtgcggaggcgctaaacagggtgccgacgagcacgggcgccgccaagggcgtggcgctggtgctgtcgcatctcatggggaagctgaacgggatcgatctgcgggtgccgaccccgaacgtgttcgtagtggacctggtgctcaacatcgtggagactggcatta

SEQ ID NO: 111 - DNA, 379 bp, Zea mays
  unsure at all n locations
  Clone ID: LIB3115-014-P1-K1-C2
tcgcccacgcgtncggctttgttcagacttcagagcccttcctcttgtgtccgtgcaaattggtgatacttgaacagggatctcctccatattagtgagcaggatgtataatcctcccagtgggcaggacatgtcctactacgatcatgtgcagaagcgccatgaggagaagggctgcctatatgcatgcctgttcactgcgtgctgctgcttctgctgcttcgagacctgtgagtgctgcctcgaggctatctgctgctgctgctagttctgcttggagggcatgggcgtccatcatcgtggagatgtggccatgcgggacacccaccgccgaataaaatgctgtacttatatgcacgcacgttagaaatgcattagt

SEQ ID NO: 112 - DNA, 400 bp, Zea mays
  Clone ID: LIB3115-014-P1-K1-C7
gcgcaggtggccaagcgctacggcgtcaagctcaccttgttccacggccgcggaggcaccgtgggcaggggtggcgggcccacgcaccttgccatcctgtcccagccgccggacaccatcaacgggtccatccgtgtgacggtgcagggcgaggtcatcgagttctgcttcggggaggagcacctgtgcttccagactctgcagcgcttcacggccgccacgctggagcacggcatgcacccgccggtctctcccaagcccgagtggcgcaagctcatggacgagatggcggtcgtggccacggaggagtaccgctcggtcgtcgtcaaggagccgcgcttcgtcgagtacttcacatcggctacaccggagaccgagtacgggaggatgaacatcggca

SEQ ID NO: 113 - DNA, 456 bp, Zea mays
  Clone ID: LIB3115-014-P1-K1-C8
acgtagcgcgaatagcgggcgccgagcacggaggcgcccattgcgtcggcgaactggtacagcgtgtccaggtgccaatcggtgtcgccggactgttggccggcggcggtcatgcgggcgcgctgggcgtcgggaagctggctgcccaggtgggggatggagatcagcagcggggcagtgccgcggctgaagtggtagatgtcgctcaagaaaaactccgggtggcaagggcaaggcgccgcgggctgggccgcggatggcgggcgcccttacgccggagcgctgtcccgcggagaccggacagcactctagacaggaccacccgccagaggttttgcatcagtttagtggatatagatgatcggtatcactgatgcaaatgacgccggcccgggagcatgcggacgtttgttccagcccccgcgttgtcatgccggcgcacacacaggccttatg

SEQ ID NO: 114 - DNA, 314 bp, Zea mays
  Clone ID: LIB3115-014-P1-K1-D1
cggacgcgtgggtgtaaactgaacaagaatgcattgtctttagccgctccgcgatcacagtacaagctgactacggctgctcttcctccaccatgttgatcacggcccgcgccacctcgacgctgtcgcaccctgcagcgttcacgacgcggcaccgctcttcggtgacagctccgcagcggcggacgttgacggccctgcacagctcgaccttgacggtgccgcaccagtcggcgcgcgcgggcttgcaccgggccaggcgcaccccgtcgaagcttttgacgttagcgcgccggcaccgcgtggcgcggagc

SEQ ID NO: 115 - DNA, 450 bp, Zea mays
  Clone ID: LIB3115-014-P1-K1-D11
agagagagcatgaagagaagtgggaggagaccagagacaagcgggtctccagctggagggatttcatgaagacaggaaagaagggacggaaaggtgaaatcaaacccccaaaactgaagactgaagatccgaacaaatcttacgtgcaaaggccagtaaagcgaaactgagtggaatgtcagcaatcaaagaacatccggtagcggcctttcatctcaccagattagagctgcaacccttcaatgttgtacttgtcctgaatgtggtaaggttgaattacgcccgctgggaaacagaacggaacagagcagattttacccgtattgctagctagaatgatttggtttgatgtactcatcatcagtctgaagattttactgggaaaaaaaagtacaaacttttccgttggaaaagaacctactgaagtgaatgttgacaggccgtctcttt

SEQ ID NO: 116 - DNA, 240 bp, Zea mays
  Clone ID: LIB3115-014-P1-K1-D12
aattttatatttttgaataaatattttgaataagataatggtcaaagttttttgaaaagaatcaataatgccatatttttgtgaacggaggtggtacctgtgctttcatcagtgatatgcttggcggtgtgttttcattttgtatgtggttacattaggccaatgtttccatagcatgtatatgcgcggtcgcaaacgatagtttcctgaatgagtaatgcgagaacatgctgtaattcc

SEQ ID NO: 117 - DNA, 346 bp, Zea mays
  Clone ID: LIB3115-014-P1-K1-D3
cccacgcgttcgcggacgcgtgggtcatcctatgctcacgcatctccgtcgccccgccaccatcctctcccctctcctccgccgcaacatgtccgtctacaaggtcgtctccacctcgtccgcgccctcggctatcggtccttactcgcaggccgtggtgcacaacggcctcgcctactcgagcggctcgattggctttgagccgtcgacgatgcatattgtcgagggcggcgtcgaggcgcagacgcgccaggcgctcaagaacctcaaggctgtcgttgaggcggccggtgcaagcacggccagtgtgctgaagacgaccgtgttcctgaaggacatgggggac

SEQ ID NO: 118 - DNA, 343 bp, Zea mays
  Clone ID: LIB3115-014-P1-K1-D7
cgacatgaagggccacgttggtgtcggcgtgggaaaggccaaggatgtcacggaggccatcaccaaggccgccatgaacggccggcgcaaccttgtcacagtgccgctaactaagtactccacattcccgcacagagctgatgcggactatggagcagccaaggtgatgctgaggcctgcttgccctggatctggtgtcattgctggtggagccgtgagggttgtgctggagatggctggtgttgaaaatgctctgggcaagcagctgcgcagtaagaaccccctgaacaacgctcgagccactatcaaggcgacgcatatgatgaagcagttcaaggatgtc

SEQ ID NO: 119 - DNA, 416 bp, Zea mays
  Clone ID: LIB3115-014-P1-K1-D9
cggacgcgtgggcggacgcgtgggcggacgcgtgggcggacgcgtgggcgtgaacccgccggcgacgcagcagcaggagacgcgccaaggagagcccgcaaggaggcgactatgagggccaagtggaagaagaagcgcatgaggaggctgaagaggaagcgccgaaagatgaggcagagatccaagtaggctgatggggattgtggatggtggtgtcggcatagttgtgttacgtttcttcgatgcgtgagttcatggagagatgtcacatcctagttcgtcgtcaccgtttgccatgggtccaatggctcgtcttggaaacctgcacttcagtatgccatctatcgtggtttctaactatattcagagttttgtgctaagacaaatcagtcaggcgtttggggacctattatgat

SEQ ID NO: 120 - DNA, 402 bp, Zea mays
  Clone ID: LIB3115-014-P1-K1-E11
cggacgcgtgggcggacgcgtgggcgcgctcgttgagaagctggacggcagcaacagctgggttcctgcctacgacgacgacgactggtcactacgcttcaagtggtcgagaccgtcgaagctgagcccgagaagctttgcgacgctggaatggaccgttcctggagacgccccgtcgggcgtttataggttgaggcattttggtgcctccaaaccactgattgggtccatcaaacattttacagggacctctcgggcgttcgcagtgcgttaggttgcacaccgttgcgttgcgttcgacggcacacctgtcagagaatcgacaccgggtcatatatttactttgcatacctgccacagtatatggacatgttttccctataggttttacatgctcctgat

SEQ ID NO: 121 - DNA, 442 bp, Zea mays
  unsure at all n locations
  Clone ID: LIB3115-014-P1-K1-E2
gagaggatggccaagatgccatggaggccaaggcctctgcttggtaccatgttacttatcatcagcagtactggggcagctacaatgaagggtatgatcggccgcatcttattagcttcccatggtgcgtatatgacaagcttgtggccatcaagcaggggaggaatctcctcacgcagatggatcgaaacttgaggttccgttgagcattgccagcaggtttgctcctgtacatatccctgatcgtttgcaatcagcactgccagcaagtgtgcatgaacgatctgatgaattaagacgggcaaactgccgcaagctgacgctctggcgtacgtgcgtcttgaaactttcggatgctggcgtctagctaaatgcatgttccttgatttncactgggaccttgagtttgaagtggtgtaatatatgctgcttatgatgtttt

SEQ ID NO: 122 - DNA, 306 bp, Zea mays
  Clone ID: LIB3115-014-P1-K1-E3
cccgacgcaagaacgtcggaggcaaagtccttggtttcttttattaattaaagggtcgtccgagtttcttctattaaatggtgggtcgaccgagtttttgtttttgtttttggtctgaattgaatagagtgtttgcttcgttaagactggaatgtgttatgtgcctttgttaagactggatcactggaatgtgggaatctttatgagtgattcggcatgtttcttaatataaaaattctcttttttgtttctaataagtacttttcaacatcgttttttattttccattttcttgtttattttttt

SEQ ID NO: 123 - DNA, 224 bp, Zea mays
  unsure at all n locations
  Clone ID: LIB3115-014-P1-K1-E4
tcgngcacgcttacgctcacgcatgctgtaatgcgtctcgcgttcggttcgctgcgacacttcacgagatggagaaatggatccccgatgagtctggtggtctatctgcatgagggacgcaaacctgaggaggccgtactctatcaggctcttgccaacctcgaggcgcataatgaggagggtgtctagggcctcgaagcctacatcttcttgcttagtgatga

SEQ ID NO: 124 - DNA, 458 bp, Zea mays
  unsure at all n locations
  Clone ID: LIB3115-014-P1-K1-E5
ccgccgattccggcgccaccgncgccacgcgtcgcttaggaaaccctgggttgacacagtccaagaattccatggtcttttcaagcgcattatccagccccatccggcggagcctgcaaccttaccacctagagcaggacggggatgcagggtacttcgcgaacggtgcaagccgcgatgtgaaccccacggcttcgaatgattcgtccatggacatgcactcggacagcccagctcatgactcctactgagcagctcccaccatggaaccagcctcaagaacagcacttcaagtggaagaagtctgctgtcacagccttcccaggcctagtagtaatattcaatttaacaccttccatagcctctcttacactaagcgtgtgatgtcttgtgttggtactactacttaccacttgttgctttgcgagaattatgtaaattgcatgtactatactata

SEQ ID NO: 125 - DNA, 316 bp, Zea mays
  Clone ID: LIB3115-014-P1-K1-E7
aggttctccggggttcggcttcgtgggtgagcggatcgagatggccgcgtcgggtgttgagggccgttgcttcgtgggcggcctcgcctgggccacggacgaccactccctccacaacgccttcagcacctacggcgaggtcctcgagtccaagatcatcctcgatcgggagacgcagaggtcccgcggcttcagcttcgtcaccttctccacggaggaggcgatgcggaacgccatcgagggcatgaacggcaaggagctggacggccgcaacatcaccgtcaacgaggcccagtcccgcggcggtcgtggaggc

SEQ ID NO: 126 - DNA, 403 bp, Zea mays
  Clone ID: LIB3115-014-P1-K1-E9
cttgctccgccttctgcttctgttcatccttcaaggatcgtgatggccatggccacgcaagcgtccgcggccacgcgccacctggtggccgccgccgcttccgcctgggcgccgtcggcgaagccgcggcagctaagctcacagctcgcgctgccgccgtcgtcctcccgcgcgccggccccgctccgcgcgaccgccggggaggcggtgaccgaggaggcgcccaaggggttcgtggccccgcagctggaccccagcacgccgtccccgatcttcggcggcagcacgggcgggctgctccgcaaggcgcaggtggaggagttctacgtcatcacgtgggtgtcctccaaggagcaagtgtttgaggatgctcaaccggcggggcccgtcattattgcgggag

SEQ ID NO: 127 - DNA, 438 bp, Zea mays
  Clone ID: LIB3115-014-P1-K1-F10
cccacgcgtccggaccaccgcggagctggaggccaagctggacgagggacgcagccgtgtggaggccgagctcgtagaggcgctcgccaacctcgaggcgcagaaggaggaggctgtcaaggcgctcgacgcccagatcgcctcgctcagtgatgagatcgtcaagaaggtgctcccatccgcgtgatgaaaccaaaccggccctgccttatcctatgactatagttacatgaacatcataaattaatgataattttgaagaaattggccgatgactccgacactgtactcatgaaagattattggatgggctgtgtccaccgcctgtgttgggcgtggattgttgtagacttgcagtgatcttgctcgataagcttgtacagttcagtacagacacacattgaaaccatatagatacaggatacattttggtcctat

SEQ ID NO: 128 - DNA, 440 bp, Zea mays
  Clone ID: LIB3115-014-P1-K1-F12
ccgccgccgacgcagcagcaggagacgcgccaaggagagcccgcaaggaggcgactatgagggccaagtggaagaagaagcgcatgaggaggctgaagaggaagcgccgaaagatgaggcagagatccaagtaggctgatggggattgtggatggtggtgtcggcatagttgtgttacgtttcttcgatgcgtgagttcatggagagatgtcacatcctagttcgtcgtcaccgtttgccatgggtccaatggctcgtcttggaaacctgcacttcagtaggccatctatcgtggtttctagctatatccagagttttgtgctaagacaaatcagtcagtcgttttgtgaacctattatgatggagctttatttgctgctaatatcgacctacctgttaaggaattgcaacggtcgtctaaaaaaaaaaaaaaagggcgg

SEQ ID NO: 129 - DNA, 292 bp, Zea mays
  unsure at all n locations
  Clone ID: LIB3115-014-P1-K1-F2
agcgtaaattgcatgcatgcatcattagatatagtaacagngatggatcgttacacgctgcagaagcatgcgcttagtcgttatttgcagacgataataagtagatcgatggagtagtgatcgagcaacacacacgtgacgacgtttgctcttatttacttacacgcacgcacgtgtacggcgctaggggccgtatatatatcgagttctgcatgcatatctcgatcgatgggatgatcagtcgcttcagtcgcagtagtaggagtagccgtgcccgtgcccgtgcccgtgc

SEQ ID NO: 130 - DNA, 422 bp, Zea mays
  Clone ID: LIB3115-014-P1-K1-F3
ttttgttatgtattatggctatttccatatcttttttttatgtaatgagcctatcctctatcctctcttttctgtttgtatttctatatacccaaacttatataagactagatgaatattaagaggactcttccaactagataaaaatctatcatggtcagcaaaggtgtttctttatttgtgtttgctctgttagttaataatttcaatttcattaagaaaaactaactaaataaatggaaaataaaaattgatagaattccttttattttttcttcaaatccaaaaaatatctcttttttttatacataggtcgtcgatttggcattggaaaaagggctgcgtgcccctctagtaaataggtcaaaactattctatcgatttgagtgttctatatcagataaattctacactagctattt

SEQ ID NO: 131 - DNA, 321 bp, Zea mays
  Clone ID: LIB3115-014-P1-K1-F4
cgcttactgcaggatggcactcctacattgctcgctgctgctagtagaagcatatacccgagagcgctgatgacagacttcggcatctactaccagctggctcttatgtggccaggagcatactgcgagcagaccagcgctgggtgctgcaagccgaccaccggcgtcttgccggcgcgcgacttttacataacgggctttaccgttcttaacgcgaccaccgacgctgcagtgacgggatgcagcaacaaagttccctacgaccctaacctgattaccggcattcaaggcctgtatcaagactggagcaacatcaggtgc

SEQ ID NO: 132 - DNA, 425 bp, Zea mays
  Clone ID: LIB3115-014-P1-K1-F5
gatacaatccacgtcataatccatattggattccccaacttattaaagaaaaagggagcaatcgaagaattagagaaagatctccaaaaggaagttaattctgtaaaccagagacttaatattgctatcgaaaaggttaaagaaccttatagacaacctaatattcttgcggaatatatagctttccaattaaaaaatagagtttcattccgaaaagcaatgaaaaaagctattgaattaactaaaaaagcggatataaagggaataaaaatccaaattgcgggtcgtctagcaggaaaagaaattgcacgtgccgaatgcatcaaaaagggtagactacccctccaaacaattcgcgctaaaattgattattgctgctatccaattcgaactatctatggagtattaggtgtcaaaatttggat

SEQ ID NO: 133 - DNA, 166 bp, Zea mays
  Clone ID: LIB3115-014-P1-K1-F6
cccgaaatgactcactttcggtgaaattcacccgtttcggcgaggtccgaatataccggccaaatgtttccattggatttcaattattagtcaactctagagttgaaacaaacatacaagttcttcattcaataatcaatatagaagtgcatatctgtttcctctt

SEQ ID NO: 134 - DNA, 441 bp, Zea mays
  Clone ID: LIB3115-014-P1-K1-F7
cagaaacacaccaagcgaagcacattagcaacaacctaacaacaatggctaccaagatattatccctccttgcgcttcttgcgctttttgcgagcgcaacaaatgcgttcattattccacaatgctcacttgctccaagttccattattacacagttcctcccaccagttacttcaatgggcttcgaacacccagctgtgcaagcctataggctacaacaagcaattgcggcgagcgtcttacaacaaccaatttcccagttgcaacaacaatccttggcacatctaacaatacaaaccatcgcaacgcaacagcaacaacaattcctaccagcactgagccacctagccatggtgaaccctgccgcctacttgcaacagcagttgcttgcatcaaacccacttgctctggaaacgtagttgcaaaccagccacaacaaca

SEQ ID NO: 135 - DNA, 64 bp, Zea mays
  unsure at all n locations
  Clone ID: LIB3115-014-P1-K1-G1
ggaaaaaaaaaaaaaggaaaattttaaaatttttttataataaataaatataaggggtanttgg

SEQ ID NO: 136 - DNA, 399 bp, Zea mays
  unsure at all n locations
  Clone ID: LIB3115-014-P1-K1-G2
tttggccttcttgttgaccttggttggacccaagggtttggagttcgaacgctactctttggactataacaccattcggaattatctgcatgttaggcgggcatggggaaagcaaagagctgagcagaacatcccggggtatgccaagaagatcgggggggcctccgacaaggacggacggatcgaggcaatggttacgcagtcacgtgactgactcacaccattcacactctactagctggtagtatttgtactgcatcgtagtaaagattaaggaatgtagaagcattgtttgtaatgtgacgtagtggccatgtatacagtagaatgtataggctgcatggcagcagctcacatctgtatgtacatcctgcgctngccaagttctagtttgcattt

SEQ ID NO: 137 - DNA, 448 bp, Zea mays
  Clone ID: LIB3115-014-P1-K1-G3
tcgcccacgcgttcgtctttatcgcgagtcactgaaaaaatatagatgcttttcagaactgaaacagaaagtgaagacccagaaatagatacactttcatttactgagctgagggacaagctgcttgcccttgatcctctggataaagatcatgtggtgaaaatcaataaagcggaagctgagtattggaagaagtcagaagggtatcgcatgggctggagtgatgaaatactgggcttcgattgtggtgggcagcagagggtttctgaaaactgcttccccactggaaccctagcaaagccaagtatgaaggatcttgattatatagataagctgctgcagctgattgaaaaggaggagatacccgcacctggacctatcgagcagcgttggactgcccgcagcaagagcccgatgagcccggcatcaagctctgaagaagatgatg

SEQ ID NO: 138 - DNA, 399 bp, Zea mays
  Clone ID: LIB3115-014-P1-K1-G4
gtacttagagttcgatgcctcatagtactcgggcacacggctagttagctcgacaccatcatttgatcgcacgcctgcagcgcctggttcgcgtagtacctcacatcgacgtcagggtcctcgctgagctcaacaaggcatggtttcacggtcttctccacgacagattgatcgagtacttagagttcgatgcctcatagtccaattttggattacctgtaatttgttgggccttttagattgaagagttttccgtctagcctcggtggacagatcgacgctgcccatgctgataaatggacggtcctgatccattgttcgttgtgttattaatgttgtataattgagcaggacacaacacgtacgttactctctgtgtctgtgtgtgtttgcatggca

SEQ ID NO: 139 - DNA, 384 bp, Zea mays
  Clone ID: LIB3115-014-P1-K1-G5
cccacgcgtccgagaacggtgatgctggtatggtgaagatgatacccaccaagcccatggtggtggagacattctcagcgtatcctccccttggtaggtttgctgtccgtgacatgaggcagacggttgctgttggagttatcaagagtgtggagaagaaggacccaaccggcgccaaagtgaccaaggctgctgccaagaagaaatgatgcgattctgcgcctgctttagcaatacctagttttcatcattacaagttttgtttgtggtcgttgctgttattgtgtgaactgttgagctcttgtagcctgtgcacttttatctatttatttggtacccttgtgctattttacccttttcaatacaagaatgctgtgagagctt

SEQ ID NO: 140 - DNA, 454 bp, Zea mays
  Clone ID: LIB3115-014-P1-K1-G8
gttctagatcgcgagcggcctggtgtgggaggaccagatgccgccgtccgccgtcgccgtcgccgccgccgcgcacgggttcgccccggagctggtggagcccgggatcacctcctcgtcctgatctggacggggacgtcggccgggcctgcctacctacgctaaccccagattctgaccgacggccggcccggcggcaccaagtagaaaggctatctatactagtaccacctaattaataccgtaatctactactactactactaacaaagaagattgttgggatggaggatgacagctagctagcgtctgctcagttagcagcatatcgtcgttagccgcgcagtgtgcagctgcgtcagctctgccattgctgctcctagcttttgggcttttgtgttgtgctctcctagaagtagggaggaaggaaggaaggcatgctatgtatattccc

SEQ ID NO: 141 - DNA, 325 bp, Zea mays
  Clone ID: LIB3115-014-P1-K1-G9
agtgagcacagctcgagccatctttcggagttctcaggcactgcaccacctcggaagccatggctgctgcttctgcctccatggacaggatctcccagagggtgtcgtcacaggaggtcccgaccgacctcaccgaccgcatcggcgactgcgtattcactctacacaaggcggtgatcgtgcccaagtgcggctacatccgccgggccggggcggctagccagacacaaggcccggagggcggcgccgtacagctggaactactcacactgacgatcggcgctgtcgcctatcacaacgaggctcgctgttggtactgcgacag

SEQ ID NO: 142 - DNA, 241 bp, Zea mays
  Clone ID: LIB3115-014-P1-K1-H1
cttccaaaagggttttgttaccttgtaaaccaactatggttttatttaacaatggtaaactgaccggggccaaagtgctccggaattaaaattaaaaccgtcctcctttaaaaaaaaaaaaaaaaaaaaaaaaataataataattattaaaataaatataaaatatattaattataaaaaataaaaatattaatattttataatataatatttgggggggggcccttttaaaggaataaag

SEQ ID NO: 143 - DNA, 445 bp, Zea mays
  Clone ID: LIB3115-014-P1-K1-H10
gtcacatagatgcagttgatctcagtgccctggattgccctctctgaaaaggaagtgatggacactattgcatgcctcccatccgacaaagctaccgggcctgatgtgtttactgggaggttttataaaacctgttggaacattattaaggtggatctaagaggttttataaaacctgttggaacattattaaggtggatctaatggaggctctggctgtccttcatcaaggcaatgctcaaaagctttggcaactaaattcgtcctatctcatttgatccctaaaaagatggatgcttcttcgcctggtgatttcagacctattagcctaaattggtcacaaacatgcttgctaatcggctgggccctcgcctgcatgagttggttgcagctaatcaaagggcttttgtcagaggaaagtcaattcatgataattttatgctag

SEQ ID NO: 144 - DNA, 391 bp, Zea mays
  Clone ID: LIB3115-014-P1-K1-H11
cgagacgctattgcccgcctgactctgctgaaactcataaaggttgtctatgagcatcatcctcgaccaaaacaggtcatagtagagaatgacctccctcagaagctacaaaacctgattgaagaacgcaggggtggacaacggggcggccatcaagtgttggtcaaacaaatggccacctcattgctgaaggcgctgcacatcaatacagtattgtgattttgatgggtcatgtgttttcctctcaagttagtgtttacgttttcgctagaggaagaaaaggggcgtccttctctttttgcctccttttctgctgtggtggcttctcacgagcaccagactcatttgttgtacctgatccctccttttttgggagaaagggtcaccgttt

SEQ ID NO: 145 - DNA, 435 bp, Zea mays
  unsure at all n locations
  Clone ID: LIB3115-014-P1-K1-H12
tctcgctctggcttttgttgttcaaggctcatagcatgatgatcccctcctctccatgactccgtcgccatgggcacgtatagctctgatcagcttcaaccatcatggggagtcaagagtcggagcaggccaaggtgctcccgggaaccgactgcccgcagcagccaccggcgagcaggacctggcagaggaggttcgacgatgaaggcaagaacgtcgccatgttcagcatgaccatgagcgacctggtggaacttatgcccttgatggtcaaaatactcaagctgcacgtggaagaaaacgccgaaggccgagtgggttaccaaactctatctaggattattgcgnttctttctctctctctctctctctcttggcaacacccagttcatgatcatgtttcagtgagtgctgaaacatgactaaagcatgact

SEQ ID NO: 146 - DNA, 398 bp, Zea mays
  Clone ID: LIB3115-014-P1-K1-H2
cttcggggacgcctgggccccttccccatcttgtcgagggggaggccaattccggaacccgccgcctaattcaatggggcccaaaggccgggaggaggccggccgccaggaacctggcgaggaagagcccgccgccgaaaaaggcaaccgcggggaggaggccaagggttggaaggcggttcccggcggcaagtcccaagcaaggggggtggcgaggaggaaggggaggaggaaagaaaagaagtcggggagacgtacaagatcacatctttaagtgctgaagcggtgcacccgacattgcattcgtcagggcatgtcatatgactcttatcacacatttcaaagtgcggcgagcgcagctgccgacacagagcacatactcgggacaactcgtgctg

SEQ ID NO: 147 - DNA, 462 bp, Zea mays
  Clone ID: LIB3115-014-P1-K1-H3
cctcgccaaaggggcccttgttttggttggtttaatgggtcaaaaaatgaggaagaggaccaccctactggtaaaaaacatgaggggcatgttctaagtcggggagaggcgagcccagtaaatgggtggctgataccaacctgacatggtccatgatgctccactaagatgcagaagtccagtgctgtattcttggtgtcgctgaaaccaaaaactaactttcagaagccttttttgtgttttgacacgtctagcagtctagcagaactgcagaagtatataacaatatagaacgtgcgcttgatgagcgtaagtagagcatgttccgctaatttaaataagagcctttgactgaaagcgtgacatatattttggaaactgagaaaagaagagcttaacttcgattgaagcagtgacgtaattttagaatatgatacgatgtttatcattcaataatatagg

SEQ ID NO: 148 - DNA, 374 bp, Zea mays
  unsure at all n locations
  Clone ID: LIB3115-014-P1-K1-H4
tcgtgcttgtgagaggggagtacatttgaaatgccttcagcagtatggcaataagggtgtccctaaagctgagtggcattgttctgcatgcctgactcanagtaagggcaaacccttaccaccaaaatatggcaaggttacaagaactgtagttgcatcaaaggctgctccacctggtggtggggcacagctttcttttgcagggatcagcagaaaacatggcttcaaaggaaaatcaccaaaagttggctgcaaatgggaatcttatgaaaccaatctctattcaagggggtagcacaggacccaacaagaatgtattggcactgagtgccattacggctgggtcacaatcacaattagtttttaccttgaga

SEQ ID NO: 149 - DNA, 306 bp, Zea mays
  Clone ID: LIB3115-014-P1-K1-H5
gggcgtgccgctgaagctcgttaagaggcttgccaacacataccagtgcttttttggcatcataggccatcgagaaacagggtccccgtctccgtggtcctggtctcaacaaggcaggcaagttacgaacgcatgggtactcaccaggaatcccttgagtgcaaggtgaacgagactaacgcaaccgtcaagttccagctcaagaaggtcctttgcatgggtgtcggcgcctcaacctttttcctgttaggttagcgtttacatcttagctagaggaagagagggggctttcttttttcttttctt

SEQ ID NO: 150 - DNA, 235 bp, Zea mays
  Clone ID: LIB3115-014-P1-K1-H6
agccatggcgggcaccttctgctttcttcttcaccagtcaaccgcccgcctcggcgcgtcgacgcgcctggccgccgccccgtcgcgcagtgcccagctgctcgtctgcaaggctcgtaagcaggaagccgcctgtggaccattagacgacgtttttgcgccgtgccgtgctcgtgcttctcgccggcgttactgtcgccgtcggcgccaaggtgggttccgtcgccgcggcata

SEQ ID NO: 151 - DNA, 402 bp, Zea mays
  Clone ID: LIB3115-014-P1-K1-H7
cacaggcagcagctagcatcccttactctcggtacctgacctgaccacgagagcaacatgggcggaggacacgacatgcacgggcagcactacgggcacaacggcggcgtgaagggcttcgtgtccaacctcgtccacggcggcggcggccatggccatggaagcggctacggccatggccatggaaacggctacggccatgggaatggcggctacggcggcggccacgggtaccctcctcccgccgccggcggcgcgtaccctcacccgcacggcgcctacccgcccgccacctaccccgcgcactcggcgcactacgggcacacggggtcgtaccacaccagccacaacagctacggcggcggcggcggtcaccacggtatctacggtgggggcaagcac

SEQ ID NO: 152 - DNA, 329 bp, Zea mays
  Clone ID: LIB3115-014-P1-K1-H8
cccacgcgtccgggttgacaatgactttcaggactattacttctacaacgatgacactggagtagtctattgtttgggaacccgcaactgtgaagactttgagctgagagattctttggttgacaagtacatcattagaattcttcaaacttacgtaccgttcctatccccactgcctgtaaaacagaaagcatgcgagtcgctggctggctgttgacctcacctcccctctcctctcctctcctcttgtaccaatgttaaattcttacgaccgtttaatgtatcttaatcagacaatccagaatcgaccctaatcgtctgctttgctc

SEQ ID NO: 153 - DNA, 301 bp, Zea mays
  Clone ID: LIB3115-014-P1-K1-H9
tccacgcgtccgggttgacaatttcttttatttctattacttctacaacaatgaggcttttggagtttattgttggggaacccgcaacttttaatactcttagcttttagattctttggttgacaagtacattattataattctttaaacttacttaccgtacctattcccactgtctgtaaaacataaagtatgcgagacgctatctttctttttaccttacctactttttacttttctcttctcttgtaccaatttttaatatttactaccgtttaatttattttatttatacaattca

SEQ ID NO: 154 - DNA, 360 bp, Zea mays
  Clone ID: LIB3115-012-Q1-K1-C9
aagaggagctcggacaaggcatagcgccatcgttcggtttccttgctgaattcccgatcgcgggctcgctcgaaaagaaagaagctagcttttagcatggcgtctctggcgttcggcagcaccgtatcggcggccgtggcggcgacctctgggaggacgcggtcggcgcgccggtccgtgctggtcgtgccgcccgctgccagcaggggcggtccggcgccggccaaggaggagaatggcctcggcgagaccatcttcggcttcatcttcaagaatgaccaactggtggagacggacccgctcctcaacaaggtctgcgccgtgccggccgtcgtctcccgcgccaagacgaccgtcggc

SEQ ID NO: 155 - DNA, 430 bp, Zea mays
  unsure at all n locations
  Clone ID: LIB3115-009-Q1-K1-F9
cccacgcgtncgtggagaattgtcaaccaccgggatatcattccaacagggccacgtcttgaggggctattgccatgtggaagcattattttatcttataatttggggacgcaaaagaagcaccggtaagtaacagcattctagatgatgaagaccaaggtgacgtgataggggagtacacacctgatgttcttgttactgaatttatgaaaggcgagaagcaacttgtggaaaaactactgcaaacagaaataaatttactccgctcaatcaaggatggttcggctcttatgcagcacatggaagactcctactatgtcacccttcttgagaatgtgagatcaacttattaagtggcagatactgccaatgatgaataccaattgacagcgtgatcctagtaaaactgcacagctgaacatcatggact

SEQ ID NO: 156 - DNA, 437 bp, Zea mays
  Clone ID: LIB3115-009-Q1-K1-G10
ctaaattcgacttcgcgaacaccacggcgctcttcttcgtccagctcttggtgatggggggcgctgaaaccaagaggtacatggacttcaaaaatccaggatcgcaagcagaggaagggacattcatagggttagaggctgcactcgcaggtcaacagccaggctaccccgggggcccactgttcaatccactatgactcgcaaaggatatagagaatgctcatgacgagaagctcaaagaaatcaagaacgggaggttggcaatggtagccatgcttggcttcatggtgcaagcatccgtaactcatgccggccccatcgacaatctcttgacacacctttcggacccgttcaacaaaaatattattcacacattcttctcttcctaagtactcgttccaatgcccggatgccatggcggcacaaaaagggcacaa

SEQ ID NO: 157 - DNA, 376 bp, Zea mays
  Clone ID: LIB3115-009-Q1-K1-G12
gctactgggacaagatctcacagggcggccttcatagaatctatgagagggtcacctgggggctctactccgagaggctgatgacccttaccggcgtgtacgggttctggaagtacgtgagcaacctgtagaggcgcgagacccgccgctacatcgagatgttctacgccctgaagtaccgtaacctggcaagccaggttccgctgtcctttgattattacggggaaagaagaagaataagaagcccatgccggagaaccattgcctgcatttcgatcttgtttaccgcaattcgcattgttaggcgcgtattgtaattatttgttacttggtttccaaagatcctttggtttccttcttcgatattttttccctt

SEQ ID NO: 158 - DNA, 379 bp, Zea mays
  Clone ID: LIB3115-009-Q1-K1-G2
cccacgcgtccgattgagggaaagtatctaggacttgcttcaatgaatgcaaactaaatacgagttggggagacacaacaagcttgtctaagctccttgcaggcgcacaactagaacatttaatcgctatgatggcactctgccgttgaatatctgacttctgtcatttaagactcaatcagaatatggacattcacttctggacgtgcttgtgaatttgtgcacgaattgaatcgcagtggaaatcaattccactcatgtgttttccacccaacttatcaatccttgttagtgattggttgttacgagtccttggaactctgggacataagggagaagaacaccatgatcttcaacaatgcgcatgacggtttggttg

SEQ ID NO: 159 - DNA, 217 bp, Zea mays
  Clone ID: LIB3115-009-Q1-K1-G3
acgcccacgcgtaacactaacaaaatttctctagtgcggatattccagcctctaaacatacacggaaaagttttaaacaaacaaacctgcctaacactcaccctttcactctattttaactataaagaactttaattcctctcgtcccttttatatctgatatcccccaaacttactcattaaaaaatacttcattcacatcatgtttaatcttgac

SEQ ID NO: 160 - DNA, 364 bp, Zea mays
  Clone ID: LIB3115-009-Q1-K1-G4
aaaaaaaaaaaaaaaaaaaaaaaaaaaaaaattaaaaaataaaaaaaaaaaaaaaaaaaaaagaaaaagggaaaaaaaaaaaaaaacaaaaaaaaaaaaaaaaaaaaaaaggggccggcccttttaaagaatcaaactttacttccccttccatccaacgaaatactttttttttagtgtccccaaaaataaatccaatgcccgcctttttaaaacgccggaactggaaaaaccctgcctttaccaaactaaattcctttgcaaaaaatccccttttccccagttggcttaaaacaaaaaaggccccaaccaatcgcctttccaaaaatttgcccaccctaaatggcaaatggaaccccccctt

SEQ ID NO: 161 - DNA, 87 bp, Zea mays
  Clone ID: LIB3115-009-Q1-K1-G5
ggagatctgtcttatatattgatgaggagaaagatgcccaaaggcaaaaaaaaaaaagtggggacaataacaagtccatcagctgct

SEQ ID NO: 162 - DNA, 390 bp, Zea mays
  Clone ID: LIB3115-009-Q1-K1-G7
cccacgcgtccggaaacaagagtcctctcaagaactattgctgattggtttacgggcctgggaattttgagttattcaatacatccgttgaagtttggagttcttcttacaaaggaatgccttcatcaggtctcaacttcccattttgttgacgcagtccactattgtaatgagatgtaaggatacaatgtattatgtatggcacataatagcagtgcatatttggggtgtgctgagctggtcgtgctcacccgcaggccctagccgtactacaaatatctgatcaagattggtggtttggggcctacgtggatcgtatttgcaagctataaaaagcatcgaacccaaaaagttcaagcagctcgatcctgggccaagttgggcaaacca

SEQ ID NO: 163 - DNA, 442 bp, Zea mays
  Clone ID: LIB3115-009-Q1-K1-G9
ctagcaacatagaaagcacaatagtgtaccaacaatggcagccaaaatgggttgcttcctgatgctccttggtctttctgcaagtgctgctaccgcaaccattttcccacaatgctcacaagctcctatagcttcctttcttcccccatacctctcaccagcggtgtcttcagtatgtgaaaacccaattcttcaaccctacaggatccaacaggcaatcgcagcaggcatcttacctttatcacccttgttcctccaacaaccgtcagccctattacagcagttacctttggtgcatttgttggcacaaaacatcaaggcacaacaactacaacaacttgtgctaggaaaccttgctgcctactctcagcaacagcagtttcttccattcaaccaactggctgcattgaactctgctgcttatttgcaacaacaactacca

SEQ ID NO: 164 - DNA, 297 bp, Zea mays
  Clone ID: LIB3115-009-Q1-K1-H11
cccacgcgtccggtcccagtatggcttgggcaaaaccttaagccacccaggaagagaccagagtagcctccaactgtctcaaccattaaccagtgaagttacttcaaccaacctacaccgccagtcgcctgtgccttcgagtcctagctccgaccggtgaccggatgcgggatgtataccatgctctgacgccgagcggctgcctgctcgcgcccgactccgcctggtcgcctgatggacgaccgccgatcgccacgctgagcgccgcggcgtgccctgtcccttatatgcttgctg

SEQ ID NO: 165 - DNA, 402 bp, Zea mays
  Clone ID: LIB3115-009-Q1-K1-H2
cccacgcgtccgcgcgagtgagtgaacaccagccgtattgtcccgaccccgaccgatccgcgcctgctgcagccatggcgacctccgcggcgctctctaccgccgccaatcccacccagctctgccggtcccgcgcttcgctgggcaagccggtgaaggggcttggcctgagcatgggccgcgagcgcgcccagcggagcattgtgtgccaggcggcgagcagcatctccgccgaccgcgtccccgacatggagaagcggaagctgatgaacctcctcctcctcggcgccatctcgttgcccaccgtcggcatggtcgtcccctacggcgccttcttcgtccctgccggctccgggaacgccggcggcgggacctacgcgaaggacaagctgggcaacgaca

SEQ ID NO: 166 - DNA, 216 bp, Zea mays
  Clone ID: LIB3115-009-Q1-K1-H3
cagaggaggaacgcgaccaatcttgctctagtgaggagattccaggctcttggaatacacggaaaagtttgaaacaggggaaagtactagtgattcagcttttgttgttcttctgtctatagagaattttaatttcttctgtgagtttttgtggggatatggccaaaacttcctgatgtaaaaaatacttgatttaatttaggtttaatgttgagc

SEQ ID NO: 167 - DNA, 387 bp, Zea mays
  unsure at all n locations
  Clone ID: LIB3115-009-Q1-K1-H4
tcgagcacgcgtccgcccacgcgtacgactggttggaatctcctctggagcagccgccgctgctgccataaaggtggccaggagaccacanaatgctggaaagctgatantggttgtgtttccgagcttcggcgagaggtacctttcatctgtcctctatcagtccataagagaagaatgtgagaacatgcaacctgagccatgagggagccgtcactttaagcgggcatagtaaatgtttctgaaataagacgcgtagccagcatcagtttgctccacttggaatcatttggccatgctcactctatcctttcgctagcctctatgaccggacctaaactggtgtgtgagaaacatccacgactgtcctaccaactgcttttctaa

SEQ ID NO: 168 - DNA, 311 bp, Zea mays
  unsure at all n locations
  Clone ID: LIB3115-009-Q1-K1-H6
cacgcgttcgcactagtgagtaaacaccatccgtattgtcccgacccccaccgatcctggcctgcggcaaccatggcgacctccgcggctctctctaccgccgccaatcccacccagctctgccgttcccgcgcttcgcttgtcaagccggtgaaggggcttggcctgagcattgtcctcgagcgcgcccaacgcagcattttgtgccaggcggcgagcagcatcttctccgaccgcctcccctacatgtagaagcggaagctgatgaacctncttcttctcggcgccatctcttttcccaccgtcggcat

SEQ ID NO: 169 - DNA, 460 bp, Zea mays
  Clone ID: LIB3115-009-Q1-K1-H7
gatagatggaggatcatcacacggacaggaggatatccaaggaggccggcgagggaacgaagctgaccaggagcttccgctacgaggactacagcaccaggcgagtcttcctgcgcagctacccgctgcagtgggactggtcgccctcgcgggacgacgacgacgacgacaagcaggacggccaggatgccgccgacggcgacgagtgctgctgcagcaggcggtggaagagcaagatggtggcggccgtcacggagtggggggaggacaagctgctgctgctacgcagggccaagaagcgcctcgcgctctacctcatcggctgccaccaccacggtcgccgcgcgctgcccttcccgtcagcctcacccgccggatcatgcaccgtcgccatgatgctcgccttcagatgatcgatagatattcaccaccgtacgtgcacgcacggcgcgcgcgcgtg

SEQ ID NO: 170 - DNA, 426 bp, Zea mays
  Clone ID: LIB3115-009-Q1-K1-H8
cggacgcgtgggttttttttaggggtaacggttgcggatagcctaataatactgggagggtgatacagcttgacttcatttcaatcacagcaggatattacaacatgagaaaagggggaaaaagggaaaacgccacataataaatgtctctctctcacacacagctcatccactgcctgactgaacaacctagctgctgctgctgcttgcttctgctcacagactcaacggtgccctcttgcacgtagccactcttttgtacagattctccatgggccttggaaatttcttttcttacttggttgcatggacggacggacaaaaacaattccatcgaaaacccaaaaagagaaaaagaaaacctcgttgattgatgaactaggacagattacctaactacttccacgaccttccacttcccaacct

SEQ ID NO: 171 - DNA, 176 bp, Zea mays
  Clone ID: LIB3115-010-Q1-K1-A1
gatagaccttctcaatacaatggaccgtgcttcatccaacaatggaacggcttcacatggtgccgtgtccatcacaaaaaaggagcctatattcatgtactagaattattcagattcagttcacattgtgatgtgttatttttactttcgtcgtgctataaccgatagcgctcttc

SEQ ID NO: 172 - DNA, 215 bp, Zea mays
  Clone ID: LIB3115-010-Q1-K1-A10
attcgtccactccttctctcacacattcaatctaattttaacatccattctctctaaaaactatggtgaattttcgcatatcttcaatcaatctcaaactcttctaaaccattacttcatactataatctatcccctaccatacttaataaacttatttaccattatcctttctctaaactattcctactttcaaacattccctctccttttcat

SEQ ID NO: 173 - DNA, 109 bp, Zea mays
  Clone ID: LIB3115-010-Q1-K1-A11
aaaaaacatatctacaaatcaatacaatcttttataaaaaactaaatcaaataaaaaaaatggacataattgggaaaaaataaaaaaaaatggccgtcccttctaaaca

SEQ ID NO: 174 - DNA, 312 bp, Zea mays
  Clone ID: LIB3115-010-Q1-K1-A2
cggacgcgtgggcatacacatgggttatgatgtttctgcaaaaatgacgcactaatatattggcgtgcgtataatctgatacacctaagtaatgcattacatttcgtaaacaggccaagcagcacaagttcctgactaaggatactccggagtacgcattaccttcctggtttgcttgttatgaattggaatttgtctaacactcttttattcattagagttggaagtgaagcatcttccacccataactcgtgtatgtacagcatatatatgtattacctaatcttctccctaaggagcattagttggcac

SEQ ID NO: 175 - DNA, 261 bp, Zea mays
  Clone ID: LIB3115-010-Q1-K1-A3
ccgacgcgtgtgcatacacattggctttcacttgtgtcaacaagagcccgattgacactcggggcgggtgctgtttgtgatacatcaacggacacatcttgctgcaacggaagatctactatgacgaggcctttgaaaccttttcgtggaaactcctccctaacgtatctctattcgaggtgcgctttgaggaattggaggcgctcattttctgcgctgcttacctcgtccattatcatttgtcattgggtgaagccagtt

SEQ ID NO: 176 - DNA, 437 bp, Zea mays
  Clone ID: LIB3115-010-Q1-K1-A4
cccacgcgttcgggacaaaatcggcaaccatgggtgacagcgaacttctccatggtgggggggaacacagggcacgaccggcgctaaagtaggtcagggacacgaccgacgatctctgatggccaagcacacgtaacgacaatgcccacgagctgggaggaaggatgcatggcacggtgtcaacggtcggatccgagcgcgaggtaggagctcgacactacaacagctacagtcatttttggcgtctaggagccgacgaaaataggtcctttgctgccaaaaataagctattattgacggcttgaggcttattttcggcggctcgtgtctgccaaaaaaattagcccaaaaataagattttattttcggtggctggagctcgggcaccaaaaataacatattttcggcggcttgtgagctgaccacggaaaataaca

SEQ ID NO: 177 - DNA, 196 bp, Zea mays
  Clone ID: LIB3115-010-Q1-K1-A5
attaatccttgtatagaacaatcttatttattaccaaaaggtctctgataacctggggcggggcttcaagctccttgtcttcctcaacctacaagtgctcaacgaaatacacatcccttcagtaaactacaacttccgtcacacctaactatatgattctgatgtattcggagaacaatgcctggcacgaattcat

SEQ ID NO: 178 - DNA, 345 bp, Zea mays
  Clone ID: LIB3115-010-Q1-K1-A8
atgcgctaaagcaccctgaacacgttcaacagttgattttggttggtcctgctgggttcgggtcagaaacagagcatagctctgagtggttaaccaagtttcgagcaacatggaaaggcatgctaatgaatcgtctttgggagtccaattttactccccaaagggttattaggggattgggtccttggggtccaggtctagtacagagatataccagcgccaggtttggtacaagttctactggtgaattactaacagatgaagaatcggcattgatgacagattatatgtactatacgttagctttcaaagctagtagagagctgtgcttgaaatatatatttt

SEQ ID NO: 179 - DNA, 245 bp, Zea mays
  Clone ID: LIB3115-010-Q1-K1-A9
attcgtccacgcctcctctcacacattcaatctaatttcaaaaaccgagctccctagaaaaaagtgaggaatttctgaaggctacatctaatttcaatctcttctgaactattactttcacttgcctctctatcaccttacatacttgattgtaatattggccattttgttttgactagtattgcttattttaatgatccttctccttttcatcctatttactatttctccaaatatgcttttaa

SEQ ID NO: 180 - DNA, 332 bp, Zea mays
  Clone ID: LIB3115-010-Q1-K1-B1
gatggagctcctcgagacaatggaccgtgcttcatccaacaatggagcggctacacaaggcgcccgtggcgatcacaaaaaaggagcctatatccatgtactagaattattcagtttcactccacatcgtgatgttttatttttacttttgtcgtgctataacggatagcgctcctcgttggcgccactggcgggtggttctgcctctggtctggtgtgtttgtgtgtggtcacacttgccagccagcacaggcgcctgcttgtacctaaattactgtttccattgtcgccatcatcggctaacattgtcataatgtcagcttgggttatgt

SEQ ID NO: 181 - DNA, 99 bp, Zea mays
  Clone ID: LIB3115-010-Q1-K1-B10
ttttcctatctcccttcttaacatattcccatcttgaattgtaaatggaaccctccttataccgttccttataccccgcctatttttgatttttccccc

SEQ ID NO: 182 - DNA, 283 bp, Zea mays
  Clone ID: LIB3115-010-Q1-K1-B11
tccacgcgtcctggcgagcttccgatgttaccgccagctgaactcatgttccatcccggggcatgatggggagaattttctggtggccgcctgtccttctagaactgttaggccctgtttggaatcttagggggcgttttggacataagtttttccaaagttttttgaagaataatgcagtattctcaaaaactttagtattatataccaaaacttctttgacatactatctaaattctcttttttcaaaactaaaatattacaaattcttgctctcttttta

SEQ ID NO: 183 - DNA, 432 bp, Zea mays
  Clone ID: LIB3115-010-Q1-K1-B12
ctggaatattcgacaatgtaggggaggcgattgttggcaccatgcgacgagatggcccagagggattttttcgtggcactggggccacactgtgtctcgaggttcctttctatgttgctggaatgtgcctctatgcagaagctaagaaggcagcacagcatgttttgaggagagacttggaagcatggaaagtagtggcagttgtagcattgtctggaggacttgcggcattagtgaccactcccttttacttgattaaaactaggttgtttactgccctttcaggcccaccattgcttatgcaaatgataattttgtccatcttgggaaccaaggttccacttggcctctttaaggccctcaatcccccgctttttttgaattattcccttttgaaccattaaactttgtaggctttttacctttccaaaa

SEQ ID NO: 184 - DNA, 445 bp, Zea mays
  Clone ID: LIB3115-010-Q1-K1-B2
accaactagcaacatagaaagcacaatagtgtaccaacaatggcagccaaaatattatgctgccttatgctccttggtctttctgcaagtgctgctaccgcaaccattttcccacaatgctcacaagctcctatagcttcctttcttcccccatacctctcaccagcggtgtcttcagtatgtgaaaacccaattcttcaaccctacaggatccaacaggcaatcgcagcaggcatcttacctttatcacccttgttccttcaacaaccgtcagccctattacagcagttacctttggtgcatttgttggcacaaaacatcaaggcacaacaactacaacaacttgtgctaggaaaccttgctgcctactctcagcaacagcagtttcttccattcaaccaactggctgcattgaactctgctgcttatttgcaacaacaactac

SEQ ID NO: 185 - DNA, 88 bp, Zea mays
  unsure at all n locations
  Clone ID: LIB3115-010-Q1-K1-B3
ncgaaacatacggcaggacagcgaaacacaggaccaagaaaggcagaacaaagacaaagggggcgggtagagcatgggaaccggcaac

SEQ ID NO: 186 - DNA, 352 bp, Zea mays
  Clone ID: LIB3115-010-Q1-K1-B4
gggcaacagatggtcgcagatcgcgtcgcacttgccgggccgaacggacaacgagatcaagggcttgtggaacagctgcctcaagaagaagctgcgccagcgcggcatcgaccccagcacccacaagcccatctccgccgacgcggcggcattggagcagccggcgtcgcgagaccgcaagccgtcgttggccacagccgccgctggtggcggcctcgatgtgaagcagcatcagcagcagcagcaggtgttcgacccgttcccgctgaccgacagcttcggcggcggcttcgacgacgcggccggcgccgcattgtacggccacatgggcggcggcggcaagcagcaggac

SEQ ID NO: 187 - DNA, 362 bp, Zea mays
  unsure at all n locations
  Clone ID: LIB3115-010-Q1-K1-B5
caaagccatggactttgaaagtttgaaccctggagagcagatatacgaaaaaatggtttggggcatgtatctgggagagattgttcnaagaattttactcaagttggcacatgacgcttctctatttggagatgttgttccaactaagctggagcagccatttatattgaggacgccagatatgtcagccatgcatcatgactctttgcatgacctcaaaactcttggatctaaactgaaggatatagttggggtcgcagatacttccctggaagtaagatacattacccgtcacatctgtgaccttgtcgcatagcgtggagcacgctttgcttccccaagtatatatagcatcctgaaaa

SEQ ID NO: 188 - DNA, 408 bp, Zea mays
  Clone ID: LIB3115-010-Q1-K1-B6
ataaaactcaatttgatttgtatttattgtgcaggattttatgcaaggaaagctgggacgggctcctgtggagttgcctactcttaatgattgggagaaccatctaacaacaatttttcctgaggttaggttaaagagataccttgagatgagaggtgctgatggtggcccatggaggagattgtgtgcgctgcctgcattttgggttgggctgctgtacgatgaggaatcattacaaagcattttagacatgacttttgactggacacaggaggaaagagagatgctaagacataaggtaccgttgactggtctgaagacaccatttcgcgatggatatgttagagatttagccgaggaagttctaaaactggccaataatggattggaaagaagaggatacaagga

SEQ ID NO: 189 - DNA, 323 bp, Zea mays
  Clone ID: LIB3115-010-Q1-K1-B7
cccacgcgtccgccagaacctcccaacgaatgcaaacggcgaggtcgagactggggcttggggcccactcgctgtgctcaagggcttcaagaacttgcccacggggatgccgtccgtgctcctcgtaactggactcacctggctctcgtggttcccgttcatcctctacgacaccgactggatgggccgtgagatctaccacggcgaccccaagggtgccaacgctcacatctttgcgttcgacgaaagcgtcagagtatgctcgttctggctgctgctcaactcgatcattttatgattcagctctgtcctgatcgagccca

SEQ ID NO: 190 - DNA, 230 bp, Zea mays
  Clone ID: LIB3115-010-Q1-K1-B8
tccacgccttcgccaaaaccttccaactaatgctaacctctaggccatccctacggcagggggcccactcgattaactcaaaccctaaaagaacttgcccacggccatgcactccattcttctctgaactgaactcacctctcaaaccatgctccccttcattcactaccacacctactcgattggacataatacctaccacttcgacatcaatattaccaaccctcata

SEQ ID NO: 191 - DNA, 278 bp, Zea mays
  Clone ID: LIB3115-010-Q1-K1-C1
aatcttcgtaatcgattaattaacacggttgttaaccagcttatgaaacaccgaaaaaagagggagggcttatcaaattatctatccagccccttaaaagattcaacaattgacatacacaaaaccactatttgttttacgtcaagctatacgtagagtaactcccaatatatgcgtgaaaacaaagacgtttctaaataaggatcgactccgtaagatccttattgaaatattatctaaacaaggaaaagcacttgccattcgttggttataaaaag

SEQ ID NO: 192 - DNA, 206 bp, Zea mays
  Clone ID: LIB3115-010-Q1-K1-C10
ccctcaccgtgcctggcacctacggcttttactgcgagccgcaccaaggagcatgaatgggcggcatgagcacagtcaactaaagctagctatccattccatgcatcttgatctgtatgtactccgcccgtcgatggatgatgcatccatctctacttgcttttctcacatgtacaacaattaatgcaacagattaagtgcttact

SEQ ID NO: 193 - DNA, 216 bp, Zea mays
  Clone ID: LIB3115-010-Q1-K1-C11
ccctcaccttgcctggcacctacggctttttctgctagcctcaccaaggagcaagaattgtcggctagaggacagtcaactaaagctagctatccattccatgcatcttcatctgtatgtactccgcccgtctattgatgatgcattcatctctacttgctttccttacatgtactacatttaatgcaacaaattaagttacttatcttatagaaa

SEQ ID NO: 194 - DNA, 129 bp, Zea mays
  Clone ID: LIB3115-010-Q1-K1-C12
gtgcctaaaaactagtagctagtgattgcttctgtcgaatgacactatgcaatgtgatcgggaaccttgggtcttgttttcgaccctctgtatgactttcgtcataaaaatatgttggctccccgtatg

SEQ ID NO: 195 - DNA, 309 bp, Zea mays
  Clone ID: LIB3115-010-Q1-K1-C2
cccacgcgtccgcccacgcgtccgaccacgcgtatggttcgtgggtgaccggatcgaaatgggggcgtctgatgtggaataccgctgcttcgtccgccgcctcttctgggccactgactaccacttccttcacaacggcttcagcacctaccgcgtggtcctcgagtccaacatcatcctcgatcaggagacgcataagtcccgtggcttccgcttcttgaccttcttcaccgaggatgcgatgcgcaacgccatcgttggcatgaacggtactgagcttgactgacgctacatcaccgtcatctaggc

SEQ ID NO: 196 - DNA, 329 bp, Zea mays
  Clone ID: LIB3115-010-Q1-K1-C3
cccacgcgtacgggttgacaatgactttcaggactattacttctacaacgatgacactgggggagtgtattgtttgggaacccgcaactgtgaagactttgagctgagagattctttggttgacaagtacatcattagaattcttcaaacttacgtaccgttcctatcctcactggctgtaaaacagaaagcatgcgagtcgctggctggctgttgacctcaactcccatctcctatcctctcctcttgtaccaatgttaaattcttacgacctgttaatgtatcttaatcagacaatccagaatcgaccctaatcgtctgctttgctc

SEQ ID NO: 197 - DNA, 444 bp, Zea mays
  Clone ID: LIB3115-010-Q1-K1-C4
cctctcccctccaatggcgaccgccatttcctctctagtaactcctccgaccctccaccggcgctgcctgggccctgcctgcgtctccgtctccgtgtgcacccctatccgcatctccttccggcccgccgccgcgcctcaggtgtcgcgccggggctcggcgctgcgggtgtccgcctcctcggcggtgctcgaggcgccagaggcggtggcggcgcggaagctctacgtggggaatatccccaggaccgttacaaacgacgagctccgcgacatgttcgctgcgcacggcaccgtcgagcgggccgaggttatgtacgacaagtatacgaatcgcagccggcggtttgggtttgtcacgatgagcacagcggaagaggccaatgctgcagttgaggctcttaatgggactgatgttggtgatagaaaaattaaagtgaacgt

SEQ ID NO: 198 - DNA, 112 bp, Zea mays
  Clone ID: LIB3115-010-Q1-K1-C5
cctacacctacacactgatattgactcttcttattcccttacatcatactaccacgggccggggcttattcatcaataccaccatctcctacaacaatttcaaccctataaa

SEQ ID NO: 199 - DNA, 74 bp, Zea mays
  Clone ID: LIB3115-010-Q1-K1-C8
atgcctacgcccctatccacgatctcttcatcttatcctacctttcacccttccccttggggagggggcccatt

SEQ ID NO: 200 - DNA, 210 bp, Zea mays
  Clone ID: LIB3115-010-Q1-K1-C9
gcgcggacgcgtgggcaaggctgattatccttctattttcttccatgtttcctcacactttagctcgtttgggggtgtgtacgtgcaggttgacgtagttataatgttaaaggactaatgttcttattaccaatttattataacaagtgtgtgcatataaatttttctgagctcttaagctgtgagcctctcattttaaaagtgtttata

SEQ ID NO: 201 - DNA, 173 bp, Zea mays
  Clone ID: LIB3115-010-Q1-K1-D1
aaacagcttgtatgtaacacaacaactaatgctagaaagcatgcactacattaccataatgggattcatttttgtatgagcaataaaaaccattccacgctgttagtatggacaaaaaataaaaaaaatgattaaagaaactagaaagcaaaaaaaaaaaaaaaaaaaaatag

SEQ ID NO: 202 - DNA, 225 bp, Zea mays
  Clone ID: LIB3115-010-Q1-K1-D11
gaagcgcgctagagacatacacttatacctattctgctctttattatgatgattaaaaaggggaacattagggcgttcttcgcatactccttatagtccaaactctgtatccatccctagttacttactcctttattgattaccatttgattgtttcttccggtttttatcaatctcttaaatttcttcatactttattttattcatacatctttactttatttt

SEQ ID NO: 203 - DNA, 244 bp, Zea mays
  Clone ID: LIB3115-010-Q1-K1-D12
gtgcctagaaactagtagctagtgtttgctgctgtcgaatgacactatgcaatgtgatcgggaacctggtttcttgggtgcgacgcttgttatgactgtcgtcagtaaaatttgggggctccccgtatgagatgctgccgggcaaggcctcggtgtcccacctcgtttgtggcggggggcgctggagcccggtctggttgggttgggaagccctttaaactgttgtcacttgcattttaccttt

SEQ ID NO: 204 - DNA, 310 bp, Zea mays
  unsure at all n locations
  Clone ID: LIB3115-010-Q1-K1-D3
gggactggtattctgggacgctcaagacccccttgcccccggccgatccttctgtccagggggccgtgcatgctgcacagcgagctgcagagaacgcgtttcgcttgcctagagatgatgagcaggtgcacagggcggtcatggtcgcgaacagggcggccacagccgctcgagtggcggtgatcaaagcagtccataacaagatggatgggaagttttgtgagacctatgtgttgattgctgttgtcgagaccacgtttcgctctctctttctaacttnacattaaggtagggaaggacaataactata

SEQ ID NO: 205 - DNA, 210 bp, Zea mays
  Clone ID: LIB3115-010-Q1-K1-D4
cggactcgtggagactagttctacatctctttctgtcgttcgtcatctacaacctttcctgggctgattcatctatactacaatcctcttaaaacacgttccgcctatcataagattttgtcaactatctaaacgcccccattggtaggatcatctttaccacatgcgctccagtttgatgaatcttcatcttctctacccagatgcatt

SEQ ID NO: 206 - DNA, 103 bp, Zea mays
  Clone ID: LIB3115-010-Q1-K1-D5
tctacacctacaccccgtggaagacctttcttacgacgcggatcacattcccacgggccggggctttttcatctacatcagcctttactgcgccatgttcaac

SEQ ID NO: 207 - DNA, 225 bp, Zea mays
  Clone ID: LIB3115-010-Q1-K1-D9
cttggaaaatgaattgctttatggaaaatctttcccagtttctgctgaagtgcttgattgtagtttttgggtacctattggcatagctaagatagaacgtgggggttaagatgttaccattactgcattctccaagatggttggctatgctctccaggctgcattatatacttgtcaaggaatgaatcattgctgaggttatcaaccttctatcgatcataccac

SEQ ID NO: 208 - DNA, 365 bp, Zea mays
  unsure at all n locations
  Clone ID: LIB3115-010-Q1-K1-E1
cccacgcgtccggggtcgaggagaacagggctatgctaacttcaagaactgttgcttacctaaatggggattctgcagtggctggtcatggattttatgcgtctgcaactcctcaacttgatgaattgcttaaagaagctagtaagcaggttcgaaatccacacaatgggacacacagtctctatgatttgtggatgtcttctaacagctctcctttgattggaagattatgaggtggaagatcggattattctgcatttgttcaacacattggtattccatcattggacatggcgattgggtcagactatccggnctatcataacttgtatgatgacttcatatggatggaaaagattggagat

SEQ ID NO: 209 - DNA, 171 bp, Zea mays
  Clone ID: LIB3115-010-Q1-K1-E10
cggacgcgtggggcagcgcccaattaagctcgtgcacgtgatgcggggccggcggcgtgatacactgttgaggcagtttcgtttgtaacaagctattatgcaaagacaaatgcagtttgagaggcccaccatgtaacacacgtgatgacaccatagagcgcagctagaaat

SEQ ID NO: 210 - DNA, 289 bp, Zea mays
  Clone ID: LIB3115-010-Q1-K1-E11
cggacgcgtgggcgcgctagctgaggactgtacagcggcacagaggtgcgacgtacgagggcgactacgggggcgccacacatggcatcccagctctccgccgccgtgccccggttccacggcctccggggctacgccgcgcccaggtccgcggtggcagcgctgccgtccgtgagggtgggcaggaagaggtcgtcgtcgcagggcatccgctgcgactacatcggctccgccaccaacctgatcatggtgacgacgacgacgctgatgctgttcgcggggcggttcg

SEQ ID NO: 211 - DNA, 283 bp, Zea mays
  Clone ID: LIB3115-010-Q1-K1-E12
gcgtccgtgcctagaaactagtatctagtgttagcttctgtctaatgacactatgcaatgtgatcgggaacctggtggcttggttgcaacgcttgttattactgtcgtcagtaaaatttgggggcttcccttatgagatgctttcgggcaaggcctctgtgtcccaccttttttgtggcttgtggcgcttgaacctcgtctggtttgattgattagccctttaaaccgttgactcttgcattttacctttaaaaaaaaaaaaaaataagggctgttttttttt

SEQ ID NO: 212 - DNA, 382 bp, Zea mays
  Clone ID: LIB3115-010-Q1-K1-E2
cccacgcgtccgccccgaaaaatctccccgctcagaaagcagtcctcccaccgcacgcaacgcaacgcaacgcagcctcgacctcaccgacgccatggcgagcaagcagacccgccgcctcctcgtccttgccgccgtcgccgtatgcctcctcctccccgccgcctctgtcgccaccgacgtcgattactgcagtaaaaaggagtacccggtgaaggtgagcggggtgcagatcgtgcccgatcctgtcgagcccggcaagcccgccactttcaagatctccgcttctactgataaaaccatcgagaaggggaagctggtgatcgacgtcaagtacttcttcttctacgtgcactcggagacgcgcgacatctgcggagag

SEQ ID NO: 213 - DNA, 390 bp, Zea mays
  unsure at all n locations
  Clone ID: LIB3115-010-Q1-K1-E3
ggcgcaggcgacggcgggctcgtcttccagcccagccagttcaccgtcaaggccggcgacggcatgagcttcaagaacaacgccggctttccgcacaacgtcgtgttcgacgaagacgaggtgccgagcggcgtcgacgcctccaagatctcgcaggaggagtacctcaacgcgccaggcgagacctactccgtcaccctcaccgtgccgggcacctacggcttctactgcgagccgcaccaaggagcacgaatggtcggcaagatcacagtcaactaaagctagctatccattccatgcatcttcgatctgtatgtactgcgcccgtcgatggatgatgcatncatctctacttgttttcttacatgtacaacaattaatgcaacaaat

SEQ ID NO: 214 - DNA, 305 bp, Zea mays
  Clone ID: LIB3115-010-Q1-K1-E4
actagttctagatcgcgagcgggccccttttttttttttttttaagatgacgatataccgggcatgaatcaaacatactacaattcaagttaagaatgtgccggcgatgaaatgattccgttaaccaaggaaaccacaccgcagttcgcgttgttattaccacatgaagtacagatcgaagaggcgtcatcaccgtaattgacacacagttataaaatgaacaagatgaccagcgagcggtgattttacaacaaccgcacaggcttataatacacgtgcgcggaccatgcattcatcaaaccgac

SEQ ID NO: 215 - DNA, 165 bp, Zea mays
  Clone ID: LIB3115-010-Q1-K1-E5
cctacacctacatccctacctatcctcttttttttccactgctcatattcctatgtgcccggcattattcaacaatactacaattcccttcaagaatgtgcatcctataaaaaatattactgttacctgttaaaccccccccctctttgccttgtcatttccaca

SEQ ID NO: 216 - DNA, 282 bp, Zea mays
  unsure at all n locations
  Clone ID: LIB3115-010-Q1-K1-E6
cctcgacctacacacatacatactttcttctactacaccaccacaaacattgtggggccggagaagatcggagagtggggcgactaccccctcgatcgtcgagatcttaagactgctcttgacctcctcatcgcggtgaaggtcatggtcgacaacatcacctatatccgctccatcttcttcatctacatcatancctatgtcaaaccttactatgacggctcttagtatttcccccatgcttacgtggactacaagattgacctattcacgtttcacgag

SEQ ID NO: 217 - DNA, 344 bp, Zea mays
  Clone ID: LIB3115-010-Q1-K1-E7
cgacatcgtcccttcgtccccacgagcaaccgataatccgccggcgttgagatgggggttgatcaggatctcctatctggcgactagctcctgtcggattcattcacctacaaggagctcgagaacggcgtcctgtgggaggtcgagggaaagtgggtcacccaaggtcctgttgatgtggacattggtgccaatccatccgccgagggtggtgaggacgaaagcgtggatgacacacctgtgaacgtggttgatattgttgacacattccgtctacaggagcaacctccttttgacaagaaatcatttgtgtctttcatcaaataatacattaagaatcttac

SEQ ID NO: 218 - DNA, 363 bp, Zea mays
  Clone ID: LIB3115-010-Q1-K1-E8
agccatcctttcttcaatcgcaccaacatcctattatcctccgccctccagatgggggtgggtcaggatcctctatgtcgcgactaattcctgattgttttattcacttaaaatgagctctataacagcttcctgaaccatttccagggaacaccttatcatcgcacgccctactcatgtgtgcattcatgctacatcctccgactacctttcttagaactactgcctctcttacacacctgtgaacttcattaatattgattacacatcccccttacatcagcaccctccttttaaaagtaactattcctacaattacattaaatatatacattcagactctcactgattgtttggatccac

SEQ ID NO: 219 - DNA, 306 bp, Zea mays
  Clone ID: LIB3115-010-Q1-K1-E9
tgaggccttcttcgcgaaggctgggctggattacgtttcttgctcccctttcagggttccgattgctagggtagctgcaggtgacgtgcttgtctgaggctgcctcctcgttggcaaccggattgcctgctgctggtggatgtggtgatcaacagtattattacagagccatgctatgtgaacattactagtagcagtgctcataaaagctacaatcccatctccccttttttttccagtcatgtaaaacttccaaactgctccatggttcaaaactctgttcttcaatacatcatcaattatcga

SEQ ID NO: 220 - DNA, 191 bp, Zea mays
  Clone ID: LIB3115-010-Q1-K1-F10
aggacactgctgcccggctataactaacttttttcacatgatggagacccatctgttcacgagccccagcgtgtgtatttgatcgaccctagatttccttctactacacacactctacaacattcacaccagcttacacaaaccctattactatacagagacgctacatctactctacttatacccctgct

SEQ ID NO: 221 - DNA, 328 bp, Zea mays
  Clone ID: LIB3115-010-Q1-K1-F12
cccacgcgtccgggttcccatgtcagcttttttagagtgctgtccattacaagccatatcgcgcagcatgtcttaaatctgcgtcccttgttattactttccttagtaaaatttggtggcttccctttttatattcttcctgtcaaggcctctgtgtccctcctcttttgtgttttgtttctctttatctccttctttttggtttgttaatcccttttaacttttttctcttgcatttttcctttaaaaaaaaatattatttgttcgtccttttctattagttttcattctttctttctctttcttttctatcattttattttttttt

SEQ ID NO: 222 - DNA, 172 bp, Zea mays
  Clone ID: LIB3115-010-Q1-K1-F2
cacaacaatggacgccgacctatctctcttcttatccatgcaacaacacacccaccgaccgggacgggtttcaaaccctgagccccaccacataaagtgcgctggtcctataaggcaccacctcactttcgcgtacgtccaaacctatacctctataaagcctaactttaat

SEQ ID NO: 223 - DNA, 382 bp, Zea mays
  Clone ID: LIB3115-010-Q1-K1-F4
cgccgtagtcaatccctccccagcagccgtcgttgtcaccgctgcaacgcggaggctacggcccagggccgtcaagatgcagatcttcttgaagaccctgacggggaaaacgatcactttggaggtggagtcctcggacaccatcgacaacttgaaggccaagatacaggacaaggagggcgatcccgtctgaccagcatcggctaatcttggcggcaagcaactcgaggacggccgcaccctctccgactacaacatccagaaggagttcacccttcacctggtgcttcgtctcctaggaggcgccaagaagcgcaagaagaagacgtacaccaagcccaagaagatcaatcacacgcacaagaaggtaaagctcgcattg

SEQ ID NO: 224 - DNA, 400 bp, Zea mays
  Clone ID: LIB3115-010-Q1-K1-F5
gagccacctatccatggtgaaccctgccgtctacttgcaagagcagctgcttgcgggcaagccacttgctctggcgaacgtagttgcaaaccagcaacaacaacagctacaacagtttctgccaacgctcagtcaactagccatggtgaaccctgccgcctacgtacaacaacaacaactgctttcatctaacccgctcgctgtgggcaatgcacctacatacctgcaacaacaattgttgcaacagattgtaccagctctgactcaactagctgtggcaaaccctgttgcctacttgcaacagctgctttcattcaaccaactgactctgtcgaactctgctgcgtacctacaacagcgacaacagttacttaatccattggtagtggctaacccattg

SEQ ID NO: 225 - DNA, 425 bp, Zea mays
  Clone ID: LIB3115-010-Q1-K1-F6
cccacgcgtacgcacagcaatccacacaagcacttcgacgtcacacgggcgctgggcacagacacaccaagcgtcggcaccaatggcttactaccaggaggtggactactgctcggaggaggtgaggtcggtggccccggccggcttcggccgccacggcggcggcgtccagcagcacgtcgtcaaggagaagttcgaggaggtcgacacggtctcacgcgccggcgccaaccaccaccaccaccatggtcaccacggcggccacggcttcgtggtgcgcgagaccagggtcgaagaggacatcaacacctgcaccggcgaggtccactagcgcagggagagcttcctcgccagggctaactgagccgtccggcggtcggcatccacgcccgttcgtgcttgcctgcgtgccttatgtatgtctg

SEQ ID NO: 226 - DNA, 179 bp, Zea mays
  Clone ID: LIB3115-010-Q1-K1-F9
ccccgacctccgtactaccttacatacattttttccctttcagccttccaattgctcgtgtagcattatcatacatttctcgacttactcatcacttcttttatacaaccaaaatgcctctctatagagcatttcgacatcaacactattatcacatatccatcctatgttaacattac

SEQ ID NO: 227 - DNA, 422 bp, Zea mays
  unsure at all n locations
  Clone ID: LIB3115-010-Q1-K1-G1
agctccacatggggggcgaccacaagaaggaggatgagcaccacaagaaggccgcggagcggcacaagaaggaggagggggagcaccacaagaaggacggcggggagcataaggaaggcatcgtggagaagatcaaggacaagatcaccggcgagcacggcgacaagtccggcgaccacaaggaaaagaaggacaagaaaaagaagaaggagaagaagaagcacggcgagggccacgaccacgacggcggccacagtagcagcagcagcgacagcgactgagatctggtgtcgcagcacaggtgcaacacaagtatgcttgctggatggaggattcataccanctgatgctgatgtagtgtttcactggtgtcatgcatgcatgtatcgtgctattattatcaaaaaggaaaaagaaataac

SEQ ID NO: 228 - DNA, 269 bp, Zea mays
  Clone ID: LIB3115-010-Q1-K1-G11
gcgtgttaacttatccactccctcggcactgcagctcagtgcccttcccagcctctcgctgtcccgccgacgcgcacgtcctccgcgccgagcccagaggcagacagagggggcggccatggcgtccatcccgtgcaccttccagctgagcacggcggcgtcgaggagggtatcgccgcgggcggcggcgcatgggagaggccaaggaggagggggagcggtgcttaagacgccgctgctgggcgcggggaggcggagcctggggtggc

SEQ ID NO: 229 - DNA, 88 bp, Zea mays
  Clone ID: LIB3115-010-Q1-K1-G2
accaaacaatacgacatcgcatacggaaaccaacaagcaacataaaaagaaggaatcaaaacgcgacaataaaacaacaatggcaacc

SEQ ID NO: 230 - DNA, 57 bp, Zea mays
  Clone ID: LIB3115-010-Q1-K1-G3
ctcatcttttaatccattcccatcattctttttttacatctctcaataaaggatcca

SEQ ID NO: 231 - DNA, 423 bp, Zea mays
  Clone ID: LIB3115-010-Q1-K1-G6
agataagaaacttttggctgtggttggagatgatcgagatgctcttcttgtggaggcacggaatggaaaggtaacctctaccctagttggccatctggactactcatttgctacggcatggcacccggacagccggacattcgcgaccgggaaccaggacaaaacctgccgcatctgggacacccgcaacttgtcgacctcacttgcagtactgcggggcaacatcggcgcgatccggtgcatccgctactcctccgacgggcggttcctggtgttctcggagcctgccgacttcgtccatgtgtacagtgtggctgctgactacaagaaacggcaggagatcgacttctttggtgaggtgtccgggatcacgctcagccccgacgacgagtccctgttcatcggagtgtgcgaccgcgttta

SEQ ID NO: 232 - DNA, 227 bp, Zea mays
  Clone ID: LIB3115-010-Q1-K1-G7
cgtcgacatacatatacctctggttgctaataacgtatttatacaactcttgtgtggacggggggctacagttagcattacacttgcttccactattgtgtagtcatctgtttgcgtatcgctctcatacattcaccaactatcttatgtgagaagattacaattcctgacccatatccgatacatgaacaaattaatacttgcatgcacagctttaaatattcatt

SEQ ID NO: 233 - DNA, 291 bp, Zea mays
  Clone ID: LIB3115-010-Q1-K1-H1
gactaggaacggtcgtcgcccacggggctgttgatccgccccaccagggggccgcccaactgcacgtgaaggcagccgtggagccccacacatatgacggcggcgatcttaacgtacgtcctacttgtcataccaacgccacgtaaacccgccagaactgctacacttgcccgtgactgctccagtagtactgtaacatacatggcatattgcaacaatggcgccatgccagcgcaaagattacactggaagaaagaccggcacctgatcgcctgtgacatgtcatatgac

SEQ ID NO: 234 - DNA, 162 bp, Zea mays
  Clone ID: LIB3115-010-Q1-K1-H11
agcaagcaagctcaatctactactactactatctggtacacattctatccagcctgtcaggctattgtgggggcactgaccgtgattatctcctctacagtgacagcctaattcccattacaggggtttaagtaaaacgctagccattaataaaaccttcgc

SEQ ID NO: 235 - DNA, 431 bp, Zea mays
  Clone ID: LIB3115-010-Q1-K1-H2
cccacgcgtccgcccacgcgtccggagaccaacaagcaacatagaaagtggaatccagtagcaacaatagagcaacaatggcgaccaagatattttccctccttatgctccttgctctttctgcatgtgttgctaacgcgacaattttccctcaatgctcacaagctcctatagcttcccttcttcccccataccttccatcaatgatagcttcagtatgtgaaaacccagctcttcaaccctataggctccaacaagcaatcgcagcaagcaacatacctttatcacccttgtttcaacaatcgccagccctatctttggtgcagtcattggtacaaaccatcatggcacagcagctgcagcaactcgtgctacctgtgatcaaccaagtagctctggcaaacctttctccctactctcagcaacaacaa

SEQ ID NO: 236 - DNA, 322 bp, Zea mays
  Clone ID: LIB3115-010-Q1-K1-H3
aacacacaaaaaaccactcgtacggagaccttcaagcaacatagaaagtggaatccaatctcgcacaggtgaacaacaatggcgaccaatatattatccctccttattctactagctctatctgcatgtgttgctaactccacaatttttcctcaatgctcacaagctcatataacttcccttgttcccccataccttccatcaatgatagctatactatgtgaaaacccaactctttaaccctataggcttcaacaagcaatcgcagtaagcaacatacctttatcacccttgtttaaacaatctccaaccctatcttttt

SEQ ID NO: 237 - DNA, 92 bp, Zea mays
  Clone ID: LIB3115-010-Q1-K1-H6
actacacctaaatccctatctatcttctatttttttcacttatcatatgactatggtcctgccattcttttaccctactacaactccatatt

SEQ ID NO: 238 - DNA, 367 bp, Zea mays
  Clone ID: LIB3115-010-Q1-K1-H7
cccacgcgtccgatgctctacaggagggacactgaagccaacgcaaaatttccctggtggggggcaatctcggtccctgatagctgcgtacttgttggtcctgaatggctacagcaacgtgtaccatctggaaggaggactttacacatggttcaaagaaggactaccagctgttgcaggagaagagtaagagagacattacgaacatagtgttcgcatgctggagagagtggagagtggagactagagttgcgaggacttgtagtgatgtgcttgcttcacagtcacagggttgtcgattgttgtgtacggattgagatgtcgaagatttctcctgccaatgtgatgctgtcctagattttctcgc

SEQ ID NO: 239 - DNA, 330 bp, Zea mays
  Clone ID: LIB3115-010-Q1-K1-H9
cggacgcgtgggttcaacgcttattcatgatctcttacttggatgaagaaatattgatggtgagagatgctgctggagcacctgacgtcttaaccagacttgaggggccgcaaccgaatccaggtgacggcacagcagatgcagtgatatcggaatatgaaagctaatgcctcagtgctgactgtagctccgcacctagctcctgtttatggctcctttctcctctttggtcattttctcagtctcgcgcgtatataaagctatctagttctagtgttgtcaacgatgatgaccactcgagtgtttttactttaatacataccattttgt

SEQ ID NO: 240 - DNA, 263 bp, Zea mays
  Clone ID: LIB3115-011-Q1-K1-A1
accacgcgtgcgggtttccttcggaactcaaaactctcgcgctcacctgatccggccggggaatccacacaagtcctattattcacagcagggtgttggcattgatcacacacctgccatggcggatcagttcgtggattccgggaacaatgtgatcattgatgaggtgaacacgggcctgaacccaggaatggtggtgctgattgtggctgcaagcttcctgctggtattgtttgtggggaactatgcgatgtatgagtatg

SEQ ID NO: 241 - DNA, 186 bp, Zea mays
  unsure at all n locations
  Clone ID: LIB3115-011-Q1-K1-A11
tttgtacttcctaatatttccattgacgttgtgaacgatactactctggggctttctttgcaggtttatcaactagcntcccccttcttacataaatgtctgtcgtggcaaaacccaatgtgtatccaactataactcttgctctggctctcgctctttatatgcatcaagttaaatatacagaca

SEQ ID NO: 242 - DNA, 395 bp, Zea mays
  Clone ID: LIB3115-011-Q1-K1-A2
cggacgcgtgggcggacgcgtgggggcgtactcctcacggatgccgcaaggaagagggccgggtgcgaggaggctgccgccagccagcggcccattaagatgatcagaatcggcgagccgtggatcggcgtcccgtcgtcgggcccggggcggtgcggcggcgggaattaaggtaaggtatggttggaactgatgcgccacggccggccgtgtgacagctttattacagcgagcgcatgttcgagtcgtggatgctttttgtgcgcgtttgtatttgtcatccaaggtgaggttgatggcaaggataattccagtgctgtggtaaaactgtgaaggcagaacacatggcacaggagataaccggtacgcatgttaaaagttaattatgggatgat

SEQ ID NO: 243 - DNA, 317 bp, Zea mays
  Clone ID: LIB3115-011-Q1-K1-A3
gttacgcgagataatggtccctcttgctggaacaccacacgaactggggcatcaagtgacgcttatgcggcaagttgctgaaaaagtgttcgccaatgtgggcaagactatcgggtgcaaagttggtacaatgattgacatccccagggcagctctggtggctgatgagatagcggagcatgctgaattcttctgcttcggaacgaacgacctgacgcagatgacctttgggtacagcaaggatgatgtgggaaagttcattcccgactatcatgctcagggcatcctccaacatgaccccttcgaggtcctggacc

SEQ ID NO: 244 - DNA, 383 bp, Zea mays
  Clone ID: LIB3115-011-Q1-K1-A4
ctcgttccgccgctccctcgcctccggcagctaggtgaggccaccgatcggaccttccctggcggcggggcctaccaacctcaaggagcgatggctctgtctgcgacgctacggatttctcttagcgtcgcgttctttggggttctggcgttcgtgcttggtgtcatcgccgaaaacaaaaagcctgcttccgggactcctatcctaggaaaggatgtcgtcatctgcacgtttccaagtgatccgactcttgcgatggggagcctgtccattgtggcacttgtggtagctgccatcgtaggccatgttgccatcttctttccatactcgggcaagtcacttcctcgtggagcgctgtttcaaaacaccatcttgacagggtt

SEQ ID NO: 245 - DNA, 94 bp, Zea mays
  unsure at all n locations
  Clone ID: LIB3115-011-Q1-K1-A5
aaacgaacnaacggagaagaaggaaancggaaagggagcgccaaaaacaaagaagggggccaaaaaagaaaggacagaggcagcaaaaacgagg

SEQ ID NO: 246 - DNA, 232 bp, Zea mays
  unsure at all n locations
  Clone ID: LIB3115-011-Q1-K1-A7
acccacccatcccccacgcgtncanttaactttttatctattctttcacacacactaaacttgacccccacgttttttgttaacaaacaaaaaaccaacttcctatttcttaaaacctctgaccaatgactagactttctccataatcaccatcctattaaatctgagctctctttattcaactatgtgcttcgatattacatcttttctttaataatacatttccttcttt

SEQ ID NO: 247 - DNA, 387 bp, Zea mays
  Clone ID: LIB3115-011-Q1-K1-A8
tcgcccacacatacacccacacattctttcacattatctcccaatcaaaaatcattagtgtctgcgtcatctatactactcctaccaacacctcctataacaacacttcttatcctcattttcttttcattttcattaaagatgccacttattactattcttatttacattcccaacacatacatcctacttctttctttttttactaccaaaactctttaccttctcccctaccactatcctatctttttttacaccttctccattacttcttatcatttttttatacattccaaattcaaacaacaaaccttattttttatttttattttccactcaataataattcattccttatattatacttcatccttccttttttacttt

SEQ ID NO: 248 - DNA, 333 bp, Zea mays
  Clone ID: LIB3115-011-Q1-K1-A9
cggacgcttgggctgatgctttggctagggggacccgtccacggcgcccgcgctcactcgcaccggcatgaagaaggatgcctacaagctgcatacctccgacggctgggccaagtacaccgggggattcttcttcggcggcatctccggcgtgctctgggcctacttttttccttacgagctcgacctcccctacttcttcaagtaaatatcatcaaatatgcgtatatatagctcctgccgatccttctctttagctgcatggtatgtagagtcttgtggtccttgtttcatttcacttcagcggtgatcagcacctggtataaatgtaat

SEQ ID NO: 249 - DNA, 287 bp, Zea mays
  Clone ID: LIB3115-011-Q1-K1-B1
cccacgcgtccgcggacgcgtgggatcgatgcgtacacacagactaaactggacccgcacgttttgcttgagcaaacaaagaagcggcttgggattgcttaaagcctgtgaccaaggacgagactttcgccagaagcaccagcgtagtagatcggagctcgttttagtcggctgtgtgcttggatattacatgtggtcttcaataaggcatggccttctgtaatggctgtgcttctgaaaataaataaactagttggcctggtcgcaaaaaactctacctccaaaaa

SEQ ID NO: 250 - DNA, 155 bp, Zea mays
  Clone ID: LIB3115-011-Q1-K1-B10
gtataacaacaacaacaactttttcaacattaaataccattactcactgggctagccttggggaaccctttcatctacctacatctacttttatctagcccgatctctgtttaaacaacacctacgtacctacaacaacagtttcttaaacaaat

SEQ ID NO: 251 - DNA, 428 bp, Zea mays
  Clone ID: LIB3115-011-Q1-K1-B11
gccctttattttttttttttttttttttttttttttttttttttttttttttttttttttttttttttttttttgttttttttttaagggcaaaatgtatcccttttttatatgggttcaatgtgggtttttttttaccgaactgtccaaacttatttaaaaaaatcactgcgagtttacaacaattcacacccaacacaggcggtggacacaacccatccaataatttttcatgagtacaattgttgaatcatcggccaatttcttcaaaattattaattatttatgatgttcattttactattgtcggtagaaaaagaaagtcccttttttttttattaccccgattgttaccccttttttaccatttttttttttttactaggttttttttgttttaaacacctttaaaaacctttttctttttt

SEQ ID NO: 252 - DNA, 227 bp, Zea mays
  Clone ID: LIB3115-011-Q1-K1-B12
cacacatacatatactataattgtccatgtcatcggctcgttcctatggggccttttgcggcctcccttcatataggccactgagacctgcttccctttcgcagttgctcatcttcatagccacctcggaagctcgtggccgaggatccacatatatagcatctgtcttttatactaataggtcttagtttttgggagaatctacacatcgcatatacttggtagct

SEQ ID NO: 253 - DNA, 285 bp, Zea mays
  Clone ID: LIB3115-011-Q1-K1-B4
cccaatcataatacatctacaaaaaacagcatctatttctatactacaaaaaatgctcgacaggtctggcagatccaccttaacgcctgcccaccctcacacgatgcaccttctacttcgtcctctaatgctcaaacaaaaacattaagacctacaacccctacactataaaaactccttcttacacccaacttctacgccaactgttagaaagggcaattccaacagacgacttacagttcaactacaactaccgcacaaacctttacatatactgcccaatct

SEQ ID NO: 254 - DNA, 73 bp, Zea mays
  unsure at all n locations
  Clone ID: LIB3115-011-Q1-K1-B5
nccaaacaaaaaaaataaacttataaccgatttatacacaaaaacaaaaattactcccccctcgttctatttt

SEQ ID NO: 255 - DNA, 412 bp, Zea mays
  Clone ID: LIB3115-011-Q1-K1-B6
gcaggtgccaccgccatctctgctctctctctctctctcaagcaacgcccgccagggcgacgcgatagccacgatggccctgctgaagcccgccaggatcgtggcgcggtcggcgccgccgtccaccagcggcagcgtctcgctgcgcgtcccggcgcgggccaagaaggccgcggtgtccgcgtccgtgtcgtccgcgctggcgggcgccttcttctcggcgctggcgtcgtcggacgcggcgctggcggcgcagcgcgtggcggacgtggcggcggcggccgactccgggagcgacaaccgcgggcagctgctgctcttcgtggtggcgcccgccatcgggtgggtgctctacaacatcctgcagccggcgctgaaccagctcaaccgcatgcgcagccaggccgtggtc

SEQ ID NO: 256 - DNA, 120 bp, Zea mays
  Clone ID: LIB3115-011-Q1-K1-B7
acctgcatccaacctcataccatttgtatacttttacctaaattcatttcaattgccgtacgtaaacaacgttcagacttaaaaagccatagccttattaaacttaatgcacacatttac

SEQ ID NO: 257 - DNA, 236 bp, Zea mays
  unsure at all n locations
  Clone ID: LIB3115-011-Q1-K1-B8
nnaaaaaaaaaaaaaaaaaaaaaaaaaaaaaaaaaaaaaaaaaaaaaaaaaaaaaaagagaaagaaaaaaaaaaaaaaaaaacacaaaaacacaaaaaaaaaaaaaaaaacaaaaaaaaaaancccacaaaaaaaaaaaaaaaaaagcacaaccaaaaaaaaaanaaacaagaaaaacgccaaaaacacaacaaaaggaaaaaccccgaagaaacaaaaaagaaaagcagcagaag

SEQ ID NO: 258 - DNA, 261 bp, Zea mays
  Clone ID: LIB3115-011-Q1-K1-B9
caaaaaattccttcattattccacagggctcacttgcttctattgccgtgagtacacagggcctcccaccagatactctaatgaccctcaacatccactccccaagcctacaattacatctaaccctagtgcgagcgaccacaacaaccaactgcaaataccacaaaatccttgcacatgcaaatcttacaaaaatagcacacctcacaacaacaactactgcattactgagacagctagccgaaaaaaccttgttaccaa

SEQ ID NO: 259 - DNA, 419 bp, Zea mays
  Clone ID: LIB3115-011-Q1-K1-C1
gtcagcatgcctgatagccgtctcggggagagagtcgatgcgtgtgtcagcgtcaaggagggctggaactgggtggatgcgagagctgatcaccagcaccgatgcggaggcgaggaggtgtctcctaagatcctgcatggccactgcatgacgaaagaactgaacaaatttaaggtgccaaggtcttattaccagttgaggcagacatttccggtgaccaccacggggtagatcagaaaggaggagctgaagatggaactcctggcagcaatttgactgcccatcaacctgtacttttttaggcgatgatctgttttggaacaaatcttggttaatatgactccgatggaagctttttgatttttttgtgttgaagatgcctttaacctttaacttgatggaagtttagaaaccaaaaa

SEQ ID NO: 260 - DNA, 284 bp, Zea mays
  Clone ID: LIB3115-011-Q1-K1-C10
attctaccatcaacaacaatttctgcaccatttaataccaatatctcattcagcgactccatggagaattcttccgtatacctacaactacttaaatatattccgcactcgttttaaacttcacctacatacttactacatcatttattatatcaatttttaccatctcttacgcaactatctacttcatacctttttacttacttacaacataatatactattaaaaacaattttctttatcctaatattttttaatattcacttctaatatccactttcaat

SEQ ID NO: 261 - DNA, 295 bp, Zea mays
  Clone ID: LIB3115-011-Q1-K1-C11
gcataccatcaacaacaacagctgcaacagtttatgccagtgctcagtcaactagccatggggaaccctgccgactacctacaactactttcatctagcccgctcgcggtgggcaatgcacctacgtacctacaacaacagttgctgcaacaaattgtaccacctctgactcagctagctgtggcaaaccctgctgcctacttacaacagttgcttgcattcaaccaactggctgtgtcaaactctgctgcgtacactacaacagcgacaacagttacttaatccattggcagtg

SEQ ID NO: 262 - DNA, 116 bp, Zea mays
  Clone ID: LIB3115-011-Q1-K1-C12
acccacttccattaaatatttcttacctattttattaccaatccacacactgtcaatcttcgcaccctattcaatataacccatatcaaacctacttccacataaactcaccttta

SEQ ID NO: 263 - DNA, 305 bp, Zea mays
  unsure at all n locations
  Clone ID: LIB3115-011-Q1-K1-C2
atcatgcttcctctttacctactatgacatagcaactatatgtgttagaggataaacgacgggcatatactaantctataccaaaacttacctcttaaaccgaggcaaattccaaaattataattccttaaacactccactcatattgcatgagtatacatatcataaaatcctattcttataatccttatcaacacttgtgccacacctttaccgaatgcactcacggcgtatatcagatctttataacctgcgtttgacactattacattctttcctaattccatcaatactaatcttttata

SEQ ID NO: 264 - DNA, 451 bp, Zea mays
  Clone ID: LIB3115-011-Q1-K1-C3
aaaaaaaaaaataaatataaaaataaaaaattacactaaaatataatcaaaaaaaaataacagaatattataatacacatacatacaaaaaaaaaaaatataatataaacaaataataatcccaaactatataaaaacaattcaaaaaaacattcatgttgcccccccttttaaaatatcaaatttttattccctttctttccaaattttttttttttttttttcttcccaaatataaatatctttccccttttttttaaaaacaatttcttaaaaaacctttccatttccccactttatttttttttaaaaataatcccctttttctgttttgggtaatttcaaaaaaacccccccccttaccccctcccaaaaaattgcccactttaaatttcaatttgccttcccctttaccgcccttttttacccccccaatttttttttttccccc

SEQ ID NO: 265 - DNA, 279 bp, Zea mays
  Clone ID: LIB3115-011-Q1-K1-C5
gtcagaatgcctgattgccgactcggggagtgagtccttgcgtgtgtcagcctcaacgacgtctggtacttcgtggatgcgagagctaatcaccagcaccgatgcggaagctaggaggtgtttcctaagatcctccatggccactgcatgacgaaagaactgaacaaatttaaggtgccaaagtcttattaccagttgaggcagccattttcggtgaccaccacggtgtagatcagaacggaggagctgaagatggaactcctggcagcaattttactg

SEQ ID NO: 266 - DNA, 323 bp, Zea mays
  Clone ID: LIB3115-011-Q1-K1-C7
cccacgcgtccgcccacgcgtccgtccacgcgtccgcccacgcgtccgcgtttcgttctcgcctttcagggttccgattgctaggctagctgcagctcaggtgcttgtctgaggctgcctcctcgttggcaaccggattgcctgctgctggtggatgtggtgatcaacagtattattacagagccatgctatgtgaacattactagtagcagtgctcataaaagctacaatcccatctcccttttttttccagtcatgtaaaacttccaaactgctccatggttcataactctgttcttcaatacatcattcaattatcgatt

SEQ ID NO: 267 - DNA, 258 bp, Zea mays
  Clone ID: LIB3115-011-Q1-K1-C8
actaatccaactatcaccccagctttcacttttatttccactacttctcaaaagaagtcagttaacataccacctttcaaattaaaatccaaatttaaatttttacttctttctcttttccattttaccttccttattttctttataaaattccttttaacaacctttctatttttttcccctcctcaccaatatcttctttatttttaatatgtctttatcaaaaattctttacaaaatcaaaattttattaacaaa

SEQ ID NO: 268 - DNA, 320 bp, Zea mays
  Clone ID: LIB3115-011-Q1-K1-C9
tcgcaccaagctaagcgcacttacaacaacctaacaacaatggctaccaagatgttattccgggttgcgcttcttgcgctctttgcgagcgcaacaaatgcgtccattatttcacaatgctcacttgctcctagttccataattccacaagtccttccaccagttacttcaatggccttcgaacacccaactgtgctagcccatatgctacaacaagctatttgttgggagcgtcttacaacaaccaattgcccaaatgcgacaacaatccttggcacatctaacaatacaaaccatttcaacggaacagcaacaacaat

SEQ ID NO: 269 - DNA, 296 bp, Zea mays
  Clone ID: LIB3115-011-Q1-K1-D11
ggctcagcgtatattgagttcttgcacaaagaatcagcagagcaggcgtgaaccctgaacggggcatcatttatgttacgcattttgaaggtcgttcggaaaaactccactgaagcaacccgatcgcctggcttgcttcgtgtttcgcggggatcaccatttgcttcaaggctcattagaactgcatacccaaggccaacgtttcctggtgcaatccgtggacgactgccactcaggggtgttgcccagagcttacagtggaagcgcagtgccacagattcctcaaatgctgtaaa

SEQ ID NO: 270 - DNA, 251 bp, Zea mays
  Clone ID: LIB3115-011-Q1-K1-D5
ctgactcgtgaggccatgcaccctatttcatctgcttccccatctccaacgtaggtggcacctaagccatggctatgcactcgacatttcgttctaatcgtagggcatgtgctcccctgcccctctatcccacgactactctcccttaccatctcctggctagttcaagacacccaaccttcttatccctgctcgcatcccgctcgtggagctcccttcctctaccttgtccagcgtagatctcacccatc

SEQ ID NO: 271 - DNA, 163 bp, Zea mays
  Clone ID: LIB3115-011-Q1-K1-D7
gtcacgcacaaatgcatgtgaaggtggagacgtgcgccttggaggccgaggatggcgcggcggctgtggtggaggccgcaaagcagcacggctcgtatctgctctttcttggccagcgcccgctgtatcacgccgtgatgcgctgactgaaggctctgtggca

SEQ ID NO: 272 - DNA, 303 bp, Zea mays
  Clone ID: LIB3115-011-Q1-K1-D8
tcgaccacgcgtcctagctcggacaaggcacaacgccatccttcggtttccttgctggcgtcccgatcgctcgctcggtcgaaaagaaagaatctcgctttgaacatggcgtctctggcgttcggcagcaccgaaactgcagccgtggcggtgaccttcgtgaggacgcggtcggcgcgccagtccatgcttgtcgtgcctcccgctgacatcatgggcagcccatcgccggccaccgacgacaatgtccttggcgagaccatcttcggcttcatcttcaagaaagaccaacttgttgagacg

SEQ ID NO: 273 - DNA, 140 bp, Zea mays
  Clone ID: LIB3115-011-Q1-K1-D9
accgacaccatttaaaagatcagagctattcaacagccactcaaaacagattgaatcgggcgactcaacccaatactgtccggaagcatcctctacttcacgttccgtcagggactcacctgtcatcaacgcgactttca

SEQ ID NO: 274 - DNA, 281 bp, Zea mays
  Clone ID: LIB3115-011-Q1-K1-E1
ggcgtggtttgcgtgccctctccagggcccagattgactctgttctggatcttgcacgggggacaattgtgtccgagctctccaacaaggatttcgactcatatgtcctttctgagtcaagcttgtttatctatcctctgaagattgtcatcaagacctgtggcactaccaagctcctgctcaccattccaagaatccttgagcttgctgaagagctgtctatgccacttgctgctgtgaagtactcccgtgggacgttcatctttcctggcgcacagcca

SEQ ID NO: 275 - DNA, 276 bp, Zea mays
  Clone ID: LIB3115-011-Q1-K1-E12
tctgacaaaatggccaacgaatagagaagggggtaagaccgatgggaggaaaggtactttgttgtctgacattgaaaggatcatgtgtggacagtttatatgtattagaacaccttaatcaagtataactataatcaagttacggtttatcacaagtttttattcgtgctacctgtttttcaattgtaaaaactaatggcattgtttgcatgtacattaacccttttaaattccttttagtttctaaattgatgctgatttttaaaacttatattt

SEQ ID NO: 276 - DNA, 374 bp, Zea mays
  unsure at all n locations
  Clone ID: LIB3115-011-Q1-K1-E2
ccgtccgnnattttgtaagaagccttgctctttgcnnttcggttaccatgcctattnactctctnntttggtttaaattactgggcanggcgaacttgtgttggttgtgaagggaaatttgttttctacaaaanggaattattaatatgtggattccctctgtcatgacagtattacacgtcaacccttatcaacatcattgagtattcgtattaggtctaccgatcatatcanctttggcgtctttgtgtgtaccttggttggcaactggatggctttgaaaacctcaaccgattattatctgaaaanaatatatagttttcctgaaattttgtggtttcccgtgaccttgtttggcacgaagaaatgtcatt

SEQ ID NO: 277 - DNA, 294 bp, Zea mays
  Clone ID: LIB3115-011-Q1-K1-E3
atggccgacaatgggcttacattatcaagccctgcagcgctaacaccgaccccatctttgggagcaacaagctcaccggcaccgacaaatggtaccctgaaggcctatggtttgacccgctcggctgttgcaacggctctcccgagaagatcaaagagctgcgcaccaatgagatcaagaacggacgcctctccatgctcgtcgtcatgggcgcctggttgcaggccgagtacaccggaaccggccccatatacaacctattatatcacctcgccgaccctgggcacgccacca

SEQ ID NO: 278 - DNA, 204 bp, Zea mays
  Clone ID: LIB3115-011-Q1-K1-E4
attacaaataatccatttttactttcaatccatgctacactctctccaaaaagattactagcagcatcatccttattgacacctgcatatctttattacaacaagaatcataatacccgtcatttcttcatcaacgaactattactgcaaacacaaataaactaccctcacaatgttatagatatactatcatctcacttattc

SEQ ID NO: 279 - DNA, 278 bp, Zea mays
  unsure at all n locations
  Clone ID: LIB3115-011-Q1-K1-E6
ttttgcttccgatacatactatactctcttttggtttattactcgcangcgactcatttggtgtgaaagaaattgttttctacaaaaggaattataatatgtgggttcccttgtcatgaagtattacagtcaaccttatcaacatcatgagtatcttatatgtgtacgatcatatcactcttgctctctttgtgtactctcttgtcaatagatggtttgtaacctcaacgattattactcaaaaaaaatattttttctcaatatgtggtttcccccac

SEQ ID NO: 280 - DNA, 206 bp, Zea mays
  Clone ID: LIB3115-011-Q1-K1-E9
tacctcacctacgatcactttttcgttttaattacattaccattactacggggacttctgcggagagtcttttaattaagcatggctcctctctttctactgaactactctttttttcttttccgttcttaacaacatcttttttatagagctcaccctatttaaatcaattgtcccccgtttttcataaaagctacaatcccatc

SEQ ID NO: 281 - DNA, 316 bp, Zea mays
  Clone ID: LIB3115-011-Q1-K1-F1
attttgaagaagctgcttttgcttcggctacatgctatactctcttttggtttattactggcagcgaacttggttggtgtgaaagaaattgttttctacaaaaggaattataatatgtggattcccttgtcatgaagtattacagtcaaccttatcaacatcatgagtatcgtataggtctaccatcatataactttgtctctctgtgtgtacttgtttgtcaatggatggcttgaaacctcaacgattattactgaaaaaatataacttttctgaatttgtggtttcacagacttgtttgcacgagaaatgtcat

SEQ ID NO: 282 - DNA, 274 bp, Zea mays
  Clone ID: LIB3115-011-Q1-K1-F3
attacgcaaaactgcttttgcttccggaccattctaccctctcttccgggctattaccgggcgcggccatcttttgggcacaagaaaatgtttttttcaaaaaggattcttaaacggggctttccttggcactgaattttaaaaacaaccctatcaactttatcattattttttaggtattctatcctatcactttttctctttgtttgtaccttgtttgcaaccgagtgcttgtaacctcaacgcctcttactcagaaaatataacctttttt

SEQ ID NO: 283 - DNA, 249 bp, Zea mays
  Clone ID: LIB3115-011-Q1-K1-F5
aaaccatgaattcctcagggatcttgctgccattctcttgcttgtatgtaccgggagcggcattgttcataccaatggacattgttcaatataacaacaactctataacagaaaggcccgtggctttatgtttgtacgatagactatatccaataagtactctaacctctgtactgcttgcatatgatagcaattcatttgctgtattttcctggttcaatatcggtcacatcataatcttctattatt

SEQ ID NO: 284 - DNA, 371 bp, Zea mays
  Clone ID: LIB3115-011-Q1-K1-F6
ggcatcaaagattttggcgatgaatatgcactataagcatagtcacggatgcgggcattggtacagaatcaactgccagaaaacattcatcacagcaaggaattcatcaaatatgaccgacaaattgccaaatccataagtaaacttatgccaactactgacagtgtcagagcaagggctagtgagcttgataaagctttaaatggacaggattggccccagtccaatctcttgttgtctatttgcaaacaagattatttccattgtctatagtagaaatacaaaggacacgaccttttgaaatttagcctttgcgtgtggatatgtcatgctattagttacatatcaagtaccagacgcaatggattatc

SEQ ID NO: 285 - DNA, 242 bp, Zea mays
  Clone ID: LIB3115-011-Q1-K1-F9
gccgcctgtctgcctgttctttctacactcttgcaatcgactagactacggcgaatcgtgagtgcataggattcctttgcttgtaacttcccggtgaccaacataaatcccattttcctgcttaacctatactatcataccctccaatcggagctcgaccacactatttaccactatggtaggttctagcgcatttacatgaagtaacgctttgcttttgtttactatgaggatgaacttga

SEQ ID NO: 286 - DNA, 324 bp, Zea mays
  Clone ID: LIB3115-011-Q1-K1-G1
actatgctctagcatccgcagcttccgcagcctgctaggctttgcagatgacgaccgcggggcgccccatctgtgcgccggccaaggaacggaactcaacaaaagggcaccctcatcttcggcccctcccagaattaatcattacaggacatcttatcacacacatgcctatagcctagaaatgacagtctacagacccaacatgagttacagaacatgaatctcaatgaagaacttgaagaacgtgcgctcatgcactactctttctacgataagtcctattccgaataaagagaccggcggaaacgctctagccatctactc

SEQ ID NO: 287 - DNA, 292 bp, Zea mays
  Clone ID: LIB3115-011-Q1-K1-G2
ccgacgcgtgggccgacgcgtggggagaagcactaagaacggggaaatcgatagatcagcgggcatagagtccctgcccaggaaccctaccctactccaggacatgcttgatctgaggcgcacccttacccaccggcaccagatgtgtacccgcctccgcctacgggccttggacatccaccaacaccccatgacacgtaccctccttcgacacagggttcttacccccaaccacagcatgctccaaccgtgtaccaacgatacttcaacgaccagcagagtgcttactacc

SEQ ID NO: 288 - DNA, 304 bp, Zea mays
  Clone ID: LIB3115-011-Q1-K1-G3
ccctccacaacgccttcagcacctacggcgaggtcctcgagtccaagatcatcctcgatcgggagacgcacaggtcccgcggcttcggcttcgtcaccttctccacggaggaggcgatgcggaacgccatcgagggcatgaacggcaaggagctggacggccgcaacatcaccgtcaacgaggcccactcccgcggcggccgtggaggcggcggcggtgggtaccgtggtggccgtggaggcggcggctactgcggtggcgggcgccctgatggcggaggcggctacagccgtggcggcggcta

SEQ ID NO: 289 - DNA, 426 bp, Zea mays
  unsure at all n locations
  Clone ID: LIB3115-011-Q1-K1-G4
aattaccaggcgtttgcgatgggcggagaggccactaatgccggcagcgggggtatccgggcgcggatggaacactacctttacagtggcgagaagaagcacgtcgtcgccggcatgggcatcttcgctgccgtgttcggcgttccatggtacttcatgacgcgaggggcaaagcatcaatctcaccaagattacatggaaaaggctaacaaggcgagatcagagaggctttcttctggacagtcatctgcactaaaagaatgaatgttgtattgcctattctggtccctgaccttcagagcttgtcatagatcatacactgtattgatttgcactcaacggatttgatctgttgatcaataagcaaggtatctgtctttctaatatcacggttgggaaacgaggtacgctccaagaattntgtct

SEQ ID NO: 290 - DNA, 317 bp, Zea mays
  Clone ID: LIB3115-011-Q1-K1-G7
cgcgtccggcctccacaacgccttcatcacctactgcgatgtcctctagtccaacatcatcctccatctgtagaggcacaggtcccgcggcttctgcttcttcaccttctccacggaggaggcgatgcggaacgccatctatggcatgaacggcaaggagctggacggccgcaacatcaccgtcaacaaggcccactcccgcctctgtcgtggaggcggcggctgtgggtactgcggtggccgtggaggcggcggctactgcggtggcgggcgccctcatagcggtagcggctactgccgttgctgctgctacagtg

SEQ ID NO: 291 - DNA, 406 bp, Zea mays
  unsure at all n locations
  Clone ID: LIB3115-011-Q1-K1-G8
gcagttcaacacgggaacgactgcgcctttcatcataaagtgcggagcaaattggagtggggaactggtgattaaggctgatctgcgagtccaggagcctaaaggtggcgaggtgatccgtgttgttccaagaccaacagttcttgcggacttgagttttgaggaaataaaaggtgtgtttgagcaattgccagaggcagttagcttgcttgccttggcacgaacagcagatggtacaagggccaggtattcaagattgtacagaaccttatccagcaaagtgacggccttgaaagagactgttgcagagatggagagaggtggtgttttcaaagatgtacgataaatgctgcgttattgtagagttanttatgaaattgatgttggatatggatgccatttgtcg

SEQ ID NO: 292 - DNA, 281 bp, Zea mays
  Clone ID: LIB3115-011-Q1-K1-H11
cgaccacattgaaaagaaggacaagaaaaagaagaaggagaagaagaagcgcggttaggggcacgaccacgactgcggccacagtaacagcagcagctacagcgactgagatctggtgtcgcagcacaggtgcaacacaagtatgcttgctggatggatgattcataccagctgatgctgatgtagtgtttcactggtgtcatgcatgcatgtatcgtgctattataatcaaaaagaaaaaagaaatatcagtcagggatggtttggtttgcatgtgatct

SEQ ID NO: 293 - DNA, 211 bp, Zea mays
  Clone ID: LIB3115-011-Q1-K1-H2
ggcacgcctatgctttctcttatgccagagcttgttaaagtgcacaaccgttggaactgcgtcgacagcgtctgttgacccctttattaacatgaatgagcataccgtgtctttgtcgcagcaccttgcgttcacgattaatatgtgctcatctcttcgcatccggagcttcaacatggaggtgcacatcttagcctctagaccgggatcc

SEQ ID NO: 294 - DNA, 301 bp, Zea mays
  Clone ID: LIB3115-011-Q1-K1-H3
attacacagacgtcatctatccttttggcccctgttaccttctttacagaatgtttcagaagtactcttacatttttccaatctgctggtctgaatgtaaaccaagtccttacaaggtgccttttcgctggactgtgtttacatgcataccaccagatgacttacatgactttggcgatggtgtctcctatcactcattctgtgggcaactgggttaaacatcatatcgtcattgtaacatcacagctgctcttaaagacaccacgttctactatcaactctctacgttctgcgattgaac

SEQ ID NO: 295 - DNA, 284 bp, Zea mays
  Clone ID: LIB3115-011-Q1-K1-H4
aattcccagacttcttctttccttttggcccctgttaccttctttacagaaggtgtcagagcgactcttacacttttgcaatctgctggtctgaatgaacaccacgtccttacaaggtgccttttcgcttgcctgttcttccatgcataccacctgatgactcacacgactttgcctatagtgtactcctgtcactcattctgtggtcacctgtcttaaacatccaggcttcattgtaacatcacagctgctcttcaagactccatgttgtattatctactctc

SEQ ID NO: 296 - DNA, 359 bp, Zea mays
  Clone ID: LIB3115-011-Q1-K1-H7
ttcgacgcgttgtcgaacacatcggggcgtactcctcactaatgccccaaggaaaatgccccgttgcgtgtaatctgcggccaacaaacatcccattattatgatcacaatcttcgagccgcggatctgcgttccttcttcatgcccccagcggtgcgacggcgggaattaaaataaggtatgtttttaacttatgctccaccaccgcccgcgtgacatctttattacaccgagcgcatattctagtctccgatgctctttttgcgcgtttgtatttttcatccaacgtgaggtttttttcacggataatttccctgctcttttaaaactcttaaggcacaacacactgcgcacgagat

SEQ ID NO: 297 - DNA, 261 bp, Zea mays
  unsure at all n locations
  Clone ID: LIB3115-012-Q1-K1-A1
cgctcgttcaggcagtacaaagcgctaaactgcggaagaacatgtgctacattcttcataggactttttggtgcttccgatagctttgccatcggtgctgacattatgtatgtccaatttgagcaaacgtcatatgtatgggcatcaaattaatggaccggtacatgtatgatgctcaataatntatttgtgcaatactagtaaacgcataaactgtttgaacgaatacttggtttctcccgatatgttgatcaatgtttc

SEQ ID NO: 298 - DNA, 266 bp, Zea mays
  Clone ID: LIB3115-012-Q1-K1-A10
tcccggtcccaagcacgcgtccgttcacgcctctttccagatggttttctattcttggcacacaccattttattagtcacgaaagtgagcttatgctaacatctacagctattctccttattatcattatgttattccccttcatgaattttataccatttagttgtacacacacgctagtaatacatacttatcctgcattgccatctgttaatacacacaaaaaacgggtctaagtataaaaaaataaaaaactgtaaacactt

SEQ ID NO: 299 - DNA, 188 bp, Zea mays
  Clone ID: LIB3115-012-Q1-K1-A11
tttcattcctccttccagatgtttttctattctttgcacacatccttctactttgtcccggaagagagcttattctaacatctacatctactctcctcattatcattatgttaatccccttcattacttttataccatttattcgaacacaccttataattaatcatcactacccttcattcccatta

SEQ ID NO: 300 - DNA, 386 bp, Zea mays
  Clone ID: LIB3115-012-Q1-K1-A6
gcgcccacgcgttcgtcaaagcgaggactgtgaaaggccccatcaccgacccgagccagctgccggaatggggctacgactgctccagcaccgggcaagctcccggagaggacagcgaagtcatcctctaccctcaagccattttcaaggacccgttcaggaagggtaaccacatccttgtgatgtgtgactgctacacgccacaaaggcgagccaatccccaccaacaagaggtacagcgccgccaaggtttttagccaccccgacgtctcatctgatgtgccgtggtacggtattgagcaagaatacaccctccttaaaaggacgtgagctggcccctcggctggcctgttggtggataccctggtccccagggaccatactac

SEQ ID NO: 301 - DNA, 128 bp, Zea mays
  Clone ID: LIB3115-012-Q1-K1-A8
accacgcgtacggccacatcgttttccatgctaagctcacatcatcttcctggtcccgcatggggtctttttttaagatctacaactgatctccgggtcggcctctttttaatacccattcttattta

SEQ ID NO: 302 - DNA, 244 bp, Zea mays
  Clone ID: LIB3115-012-Q1-K1-A9
cccacgcgtccggccagatgggttacagggctaggcacacatcattttcttggtcccgaatctgggcttctgctaagatctacagctggtcgcggtatcatcattatgtttatccttgtcaggagttggctatgattcaattgttttcacctgctggtcctgcagtcttgccatgcatgggtatctgtttctggagacaaaaaatcggtggaagtcgatagaacttaaagccctggaaacgagt

SEQ ID NO: 303 - DNA, 374 bp, Zea mays
  Clone ID: LIB3115-012-Q1-K1-B10
ccagaaccagacgagcacggacggaccttcgcatgccgcatccctccacgtgcacgagttccgaggcgccccttcgatccgcccggcccggccctcttcaccgcgcgcgcgcgtccgtcgctagcgtttggccgtctccctcttgagccccgagtacccccacgacgcggcatggaacctcgccatgagggtccacccggctccgcggaagcgcaccatcgccgtgcagcgctgcgccacggcggctgcggcggcggctgcgggcgcactctgcgggaagaagctgcgccgcctgccgcacatcttcgccaaggtgctggagctccccttcgcggccgacgcggacgtgtccgtcgaggaggacgcggcggcgc

SEQ ID NO: 304 - DNA, 177 bp, Zea mays
  Clone ID: LIB3115-012-Q1-K1-B11
acctaacctaactagcaccgtcgctcctcctttttccacatacgttcacattcacgagggagggtgctccccttaaatccggccggtcctatcctcttcaccgtgcgcgcgcgtacattactagcgtttggacgtctccctcttgatcccctagtacccacacgactcgtgaaggaa

SEQ ID NO: 305 - DNA, 219 bp, Zea mays
  Clone ID: LIB3115-012-Q1-K1-B5
acgccgaggaggaaaaggacgcactgcagcgggacaactctgagctgtccaacaccgttaggaagttgaacagagatgtcgccaagttggaagttttcaagaagacacttgtgcagtcactccatgaagatgacagcagtgataatactgctcccagggaaagagctgcaacagcttcaaatttctcctctgcaccatcagatgaagattctgcatttt

SEQ ID NO: 306 - DNA, 330 bp, Zea mays
  Clone ID: LIB3115-012-Q1-K1-B8
cccacgcgtccgcccacgcgtccgcccatccgcacctctctccatctccctgctcctgcgcctgcttcttgatccagccaagccagggatcgccatgtcggactcggaggagcaccacttcgaatcgaaagccgacgccggagcgtccaagacctacccgcagcaggctggcaccgtccgtaagaacggcttcatcgtcatcaaaaaccgcccctgcaaggttgtggaggtttctacctcaaagactggtaagcatggccatgccaaatgccactttgttgccatagacatattcaacgggaaaaagcttgaagatattgttccttcatc

SEQ ID NO: 307 - DNA, 365 bp, Zea mays
  Clone ID: LIB3115-012-Q1-K1-B9
cccacgcgtccgcagtatgatggtgagttgaagcttccaagccgtttccttgtttccccaccggagatagatagaacatctggggagtacttggtgaagaatggcatccgcacctttgcttgcagtgagacaggtaaatttggccatgtcacatttttctggaacggctaccgctcgggatactttgatgcaactaatgaggagtatgtagaagtacctagtgacagtggttttacattcaatggtgcacccaatatgaaggcgcttgaaaatgcttaaaaagccaaggatgctctcctaagtggaaagtttgaccaggtacgtgtcaacctgccaaatggtgacatggttggtcacactggtga

SEQ ID NO: 308 - DNA, 451 bp, Zea mays
  Clone ID: LIB3115-012-Q1-K1-C10
aggaggtgaataatttcctagagaacgcgtattataatgcgaagaccatccttacgaaacacggggaagagctacatgctctggccaacgcacttcttgagcacgagaccctcacaggagcccagataacgaacatattggcccaggtacgtaacaaacagcaacaagaacatactgtcgaagcaccacagagggccccagcttccccggcatcaccagctgcggcggcagcagctgcagccgccgcggcagcacagcaggcggcagccaaagctaagggagtggctggtatgggatcttagcacatggagcgccccaccggatgtatatttaaccaaacaaagcaaagctgttccagcgattgacagttgatgaaggtcatcggatgtattgtatgctaaactgctgcaacaatagaacacactgattgcgtggaaattactcttccatg

SEQ ID NO: 309 - DNA, 331 bp, Zea mays
  Clone ID: LIB3115-012-Q1-K1-C11
tcggactcgtgggcggacgcgtgggttatcctctcggatcccctcaattcccctgtatcccaaggaaaccttgaagtgttttctacagctttaggaaatgtggtttacttctatggttggtacatgggcaaccaatgtatatacatttatttttacagcatcctggccccgtccatccacaacgtgttgcacatgtctagcctctcaattgcaagggcgtacagatatttatataaaaatctacacaatgcatgcgcatgcaccgtagtgtatctgtatcgaccatgaaaggtttggttcaaatctgaaaaagtatacatttgttgtctaa

SEQ ID NO: 310 - DNA, 102 bp, Zea mays
  Clone ID: LIB3115-012-Q1-K1-C12
ggaaattcctgttccacccacacctccccccatactcttttcattcttcttttttatccttttttatccaatcaattaccctatatcccaaagaaaccttta

SEQ ID NO: 311 - DNA, 410 bp, Zea mays
  Clone ID: LIB3115-012-Q1-K1-C2
gacagttctagatggagggaacctcttcaagaatgacaggtgtcaataatgattatggtgacatagcgggaacttgtgatctaggtaagattactgcagagcagttagcaagacaatcagttaagaatgtccggaaaagagaaatggatcgcaaggcacatgaaagggcccaacgtgcaagaattcgtcagcacaatgaagatgtcctgcgaaatgcggctcttgcttcaacttcctattctgcatcatcctatgagcagcctacagaagcacatggtcggcgaggacgccgatgtaaggcaaatgcaccaacgctggcatcgatgctgaaaaagaaagttaccaccaaagacataattgcatagaggcttttgaacactcgagccacagatgccacattaagggatgtt

SEQ ID NO: 312 - DNA, 274 bp, Zea mays
  Clone ID: LIB3115-012-Q1-K1-C3
gctgccgccacttgtgacgcgttggccatcccgcgcgacccggcgttgtggcccgactcgcccgacggcgttcatccagagcggttcctgggtgcttccgccgctgtggacatgcgctgtgcgcactttgagctgctgtcgttcgggtccggccgactcatctgccccgcgtacgatctcgccatgaatctggtcgccgccggcgtggcgaacctggtgcacgggttctcgtggcggctgccggaccgggtggcggccgatgaccttagcattg

SEQ ID NO: 313 - DNA, 452 bp, Zea mays
  Clone ID: LIB3115-012-Q1-K1-C4
gcgtccacgcgttcgtccacgcgttcgtccacgcgttcgagtgattatttgcacctactgtgctgtgtactcggatcaggaaacaatgaatagtttgtccaccagcttcgtgagaatttctaattcgctctggtcccatatgtgccatgaccacgtttttatatacaagtaaagcttcggtgtgtcttttctaagttagcatcttaattacatcaagtacctacaaatgaagctcatagagaccatttccctaccggtcatgttttgctttgcggttaatgactgccctaatagataattagatatgcagtcagatttgggactgaaagtgaaggtcgtgtttgaccaacagaagctgttaaactccagaaataaacaagccgcaaggttgcacgtgttcgagctaccatactatggttttgagcgcgttttcacaatagtttgatctaaat

SEQ ID NO: 314 - DNA, 330 bp, Zea mays
  Clone ID: LIB3115-012-Q1-K1-C6
gcgctcaactgtccttcttcctgaatgaccagcctatgtttgatgacttgctaccacatcgctcttgcgagggggaaggaagtcgaggatcttgatgctggtggtattcatgttatccaaatcgacgaggctgcactgatagaaaggctgccgctcctcaaggctgatcatgcattctacttgtactgggctgtccactccttcataattaccaactgcgagatccaggacaccacccagatccacacccacatgtgctacttctacttcaacgacatcatccactcgatcatcgacattgactcggacgtgatcaccattgagaactct

SEQ ID NO: 315 - DNA, 394 bp, Zea mays
  Clone ID: LIB3115-012-Q1-K1-C8
caaggagcagaaggtgacagtcaaaggcaatgtcaagcctgaggacgtcttccagacggtttggaagtcggggaagaggacctcctactgggagggcgaagccacggccccggacgctgcggcggcttctggagccgaagcagctcccggcaccgcggcagaagcgcctcctgctgctgctccggcggcgccagagatcaccccaaccaaagctgacgcctgatcggtacgctattattcactcacatgtgatgctgcggctgcgactcctaaaccttaaatctagaaatagctggggattgggtttgcattgcatcgtgttcttgccggtctagcaagtgactataagaataatgggataaacgatgacccagtgtgtgtatgattttcgttc

SEQ ID NO: 316 - DNA, 433 bp, Zea mays
  Clone ID: LIB3115-009-Q1-K1-F7
cccacgcgtccggaaacaagagtcctctcatgaactattgctgattggtttacgtgccttggaattttgagttattcaatacatcccttgaagtttggagttcttcttacaaaggaatgccttcatcacgtctcaacttctcattttgttgacgcagtccactattgtaatgatatgtaaggatacaatgtattatgtatggcacataagagcagtgcatatttggggtgtgctgagctggtcgtgctcacccgcatgccctagccgtactacaaatatctgatcaagattggtggtttggggcctacgtggatcgtatttgcaagctataaaaagcatcgaacccaaaaagtccaagcagctcgatccttggtcaagttggccaaaccattctgttgcacgcagactacccaacagtggtttctgcatgctt

SEQ ID NO: 317 - DNA, 311 bp, Zea mays
  Clone ID: LIB3115-006-Q1-K1-E5
tggattgttaccaatgatccgaatggtgtatttcagaggactaaggtagtgcacagcatcaagggctaccttgatatctcgtctgatcctgcaacatttgtccagggagcaataccaaaactcgtggagaacacaaaggaggaattcttcgaaaaaactatcgaaattctaaaacgatgtgtagatatatgctgtgaaaagcttaatggcatcaatgcaatcacgtgcccaagcaaaccagagggatccatgtttgtaatggtgaaactggatctgtcctgcctggagggcatcaaagatgacatggactt

SEQ ID NO: 318 - DNA, 264 bp, Zea mays
  Clone ID: LIB3115-006-Q1-K1-E7
tacgagttcgttgccgttcaggacgcctgcgcgttcgagctgcgcacgtaccggcagcgcggcgcccgcacgatacccggccggccagcgatagagcgcgtactgatacgggccgcggcgcacacgtgaaccgtgcagcaacggttcgtaatagccggtgacgagcccgtcgagcgtgccgtcggtgttcgcgagctggaacggcgtgaaatacgtctcgaagaacgtgcgcgcactgctgacgtcgagctcgtcgagccggtc

SEQ ID NO: 319 - DNA, 453 bp, Zea mays
  Clone ID: LIB3115-006-Q1-K1-E8
gcgccaagaattatcggagcacctgggcatacgcctactcaatgacaggctgaatgatcctaacatgcaaggttcctttgagtccatcttcccaaaggatcatccgaagaatacaaggatctcgatcaacttcttcacgtccattggtcttggtggcatcacggaaagcctgacggagtacttgaagaacatgccacgtctaataatgcagcagcagaagccagaatcatcagagtcagattcaagtggatcagaatctggttcggaaagctctagttcagggtccagttctgagtctgagtcacaatcaagccctgatgagcgtgacagaaggcgaagtaatatgaggaggaagaggacttgagagcacttccaactatgctttttggaattcatgtatttggttttgtttaaatgtgcttcttcagtatacatgtgcagtatgtgatctac

SEQ ID NO: 320 - DNA, 414 bp, Zea mays
  Clone ID: LIB3115-006-Q1-K1-E9
gcgataggaaactccgcttcgcccgagcccagggctcggactcgggctcagccccggaagacgacgaactccgcttcggccgaccccacggctcggactcggggtcagccccggaagacgacgaactccgcttcgcccgaccccagggctcagactcgggctcagccccggaagacgacgaactccggctcgcccgaccctagggctcggactcgggctcagccccagaagacgacgaactccgcctcgcccgaccccagggctcggactcgggctcagccccggaagacgacgaactccgcttcgcccgaccccagggctcggactcgggctcagacccggaagacgacgaactccgcttcggccgaccccagggctcagactcgggctcaggcccggaaggcgacgaactcc

SEQ ID NO: 321 - DNA, 331 bp, Zea mays
  Clone ID: LIB3115-006-Q1-K1-F11
agacgacttgtttcattgattcttgaagagatcgagcttcttttgcaccacaaggtcgaggatgtcttgcaactgcggatcaagctgcggctgcggctcaagctgcaagtgcgggaagaagtaccctgacctggaggagacgagcaccggcgcgcaggccaccgtcgtcctcggcgtggccccggagaagaaggccgcgcccgagttcgtcgaggccgcggcggagtccggcgaggccgtccacgggtgcagctgcggtggcaactgcaagtgcgacccctgcaactggtgatcacatcgatcgacgaccatggatatgataattatctat

SEQ ID NO: 322 - DNA, 407 bp, Zea mays
  Clone ID: LIB3115-006-Q1-K1-F12
tcgcccacgcgtccggaggccgcgcagatcgactacagctcaagcgtctcggtgttcccgatggaggcctgcgacctgcttggtggcgacgcgtgcaacggtcccatgttcccggaggccaagcccgtctcggctgcagcggcggcgagcaggagtgtggtcggcgtggacagggactacctgtgctacgacgagccaaagacggtgttccctggcgaggcgtgcgatgaccttggcggcgagttctgcgaggcgccgtaccaggacggcgtctacaaggagctggcgcacgcctgaagaccctgatccatacatttctgtccaccacgctatgtacgtatgtgtagcagatggcttacatctacgtgttagagcccggagagctgaaaaactagctagcgtgctta

SEQ ID NO: 323 - DNA, 435 bp, Zea mays
  Clone ID: LIB3115-006-Q1-K1-F2
cccacgcgtccgggaacagatcaagggcatggacgcgttccagatggcggagctgatgcggaagagctgccgggagacaaacgacaccgcaaaggcaggcgtccagacgaactactacggagtgaagaacgtgaccgaggcgctgctgcctctgctcctgcaggcctcctcctccggcggaggaagggtcgtcaacgtctcctccgacttcgggctgctacgctatctcaggaacgaggaggtaaagcatgagctggacgacattgagggcctgacggaggagaggttggacgagctgctgagcacgttcctccgggacttcgaggccggcgcgctggaagcccgcggatggccgacggagttcgccgcgtacaaggtggccaaggccgtcctgaactcctactcgagggtcctggcgaggcggcaccccgagct

SEQ ID NO: 324 - DNA, 461 bp, Zea mays
  Clone ID: LIB3115-006-Q1-K1-F4
cccacgcgtccggagcgcatcaacggccggctcgccatggtgggcttcgtgtcggcgctcgccgtcgaggcgtcccgcggcgggggcctcctctcgcaggccggcagcgggtccgggctcgcctggttcgcggccacggctgccgtgctgtccgtggcctcgctggtgccgctgctcaggggcgacagcgccgaggccaggagcggcgccgtcatgagcgccaacgccgagctctggaacggccgcttcgccatgctcggcctcgtcgcgctcgccttcactgagtacctcaccggcgcaccgttcatcaacgcgtagaggcggttcagtccaagccagtgcttatatattttggaagttggaactgtgtatgctagtcagctatagcggcaccatgcccgtagtaggagcctagctacagttggacgagctactttttattgggatttactagtcttggg

SEQ ID NO: 325 - DNA, 138 bp, Zea mays
  Clone ID: LIB3115-006-Q1-K1-F5
gcgttcaccgcctctccacagtggcggatctaggttttttatacaggatgtaccgtaataaattttttatatgcaactgtatatacagttttatagtagatttgataaaaagtttgataaatagatataatgtttagc

SEQ ID NO: 326 - DNA, 444 bp, Zea mays
  Clone ID: LIB3115-006-Q1-K1-F8
agcgtccttggcttcccgcaggaagtcatgtacagcgtcaccaaaggaggactgaatcagatgacgaggagcctagctgtggagtgggcctgcgataggatccgtgtgaactgcgtcgcgccgggcgtgatcatgacggacatgggtaaagagctaccggcggcgttggtggagcaggagcggtcacgcatcccgctgcggcggaccggcgagccggaggaggtggcgtccctggtgtcgttcctctgcatgccggcggcgtcctacgtcaccgggcaggtcatcttcgtcgacggcggccggaccattagtggcgcctgatcgacgacgacggccagctatatatatatagcgaagaataaatgtgggtctattctactgtattttaatttcttttcgttcttgatcggccatgtatcaccgtcagacgtcagcggcaataat

SEQ ID NO: 327 - DNA, 425 bp, Zea mays
  Clone ID: LIB3115-006-Q1-K1-F9
agaaaatcaaccgcctcctggcccgcaagcaattcgtgcttgaggtgatccaccccggccgcgccaacgtctccaaggcggagttgaaggagaggcttgccaaggcgtacgaggtgaaggaccccaacaccatctttgtcttcaagttccgcacccacttcggaggaggaaagtccactggtttcggcctcatctacgacaacctcgaggctgccaagaagttcgagccgaaataccgcctcatcaggaatggtcttgctactaaggttgagaagtcccgcaagcaaatgaaggagcggaagaacagggccaagaagatccgtggtgtcaagaagaccaaagctggtgacgccaagaagaagtaaacgttcgtttacatttgtattactgttctgggctctgggtggtctagctgcaatgtcata

SEQ ID NO: 328 - DNA, 460 bp, Zea mays
  Clone ID: LIB3115-006-Q1-K1-G1
ggcgttcagcaaatcagcggcgatctgaaggagaaggatgaatgcatggttgggctggggcctgggcccttaggctatccacatgttactctatatttactctacagactataccactattcctagcttaatcaccaaaattccttactctaaattactcaccaaaatttgtagcctcatatacctctatatatcaactactactacatagtctattttattctatttcattctaactacttttttctctaaaaaaataatttttaataattatttttaattatttattattttattttatttatttattttttatattatttatttgttttttatttatttttttatttttttttatatttatttttatttttttttatttattttttattttttttttttttttttattattatttaagtgttttttattttaatatgtttttttttttttttatttt

SEQ ID NO: 329 - DNA, 169 bp, Zea mays
  Clone ID: LIB3115-006-Q1-K1-G10
ccgggccggaaagcccggggcgacgccacgcgaacgggcaacgagaagacgaaggaaagggcaccaggaagaagcgaccgaaccagcacgacaagggggacgaagaaacacgggagaagccaaagccaagaggaaccacggaccaagacgccaacaggagcaagggaaa

SEQ ID NO: 330 - DNA, 294 bp, Zea mays
  Clone ID: LIB3115-006-Q1-K1-G11
gcgtcattgaatgagccagatttcgttgagcttgcactgcatgagtacaagtctgcgactaacatgacagagcagtttgctgcattagcagcattatcccaaaatccaggccaagttcgtgatgatgccctcttggatttctataacaagtggcagcatgaatacttgggtgtaagcaagtggtttgctcttcaagctacttcagagattcctggaaatgttgcaaatgttcagaaactggtgtcttaccctgctttcgacctgagggaatccaacaaggtgtactcactaatc

SEQ ID NO: 331 - DNA, 388 bp, Zea mays
  Clone ID: LIB3115-006-Q1-K1-G12
tcgctgcactgcacgagatgaggacggtgcactccacagctgctggcatttgcatccttcttgtgatggtcatgtcttgcaccctcatgacgacacccacctgggcagcagaggattgttaccagcagtacccgacatgccatgacgccgtgtgcgaggtaaaatgcagtgaggaattccactccaagctcttcggtttcaggtgcacgagccgtatgcacatccctgtttagctgctgcacccacacttgacatgggcggtccgggatgcgtcagatccaattaatatcatacaacaacaaccgtgcttaagcttgtcaccgaatatgctgtaagagtagccattatgtttatattctataaaagatatatggtaacagctggactt

SEQ ID NO: 332 - DNA, 437 bp, Zea mays
  Clone ID: LIB3115-006-Q1-K1-G2
atcacggaggaggtcgctgccgcggcggccgacggcgccggcggctacgtattccacgagcaccacgagaagaagaaggaccacaaggacgccgaggaggctagcggcgagaagaagcaccaccacctcttcggctgaccgtagtaccggccggcgcgcgaccgagctagctagctacggcgcacacaaccacacacctgtttaattctgtactgcatgcgtgtgtaatttgatggttcacaataatgagtccctgtccggaccttggtagctgcttgcttgtggtgagtgagagtgtgagactgagggagaagaggtggcgggcgtggggctacgtcgagagaggcgtgttcctgtactagctacggttgctctgcatgcgtgtataatagtgttcaataataagtgagagcgcagtgatgagtggctgcccttgt

SEQ ID NO: 333 - DNA, 237 bp, Zea mays
  Clone ID: LIB3115-006-Q1-K1-G3
gagaccacaagcaacatagaaagtggaatccagtagcaacaattgaaccacaattggaaaccgagatatttttccttcctaatgcttctttgctcctttcaacatgtgtttgctaacgcgacaattttttccctaattgctcaacaagctcctatagctttccctttttcccctataccttccatcaattatagcttcagtatgtgaaaccctagctctttacccatataggctttt

SEQ ID NO: 334 - DNA, 99 bp, Zea mays
  Clone ID: LIB3115-006-Q1-K1-G5
gacactaagcagactaacagatagctgaatgaaaaggctgcattcaagcttcatctgataccggggtattttacctatttatatattacgctatattta

SEQ ID NO: 335 - DNA, 448 bp, Zea mays
  Clone ID: LIB3115-006-Q1-K1-G6
acattatgctgaaagaagtgtttgacaggctgaaggccaaggacattaatctccaggtgacggagaagttccgagatagagttgttgacgaaggttataacccgagctatggtgccagacctttgcggcgtgctatcatgaggcttctggaggatagtctggcagagaagatgctggctggtgaggtgaaagaaggtgactctgccatcgttgatgtggattcagatggcaaggtaatagtcctgaatggtggtagcggtgttgctgagccactggaacctgctctcagtacctaaccgaggttaaaatctttgggccgaaatggccttctttacaagtcagctgggctcttcgtgatggtaaagtagactgttattacttggccgctccattagttgctttatctttcattgatttttttttgttggaagtgaggcagtagggtcac

SEQ ID NO: 336 - DNA, 176 bp, Zea mays
  Clone ID: LIB3115-006-Q1-K1-G8
tctttacgacggatcccatattacacacagtaagaatctatctgtatctgtctgttcattgtctctctggtggggataccatacccacgaccttgacgtatacacacagactaaactaattaaggcacctatgctttgcattcatgataccatgatcccttttaatttttctcaat

SEQ ID NO: 337 - DNA, 285 bp, Zea mays
  Clone ID: LIB3115-006-Q1-K1-G9
tcgagggatccgatcccacacacagaagaatcagtcgtctggtcggtgctgctgcgcctgctgcgggaccatacccacacccttgaagtatacacacagtagaaactaattaaggcacgtttgctttgctccaggagaccaggagcgctctgatgttgtcgtgttccttgcggcatggccttttcggcctgttgtactcagtagcgccgcagagtctctctagcatgagacgacctcgaggaggctatggtgtcgtctatggatggaacagtcagcatagaccaa

SEQ ID NO: 338 - DNA, 314 bp, Zea mays
  Clone ID: LIB3115-006-Q1-K1-H12
tctttctcctcgaggctcgagcattcgtgcttgctccggggggaccgccacaggctgggcggtccggcgatctcgctcaccggcgggaacatgactacttcaaggcgccttgctgacaggaagaccgcaaagttccagaagaacatcaccaggaggggttctgtgcctgaaaccactgtcaagaagggaaatgactaccctgttggccctctagtgcttgggttcttcatctttgtcgtcattggatcatcgttggttcagatcatcaggacgtgaaccagcggctgggtggcttgagagcccgcccacattta

SEQ ID NO: 339 - DNA, 264 bp, Zea mays
  Clone ID: LIB3115-006-Q1-K1-H3
tgattgagaccaactagcaacatacaaagcacaatagtgtaccaacaatgttagccaaaatattttgcctccttatgctggatggtctttctgctagtgctgctacttactaccatcttaccgtaatgctcataagctcctatagcttttctttttaccccatacctcttaccaactttgtcttcagtatgttaaaacccaattctttaaccctacatgatccaacatgcaatctcatcattgcatttttacctttatcatcct

SEQ ID NO: 340 - DNA, 372 bp, Zea mays
  Clone ID: LIB3115-006-Q1-K1-H4
cccacgcgtccgcgacgaagaggcaggccggacgcagctgaggcgcccgtcgtcggggagctacgggcggcggtcagccgaggagccggtggtgtgcagccccgcgagctcgctggtggccgtcatggtgcaggccctcgcgcacagggtgagctacgtgtgggtcctcgacgaggacagcgactgccgccttgctggcatcgtcacgttcgcggacgtactgagggtgttccgggagcagctgctgtgagatctggaagagtgtttgctgtttcctcctcgatcgcatcttgtgctgtaatgagagaagaacatgagctcttgtcacggaccgagcgccttcgtttctcaaaaaacattttggtttggatc

SEQ ID NO: 341 - DNA, 187 bp, Zea mays
  Clone ID: LIB3115-006-Q1-K1-H6
cggacgcgtgggcggacgcgtgggtaaaattatgcttttgcatctggggcttgcctaggagattagaacattttactagaagagccgaagaggatatgtatgaacaatttggacatctgaattttttttgtttatggtgctgtcgtctggttttaatgcaaatcatgaagagccgagtttattcttg

SEQ ID NO: 342 - DNA, 317 bp, Zea mays
  Clone ID: LIB3115-006-Q1-K1-H7
cgttcctgctggaccgcgtggggcgtcggcctctgctactgaccagcacgggtggaatggtcgtggcgctcatgagcctggggactgcgctcaccgtcgtggggcatgacccggacgccaagatcccgtcggtcgtcgctctgtgcatcgcgtacaccctggccttcgtcgccttcttgtctatcggcctcgggcccatcacgggagtgtacaactcggagatattcccactacagctgcgcgcgctgggctttgcggacggcggggcgtgcaaccgcgttaccagcggcgttatctgcatgaccttactgtgtctc

SEQ ID NO: 343 - DNA, 360 bp, Zea mays
  Clone ID: LIB3115-007-Q1-K1-A2
atcgaacatggtattgttagcaattgggatgacatggagaagatctggcaccacaccttctataatgaactccgtgtggcgcctgaagagcaccctgtgctgctgacggaagccccactcaaccccaaagctaacagggagaagatgacccaaatcatgtttgagaccttcaatgttcctgccatgtatgtcgccatccaagctgtgctttccctgtacgccagtgggcgtacaactggtattgtgttggactctggtgatggtgtcagccacaccgtgccaatctacgaaggttatgcccttcctcatgccatcctgcgtcttgaccttgctgggcgtgacctgactgacaagctgatg

SEQ ID NO: 344 - DNA, 339 bp, Zea mays
  Clone ID: LIB3115-007-Q1-K1-A3
gtaccatggtattttatgagaacaaagaaaatctttccaaattatgggatattctaaccgtgtatggatggattgacaaagatgttggttactgccaaggaatgagtgatttatgctcaccaatgatagttctactaaaggatgaagcagatgccttttggtgctttgagaaattgatgcgtagattgcgaggaaatttcaaatgcacacatcaatctgtgggagtatccaaccaacttcaacatcttgttaatttttaaaaaaaaaaaagaaaaaattattatttatatatggataagcctcattcttttttttttgttgaaaatgtaatgtttggat

SEQ ID NO: 345 - DNA, 359 bp, Zea mays
  Clone ID: LIB3115-007-Q1-K1-A5
cccacgcgttcgagggccccaacctcttgaatctggcgcgcaaggagcagtgcctggcgctgggcaccaggttgcgctccaaggacaagatcacctaccagttctaccgcgtcttccccaacggcgaggtgcagtacctccaccccaaggacggcgtctacccggagaaggtcaaccccggcagggagggcgtcggccagaacttccgcagcatcggcaagaacgtcaaccccatcgacgtcaagttcaccggcaaggccaccttcgactaatcacactttcgtacgctcgacgccccagccgggattcaaattaaagaacttcttcttctattaattacaagattattggaatttggc

SEQ ID NO: 346 - DNA, 262 bp, Zea mays
  Clone ID: LIB3115-007-Q1-K1-A6
gagctgaggagttccttatatgcagtttatgatgtcacaatagcatacaagcatcggcttggagattttgtggacaaggggtgtggcgttcatccttctgaagtccacatccacgtcagaatgggtgagcttcatcacatccccacaacagaagacaagataacagaatggatgtggaagaggtgtatgcagaaagaccaacttctggcagatatctttatgaatgggcacttttcttgtgaaagaactgaaggagatctgt

SEQ ID NO: 347 - DNA, 373 bp, Zea mays
  Clone ID: LIB3115-007-Q1-K1-A7
cccacgcgtccgagcctagctctatagctcgagtattgcttgctctccacaagaaacaaggcagagcaccaacaatggccgccgcctcctcgtcctcggtcctcctgctgctcctggccgccgccttggctggcatgagcgccaacgccgccaccttcaccatcaccaacaactgcgggttcaccgtgtggcccgcggccaccccggtgggcgggggcacgcagctgaacccgggcgggacgtggaccgtcaacgtgccggccggcaccagctccggccgcgtgtggggccgcaccggctgctccttcaacggcaacagcgggagctgccagacgggcgactgcggcggcgcgctggcctgcacgctgtctgg

SEQ ID NO: 348 - DNA, 223 bp, Zea mays
  Clone ID: LIB3115-007-Q1-K1-B2
cggacgcgtgggcggcggcggcgccctcctcgtctacaacaccagcgccctctccggctaaggatatccaatgcatgcgcttcttgcgattcgtcatgtaaaatcagggtgtctgtctataatctagcctccatggatgctcaaccttcgtcatgtaacaataatcagtgctactcttcattacataattttgatgctatatatatataccccatccctccct

SEQ ID NO: 349 - DNA, 328 bp, Zea mays
  Clone ID: LIB3115-007-Q1-K1-B3
gcgcccacgcgtccgcccacgcgtccgcccacgcgtccgcggacgcgtgggcgggaggcggcgggggcgtggccgcgtcggcgccggcgcgcgacaccttcgtggcggcggccccgcggtggagcgaccgccgggagtgcccgccgtggcgcgccaactcgctggagaacgtcgtgccggagaacctgccccgcccgtcggcgcgccggaggtttaactcctgtaagcgggcgccgcggaaggcccccgcgctcgggccttaagcggtggcgccggcgccgttcctggcgctgcgatccggcatggacgactgctttaccctctatgc

SEQ ID NO: 350 - DNA, 247 bp, Zea mays
  Clone ID: LIB3115-007-Q1-K1-B4
acgccctgtgcacggttagcctgacagcagttcaaaggatagtcatcacacctcattacaacaacactgacggacagcgtcagcccataataaaggtttttatgtactgtaacatcaaaactacaaacctaagaccagtcatatatttgacgaagcagtgaagagaacacatggtctataaaaaaaaaaaaaaaaaaaaaaaaaaaaaaaaaaaaaaaaatggcggaaaatattaaaaaaaaacaaa

SEQ ID NO: 351 - DNA, 236 bp, Zea mays
  Clone ID: LIB3115-007-Q1-K1-B5
ttctatgctttttgctgttccccctacggtgtggatcaggccatgccgtcaaatcgtcttggaaatgtttcgtcttcttataaactatattgctaactattttcattcgtgaattatttggctttttttggattggcaggtgaacttctctggttctattttcatcgtcgggtaacaagaaactaatcagggagtctcttcccatttctttgcagtggagggaatggtttagctac

SEQ ID NO: 352 - DNA, 97 bp, Zea mays
  Clone ID: LIB3115-007-Q1-K1-B6
actagattgtgtgttttgtgttgagttgtttcacgatatacggcctcagaatagaagttcgctttgaaatgaagtaacgctcgctgatttatgagtt

SEQ ID NO: 353 - DNA, 437 bp, Zea mays
  Clone ID: LIB3115-007-Q1-K1-B7
cccacgcgtccgcagaagaaaaggttaagttgaggctggagacttattaccaaaatatcgagtccttgctatcaacatatgagaacattattgtcaaagtgcaaggagatgccacagtggatgctgtctttgctaacatcgacgagctgctgggttctatcctggagaagaaaaatgaaatggtgtccagcacatgagcaaggggaatatatctgaagcacaggacgacacgtacaagtaatgtaagccagtctcacgtaatggaaatttctccatgtggatgtggtcaaagcataggattttttttctccaattgttaactgtacgcgaatggaagcgacagatcattcgtaagttgtgaggggcttaaagatcatctgctgctgtacatgttttgttgctgtcttgtgacatacatgtctttgtgtttctcaact

SEQ ID NO: 354 - DNA, 322 bp, Zea mays
  Clone ID: LIB3115-007-Q1-K1-B8
cacaagcacttcgacgtcgcacgggcgctgtacacagacacaccaagcgtcggcaccaatgggttactaccaggaggtggactactgctcggaggaggtgaggtcggtggccccggccggcttcggccgccacggaggcggcgtccagcagcacgtcgtcaaggagaagttcgaggaggtcgacacggtctcacgcgccggcgccaaccaccaccaccaccaccatggtcaccacggcggccacggcttcgtggtgcgcgagaccagggtcgaggaggacatcaacacctgcaccggcgaggtccacgagcgcagggagagc

SEQ ID NO: 355 - DNA, 358 bp, Zea mays
  Clone ID: LIB3115-007-Q1-K1-C1
ggcgcggacgcgtgggcacagcaatccacacaagctcgtttacgtcacacgggcgctgcgcacagacacagggagcgtcggcaccaagggctggctaccaggaggtggactactgctcggaggaggggaggtcggtggccccggccggcttctgccgccacggcggcggcgtccaacagcacgtcgtcaatgagaagttcgaggaggtcgacacgggcttacgctgccggtgccaaccaccaccaccaccatggttaccacggcgggcacagctttatggtgcgcgagaccagtgtcgaagaggacatcaacaccttgcccggggaagttcacgagcgcaaggagagcttccttggca

SEQ ID NO: 356 - DNA, 389 bp, Zea mays
  unsure at all n locations
  Clone ID: LIB3115-007-Q1-K1-C3
cactcatcgatctacacacatacatagtttcttctactacacgacgacaaacatggggaagcctgcgaagatcggagagtggggtggatacgccggcgatcgtcgggatctgagggctactccggaccggctgatcgaggtgaaggtcacggcggacaacagcagctgcatccgctccatctccttcatctacatcggagccgatggcaaaccgtacgaggaggggccatggggtttcggccatgctggcacggagtacaagattgatctgtgcangttcgacgagagcttgacggagatctccgggaccacgggcccagcctacaacattgacaatctggtcaagtctctcaaattcgtcaccaacaaacgcgcttacggaccgtacg

SEQ ID NO: 357 - DNA, 348 bp, Zea mays
  Clone ID: LIB3115-007-Q1-K1-C4
cccacgcgtccgcaaaatattgccggaggtggcattgtaagtgggagtgggagtggcaatgacatgtatcagaatcgggtcctgcaacgagaagctgcattgaacaaattcagactgaagcggaaagatcggaactttggtaaaaaggttcgctaccaaagcaggaagaggcttgctgagcagcggccacgggtccgaggacagtttgtgcgacaatctgagcaagaagatcaaacagcgcaagggtcagaaagatgacacgtaatttctaatacaacgtatcatcttcttcggcagatctgagaattaggcgggtcttcctattgcgcatcttcgtcgacagatctg

SEQ ID NO: 358 - DNA, 280 bp, Zea mays
  Clone ID: LIB3115-007-Q1-K1-C5
cccacgcgtccgatttgttaagggcttcatgttgagaccatgaataccgactgtcggcgctgctctcatgtacggtggtgtggcctcgagcctgattaactgttattacaataaattgctggacttgttctatccaattgttatgaatcatgtattatggttgcatgggtacaatttcttcatggaatgtgaatcgaaacattccacatcaattggtgtgcgtgaactctggttcgtccttgtacacaatacaagattcatctgattaattacacttaaa

SEQ ID NO: 359 - DNA, 340 bp, Zea mays
  Clone ID: LIB3115-007-Q1-K1-C6
cccacgcgttcggatggaggaaggcgcacgtttggtagcccctcaaggcgtgcaaggagccgagtcagggaaagcagcgaggagcgaagggccaagattgagcagtggaaccgtgaacgggagggaaaacagtgagctctccgtggctactgtttgccggacttgttgcttagctccggctctcatcgctatattctaagtatgcttgtgtggattgcattctgcatggctaagtaaaaccttttaagatcaggattcctcggttcattttatggttaaaccagacatcatttgtttccatctgtgttgtgtcggatcctttgctattatgttattttga

SEQ ID NO: 360 - DNA, 339 bp, Zea mays
  Clone ID: LIB3115-007-Q1-K1-C7
tctgaggtcgacacggactcacgggcgcttctcacagacacaccaaacgatggcaccaggggctgactaccaggaggtggggtactgctcccaggaagtgaggtcatttgccccctcctgcttacgccgtcactgcggcggcggtcaccagcacctccacaaggagaatttcgaggatgtcgacacggtatcacgcgccggcgccgaccaccaccaccaccatggtcaccacggttgccacatctttgtggtgcgcgagaccatggtctaagaagacatcaacacctgctccggcgaagttcacgaacgcagggagagctttctcaccatggctaactg

SEQ ID NO: 361 - DNA, 282 bp, Zea mays
  Clone ID: LIB3115-007-Q1-K1-C8
ggaggacctaatcgtcaggggagggtgcgtcggcggcgtcgacaccaactgggcgggcgtgtgcatgaaccacgagaggcagtcctgcatggaccccaacatcatggaggccaaagtcgtggtcagctcctgcggacacaacaggcccttctgagccaccggcgtgaagaggctgcaagacatctggatgatcagcgccgtgccggggatgaaagcgctcgacatgaacaccgccgaggacgagatcgtgcgcctcacacgcgaagtcgttcccggcatgat

SEQ ID NO: 362 - DNA, 390 bp, Zea mays
  unsure at all n locations
  Clone ID: LIB3115-007-Q1-K1-D1
gggattcttattgcagtaccgatccccaagcagcatgcaacttcagggaaaattatagagtctgcaatacagacagctctaaaagaggcaggggataaaaggataataggaaatgcgatcactcccttcatgcttgaaagagtaaaagaactaaccgcaggatcttccttggaagctaatattgcacttgttaagaacaatgctcttattggtgcgaacattgctgttgccctttctaaccttcagcagagagaaataagcagaatgggaagatccgcgttgtacggttatgctcgcggatggagtagcacaagaagcaaaccatttacgangatggaagctagctgcacgttgggaactggatgtgattgcgatgtgtctgagtctgac

SEQ ID NO: 363 - DNA, 188 bp, Zea mays
  Clone ID: LIB3115-007-Q1-K1-D12
ctcccgcttcgcttccccaggggcggctgtctcggcgtctctggcatttacgtcctcctcctcgtttgcgggttcatctttgggaatcgagttcagctacagtataatgacaacgcggagataccgtggtatgcagattagggcctggaaaggctgtccctctgcatggaccaagaggtcaagggtct

SEQ ID NO: 364 - DNA, 361 bp, Zea mays
  Clone ID: LIB3115-007-Q1-K1-D2
ggccgtggaggacctcatcgtcaggggagggcgcgtcggcggcgtcgtcaccaactgggcgctcgtgtccatgaaccacgacacgcagtcctgcatggaccccaacgtcatggaggccaaggtcgtggtcagctcctgcggccacgacgggcccttcggcgccaccggcgtcaagaggctccaggacatcggcatgatcagcgccgtgccggggatgaatgcgctcgacatgaacaccgccgaggacgagatcgtgcgcctcacgcgcgaggtcgttcccggcatgatcgtcaccggaatggaggtcgccgagattgacggcgcccccaagatgggcccgacgtttggcgccatgatgatc

SEQ ID NO: 365 - DNA, 366 bp, Zea mays
  unsure at all n locations
  Clone ID: LIB3115-007-Q1-K1-D3
cccacgcgtccgatcaggtcaggaggagcatggccgaccataaggaggagcagtctgtgatggacaagatctccgagaagttgcacggcggggactcctcgtcgtcgtctgactcggacgacgagaagaagaaggggtcttcttcggcgtcggcgacggaggccatgaaagccaagatctaccgtctcttcggccgcgagaggcccgtccactctgtcctcggcggcggcaagcccgccgatcttgtcctatggaggaacaagaagatctcangcggggtactcgctggtgccacggccatctggctcctgttcgaggttatggagtaccatctcctcaccttggtgtgccactgtctcatcgtct

SEQ ID NO: 366 - DNA, 124 bp, Zea mays
  Clone ID: LIB3115-007-Q1-K1-D5
tataaagaggagctcggacaaggcatatcgccatcattcggggaacaattctaagcgcggaacgctccatcgctctaagggaaggaagctatcttttaacattgcgtaattcgcgcactgcatt

SEQ ID NO: 367 - DNA, 430 bp, Zea mays
  Clone ID: LIB3115-007-Q1-K1-D7
cccacgcgtccgctacatttcttctctctctgctcctccgcctccgcctgatccatccaagacagggatcgccatgtcggactcggaggagcaccacttcgaatcgaaggccgacgctggggcgtccaagacctacccgcagcaggctggcaccgtccgtaagaacggcttcatcgtcatcaagaaccgtccctgcaaggttgtggaggtttctacctccaagactggtaagcatggccacgccaaatgccactttgtcgccatagacatattcaatgggaaaaagcttgaagatattgttccttcatcacacaactgtgacattccgcatgtgaaccgtactgagtatcagctgattgatatttctgaggatggatttgtgagccttcttacttcaaatggcgacactaaggatgatcttagactccca

SEQ ID NO: 368 - DNA, 397 bp, Zea mays
  Clone ID: LIB3115-007-Q1-K1-D8
caagaacgggaggttggcaatggtagccatgcttggcttcatggtgcaagcatccgggactgatgccggccccatcgacaatctcttgacacacctttcggacccgttcaacaaaaatatcattcacacattctcctcttcctaagtactcgtcccaatgcccggatgctatggcggcacaaaaaggtcacaatgtttttgaacacaacagaacaatatgattattgatttacgtgcttctccccaccgaataggggaaggaaggttagggaagcgttcaatcaattcaatgagataggggaatctatagcagactctgatacgctatgatgtgagatggagcgtacttcgtgcaatcaataaattccatgtattcttattggggtaaaatattttt

SEQ ID NO: 369 - DNA, 330 bp, Zea mays
  Clone ID: LIB3115-007-Q1-K1-E1
cccacgcgtccgaccagatgaagaagctgtgcctggagccgacgtccttcaccgtcaaggcggagggcatcgccaagaacgccccgcccgagttccagaagaccaagctcatgacccgcctcacgtacacgctggacgagatcgagggcccgctcgaggtcggctccgacggcacgctcaagttcgaggagaaggacggcatcgactacgccgccgtcaccgtgcagctcccggggggcgagcgcgtgccgttcctcttcaccgtcaagcagctcgtcgccaccggcaagcccgagagcttcggcgggcccttcctcgtgcccagctacc

SEQ ID NO: 370 - DNA, 186 bp, Zea mays
  Clone ID: LIB3115-007-Q1-K1-E11
gagggtgcggtgcagctacgccaaggatgccaagaacgcggccccagtcagcaccaagggcgcaggcgcgtcgctgctcgccgcagcgggcgcggtgaccgcgtcggcggggcccgcgctggcgctcgtggacgagcgcatgtccacgtatgtcacctggctgagcctcgggctcagcaacaacct

SEQ ID NO: 371 - DNA, 294 bp, Zea mays
  Clone ID: LIB3115-007-Q1-K1-E2
agcagctccgctcgtcgatcagctctcggctgaccactcaccgccagtgggtgcctgccgacgcaggtctcgccaccgccgccggcgccgcggtagaaaggggagggagagggagagggagaaaaaactggcccacatcgagaggtacagcacgaaaaagagaggcaagagagataggggaccggagggcggcgggccggggcccaagaccgaggggctcgtgcgcaggaagctgatgaggctcctgtcgctcgtccccttcggctgccgtgctggacccatcgacgacgcgcc

SEQ ID NO: 372 - DNA, 436 bp, Zea mays
  Clone ID: LIB3115-007-Q1-K1-E6
cccacgcgtccgctccaacaaggagatctttcttagggagctcatttcaaactcctgcgatgccttggataagatcaggttcgagagtttgacggacaagagcaagctggatgcccagccggagctgttcatccacatcgtccctgacaaggccaacaatactctgacaatcattgacagtggcattggtatgaccaagtcagaccttgtgaacaaccttggtaccattgcacgatctggcacaaaagagttcatggaggcactggctgctggtgccgacgtgtccatgattggtcagtttggtgtcggtttctactcggcataccttgttgctgagagggttgtcgtgaccaccaagcacaacgatgatgagcagtatgtatgggagtctcaggccggtggctcttcactgtcacacgtgatacctctggggagc

SEQ ID NO: 373 - DNA, 96 bp, Zea mays
  unsure at all n locations
  Clone ID: LIB3115-007-Q1-K1-E7
ntaaaaaaaaaaaaaaaaaaaaattttaaaaaaaaaaaaaaagaaaaaaaaaaaaagggtaaggggaaaaaaaaaaagggggaagggaaataaaaa

SEQ ID NO: 374 - DNA, 365 bp, Zea mays
  unsure at all n locations
  Clone ID: LIB3115-007-Q1-K1-F2
attgactatgagtgtccagctcttatagggagcattcaaccatcagcgaaaaagatcaagggcgatgaggcatagtattttactctaatttactctaatgggttgttggatccttagtagacgaggcggtggaatggttgagcaatatattcaccttttgaggagacggcagacaactatgtatttcacttttgaatttctctatgttttatgaatgacaccgacacagatgttacaacttaagtatgaaaatgcaatgagctgtgttcttcatttgcccttggaaggttccatataacattgtgttcttaattcaaaananaaaaaanaaaanataaaaaattaataaaaaaaaaaaaaaaata

SEQ ID NO: 375 - DNA, 291 bp, Zea mays
  Clone ID: LIB3115-007-Q1-K1-F3
tcgaccacgcgttcggggagccacgccctttacttcgttttgggctcccgggcgcgacaacacgggggggtgtacaccacatgtgcgggaagcactactgaggggtgatatggaccaaaagaagatgatcgtgcgcgtgatgtggtgccaaccacaaaatgcagttgggggaggacctgtagaatgatggactttacaagggggtgctcgtccaaggagtggcagccaccaaacactatttaagtgtggaaatcaagggaaggccccggtgtatgtataaccattatatat

SEQ ID NO: 376 - DNA, 375 bp, Zea mays
  Clone ID: LIB3115-007-Q1-K1-F4
cccacgcgtccggcactgccattgaggacctgttcaagcctgacagagtgcttatcggtgggcgggagacccctgagggcaggaaggccgtccaggctctcaaggatgtgtacgctcactgggttcccgaggacaggatcctcaccaccaacctgtggtctgctgagctctccaaactcgctgccaacgcgttcctggcacagaggatctcctctgtgaacgccatctccgccctctgcgaggccaccggcgcgaatgtgactgaggtggcttacgccgtgggcaaggacacgaggattggccccaagttcctgaacgccaatgttgggttcggtgggtcttgctttcaaaaagacattctgaacctggtgtaca

SEQ ID NO: 377 - DNA, 338 bp, Zea mays
  Clone ID: LIB3115-007-Q1-K1-F7
cctacgcgtgcgtccacgcgtacggactggcttccgtacatatccaagaaccaaacgtgacgtggctagtccatgacttggtggcgtatcacgatccaagcatcccctcaggacggtggctcccgtggtgattgtgtccgccggactaggcatgctgatcgtcgtatcaatagccaacctgtccctgaggaacggtctcgcgggcaccttcactttggacacacgcacactctgtgccacgtgcggctggtccctgcgcgtatagtgcatatgcaacccgtgatccaacggggactacaggtggctgacctgcttctggtccgggatgatgccctgcc

SEQ ID NO: 378 - DNA, 288 bp, Zea mays
  Clone ID: LIB3115-007-Q1-K1-G1
cccacgcgtccgcccacgcgtccggctcactggaccattcctccgtgcttgggagcggcggagagctatccacctcgtctcaggcaccctctggcgtccccctccccccgtcgcgtgccggcgagctgcggagatccgggattttgacctcgcctccttctgctgacttgtgaacgaggcagcatcatagttcaatttggaaacatgtcatcgaagaagatagagttggatcacaaggacatggtccatgattctgccatcgactactatggcaagcgccttgccact

SEQ ID NO: 379 - DNA, 334 bp, Zea mays
  Clone ID: LIB3115-007-Q1-K1-G2
gctccattctcgagaaggaggccgtgaacgtgtccctggagaaccttaagacctaccccttcgtcaaggaagggctgggaaatgggaccctcaagctgggcggcgcccactacgactttgtctcaggagagttcctcacatggaaaaagtgaaaaactagggctaaggcaattctaccggcccgccgactcctgcatcatcataaatatatatactataactatactactacgtacctaccgatatgcacccgagcaatgtgaatgcgtcgagtactatctgttttctgcatctacatatatataccggatcaacaatcgcccaatgtgaatgt

SEQ ID NO: 380 - DNA, 338 bp, Zea mays
  Clone ID: LIB3115-007-Q1-K1-G3
cccacgcgtccggctggccaaggactacgccggcaagatcacgtgctgcaaggtgaacacggacgacagccccaacgtggcgggcacctacggcatccgcagcatccccaccgtgctcatcttcaagggcggcgagaagaaagagagcgtcatcggcgccgtcccaaagtccacgctcaccaccctcatcgacaagtacatcggtagctcatgagcatgccatgcatgcatgcatcgacgactaaacacatatgtgtatctctagtagcctttgcatacgggatatgatcaattcaagcaaccagcccgctgctactgctgtgttatatataccatac

SEQ ID NO: 381 - DNA, 310 bp, Zea mays
  Clone ID: LIB3115-007-Q1-K1-G5
gcaaaccgagaaaatggcggctcggcgtggtctagagtgggacggggaccagcagggagcggtgctgccaacgccggggcccctctgcgcgcccgtcgtctgccttctcagctccggcggagacctagaccccggcgccttcgcaggcttcctcgtgggatactgaaaacgttggatcacaaaccatggcacgaaggctcgtcttagcattgatggatcttctgcaaacacattcgctgctcttgctggtgtccaaagcttcattatgtgcttgctaagaacactgcgttggaaagatgacatgaacaat

SEQ ID NO: 382 - DNA, 367 bp, Zea mays
  Clone ID: LIB3115-007-Q1-K1-G8
atttcatttcagggcgccaccaaaatgcattggagctaacgaacagcgaggggcgatcatggcagcagctgccactacatcttctaaacttgccatttttattatccctgatccatgtattactcttaatttgtacgtactacaatacgggatctggccaagcgcgatatatagctgggcatgcaaagtttttgtcgatgttttttttttgaaagaaacaaggtagaagggctagctgtgcttgttaaattaaaaagaaggtgagccaagactagcagaacaaggctgtacaaaaaaaactacacaaagtgtgccaaagaagaactctcagtgtcggcctatatatcaaaattgccatatgttttac

SEQ ID NO: 383 - DNA, 363 bp, Zea mays
  Clone ID: LIB3115-007-Q1-K1-H2
ggtgctgggatccaaatcctgatgtccgtccgccgttcactgaagttgtgaggatgctggagcatgctgaggtggagatcctgagcactgtccgcaaggcccgatttcggtgttgcatctcccaaccgatgaccaccgactgaatcaaacagaagagagtcgaaaagaactccatgcaagcataattgataaatttatcttgtgtccagacttcgctcagctgaagtagaaagcacacctgagtgtatggccgcgtgtgtgtgtatactcacgtgtaagcatattgtctttgaaatattcctgcccttagaaatatacctacttcgcggcttcagactcttgagatgttttaaggctaaccta

SEQ ID NO: 384 - DNA, 378 bp, Zea mays
  Clone ID: LIB3115-007-Q1-K1-H3
gcgcccacgcgtccggctggacggccgcaacattaccgtcaacgaggcccagtcccgcggcggccgtggaggcggcggcggtgggtgcggtggtggccctggaggcggcggctacagcggtggcgggcgccgtgatggcggtggcggctacagcggtggcggcggctacagtggcggcggcggctaccgtggtggtggcggcggctacagcggtggcaaccgtggcggcggctacggcaacttcgacgggaactggaggaactgagcggtggggcccgcgcggccaaattatcctgttcgctaccgtgatgtttaccctagtccagagggtttatctttcttcgcggcgcgttttgtgttgcccatctgtgtttttga

SEQ ID NO: 385 - DNA, 107 bp, Zea mays
  Clone ID: LIB3115-007-Q1-K1-H4
cccacgcgtccgcactatttgcatttacaaacgaggaacgagtgaagcaacggctagcactgtaccaaggcggcatccctattgacatgcagttctctgacactcat

SEQ ID NO: 386 - DNA, 314 bp, Zea mays
  Clone ID: LIB3115-007-Q1-K1-H5
cggacacgtgggcagcagcacaagcaagaaccacaccttctgccttcgcctgggatcatgggggcttgctacggaggaaagcgcggataccgttccagctgctcatacggcaccggatacaacggctgcggtatgtaccctgacgtggagaccgtcgctaccaacaccagcaagaccaccgtcctcgccgcgccgaccaccaacgccagtgccggcggcttcgatgccgccaccgatggcggccgctgctactgcaacacctgcaagtgcggcaccaactgcaactgctcctgctgcatctgcaactgagctgg

SEQ ID NO: 387 - DNA, 357 bp, Zea mays
  Clone ID: LIB3115-007-Q1-K1-H7
cggacgcgtgggcggacgcgtgggagacgacttgtttcattgattcttgaagagatcgagcgtcttttgcaccacaaggtcgaggatgtcttgcaactgcggatcaagctgcggctgcggctcaagctgcaagtgcggcaagaagtaccctgacctggaggagacgagcaccgccgcgcaggccaccgtcgtcctcggcgtggccccggagaagaaggccgcgcccgagttcgtcgaggccgcggcggagtccggcgaggccgcccacggctgcagctgcggtggcaactgcaagtgcgacccctgcaactgctgatcacatcgatcgacgaccatggatatgattattatctatct

SEQ ID NO: 388 - DNA, 341 bp, Zea mays
  unsure at all n locations
  Clone ID: LIB3115-008-Q1-K1-A1
cctctccggcgggcagtcggaggtggaggcgacgcagaacctcaacgccatgaaccaggggcccaacccgtggcacgtgtccttctcctacgcgcgggcgctgcagaacacctgcctcaagacctggggcggccagccggacaaggtcaaggcggcgcangacgcgctgctgctgcgcgccaaggccaactccctggcgcagctcggcaagtacacctccgacggcgaggccgccgaggccaaggagggaatgttcgtcaagaactacagctactaattaatcgcccggccatcacccgggataccgccggccctccgagagatacgtgtgtactgatcat

SEQ ID NO: 389 - DNA, 117 bp, Zea mays
  Clone ID: LIB3115-008-Q1-K1-A11
cggacgcgtgggcaaacaacaaattattttttggcacatcatgcggtaataagcttgtgacaatgctgtaattgggagcgtttttcttgttataagtgtttctggtttgtttgagct

SEQ ID NO: 390 - DNA, 139 bp, Zea mays
  Clone ID: LIB3115-008-Q1-K1-A12
ctgacttaaaccgatgcgggtcaatatgttacgtgcatcctttcatggttggtctctggtattatgagcccgggtgcggggaacaataacaatgggtgtgcctcttctgagttttaaatccgaccacagtgatttctat

SEQ ID NO: 391 - DNA, 400 bp, Zea mays
  Clone ID: LIB3115-008-Q1-K1-A3
gcgaaaaccgagaagagaccaggccgaaggaaaacaatcctgaaaccaagccatgggtctggaggagggatttgaggagcatgctgaggaggcaaagaccttgcctgagaacacgagcaatgagaacaagctgatcctatacgggctctacaagcaagccacggttggagatgtgaataccgatcgtccgggcatattctaccaaaaggacagggccaaatgggatgcctggaaggctgttgaaggcaaatcgaaggatgaggcgatgaatgactacatcaccaaggtgaagcaactccaagaggaggctgccgcctcttaaaagtctcttaatatgtgtgccaaacagctatttgtaagatgagctttgtgccattttctcaataaaagtatattattc

SEQ ID NO: 392 - DNA, 225 bp, Zea mays
  Clone ID: LIB3115-008-Q1-K1-A4
accactcttacgtgaacacgctatcgagactgccaatgctctggctcttaaaaaacgggtgttggttcgaatcatttcgggttcagctgccgctgagcccgacacgcttgctaagatgccacaacacgccgagaagctatatattggcctgacccccaccatcctcgagcgctacctcttatccgagactgatacagcccatcctgaaggaagcactcaacatcg

SEQ ID NO: 393 - DNA, 359 bp, Zea mays
  Clone ID: LIB3115-008-Q1-K1-A5
cgcgccatggcgatggcgttcgcggctgcctccgcctggagcctcagtcttacagccgggtccctcccgctgccccagggtctgcgcccgaaacctagccaactcctccatggcgcgaccagctcgttcccgcggccacgccgatgcgggtggggcgccgtggtgcgctgcgcgaagcgcacggggaagcagcggtacccgtcggagaagaagcggttgaacaggcgaaaacaagagttgctacgccaggccgccccggaggaggggagcaaggggcgggagtccgggtactggcggctctcgaagctcgctgtttccgcccgcgacgacccaggcaaggacttcaccggcatcttcct

SEQ ID NO: 394 - DNA, 309 bp, Zea mays
  Clone ID: LIB3115-008-Q1-K1-A9
gcggcagacgactaccaagcgtgcctgaagcagcttgtcaagaaccgtgtggtttctgtgtcaacggcgactggatttgccacctttcatctccaccttctgggaatgggacctgatggccacattgcgtctctcttccctggccaccctcttgttaacgagaaagagaggtgggtcacatacattaaggattctccaaagccacctccagagagaattacattcacgtttccagtaatcaactcatccgcatacgttgcgatggtggtgactggagctggaaaggcggcagcggtgcaaaaagcgctc

SEQ ID NO: 395 - DNA, 321 bp, Zea mays
  Clone ID: LIB3115-008-Q1-K1-B1
cgaagtggcaacgcaacgtcgaccatgttttcgagcacttgctatactgacgttgtagatgtaccctagtacaaaaatgtcatctttgattcattcaacgccttgagtgggagggcacaggaacacatcttttggttaagttgctgaccgggggaacagctacccggtgctgcgtgcggtgcctacaaataacttcgctcgggacggatcactactctctagggagatggaacaaatcactgtttgtaccggccctttttgtttctgttttccttcagagatggagatgccgtatggaaaataagtccatcttctgtacaa

SEQ ID NO: 396 - DNA, 259 bp, Zea mays
  unsure at all n locations
  Clone ID: LIB3115-008-Q1-K1-B10
gcgttcnggtaagcggcgacagcgagcgcccttcttatagaataggcaangccgcggcgggcgctgggttatactcttcccgtgcangagctcgcgaggcaaggcatgtcaagtgtttgcttactcactgtctgtgctgctcaagcttcttcctccttcggttcaacatccgttcttcaactgtggggaattaattgttcggatgctgggcaccatcgatagtttataatagtggtaatttggcctctttttcttggct

SEQ ID NO: 397 - DNA, 416 bp, Zea mays
  unsure at all n locations
  Clone ID: LIB3115-008-Q1-K1-B2
gcgcccacgcgttcgggttaatcaggtttaatggatccagacgatgactgaaatgtcattgaaggaatgctttgtgcacaggcatttgatgtgtgcctagtagctgttggtgcataaattttgtctaagcttcggatgaaaaaggttatcaatcttttaaaaaaaaaaaaaaaaaaaaaaaaaaaaaaaaaaaaaaaaaaaaaaaaaaaaaaaaaaaaaaaaaataaaaaaaaaaaaaaaaaaaaaaaaaaagtttttnttaaataaaaaaaaataaaataattaataataaaattataatattatttttttttttattatatattaaaaaataaaatttagggggggcgtcttttaaaaaaaacaaattttattatccgggtggtttgacgaaataatttttttttttgggggcc

SEQ ID NO: 398 - DNA, 370 bp, Zea mays
  unsure at all n locations
  Clone ID: LIB3115-008-Q1-K1-B4
gcaagctaaggaggcaccattgcttgtcgtctgatccccgccgggcgcgtgtctctggagaagaggactacggcaacaggcgttggcagcttctccnaccgcatcatgccgcacctcctcaacatatatggatcgtctgcgacggcacgggacttctagatttacgcgccaaatgcgacgtttgaggacccgctcatgcgagctcacggggttaagcacatcaaatcagcgttctacacgctgccaaaggtgtttggggaatccaacatcaccgaatacaccgtacaagagaattccatggggccgggcaagaccgatgtggtgatccataacaagcagcactacaaggtgctgggcaagcccgtggatc

SEQ ID NO: 399 - DNA, 418 bp, Zea mays
  Clone ID: LIB3115-008-Q1-K1-B5
gcgaaaaagagaaatgtaaagcttgtgccttgcgggttggattttgggcgtccaggattcatgctgtaccgggagcatcggggtcatacttctttagaaaaaacaagaagattttatcctcatgtcaataacatggatggattttttgtagctaagctgaaaaagttgagcaatacaatcccggtgacgtctgagccgtctaaagcatctgaagaagcagctaatgttgatggcgaagatgagaaagctatttctaatgaacaagagactggtgttcctgataaagatgagaaaactgttgagataaaaaatcataaaaatgtgactaatataagaacaagtgtcaccaaagagaatggaagccataaacgtgaatccaataagccaggaaagcatctcaagaaaaataagaataatg

SEQ ID NO: 400 - DNA, 428 bp, Zea mays
  unsure at all n locations
  Clone ID: LIB3115-008-Q1-K1-B6
cataaaaataatgcacattttgtgggtgtgaacaactggaactttgtacanggttgcgggattggtgttgtattatgtgggattggacatngctctatgttcaagagatcaaggtgccgaacaatgatggcctgtgatcgatgatttccctgtgtagccactatcccgtttatcaacataagctgttcagtgatctgtaaggcacagtgtagcttctgtgtaacacctgcattgttggatctgcattggtggatgaggcttttaaaacagttagatatgaataaaatctttggctagtttcttctgtgngaaaaaaaagaaattatataattaattatattttataatataaaataatttatattatatattatctattattctttttttgctttttattttttttgttgttatttctttttatattt

SEQ ID NO: 401 - DNA, 333 bp, Zea mays
  unsure at all n locations
  Clone ID: LIB3115-008-Q1-K1-C1
cggacgcgtgggcggacgcgtgggcggacgcgtgggcgagataagagcaagatgacggcgtcgacggcgttcagccaactgttcccttccgccgctgcggtatcccccgtccctcgctgcgtctccctgcagctcttctgcgccagcggtggagttgtccctggatggaggagaagatgccgccgcatggccatggtgcgcgcggccaccgcggatgctgcggcgcccgcctacacctncgattccctcatcctctacttcaaggcggagggcaccatggaggagagggccattcccaagatcacagaatctcttgaaggtatggagggagtc

SEQ ID NO: 402 - DNA, 278 bp, Zea mays
  unsure at all n locations
  Clone ID: LIB3115-008-Q1-K1-C10
ttcanagccagtacagcaagctttacagcaagggcatcctcaangggggcctcggcttggggaaaagcgactaggtgaggtcctcccatctacnactactatttgattcatcctgggagtcttcatccatctacactttttctgttctggacanctagtaacaaccgctgcttctagctacattccttactggactgtacttgtgtgatgacatcatatcttcgcgtcgcgcttactgaagaactacacattgcactaactactaacggttctttcgt

SEQ ID NO: 403 - DNA, 450 bp, Zea mays
  unsure at all n locations
  Clone ID: LIB3115-008-Q1-K1-C11
ccatccnntcatgtctatcttctggtcgattccctatatacctcattgaacatcctttggggtggtgaacatgaaatcaggatagggctctccaatcattctacataanagccctcaacataatgagttaacattcaacattaattcgtatctgaaaaagacttttctcttntgcctcttcatcaagatgatttaaccatctaacttatcatcattgtanaagtatctataacctcttctcttcaacaaaatcaaacccccgtgcattttccccttccttttgttttaaaatctttatcaccttaaatgatgcattaacttatatgaatctttttttttacatattttattttttctctttttatttttaattttatttctttatatttaataaaatttttttttcctttttatattattttatttttttttttttttctttttattttt

SEQ ID NO: 404 - DNA, 253 bp, Zea mays
  unsure at all n locations
  Clone ID: LIB3115-008-Q1-K1-C12
gtgaatcgaaattctctgaactcggtgcagattcactggacacggttgagattgtggtgagtctcgaggagcacttcggtagtancgtggaggagtccagcgcacaaacaatcgccacagttgaagacgccgcggacctcatcgacaagcttgttgctggcaaagcgtacttctgtacctcctctatcggtggcctaccactctaggtctatcccttgatctacgttctatgggctaaaattttgattttctc

SEQ ID NO: 405 - DNA, 366 bp, Zea mays
  Clone ID: LIB3115-008-Q1-K1-C2
caaagtttgtcagtgacctattcttggttggactgttctaccatctgtataaccagattgctacaaacaccttggagcgagtggctcctctgacacatgctgtcggcaatgtgttgaaacgtgtttttgtcattggtttctcaatcatcgtttttggcaacaaaattagcacacaaactggaattggcacgtccattgccatagctggtgttgctatgtactcttacattaaggctaagattgaagaggagaaaaggaaaaagagcgcatgactgctgtgaataatattatcgggaccttcctcggacacaacatcgtcgacaatcacgacctacttctataccttggtttggtttcatcttgagt

SEQ ID NO: 406 - DNA, 429 bp, Zea mays
  Clone ID: LIB3115-008-Q1-K1-C3
gagcgatcacgccaccttaacaaagttaagcttcccatcatccagaggagcttgagggtgcgcgactgtggcagtttgtgagcgcaacgcgcaggggcggctgccaccttacatccatggataccgggtcatgcaacaaagcggcagcgccaccaccaccacgcaatatcgagaagaaccagcaggtcgagaaggaaccgatcgaggagaagccgaacgcggcggcgcacgtcgagaagaagctcaacaccattattcgctgcggcacaagagattaatatctcctcaatcctcattcgtctctcggcgtaatattgatgcatccattgttccatcgatatataatagatcatataagatacggtcgactttatacgcgtcctatagctataatcggtggtttgtatgcgtgaaacatatcttatttta

SEQ ID NO: 407 - DNA, 53 bp, Zea mays
  Clone ID: LIB3115-008-Q1-K1-C7
ttcatcacttccaaatcttttgattcttctttaccttccaatcctttgacatt

SEQ ID NO: 408 - DNA, 365 bp, Zea mays
  unsure at all n locations
  Clone ID: LIB3115-008-Q1-K1-D1
tggaggcacgcgtgcgngctcgtccaccctgaccgcggatcacagacagcctgtgcccgccttccaggccacagggtccctggctcttctatcgagcctacgaaaagcaagctctgggcggaccgtcccaccgggcgcgcgcatacacacagagatagagagaccgcacgggcgatctgggtgttctttggtcaggcgcacgacacgagcattgtgcagcgcgacaagaaggaggagcccaccgagctccgggctccagagatcgcgctctgcgccaacaacatgggatttccaggcaaccctggcacgcaaaacctgtgccagagctggttctcggcgtcgaagacatcgaccgagacgacatc

SEQ ID NO: 409 - DNA, 201 bp, Zea mays
  unsure at all n locations
  Clone ID: LIB3115-008-Q1-K1-D10
cggtggaggatacaaaacactcattccatatttataccgtggaaaactttctcttcatggtgcttatgcacaacatctggtggagtgtctttacttgcatcgtgcattcaatgatatccacgcttcatttaaatggctcaangcaaatggatcacccaacgtttgtcttactggctattgcattggaggggctttatcaat

SEQ ID NO: 410 - DNA, 261 bp, Zea mays
  unsure at all n locations
  Clone ID: LIB3115-008-Q1-K1-D2
ggcgcccacgcgtccgggtgggttggcttctcctcccccttcggttcgggttctccttcctgaggttcgctcacgttcggtgggggtgggtgagcncatctagatggcggcgtctgatgttgagtaccgctgcttcttcggcggcctctcctgggccacggacgaccactcccttcacaacgcctttagcacctacggcgaggtgctcgagtccaacatcattctccatcgggagacgcataggtcccgcggcttctgctt

SEQ ID NO: 411 - DNA, 293 bp, Zea mays
  unsure at all n locations
  Clone ID: LIB3115-008-Q1-K1-D7
cccaaaccaatccgtcgcagacactcattgttgcaggatgcctcctccncgggagcacgaccanccccagggcggagaggactactatacctcangcgttgtcaagctcatcagcgccgagggcttctaattctttgttgacagggaggccgccatggtcttcaacacccttcgcaacatgctcacatccccaggcggcttctcttagactctccatggcgaggtccgcttcccagagatccccactaacatccttgagaagatctttcagtatttctattggtcgctccatt

SEQ ID NO: 412 - DNA, 230 bp, Zea mays
  Clone ID: LIB3115-008-Q1-K1-D8
tataaaaaaaaaaaaaaaaaaaattttatttttttaataaaaaaataaatattgtgattatgaaaaaattaaaaaaggtgtgggaaaaaaaaacgtcctccctttttaaagaatccaaccttacttacccttcctttcaacttaataattcttttaaatttgcccctaaattaaattaaatggccttcaattttacaacatcaatactttaaaaaccctttctttaccca

SEQ ID NO: 413 - DNA, 248 bp, Zea mays
  Clone ID: LIB3115-008-Q1-K1-D9
accttcttattttatttctatactcctaaaaaaatttttaaataaaataacttccaaatataattttttattgtactttgctcatcttatacttgctacctcacattttttcatttctttcatctttattttccacctttattattcctattaccacataatttataccactaatatttttttttaataaaaataatacttctaatccacattatatctctttcccttaatatcttttttattctatt

SEQ ID NO: 414 - DNA, 379 bp, Zea mays
  unsure at all n locations
  Clone ID: LIB3115-008-Q1-K1-E1
gtgaagaccgaactttgccgcttcagcggccagaagatttatcctgggaaaggcgttacatggatccgggcggaggctcangtcttcctttttgccaactcgaaatgcaagcgctacttccacaaccgcctgaagcctgcgaagcttacctggacagcaatgtacaggaagcagcacaagaaggatatccatgctgaagcggtaaagaagaggcgccgcgccaccaagaagccatactccaggtcaattgtgggtgcttccttggaagtaatccanaagaagagagctgagaagccagaggtccgcgatgcttctagaaaagctgctcttcgtgagatcaaggagcgcatcaagaagaccaaggatgagaagaaagcga

SEQ ID NO: 415 - DNA, 268 bp, Zea mays
  unsure at all n locations
  Clone ID: LIB3115-008-Q1-K1-E10
gaccctaccttcgccaatgttacctatgcggcttccaanaataaatgaggccggcgcttctcctgctttggcaatacctacttttcatcatcacaacttttctttgtcatcctttctcttatcttttgaaccttttacatcttgtagcattttcacttttatctatttatttcgtaccatctttcttaaaaaattaaatttttatttttatttttaatttttaatattactattattttttttttttttttttatttcttttttattt

SEQ ID NO: 416 - DNA, 282 bp, Zea mays
  unsure at all n locations
  Clone ID: LIB3115-008-Q1-K1-E2
tgcgagcacgcgtgcgcccacgcgtccggtgtatttgttctaacagatcgcgacgctggtacaacgcantgacgggccagactgggccactatgggagtgtggggaaagaccaaatagtttgtgtatgtaaaagtggtgattctatcattctatgtatgctgatccatagtagcctatcatgtgcaaacgctattgccctttgggatttggcatttcactgtatataacatatcatcggctcatcgccgtattggcgcatccatcggtgtcttgggttaccc

SEQ ID NO: 417 - DNA, 378 bp, Zea mays
  unsure at all n locations
  Clone ID: LIB3115-008-Q1-K1-E7
gagatatcacanggacctcttcaggcttcaaggcacatccgcancacattggggctaggagcattctggcggggggggcgatcntcccnnctgcactgccctttgctggcgacngcacaatctactctgcaaaagcggcggcaggcaaggagcccttaagcccgggcactccgtcctccgtggccgccggccgcancatctttgatgagaggcgcgccgtggaccgcgtcncccttcctgggtggaagctcgacgccctctggcaggagtcctgcccgtcgccggccatgagggcgcgcttccnctactacttctgaagcttcccgttgcagtccttcgtcatcgagttctttagcggcgacaatctgtgcatgctct

SEQ ID NO: 418 - DNA, 151 bp, Zea mays
  unsure at all n locations
  Clone ID: LIB3115-008-Q1-K1-E8
ctactttctcctctactttctcnacctcccctacttcttcaantagggagtcatggaatattcttatatgtagctccttcctatcctcctctctancttcattgtatttaaattcatttcgtccttcattcatttcactccatctgttatc

SEQ ID NO: 419 - DNA, 382 bp, Zea mays
  Clone ID: LIB3115-008-Q1-K1-F11
ccactcatcctcccactcattctcccactctttctcttattcctaattctttacatactttaggcataagaataatcactaagggcgctgctttcttaaaacccttcaaatattcacattttattattattctacttcattttatttatatccggtacgtggtaatatatacttattccaatacttcacttaatataatattcttttaccttttctaaaccttctactactccatttcaaatcttccattactctttaaccaacttcacaccccctattacaaaattttaaatttactattcaacactctttccttacataccttaaacaccattctttcccccattaaatccctttattaacttataatttaaattctttt

SEQ ID NO: 420 - DNA, 181 bp, Zea mays
  unsure at all n locations
  Clone ID: LIB3115-008-Q1-K1-F3
ggggagcacgcgcagcgcgtctccgtcngagaacccgtcgacctcgactttctctggccgcgggattcgtcctgctccccgctccatccatttctccctcctatggcgcactccttcccctagtcgcccatgggcgcgccctctggttcttcccctggcgtctccttctctggttacagct

SEQ ID NO: 421 - DNA, 392 bp, Zea mays
  unsure at all n locations
  Clone ID: LIB3115-008-Q1-K1-F4
gcgcccacgcgtccggagaactggggggagaacggatactacaacatatgcangggttccggcgttcgcaacaagggcgggggcgattccatggtctctaccgtgtccgcagtccacgcctcgaaggagtagactctggtcagcggtgataatcgtgattccatatattgtagaactataatccctgctagtaatccatttgtgctggttatgtatcgaaggcagcaaacatgttgtgaagcggcaatgggatgctttctttaacggaatatgtttagcttggtaggcatgctacaccctattttgatgtagcaacgttatcaccagctgtataccctttttaatcgacaacatttgaataatatgtacataacattattttttgcgtcana

SEQ ID NO: 422 - DNA, 309 bp, Zea mays
  unsure at all n locations
  Clone ID: LIB3115-008-Q1-K1-F5
gcgcccactcttccncggactcgtgggtgaatctggccactttgcacgtgaatacctcttgcggattggttcaagaggctggggtagtggaangcttctcatcctaattcctatatatctcagccgaagccgcatccgcatcctcagcccaagatatctaatgagcccaatctatatcataagcccgcgaggtccttctcctatgaggcgaagttacagcaggtcgccactggcatctccttcacggagtctcagcaggtcaccggcgcttgctccccctccttccaaaaataacaacaagtcaccacc

SEQ ID NO: 423 - DNA, 104 bp, Zea mays
  unsure at all n locations
  Clone ID: LIB3115-008-Q1-K1-F6
caacattaattctatcatccaagctttctaatgtggtcattatngcttgggttttgggggggtgggnggtttcccacataatggcgctgagttcaagacccacc

SEQ ID NO: 424 - DNA, 185 bp, Zea mays
  unsure at all n locations
  Clone ID: LIB3115-008-Q1-K1-F8
ttccaattacattaactactctctccacactgacttaataaaccttttcttacattcttcttaccaaccactcctctcatctttcttatcattataacctttactttagactttcctttcctcattttattctactcnttatttatttttctaatcaactcttttatattctttttttttttaaa

SEQ ID NO: 425 - DNA, 188 bp, Zea mays
  unsure at all n locations
  Clone ID: LIB3115-008-Q1-K1-G10
gccactcatccnctgacttntcttctcctccccctcaccttcttattccaattcttctacttcgtcccggttcaccttccttggggagcggatccatattctncttccaatctttaatacctcttcttcttcgacctactctctctttccactgacgaccactcccttcacaactccttcatcaccta

SEQ ID NO: 426 - DNA, 287 bp, Zea mays
  unsure at all n locations
  Clone ID: LIB3115-008-Q1-K1-G4
ggcctttatgacactaacaattaaaactgtggccaaaaaacctatcccactttcanatcaggggcaggataaactttgctgggagggggcaacacaaacatttattangggtgctcatattgcaccaactgtgcctgtgggacaaccaccaccctgctcacaacatttcatacgcatctccccacattaactggagaataacatggaagaggcgtcggcttttttacataatacaatctctacggtttaagctgtgccttctgttgttcgtgcaataacaaacacac

SEQ ID NO: 427 - DNA, 319 bp, Zea mays
  unsure at all n locations
  Clone ID: LIB3115-008-Q1-K1-G7
tagcaggcagcanccatttccaatgtcttcaccctcgacgctgtctccaatcagaacttgaannatggttgctgggtcatgatctncntcaangtgtattatnttactaactttttcgtagaccacctcaaacgtgattatcgtctggtggcctcaacttgcaaggatgctacttattatttcgaggatgtctgtcacagcaacactgccctcgcgattattgatgagtacttcgggggtgaaatctactcttctaccatcccttccaggactaagtatgttccccctaaacaacctcactacaaccaggacaagactc

SEQ ID NO: 428 - DNA, 131 bp, Zea mays
  unsure at all n locations
  Clone ID: LIB3115-008-Q1-K1-G9
aacttcaagttcaaccccttcaactgctcatcacattcatctactaccattgatatcattattatctatctagctctttgtgggtctttaacaataataanctaagcctatctggcttccatacataatta

SEQ ID NO: 429 - DNA, 218 bp, Zea mays
  unsure at all n locations
  Clone ID: LIB3115-008-Q1-K1-H3
cattcataacactngctaggcggcttctcttcactcacctgcagagtgcaccgcgataatcancttccggatgggggcgtttcttcacttttggatggaaaatcctaactggcaacgtctgttttccctattcatatgtaatttcctgcctctttatattcactctttttgtcaagtccaagtggaaaatcttggcatattatacatattgtgataat

SEQ ID NO: 430 - DNA, 264 bp, Zea mays
  Clone ID: LIB3115-008-Q1-K1-H4
aaagtgatctttgcccacttcatcccttcacttctggagtgtatctttcactaatgggggctcatatttagggcctgagaaaaatagccactcttactcaaatataattaattagagcctcatctaatccttggactccttggagcccttcatacatactttccgggtggcctttattgtctataacttcttcacaacttgttcttttggcaactaagaattgggcaccacccttctattacattcttacccaacaagcctttt

SEQ ID NO: 431 - DNA, 320 bp, Zea mays
  unsure at all n locations
  Clone ID: LIB3115-008-Q1-K1-H9
ccaacaatcaacatataaagtttaatacanttgcaacaatatancaacaatggcggcgcgagatattgtccatccgtatgcgtcctttctctttcttcatttgtttctaactctaccatttttcctcaatactcacaaactcctatagctgcccttcttcccccataccttccatcaattacctcttcattattttaaaacccaaccctttcaaccctacatgctccaacaatcaatctcaacaagcaacttacctttatcaccccttttctttcaacaatctccatccctatctttggtgcaatcattcgtacaaacca

SEQ ID NO: 432 - DNA, 420 bp, Zea mays
  Clone ID: LIB3115-009-Q1-K1-A1
caaccatctaccagcgactcagcgagcgagagcagcacacactgcacgcagctagctaggagcagcagcagcggcggcgatggcggcctccatgatctcctcgtcagctctggcggtggcgcctcagggcctgccgcccctcggccgccgcgcctcctccttcgccgtcgtctgctccaagaagaagatcaagaccgacaagccctacgggattgggggtggcctgaccgtcgacgtcgacgccaacgggagaaagggcaagggcaagggcgtgtaccagttcgtcgacaagtacggcgcgaacgtcgacggatacagcccaatctacaacgaggatgactggtctcccaccggcgacgtctacgtcggtggaaccactgggcttctgatctgggccgtcaccctcgctgggatcctcgg

SEQ ID NO: 433 - DNA, 436 bp, Zea mays
  Clone ID: LIB3115-009-Q1-K1-A10
agcgcgctcgcgcctgttcacagccggatgttgatagagctacacccgggtcctagccgggcaggttctgttcgtggacgggaagttagacaaggcgatctcagcattcgaggagcttgcgcgggaggaccccttcaactatcgtcctcttttctgtcagggcgtgctgaaccttccccttggaagggaggcggaatcatagttcatgctcgagcgatgcctctaggacctcggctacgcgctaatcatagatccgtcagtgatgtatacaccgaacgtggataccgaattctattgtgataagcctcatcccgcgaatgtttgacctgttactctacagcggatgatcttaatataatggaacacttgcatttttgtaccctatacgaattataattagggaaatttcctaacatgtttccgttattcttattat

SEQ ID NO: 434 - DNA, 361 bp, Zea mays
  unsure at all n locations
  Clone ID: LIB3115-009-Q1-K1-A11
ncccacgcatacgccgatcttcttctagtgtacgcaagttccgaatgttgaatttttttggggaaggtatgaggaaaggaggaacccaatgtggtggacttcctgatcgtacttagcaccatttcaaattcctggttaacgtacttgatattttttgttaatgaagggagtttcatcacgttcactttcactctaatattaaagctgctcaagcgcattcattttttaattattaacttgatgtcaaacgaagcttgttttttttactattcatgctccattttttattcatatcatgttgtatgtttaacctttcttttctattctatttaataatacttaagtatgttcttttttgttc

SEQ ID NO: 435 - DNA, 349 bp, Zea mays
  Clone ID: LIB3115-009-Q1-K1-A12
acgctacccttctcctggcaactggcattggtcacgtatactgccttgctggcggttgcatgggcgggctgacggtcgagcagaggctctcgttccaggaggccttctcgctcttcgacaagaacggcgacggatgcatcaccatggaagagctggccgcagtcacccgctccctcggtctcgacccgagcgatcaggagctcaatgatatgatgagcgaggtcgatactgacggcaatgggatcatcgatttccaggagttcttaagccttattgcccggaagatgaatgatggcgactgcgacgaaaagctcaaggaagcctttgaggtcctggacaaagaccagaa

SEQ ID NO: 436 - DNA, 297 bp, Zea mays
  Clone ID: LIB3115-009-Q1-K1-A2
acgatcgctagcgcacgcacataagcacgttgtcggaagctcaagttacaagaagcaccggggactggtcgatggcgggccaggctcttctatcctgtcggcagctgctgtggcggccgctgcagacggcctgctgtaggtcggccgccaggaatgcgcccttcgcggtcagtgccagctacagacatccagacaagcaaagtgccacacagacagctggggttctgagtccaagcagtccctctcctacctagaaaggacgctgcccagggactatagcatttacccgatgggcct

SEQ ID NO: 437 - DNA, 377 bp, Zea mays
  unsure at all n locations
  Clone ID: LIB3115-009-Q1-K1-A3
gtcctgacaacccacgccacgacgacacaacaaagcacaagcaccgcagctaaacccatgggcggggtcgttgtggtgttcgacttcgacaagacgatcatcgacgtcgacagcgacaactgggtcgtggacagcctcggcttcaccgagccgttcgagcgcctcctgcccaccatgccctggaacacgctcatggacaccatgatgggggagctgcacgcgcacggcaggaccctggacgacgtcgccgaggcgctccgtgcggcgcccgtcgtcgcgggcgtccccgccgccatcaaggccgcctacgcgctcggctgcgacctgcgcgtnctcagcgacgccaacgccttcttcatcgacaccgtcctggcgca

SEQ ID NO: 438 - DNA, 192 bp, Zea mays
  Clone ID: LIB3115-009-Q1-K1-A4
gcgaccatgacaacccaccccacgactacacatcatagcacactcaccgtagaaaaacccatgggcacgggtgtattggtgtacaacctctacaataccatcatcaacttctacagcgacaactgcatagtggacagcctaggctttactcgaaccaatccagcgctttctgtcaatcatgccttgtaacac

SEQ ID NO: 439 - DNA, 290 bp, Zea mays
  Clone ID: LIB3115-009-Q1-K1-A5
cagacacgtgggcggcgcccctgtctacctcgctgccgtgctcgagtatctgggtgctgaggttcttgagctggccgtcaatgcgtcacctgacaacaagaagacccgcatcgtaccgcgccacatccagctcgtcgtccgcaacgacgaagagctctcccgcttgctgggcacggtgaccatcgctagcggtggtgtaatgcccaacattcataaccttttgctcccgaaaaaagccggcggcggcagctccaaggctgctgctggtgacgaggactaagtccttgact

SEQ ID NO: 440 - DNA, 51 bp, Zea mays
  Clone ID: LIB3115-009-Q1-K1-A6
tcaactcctaccccttcagcctctttatctttttttagatctcacccatac

SEQ ID NO: 441 - DNA, 347 bp, Zea mays
  Clone ID: LIB3115-009-Q1-K1-A8
cacacacactcttctccccccagttcggaccccggaggagccaagccatttcgtgcacctgctgctgtctccttcaccagtcaaccgcccgcctcggcgcgtcaccgcgcctggccgccgacccgccgcgcatcgctcaactgctcgtttgcaaagcccggaagcaggacgccgtcgtaaaccagagagacgtctcgcgccgcgccgcgctcgcgctcctcgccggcgtaacggtcgcccccagcgccaaaatgggtcccgccttcgcggcatactgataagcaggtaacttaccgagcatgcaatcggggcacgactctcatcaattcagcttgccttaattaacc

SEQ ID NO: 442 - DNA, 297 bp, Zea mays
  unsure at all n locations
  Clone ID: LIB3115-009-Q1-K1-B1
cggggtcggctcangacatttctactactgatccgccgatgcgtctgcagagcctgaccgttgaggccggcgttgccgtggactccatcgagttcacctacagtaccgtcacaggtgtttagactcgcaccgctgtgcgatggggtggacttggcgttaactttcgtaagcttgatcttggctacgctgaatacgtcaaggaagtttctggaacgtacggcgcattctaaggtgtgactacccttacctcgttcatgattgtcaccatcacctccatagcttgtgtgccatggggca

SEQ ID NO: 443 - DNA, 322 bp, Zea mays
  Clone ID: LIB3115-009-Q1-K1-B10
gatgatgatgtttttgtttgttgacagcttctgatggtgcgttagcaatggcaaggaggtgtcagtttgtttggattagcaggatgaagaagagcaaccctggtaactggggctgggggattgagtttgtgcatgacaaggctgcaaacttttgtatgtagataaaaagaacacccatttggccatttgtattgtatgttattgtatgtaagctagcaggcctgtacaactgcttttaggtcttcgtttggatgggcgaaattctggcaaacagcagcacatccactctgtgttctgatctaaacatctttgttttgatttg

SEQ ID NO: 444 - DNA, 226 bp, Zea mays
  Clone ID: LIB3115-009-Q1-K1-B11
ggccgaccacgcgttcgtccacacattcgcacaaattggaataggttctttcattgccatagctgggtgttctatgggctctatcattaaggcttaagagtgaatatgagaaaatgataaagagctcatgactgccgtaaataatattattttgaccttcctctgacacaatatctgttacattcactacctacttttattcctctgttttgttttcatcatttat

SEQ ID NO: 445 - DNA, 296 bp, Zea mays
  Clone ID: LIB3115-009-Q1-K1-B2
acgacgcgtgggcggacacttgggaataaagcgcgcgcgcgcacgccgagaggctctgagggctgtgtgagatggcacaagccattgcttccatgaccgggctctagaagggcgttctgcccaggaggcgcgccagcaacagggccaggactggcgacgtcatcagggcgtgcgccgaggcgcaagcgcatgcagtccggcgggccgcgctatggctgtgggacactgtcatcgtcggtggcgccttgtaacaagcagtgcacgctctgaccgtcaagaccatcaagatcggagcc

SEQ ID NO: 446 - DNA, 263 bp, Zea mays
  Clone ID: LIB3115-009-Q1-K1-B6
agtttttgtccttgtggaagcagacgcctgagcggaacttgggacttctcagagagtttggcgccgtcgatgctccctctctggagacaacacagtttcccatgttaccatgttggctattttctggctgacgcgtaataaagttttattccaaattgtgatcccctgaatgatttgtcaatgtagacatgattgctgatctttgtaaactgtggcttatgttttgtcaaaatggttctaattattcacatcaattaaggatt

SEQ ID NO: 447 - DNA, 393 bp, Zea mays
  Clone ID: LIB3115-009-Q1-K1-B7
actagttctagatcgcgagcggccgccttttttatttctttttttttttttttggagaaggagcaactgcaaagcaacatctatgcaccaataatagtactgtagtagtttggcaatgggcaccgtgggatccaaaccaaagcagaacaaacttgatcaagggcagaatggcgtgccgtccttgtcgcggtgtgacgggatgacgaagtgcctgatccgtacgacctgctaggcgaggtagcccttgtacaggaacgccctggagaaggcgtactttacggggcggtccacgtcgtggacgaagacgtgggtggggccggacactggcctgcacgcgcgcgccgacatgccggaggtgtatatggcgcccatgcagtcgggcgcccggggcgt

SEQ ID NO: 448 - DNA, 305 bp, Zea mays
  Clone ID: LIB3115-009-Q1-K1-B8
caatacatcttccgccactaccaccgtcttcgaacctggcgctggccctcgaaccgtcagtggcaacggcgcgcccggcgctgacgggttcatgttccagaccaccaccgactgtcacgtacagggttaaatgatgagcgagaggaggggaaggaagcaaaaagccatagaccttggtggctacctctctagctgctgctccacctcctgccgatggcgtgggcggtaataaactatctctctttatatctcgccgctgctggcgttactgctgttgcagagatgcaggaatgaaaagaggggtg

SEQ ID NO: 449 - DNA, 353 bp, Zea mays
  Clone ID: LIB3115-009-Q1-K1-B9
ggccgacggaggcgtacgggctgcaaaagagcttgttaataagctagttatcaatggcgtgcgccggaagctgatgtggggcaagcctcaggccccaaagcctgatgaggatgagtctgggaggctggggcaggtttcccacggagggctgctccctatggctgtcatatcttagcagcagagcggtgaccagcctcagccccccgggatggtgggccaacagcaacaggctgcaccatcatcgtactacttcaacattccagcaccacccagctaactgagcggactgtgtatccatccatggatccccagaggatgggtgctatattaaaaccacattacagttaaggtaa

SEQ ID NO: 450 - DNA, 378 bp, Zea mays
  Clone ID: LIB3115-009-Q1-K1-C1
tgcaactatagaggagcctacagttcaagcaaatgcctcaagaagtgtggccagccatcagagactttgtaccatgttccccgttcgtttctccaaccaggcagcaatgatctagtccttttcgagcattttggtggtgacccaagcaagatatcctttgtgatgaggcagacaggaagtgtgtgcgcacaagtatcagaggcacatccagcccaaattgatagttggagttctcaacagccgatgcagagatatggacctgcacttcgcctggaatgcccaaaagaaggccaggtcatcagcagcgtcaagtttgcaagctttgggacaccgagtggcacatgtggaagctacagccatggcgaatgcaacagcact

SEQ ID NO: 451 - DNA, 437 bp, Zea mays
  Clone ID: LIB3115-009-Q1-K1-C10
aggaaaaattgctgggaagaaggttcaggttgatgaaagttcggagttgggggaactagagaagagactggctgctctaaaaaatgcataacatctgtttacaaccctctcctctatgcacatagcaagcctgtcgtgtaccttaattccaaatcttcattcgacacgcaaagtcactgtgatttgtatgtatcaaaaggaagatgatgcaaacccccaagtttttgggcgaatcgatgttgctgctgttcgtacacactcacgtataagatggggctgtgctgccttattagcgacatgattcagagcaagggattccatagtcttgtaaagaagtttgattatttttacatgacagctttttgtttttggtcgttcgttacatgacagcgtttttttagccttgtgggaacttacagtaacgccgcacgtcattt

SEQ ID NO: 452 - DNA, 330 bp, Zea mays
  Clone ID: LIB3115-009-Q1-K1-C11
cccacgcgtccgcacaaactggaattggctcgtccattgccatagctggtgttgctatggactcttacattaaggctaagattgaacaggataaaaggaaaaagagcgcatgactgctgtgaataatattatcgggaccttcctcggacacaacatcgtcgacaatcacgacctacttctataccttgttttgttttcatcttgagtcagacggtccattgtttgttcccagtctggtgattaaaaggctgcaaaatctgtttgtggaattggcagctatacaaatttggcttctttaagtaaatcccgttggcggtaccacaacgtatt

SEQ ID NO: 453 - DNA, 239 bp, Zea mays
  Clone ID: LIB3115-009-Q1-K1-C12
cccacgcgtccgattctgtgatcttccggatgataccatgctaccaggggaagtgtattgtagttacagaagcaacagcagcggaatgcatttgccaatacattagctgagacttgaaacatctgcttgccagatgcagcaactacttttatatatatatgtgtatattcaataattgtgccacacgaatttgactatgatgcaaacctcttacacaggtaagtcttttttttttccgt

SEQ ID NO: 454 - DNA, 373 bp, Zea mays
  Clone ID: LIB3115-009-Q1-K1-C2
cccacgcgttcgcgcaaagcgccgtcgtcgccccatccggcatggctccgaaaaaggatagggcccgggccccgtcgtcgaagcccgccaagtccggcggtggcaagcataataagaagaagtggagcaagggaaagctaaaggagaaggtgaacaacgcggtgctgttcgaccaggctacctacgacaagctgctctctgaggtgcccaagtacaagcagatcacccccttcatcctatccgagcgcctcaggatcaatggctccctggctcggagggctatcaaagacctgatggcgcgtggccttatccggttggtctcggttcactcaagccagcagatctacaccagtgcaacaaatacctaaggatg

SEQ ID NO: 455 - DNA, 395 bp, Zea mays
  unsure at all n locations
  Clone ID: LIB3115-009-Q1-K1-C3
cttgctctctgtttatgggaacaaagatgctgtggacgatgaattggttgagatcatacgcggaccggctgacacggagggcgccctggacgcgttcgtgtcgacggtgaccggcccgccggggccaagcccgatagccctgatgccgcggctggccgacctgcccgtgctggtgctgtggggtgaccgggaccccttcaccccgatcgacgggcccgtggggaagttcttctcgaagctgccgtcggagctcccgaacgtgacgctctacatgctggagggcgtggggcactgcccgcacgacgaccggccggacctcgtccacgacaggctgctgccgtggcttgaagcgctcctgccgcccgccgncggcgcggtgactacgacgacgacga

SEQ ID NO: 456 - DNA, 288 bp, Zea mays
  Clone ID: LIB3115-009-Q1-K1-C5
cactcgttctatgtaaatgggaacaaagatgctgtgggcgatgaatcgtttgagatcatacggggaccggctaacacggagggcgccctggacgcctacgtgtacacagcgaccggtccgaccgggccaagcccgataaccctgatgccatcgttggccgacctgcccgtgctggtactgcggggagaccgagaccccttcaccccgatcgacaggcccgttaggaagtttttaaccaacctccacggacagcttccgaacttgaccctactacatagtggatggcgt

SEQ ID NO: 457 - DNA, 457 bp, Zea mays
  Clone ID: LIB3115-009-Q1-K1-C6
tgggcttcgtcgagggctaccgcgtcggcggcggcccgctcggggaagggctcgacaaggggtaccccggcggcgccttcgacccgctgggcctcgccgacgacccggacaccgccgccgagctcaaggtgaaggagctcaagaacggccgccttgccatgttctccatgttcggcttcttcgtgcaggccatcgtcaccggcaagggccccatcgagaacctcttcgaccacgtcgccgaccccgtcgccaacaacgcctgggcatacgccacgaacttcgtccccggcaactaactgactgagcaacgccgtacatgtgtactaccatcagacccatccattcgtccgtccgtccgtccgtccgtcgagtgaacagtgtggtcttccctgtactctacttgttcagatcgtaggcgtgtagtagttgcaccagccggcgtatgctcatgatcgat

SEQ ID NO: 458 - DNA, 243 bp, Zea mays
  Clone ID: LIB3115-009-Q1-K1-C7
tggaatcaccggcggcctcccgccttccattccaacactctcggaagaaaggtaagaacggggagcgccatggtcacgtttacagaccgctcgccctcgtgctgtacccgtacaccgtgtggcgacttaatgtgaaggagtttacccaggcgcgcgttgcgatcttctcgatgctcgcgctgtagtcccaggccatcctcgcggagctgagcccgatggtgaacatcatcctgaacacgggcg

SEQ ID NO: 459 - DNA, 280 bp, Zea mays
  Clone ID: LIB3115-009-Q1-K1-C8
agtaatcatccaaagggtaccgcctctgattctaatacatccttacaaaaagaggaccagggtgctccaagggcacgtttacagaccgtcgtacccatcctcttaccgtacaccgaaggcggacttaatgtgaacgagtttaaaaacacgcgcgtagcgatctactccatgctcggttaattatcccaggcgatactcgcggtgctgagccccataatgaacatcatacacaacacggtcgagtcgctcatcaacaacccctttgaatacttcaacaacc

SEQ ID NO: 460 - DNA, 327 bp, Zea mays
  Clone ID: LIB3115-009-Q1-K1-D1
gttctagatcgcgaggggccgccctttgcaagattgactctgagggcaaggcaaggaagggggtaggctgctcctgtgtcgtcgtcaaggactacggtgaagaatctgagggccttaacatagtgcaggagtatgtcaagtcgcactagatgtgtgacatgtttcagtgatactcttgatttggacctgggcttaaaattatgcttttgcatctggggcttgcctaggagattagaacattttactagaagagccgaagaggatatgtatgaacaatttggacatctgaattttttttgtttatggtgctgtcgtctggttttaatg

SEQ ID NO: 461 - DNA, 399 bp, Zea mays
  Clone ID: LIB3115-009-Q1-K1-D11
cccacgcgtccgttttgatccaagcatctgggatactgttcataaggagggctttgttctgcattacgaagcagtggagaagagacctgtccttccttctgctggccaaaatattaggcgagaactataaggtagcatgcttctatcatatataaaaggaatgtatagttatgtgtacgtttgactaattgacttccttccctgatgcacacatatttgcccttgctgcttgccctaggttctcctgcatttgaagttagtttgggttgatcagtagctgttgtcatggatgggatgagttcatacaaaatgattctataagaacttatgacccccaggtggcagttgtagaaatgtagctgagatttagattttcttcataatttggtggcattattt

SEQ ID NO: 462 - DNA, 300 bp, Zea mays
  Clone ID: LIB3115-009-Q1-K1-D12
accacgcgtgcgtaatatgtacccaaatttttaaaggatatgaagaggactcacccaagggttttctagccggctacccaatatttgactttccatctgttcttcttgatggctcatatcaccatgtcgattcaagtagtcttatcatttcaaattgcagtcatatgatcttttcctgagggaatgaggaaaatctgtccaaggcttctacagcctataatgaaagttgaagtgataactctctaacatcatatgtgtgatgtctattgcttatttgaactctaaatgaagacacgtcaa

SEQ ID NO: 463 - DNA, 434 bp, Zea mays
  unsure at all n locations
  Clone ID: LIB3115-009-Q1-K1-D2
cccacacgtccggacgacaaggcccacggcggcgtgcatgacgggaccgagatcgtgctctggaagtggtgcgagggcgacaaccagcgctcgaagatcctcccttggtgaacgaacgaaagaaactactagctggtaccctaataataattctgctggctgcggcgatccccaaataaaagaggccgggtgcgatgcatatccgacttcttgagtggcgtttgcgtcagacagacagccactgtggggctagtgctccaacattttgtatgctgcttgcgccaggaaggggggtcactgactcaagagaaaggcctcgtcatangctgctgcattatgaaatttttgatgatgtcttatgtctgtactctgaatcaactatgtatgagaacctaatttctttttcctactgaatgaatgaatcattattgctt

SEQ ID NO: 464 - DNA, 322 bp, Zea mays
  Clone ID: LIB3115-009-Q1-K1-D3
ctcgtttcattgattcttgaagagatcgagcttcttttgcaccacacggtcaaggatgtcgggcaacggcggatcaagctgcggctgcggctcaagctgcaagtgcgggaagaagtaccctgacctggaggagacgagcaccgccgcgcaggccaccgtctgcctcggcgtggacccagagaagaacgccgcgcccgcattcgtcgaggccgcagcggagtccggcgaggacacccacggctgcagctgctgtggcaactgcaagtgcgacccctgcaactgctgatcacatcgatcgacgaccatggatatgagtattatc

SEQ ID NO: 465 - DNA, 411 bp, Zea mays
  Clone ID: LIB3115-009-Q1-K1-D4
cccacgcgttcggtcgacaaggcccacggcggcgttcatgacggtaccgacatcgttctgtggaagtggtgctagggcgacaaccatcgctttaagatcctcccttggtgaacgaaccaatgaaactactagctggtaccctaataataattctgctggctgcggcgatcccaaaataaaagaggccgggtgcgatgcatctcggacttctcgagtggtgtttgcgtcagacagccacccactgtggggctagtgttacaacatttgtcagcctgcttgcgcgaggaaagggtgtcactgactcaagagaaaggctctgtcatatgctgctggattatgaattttctgaagatgtctttatgttcttgacttctgaatcaaactatgtttttgagttctcaatcttccttt

SEQ ID NO: 466 - DNA, 266 bp, Zea mays
  Clone ID: LIB3115-009-Q1-K1-D5
cccacacctctttatcccttcgtttacagttcttacccaaacctacctatttggggaatcgttattttcttatccttccccccttcttagtactacctttttttataactaccctctcaatctgctatagaatcctttcttttcaactaacatcatttcttttaatctcttcattaaatatatctcttccttaatcttcttattttatgctcctttcaacttctacttccactacttatacttcctttactattattactactatt

SEQ ID NO: 467 - DNA, 230 bp, Zea mays
  Clone ID: LIB3115-009-Q1-K1-E10
ccagcgttcttgactcttgcggctctttgctcacatctaacgcgcctttgggcatccattcgcatcggccgtgtcctctatcctttgagatggtcgacatgataccatatccttggttgatgcacctaccccttttcttggggaacctatggacctgattactgtcctgcatcttcttatgaataagtcatgtgctcatgatggccttgttaaaggtcttcgtgaggctg

SEQ ID NO: 468 - DNA, 162 bp, Zea mays
  Clone ID: LIB3115-009-Q1-K1-E12
gttccagatcagcaaatcttcattgcgtatttatgatcgtctaacagtgcagcattaagatggtcattcttctcgtcgtgtgcctgtctctgtcagctgccatcgcctcttcaatgcacatgccctgccccttcgcggggttgcatggcttgtactgcgctg

SEQ ID NO: 469 - DNA, 383 bp, Zea mays
  unsure at all n locations
  Clone ID: LIB3115-009-Q1-K1-E4
ccgttgtcgcagagagagaaagagtgggatggcaatggagaggtcgttgtcgtgcgcggagaggggcagccagtacggcgccggggcgggggcggnggcgatgaacctccggagctacagcgcctcctacgagcgaccgacgacagcggcgccgtccacggtgcagcgcgccaggagcgtgagctcgtggagcacgccgccggcgccgccgcccgtgcagcgggccgggagcaccaagagcggccccaccgccgccgccggtggccgggccgccccggggctgaacctgcgctcctacagcgcctcctacgcggcctcctacgggcccaccctggccgataccggcgggcagctgaagcgctccggcagcgtcaccaactgga

SEQ ID NO: 470 - DNA, 211 bp, Zea mays
  Clone ID: LIB3115-009-Q1-K1-E5
ctttcctttacatattaaagatttgtttttaccccatatactctatctggcgcaccggaacactttcaaacctccatctttatttttcctttactcattaacacactcattttcatatccttttactatttttccattacctttttctctttatccgctcttttctcctttaacttaatctccttcaatttccttaaatttctactacatt

SEQ ID NO: 471 - DNA, 297 bp, Zea mays
  Clone ID: LIB3115-009-Q1-K1-E6
gagaaagagttggatttcaatttataggtcgttgtctttctctgatgtgggcggccattacggcgccggggcggtgtcttttgctatgaacctccggagctacagcgcctcctacgagcgaccgactacagctgcgccgtccacggtgcatcgcgccatgagcgtgagctcgtggagcacgccgcctgcgctcgcgtccgtgcagcgggccgtgagcaccaagagcggtcccaccgtcgccgtcggtggccgggccgtcccggggctgaacctgcgcttctacatcgccttctacgc

SEQ ID NO: 472 - DNA, 170 bp, Zea mays
  Clone ID: LIB3115-009-Q1-K1-E7
ggatgatgtatgtggccaaccagaaataagaagttacatttccagagggtaagggaaaaaaaaaaaaaaaaaaaaaaaaaaaaaaaaaaaataaaaaataaaaaaaaaaaaaatatttaaaaaaaaaatattaaaaatttctttttataaaaatattatattcaaatttt

SEQ ID NO: 473 - DNA, 405 bp, Zea mays
  Clone ID: LIB3115-009-Q1-K1-F1
gtaccagctctgactcagctagtacaatctgttgcaacaattgttgttgcaggtatgtaggtgcattggccacagcgagcgggctagatgaaagcagttgttgctgttgtaggtaggcggcagggttcaccatggctagttgactgagcgctggcagaaactgttgcagctgttgttgtggctggtttgcaactacgtttgccagagcaagtgggtttgatgcaagcaactgctgttgcaagtaggcggcagggttcaccatggctaggtggctcagtgctggtaggaattgttgttgctgttgcgttgcgatggtttggtttttttagatgtgccaaagatttgttgttgcaactgactatgtcgaactctgctgcgtacctacaacagcgacaacagttactt

SEQ ID NO: 474 - DNA, 407 bp, Zea mays
  Clone ID: LIB3115-009-Q1-K1-F10
agaacttcagggaccacatttacaacgactccaacatcaaccagggctgcgcgagctcggggaaggtcaactgcccccggcccaccggcttctgcgacggcaacctggcgccgctcgacaccaccacgccgcacagttttgacaacgcctactacagcaacctgctgagccagaaggggctcctgcactctgaccaggagctctttaacggcggcagcaccgacaacaccgtcaggaacttcgcgtccaactcggccgccttcagcagcgccttctccgcggccatggttaagatgggcaacctcagcccgctcaccggatcttagggccagatcaggcttacctgctccacagtgaactaagatttataattatcaccatacgcaaaaaagagtggtatttttaca

SEQ ID NO: 475 - DNA, 292 bp, Zea mays
  unsure at all n locations
  Clone ID: LIB3115-009-Q1-K1-F11
agctggaccatatgctgactcgcagacattctcagacacgatcaaatctgtgctgctttgaggcgctacaaagnncatgtggcgcataacgaatagcactctcgggttttatgagaggnggnncgcgcagagcancgccatgtcgaaacttggctcggagatgaggagggaggtcggtgctgggatcgtcgtctgttcccgcatgatcgagaagcaactggagacacggtctgatgggagtgggacaaagccgttgcctgctaccgcttcttttacagctcacgcccaccct

SEQ ID NO: 476 - DNA, 387 bp, Zea mays
  Clone ID: LIB3115-009-Q1-K1-F3
attcgctcgctcgatcctagcttcccttccaagaagcgcagcgcccatggccatgtccacgcaagcctccgccgccacgcgccacctgctggccgccgcctgggcgccggcggcgaagccgcggcagctgagctcgcagctcgcgctgccgtcgtcgtcctcccgcgggccggccccgctccgcgcgtccaccgaggaggcggtggaggcgcccaaggggttcgtggccccgcagctggaccccagcacgccgtccccgatctttggggggaggacgggcgggctgcttcgcaaggcgcaggtggaggagttctacgtcatcacgtggacgtcccccaaggagcaggtgttcgagatgcccaccggcggcgccgccatcatgcggga

SEQ ID NO: 477 - DNA, 324 bp, Zea mays
  Clone ID: LIB3115-009-Q1-K1-F4
tcgagcacgcctggcgttgttgtttttcgcaacatgaaacctaccctagaaagcttcataacggcggggcgttcatcttacacacgatagggtggaagcaccatcgacgcctgaccccgtcatgcagtaaatctaaggccaacatacggcttccaattcattgttctacagcaacatccactgtaaaaaactacaataagctggacggctcacgcacagggacattcaagtgcaagaccgttaacctcccttagacgatggacttcacgttcacaacaacggactctttgatcaaactggagcaagactcgaccgtatatatga

SEQ ID NO: 478 - DNA, 262 bp, Zea mays
  Clone ID: LIB3115-009-Q1-K1-F5
cagacgcgtgtccttaccattcatcgtatgctgaggccaatccacgctttcggggtacacggcaaagtttgaaacagggctgattactacatactcagctttggtcgttcatctgtttatagacaacttcaatgtctaccttccgatttcgtcttgatttggacacaactcgcttctgtcaaaaatccttgatttgctacaggttcaatgtcgggcgtggccctcaacctgaaaagcggcccttctcacaaaaccttccact

SEQ ID NO: 479 - DNA, 432 bp, Zea mays
  Clone ID: LIB3115-009-Q1-K1-F6
cggacgcgtgggctggcttctcctccccctcttaccaagtcctcctcgggttagggttccgtagggttttgtggaggggcgatggcggcggctgatgtggagtaccgttgcttcgtcggcgggcttgcctgggccaccagcaacgagtcgctggagaatgccttcgcctcctacggcgagatcctcgactccaaggtcatcaccgaccgggagacggggaggtctcgcggcttcggcttcgttaccttctcctccgagaactccatgctcgacgctatcgagaacatgaacggcaaggagctcgacggccgtaacatcaccgttaaccaggcccagtcccgtggcggtggcggtggcggcggtggctacggcggcggtcgcggcggcggcggctatggtggcgggcgccgtgacggctgttatggcggcggt

SEQ ID NO: 480 - DNA, 413 bp, Zea mays
  Clone ID: LIB3115-006-Q1-K1-E4
cggacgcgtgggcggacgcgtgggatcgggttcaaagttggaacaatgattgagatccccagggcagctctggtggctgatgagatagcggagcaggctgaattcttctccttcggaacgaacgacctgacgcagatgacctttgggtacagcagggatgatgtgggaaagttcattcccgtctatcttgctcagggcatcctccaacatgaccccttcgaggtcctggaccagaggggagtgggcgagctggtgaagtttgctacagagaggggccgcaaagctaggcctaacttgaaggtgggcatttgtggagaacactgtggagagccttcgtctgtggccttcttcgcgaaggctgggctggattacggttcctgctcccctttcagggttccgattgctaggctagc

SEQ ID NO: 481 - DNA, 230 bp, Zea mays
  Clone ID: LIB3115-003-Q1-K1-D10
accatgcgggtcgcgtccaagcaggcctacatttgtcgtgactgcgggtacatctacaacggggggacgccgttcgacaagctggctgacaactacttctgtcctgtttgtggagcccctaagagaaagttcacaccctacgagcctgcagtctccaataacgcgaacgccaccgatgccttaaaggccaggaatgacgatctgaataaggatgatagcattggtaaagc

SEQ ID NO: 482 - DNA, 344 bp, Zea mays
  Clone ID: LIB3115-003-Q1-K1-D11
cggacgcgtgggcagaggcgggttggcttctcctcccccaccggttcgtgttcaggttctggttcgtgggcgagagggaagagatggcggcgtcggacgttgagtaccgttgcttcgttggcggcctcgcctgggccaccgacgaccactccctcaacaacgccttcagcacctacggcgaggtcctcgagtcgaagatcatcctggatcgggagacgcagaggtcccgcggcttcggcttcgtcaccttctccacggaggacgcgatgcgcagcgccatcgagggcatgaacggcaaggagctcgacggccgcaacatcaccgttaacgaggcccagtcccgc

SEQ ID NO: 483 - DNA, 446 bp, Zea mays
  Clone ID: LIB3115-003-Q1-K1-D2
gacccgatcaacacctggacggacaaggccgcgtacaaggagaatctcctgaggctcggcgggctcttcaagaagaacttcgaggtgttcgccagctacaagatcggggacgacagcagcctgactgacgagatcctcgccgcaggccccaacttctgaactaaagcaatggatccggatgaataaaacgatggtgtgtgtgcgtgcgtgcgtgtgaagatgattacgacgactacgacgaaaaaaaggtgttggatcgatgagccaacatagtaatagattagctgggtattgtcatgggtgcgtatggcgttgatatctataaagctgtctgcctgtcccaagcagctatcatattctatttcaaattctattctgtaagcgtgtagttcaaaacaatgctttacacaaccatatgcacagtcttatcttaagttggtctgttc

SEQ ID NO: 484 - DNA, 459 bp, Zea mays
  Clone ID: LIB3115-003-Q1-K1-D5
ccaagcctcagcccctctccccgctcgtgtctccaagccgcaacggctcagctcctcttcttggacgccgaaaccgggcaccgtcgtagcccctgtctccgctcgtctccgggaccctgcttggccctctccggcgaacctctgtgcccctgctccgccgccagttcgacgccgcctgctccagatcgacgttgtcgtcctccgtcctttgtccgcctgctccagatcgacgactcctgctccagatcaaatccggcctccgtcctctgtgcccctgccctgccgctcccagatcgacgccctaccgctccaggtcgagctgctgctccagatcgacgcccaactgctccagatcgagctgcttgtcccagatcgacgctaaggggcaaaagaaggattgcctgccaatgatagtgatgatgtggaggaggtgtctccaagtgttgaggacaagcaagc

SEQ ID NO: 485 - DNA, 355 bp, Zea mays
  Clone ID: LIB3115-003-Q1-K1-D7
tcttcctaaaacaaagcctaattaacttatactaaaaaatcctcaaaatcaaactaaacaggaaacaaactgcaaaaacaaaaaacctaacatatacaaaagtccaccccttctaacaaatctaatctaactatccccttccttccaacttaattactcttttttattctcccctaactacaatcaaacgcccttcctttaaaaccttctcaatcggaaaaaccccgtcttctccaaatttatctacttttcatacaatatccatttctctatctacattatcatcaaatactcccttcccaatctcctttcctaatactactcctaccttatctcctattataacccccccttt

SEQ ID NO: 486 - DNA, 465 bp, Zea mays
  unsure at all n locations
  Clone ID: LIB3115-003-Q1-K1-E1
tcgccctacaagaccaagatcattgatgttatcgagaagggagagaagcagcccaacatcactattggcattctggtctccgttgtcgtcgtgttcgttaccgttctcttcaagatcctgtttggaggcaagaagccggtggcacctgtgaaacctgcagctgaggcgaagaagcccaaggccacagtgaccgacggtgctggaagcagtggcgacaaggatgagaaagaggacgaaaaggaggagacagcaggcccacgtcggaggacccgaagggagacatagtgacctatttttgatgtgtttggatgttctggcgcctgcttattttgaggactcttaatatttatgagtgtataataggaacttgtgtcacctctgcggctttcctgctgcttattntgttttacatggttagaccatgaaccttcacgagctgtagaatttaggtcttggtggtcattt

SEQ ID NO: 487 - DNA, 300 bp, Zea mays
  Clone ID: LIB3115-003-Q1-K1-E10
gataaacgcagctctgttgagcattcaaataagcatccactagtcaggcaatccctcaattaatgtccaagcaccaaaacttggtagcggcaagttgagtaacacatatctgccatctagcacaagtaatcacgcacttctaggggtctcaagttttatgaaaaagctttgataaacagatagattagacagttctctgtattccaaataactgtttgtatcaagcaatttggtcttgtttttttaggggaagcaatttggtcttgttacccaaaaaaaaaaaaatattattataatttt

SEQ ID NO: 488 - DNA, 184 bp, Zea mays
  Clone ID: LIB3115-003-Q1-K1-E11
caaatgcaatgatgcctcctcttcgctggcaagaacgaggaagagaagcttgcagattggatttgaagcaggggagacgaacatatcttttcgttcacttggggttctcccggaattggatatcaattgtacagattattgaatgtaaatttgcctattcaatcaagaagcaattcatcgagtc

SEQ ID NO: 489 - DNA, 424 bp, Zea mays
  Clone ID: LIB3115-003-Q1-K1-E2
tcgccctacaagaccaagatcattgatgttatcgagaagggagagaagcagcccaacatcactatgggcattctggtctccgttgtcgtcgtgttcgttaccgttctcttcaagatcctgtttggaggcaagaagccggtggcacctgtgaaacctgcagctgaggcgaagaagcccaaggccacagtgaccgacggtgctggaagcagtggcgacaaggatgagaaagaggacgaaaaggatgagacagcatgcccacgtctgatgacccgaagggagacatagtgacctatttttgatgtgtttggatgttctggcgcctgcttattttgaggactcttaatatttatgagtgtataatatgaacttgtgtcacctctgcggcttccctgctgcttattttgttttacatgggtagaccagg

SEQ ID NO: 490 - DNA, 321 bp, Zea mays
  Clone ID: LIB3115-003-Q1-K1-E3
tcgcccacgcgttcgcgaatcaacaacgcccgcggttgtgcagggctacgagatcccggccaagacggctctcttcgtcaacgtgtgggccatcgggcgggaccctgctgtgtgggacgcaccggacgagttccgcccagagcggttcgtgggcggcagtccctcggtggacttcagaggtaccgactaccagctcatcccgttcggcgccggccggaggatctgccccggcatcaacttcgcgctgccggtcttggagctcgcgcttgtcagccttctgcaccacttcgaatgggagctccccgccggcgtgggaaaagc

SEQ ID NO: 491 - DNA, 327 bp, Zea mays
  Clone ID: LIB3115-003-Q1-K1-E4
cccactcgtacgcgaatcatcaacgcccgcggttgtgcagggctactagatcccggccaagacggctctctgggtcaacgtgtgggccatcgggctggaccctgctgtgtgggactcaccggacgagttccgcccatagcggttcgtgggcgtcagtccctcggtggacttcagaggttccgacttccagctcattccgttcggtgccggccggaggattctgacccggcgatcaacttctcgctgccggtcttggatctcgcgctagtcattctttttcactcacttcctatgggagcttcccttcggcgtttgaaaatgctgact

SEQ ID NO: 492 - DNA, 142 bp, Zea mays
  Clone ID: LIB3115-003-Q1-K1-E5
cccacgcataccgaaatcaacaacgcccgcggttgtgcatggctaccatatggcgtccattacggctctcttggtcaacttgtgcgccatcctgctgcacccttctgagtgggacactccggacgagatcggcccagagccg

SEQ ID NO: 493 - DNA, 455 bp, Zea mays
  unsure at all n locations
  Clone ID: LIB3115-003-Q1-K1-E6
cggactcgtgggtgctcggacaacaccggcgccaagaacctctacatcatctccgtcaagggcgatcaagggccgcctcaatcgcctcccgtccgcctgcgttggcgacatggtcatggccaccgtcaagaaggggaagcccgacctcaggaagaaggtgatgcccgccgtcatcgtccgccagcgcaagccgtggcgccgcaaggacggggtctacatgtacttcgaagataatgctggagtgattgtgaatcccaagggtgagatgaaaggttccgctatcactggacctatcggcaaggagtgtgctgatctttggcctaggattgctagcgcatcaaacgccattgtttgagagcttgttggaatatgttcagacttctatatgatcatnctattatcagttgctagactgcaattgggcttatgtttggtcactcaattttgtagtaaac

SEQ ID NO: 494 - DNA, 457 bp, Zea mays
  Clone ID: LIB3115-003-Q1-K1-E8
tcgcccactcgttcgcggactcgtgggacgtgcactctatggaggccaagatgtgagtaactctggagatgttacatgtggtctcagtttgggagagtataccgctcttgcatttgccggtgcttttagctttgaggatggactgaagcttgtcaagctaagaggagaagctatgcatgatgcttcagatgctgccaatagtgcgatggttagtgtgattggtctggattcagaaaaggtgcaagaactatgtgatgctgctaatgacgaagtagatgaaaacgatagagttcaaatagcaaactttctgtgccctgggaattatgcagtttctggtggtgtaaaaggtattgaagtagtcgaagccaaagcatagtccttcaaggccagaatgacggttcgcctagctgttgctggcgcttttcatactagcttcattgcaccagctgtttcaaga

SEQ ID NO: 495 - DNA, 449 bp, Zea mays
  Clone ID: LIB3115-003-Q1-K1-F1
cggacgcgtgggcggacgcgtgggagggtatcgccgtcccatcccaaggcgcagccgcagccctgcagacccgagacgcgatgcgaacgataggcctcgatcaggtcacggtggaggcggtcctgaccaccgtggccacagcccccctgccaacaacaggtccaggtcgaagagcctggatcccttgagatccaggtctcctgatgccgtcccagccaagagggagagctcgagatacaaccgcaggcgcagcagcagctcgaggtccagcagccctgatgctgatggaaacaaaggcttggtctcgtactgagatgtaacgccacaacgatttacatgcgccaagaaccatctttcttgctagtttagcgttatgtacgcttttgtaatggcttctaaacttgtttttttgatgtatctgtacatttggatgtcctggtagacgtgaa

SEQ ID NO: 496 - DNA, 209 bp, Zea mays
  Clone ID: LIB3115-003-Q1-K1-F10
accacgcgtccggcgtacatcgtccctttgcccttactagcaaccgataatccgccggcgttgagatgttggttcatcacggtcttctatgtgacgactagctcctgtccgattcattcaactacaacgagctctagaactgcgtgctgcgggaggtcttgggaaagtggatgacctatggttctgttcatgtgtacattgacgccaat

SEQ ID NO: 497 - DNA, 421 bp, Zea mays
  Clone ID: LIB3115-003-Q1-K1-F12
cgccggggtgaagagcaaggagctcctcatctgggtcaccatctgcgagatcgtcctcaggcgctgcggcaccaagatcgtgttccgcacccccgcggggctcggccgcgcctttcctgtcaccgccttccagctcgagcccgcggcggcggagggggaccacaaggaggaggccgaggacgccgccgtcgccgccgacaactgatctgctctagcttccggcggcggcggccgtgcgtgggctgctcgatccggtagtggcagtggctttgtgagacagtcgagtcgattgtggcttcccctcctccgccatgtgcgtgtagtggatgatgatgcatgaataaacggtgttcctggatccagaactcacgggtcgatccatacagtttatctcatgcttggggatctctatgtatgcatt

SEQ ID NO: 498 - DNA, 445 bp, Zea mays
  Clone ID: LIB3115-003-Q1-K1-F2
gctaccatgaacctcgccgtcgcagccgcactgccgtccgtgacgccacgtaccggcgtcgtgctcccacggagcagtcgccgacactgcccccgcggggtcgtcccacgcgcggcctcgagctccgtttcctcctttaccttcccctcagcagcggcggcgcccatctacacgcccacgccgcatgaccggtctctccggacgccgcatagcgggtaccactttgatggcacggctcgacctttctttgaaggatggtacttcaaggtgtcgattccagagtgcatgcagagtttctgctttatgtactctgttgagaaccctctcttccgtgatggtatgagtgatttggacaagttgttatatcgcccacgctttactggtgtgggagcacatatccttggtgcggacgataagtacatatgccagttctctgagaaatcaa

SEQ ID NO: 499 - DNA, 145 bp, Zea mays
  Clone ID: LIB3115-003-Q1-K1-F3
tcgtccactcgttcgatgaagctatacctcaatgcttctctacctgccgtcgtcgccgcagcagcaccccgtatgatatgatacacagctgggatggtatactgatattttgggttaatttcatgtgccaagcgtgtttgaagtc

SEQ ID NO: 500 - DNA, 142 bp, Zea mays
  Clone ID: LIB3115-003-Q1-K1-F4
tccactcttacgatgaagctatacctcaatgcttctctaccttccgccgcctccgcagcagcgccccgtatgggatgattcacagctgggatggtatactgatattttgggttaatttcatgttccaagcgtgtttgaagtc

SEQ ID NO: 501 - DNA, 420 bp, Zea mays
  Clone ID: LIB3115-003-Q1-K1-F5
accaagaacaggaaggaaacaccgtcgccgctgcgccttccattccagtactcgcggaggaaaggaacaccagccagcgccatggtcacgtcgacgaccgccgtcgtcgtgctgtccccgccgtccgtggccgggcttcgcctggcgccgtctccccgggcgctcgtggcgttccgcgcggcgccggcgcggcggtccgtggcggcgcgcgcggagctgatcccgtcgctggtgatcagcctgagcacgggcgtgtcgctcttcctgggccgcttcgtcttcttcaacttccagcgggagaacgtggcgaagcatgtgcccgagcagaacggcaagacgcactttgacgccggcgacgagcgcgccaaggagttctcgggcctgctcaaagtcaacgaccccgtgggccttaatctcgtc

SEQ ID NO: 502 - DNA, 457 bp, Zea mays
  Clone ID: LIB3115-003-Q1-K1-F6
tcgcccactcgttcgctccaacatgaccccttcgaggtcctggaccagaggggagtgggcgagctggtgaagcttgctacagagaggggccgcaaagctaggcctaacttgaaggtgggcatttgtggagaacacggtggagagccttcctctgtggccttcttcgcgaaggctgggctggattacgtttcttgctcccctttcagggttccgattgctaggctagctgcagctcaagtgcttgtctgaggctgcctcctcattggcaaccggattgcctgctgctggtggatgtggtgatcaacagtattattacagagccatgctatgtgaacattactagtagcagtgctcataaaagctacaatcccatgtcctttttttccccagtcatgtaaaaacttcaaactgctccatggttcaaaactctgttcttcaatacatcatcaattatcga

SEQ ID NO: 503 - DNA, 226 bp, Zea mays
  Clone ID: LIB3115-003-Q1-K1-F7
cggactcgtgggcttttctcctgcatgcaatggttccttttgcttccaacaattctcctgctgatgtatccagcatggcatcatccatctacaattacgtacgtagtgcaacgactgtcgattcgttgggtgaggaacatatatgtgaatgcaagctccggctaccatacatgtgtaatgtgtaatagatatatatacaaaactgccgaggcgccgacaatacttt

SEQ ID NO: 504 - DNA, 275 bp, Zea mays
  Clone ID: LIB3115-003-Q1-K1-F9
gcgaacacacctgcttccacgcctcaagccactcgtgcttgcggcgatgcaaaccagcaccgcgaacatggtcacagcgaggttgaaggagaggcttgaccatgcgtacgacgtgaaggacctcaactccatctttgacttgaagttccgcacccactttggaggaggaaagttcactggcttatgactaatttacgataacctacaggctgacaataagttggagcccgaataccgcctttataggaatgggcttgctactaaggttgagaagt

SEQ ID NO: 505 - DNA, 370 bp, Zea mays
  Clone ID: LIB3115-003-Q1-K1-G1
cggacgcgtggggtttgatgatccagcgatacttttcgaagagccgactcggaagatcaagggggcaatcgagaaggccaagagcatccactcactctaggctgtcagctaattttcccctcaatccccagaggggtagccctaaattgggaaaaggtgctgtcagcagtggcactgcagaactgcaagatcttgtggcaattggcattttgcaggtaggtagtgcatagtttgaacttggaaggcctggtcattttaatttagccaattctcaccagaaaatggaattaccattctcagtagaagcagtgtatagtataatactagctgtatatattgaccaaaagttatgtgctacattattaatttt

SEQ ID NO: 506 - DNA, 411 bp, Zea mays
  Clone ID: LIB3115-003-Q1-K1-G10
ttagttgctatttaaccaggtgccaagtgcagataccttccctgcctcacaaacaacgccgcggtgtactagataccatcagggtcttcaaccagggcaggtttatgttcaggtggcactgccagcagaagtgatccgttgacttcagctatgggcaacctgtgctgctgtgttcaagtcgaccagtcgactgtggccattagggagcatgttggcaagtttgacagcgtgcttgagccaggatgccactgcatgccttgggttgccggcaagcgtttatctgggcaacttacacttaggctgcaagaactggatgtgcgctgtgagacaaaaacaatggacattgtttcgtgaatggggtggcattttatttagttccgtgcttcttggcttacaaaagaagtgacgctt

SEQ ID NO: 507 - DNA, 451 bp, Zea mays
  Clone ID: LIB3115-003-Q1-K1-G2
ctgtactgccaacgcaccacagtctttagtatctgggatgaataaattcttatcgcatctcgacatcacttttagaagagacccaaccaactataggccacgtataaacaagttggaatcgacaaaggacagggaacagaagtcagccgggtcctactactacctcgatgactaatgaggaagtgcaattcttcttggagagccatatgtcgcataatctttccagagcgtggaaaggagaagctactttgaagctaccactgcatcatggcatgtgacttgttgaataattggttgcaggagtagagtgcgccggttataacttataaagcagagcatgccgtgttgatactgagttttttgttggcttgacctatatgaagagaaggatcggtgttaaaatgagatttgcgagggggaactaatttctgtttttaagcaatactgtact

SEQ ID NO: 508 - DNA, 408 bp, Zea mays
  Clone ID: LIB3115-003-Q1-K1-G3
tcgatgcgctctagctagttaatcatatatacatatatacacgttcgatccattcgtgtggatgacatccatgttgcatatgtacaagtacatgtctcttcttcaagagtcaagactagctgtaattgagctgagcatacttggtgttgctgttgttcagttaatttgcaaaaacgcacaacacaagaaagaaggagaaaaaaaacagagtggaaatgttttttttttaagatctggagaacaacatgattgagaagggagggaaggtgattctgagcacagttttgttggaaaggctgtagttaattctggtggatgtaatatattatatgtatgtatatgcttagattcgttaatatatatgcatatatatgcacccacatgaatatgatttacagagattatatt

SEQ ID NO: 509 - DNA, 299 bp, Zea mays
  Clone ID: LIB3115-003-Q1-K1-G4
tcgatgcgctctagctagttaatcatatatacatatatacacgtccgatccattcgtgtggatgagatccatgttgcatatgtgcaagttcatgtctcttcttcaagagtcaagactagctgtaattgagctgagcatacttggtgctgctgttgttcagttaatttgcataaacgcacaactcaagaaagaaggagaaaaaaaacagagtggaaatggtatgtttttaacatcttgataacaacatgatttagaagggagggacaggtgattctgatcacagttttgttggtaaaggc

SEQ ID NO: 510 - DNA, 153 bp, Zea mays
  Clone ID: LIB3115-003-Q1-K1-G5
cgacccactcttactattctctctatctagtcaatcatatatacatatatacacttacgatccattcggctttattagatccatgtgagctatctgcaactacatgcctattctttattatccaataattccttaaattgacctgatcatact

SEQ ID NO: 511 - DNA, 477 bp, Zea mays
  unsure at all n locations
  Clone ID: LIB3115-003-Q1-K1-G6
ttcccgggctggactgccaactcaccacagtctttagtatctgggatgaataaattcttatcgcatctcgacatcacttttagaagagacccaaccaactataggccacgtataaacaagttggaatcgacaaaggacagggaacagaagtcagccgggtcctactactacctcgatgactaatgaggaagtgcaattcttcttggagagccatatgtcgcataatctttccagagcgtggaaaggagaagctactttgaagctaccactgcatcatggcatgtgacttgttgaataattggttgcaggagtagagtgcgccggttataacttataaagcagagcatgccgtgttgatactgagntttttgttggcttgacctatatgaagagaaggatcggtgttaaaatgagatttgcgagggggaactaatttctgctttaagcaatactgtactgtcgttttgctatcaagta

SEQ ID NO: 512 - DNA, 362 bp, Zea mays
  Clone ID: LIB3115-003-Q1-K1-G7
acccgtgtctgggagctgcactaccactactacccggttcataaaactccggttgaacagtaaattgcccattgtcctactgcgtatgctcgaacctcttgctgagaaaaccttgatctaagcctcatgtatccatgatccattaattgtactatcgccacgcttatgaacgaacttggacatgcttgtatcacaacgcatgatcactctgtattcttcctattgatatcttaaatttactcaactggtgattccttttcagatttttttatatatgctctatgtttacgcgactacgccggctttctgcaaacagatctcgttctccgttacttagtaccattttacaaataatagttctt

SEQ ID NO: 513 - DNA, 272 bp, Zea mays
  Clone ID: LIB3115-003-Q1-K1-G8
ttcctgtctcgagcgactcgtccgcaacatcgtcttcttgaggcatagtatgatggttacgctagttcagatgctagtggtgctgcggtctgccgtgcaactgcggttattttaatggcactgttgcttctaaggcatgcattgtctatgtcagacaacgtatgaaacgatgatgacgcttctaccatattctcgctttttctgcttcgatctgctgggtttttgctgccatgcttcatcatggcatggatatacattattttgcatcatct

SEQ ID NO: 514 - DNA, 462 bp, Zea mays
  unsure at all n locations
  Clone ID: LIB3115-003-Q1-K1-H1
tcgtccctgctgactgattcgaaccccgacgaccctttggtccccgagatagctcacatgtacaagacggaccggcacaagtacgagaacaccgcgaggacctggacccagaggtatgccatgtagtattttctctacctggcctttggggtcgctgctgcgttgtgttgccgggacctggacgtgccttcatgtattcgttctatccttcctgtataatgatgaaccgaattgggtttgcagtacagtgccgcgtgtggtgctgaatgctgctgtattgtgtcacttggaagctgtaattctcagtgtcaaaaaaaactggtacttggaaccattttgcgtcggatggcgctgcangccagtccatgcttgcgtncttctttccttcaccagtcatcgtgtttgaagaaacattatcgtctgtctcttgagtaactggtacgaaacaaatatgatcgttgg

SEQ ID NO: 515 - DNA, 142 bp, Zea mays
  Clone ID: LIB3115-003-Q1-K1-H10
actacttctacatcgcgagcggccatccatcatctacaactacttctacatctcaatcggcgacttatatatttcatggatcatatattcaactcttcttattatttttattactatatttttattactttaattctttata

SEQ ID NO: 516 - DNA, 265 bp, Zea mays
  Clone ID: LIB3115-003-Q1-K1-H2
tcgcaacatcgtcttcttgaggcagagtatgatggttacgctagtacagatgctagtggtgctgcggtctgccgttcagctgcgcttattttaatggcactgttgcttctaaggcatgcattgtctatgtcagacaacgaaggaaacgatgatgacgcttctaccatattctcgctttttctgcttcgagctgctgggtttctgctgccgtgctacatcatggcatggatattcagtattttcatcgccgtcgacaaagacagga

SEQ ID NO: 517 - DNA, 313 bp, Zea mays
  Clone ID: LIB3115-003-Q1-K1-H4
ggaagccctcgcctcggcgcctcgggcgctcttcccgcgcgcgtgcccagtggcgacgccgggcggcccagcgcggcgccgctccgccgctcctcacatctgcagggcctccgcggcggccggggaggagacgacgccgccgccgccgccggcggccgctcccaagaagatcctcaagaagaagcccgtctactcgatgaagaaagggcagattgtgcgcgtggacaaggagaagtacctgaacagcatcaattatctgtcagtgggacacccgcccttctacaaggggctggactacatataccaagaccgc

SEQ ID NO: 518 - DNA, 247 bp, Zea mays
  Clone ID: LIB3115-003-Q1-K1-H6
ttaaaacaaaaatctgataattacactcaatacaaatactaaaaaaaactggggtctaccaatgaaactacgcttataataatgacacataatacttataatgcatacaataatatatctcacactataaaggatccaaccttaactactcttacattcaacttcctaattctgatataagctaacctaattctaattccctgccccatcatttaaaacatcttcactgttaaaacccttcctttac

SEQ ID NO: 519 - DNA, 447 bp, Zea mays
  unsure at all n locations
  Clone ID: LIB3115-003-Q1-K1-H7
cgataggacttctcgagcgagttcgcgaatccaattctcccagcgagggaagtcatggtagtgatcgagctggagcccgaggaggcgacgcgcccctcgtcgccggcatcggaggagaaggcggctgccgcggccggtggggaggcggcgcgcccatcgtcttcagcggcgcccgaggaggcgcccaccgtcgtcgtcgccgctgttggcggngaggcgtcgagggcggcgggagaagaggaggaagcattcgaggacgcgctcaccgacgagcagctgcgagagaaatctagaagccaagcaaatgatgcataagcagaaggaaacaaactttttgggtccggacaatatgaggaagcattatctaagtatgaaatggcattgcaaattgctgctgagcttgaaatctctgaggatatacgtgcagcatgccattcaaatcgtgct

SEQ ID NO: 520 - DNA, 293 bp, Zea mays
  Clone ID: LIB3115-003-Q1-K1-H9
ggtccgggagtcggtgcgccgcggcgtcagctggatcaagggcaagtgctccggcgcggcctacggctggtggtgatcgatcgccgtgcccaccggcctatcggagtggtactactacggtctaccgtatgagctgatgcgctgcatgcccaccgccgcaccagtacctcctgttacttgttcttggagttaggatttttttaaaaaaaaatctttaggagatggatttggtggtatgtactgtagcatactagcatgagctgtggagcttcttctcttggtgagtgatctcg

SEQ ID NO: 521 - DNA, 88 bp, Zea mays
  Clone ID: LIB3115-004-Q1-K1-A10
ccacgcgttcgccacgacgcgtgcccggctctactgaacccgtcggcggacgaacccatggtctgtccgctcccgtggaggttcatca

SEQ ID NO: 522 - DNA, 199 bp, Zea mays
  Clone ID: LIB3115-004-Q1-K1-A11
gcgcccacgcgtccgggaagcacgaccagcatatgtcacagagggccagcgtcccacactcctggtgcagagccttcgcgctccattcccatctcctggtctccagtgagatgtgccccagctcctattggcagcaatagctattctccgccttcctttttttcttctcttcttcccttccctccggctggatttcggt

SEQ ID NO: 523 - DNA, 371 bp, Zea mays
  Clone ID: LIB3115-004-Q1-K1-A9
gcaagactgcccgcaccgctgctaacttgctagcatacttcctctacacgcacgcacctccaaagacaggcgatcatgatatggctgccgatggtcaacctgtaatcgataaacacaaaccacactccttggataatcctatatatttggctggggatcgtccagctctaatggacaaagataaaccaaattctttggcgcatcctctccaacacagttatgacgaattaccagctcaagtgcattcagctattgcacgaccatgtggcactaattatcatgctactaaaacacgatcgcttccacgttcatcacccaacaagtaatcctggaaaggtaaacctggatctaaaaataatgttgcatttttt

SEQ ID NO: 524 - DNA, 150 bp, Zea mays
  Clone ID: LIB3115-004-Q1-K1-B11
gcgcttatctccaaacaggactggcatggattgtttaagatggatcagatggaaaaggaactaggtgaggggtgcacattcaatggttgggttgaacggcctatcaccttattcaccaacgtataaatacgagtttaactcacaaaaata

SEQ ID NO: 525 - DNA, 222 bp, Zea mays
  Clone ID: LIB3115-004-Q1-K1-B12
cgggtccgcccagtatttcaaactatttttcttattttggttgcttcagttcttggtattgcatgatcagcttcagcagcaaggccacaaccggagatacaaatacggggttataaaacataatgcaaatcaactacatatccaaacctctgttttagttaattatccagccgtccaactgctattggggtttcccctcaacttttagcccatgaatcctta

SEQ ID NO: 526 - DNA, 341 bp, Zea mays
  Clone ID: LIB3115-004-Q1-K1-D10
cccacgcgtccgtataatctctcttcgtcactagctcgtggtaataagggaagcttgatcatctttccttacggcggtgatgaagagcagcacaatcgtcgcgcttctattggctgttgccattctgtcctcactgtctccatgctacgaagccggcggctgcatcgggaaacccaagaagtcaccgccgccgccgagaaggccatacttctcgtcctattccgaggaccaccagaaggaccaccagaattgccgcttgatctgtagctccaagggtttcaaggacggggggctggtgtggacgaaagcgtggagcacacagtgtgctgctgctccaatta

SEQ ID NO: 527 - DNA, 137 bp, Zea mays
  Clone ID: LIB3115-004-Q1-K1-D12
cggacgcgtgggtccattttttgtgttactccattttttgtgttactttagtagattttactctgtttatcctttagtttaattctgtttgaatttcgctgtattctgtaatgtaaatagaacgaaatttattgtgt

SEQ ID NO: 528 - DNA, 358 bp, Zea mays
  Clone ID: LIB3115-004-Q1-K1-E10
gttgattatcatctagaatatacaagaataagcgcgagtggatgtccaagtatatatgttattgtacaattcagggaacacccttgctattattacttgtgcttccacccaatatgtgatgtttggacatccactcgcgcttattgttgattatcatctagaatatacaagaataaaaatcttgcaatagaaattcgttaaacatcgtgatagtctcaaaatatggaggaaatgtgaggacttgaaggtagtgatgtcataaggttcacggctcttggtgcgggcggacacaacactttttttttagttagcctagcctttaaatggaatttactaattgggggcggcctaaaacttg

SEQ ID NO: 529 - DNA, 99 bp, Zea mays
  Clone ID: LIB3115-004-Q1-K1-E11
aaaaaaaaaaaaaaaaaaaaaaaaaaaaaaaaaaaaaaaaaaaaaaaaaaaaaaaaaaaaaaaaaaaaaaaaaaaaaaaaaaaaaaaaaaaaaaaaagg

SEQ ID NO: 530 - DNA, 185 bp, Zea mays
  unsure at all n locations
  Clone ID: LIB3115-004-Q1-K1-E9
acttgaggaacgtcagcgcaagcactactctttcaaggataagtcctattctgaagaatgagaccgggggaaaagctcaagccagctactcctttattgttcaaagagagatgctcatgttatgatacttccacgagaaaccnanactgatgactcctatgtggagcctaaaagttatgatgaga

SEQ ID NO: 531 - DNA, 98 bp, Zea mays
  Clone ID: LIB3115-004-Q1-K1-F10
gcgcgtacgcacgcaccgggacaccagtaacccccaacagcgccactgtacattgcgcgcgtaaagcttggttagatagccgtcatgggctcactcaa

SEQ ID NO: 532 - DNA, 266 bp, Zea mays
  Clone ID: LIB3115-004-Q1-K1-F11
cgaaccgtttgttccgcctctgcttcttcactgtcatggaaaagacttaattcatgttcatgtgaagcatatggtaccagactgtccccaccatcgacatgaacctcttcgtcttcctcgcttggaaattggtcgtcatagtcgatgacaagatcttctggctttctcttggcattgcgttctttaagtgtctcaaagttcaagtcatcaagcggccaagcttcctctgggcgtttgcctctttttaaacaacatagcaaaacttt

SEQ ID NO: 533 - DNA, 139 bp, Zea mays
  Clone ID: LIB3115-004-Q1-K1-F9
aggatattcttgaaggcgatccattcctgaagcaggggctggtgctgcgcaacccctacatcaccaccctgaacgtgttccaagcctacacgctgaagcggataaaggaccccaacttcaaagtgacgccccaaccgcc

SEQ ID NO: 534 - DNA, 416 bp, Zea mays
  Clone ID: LIB3115-004-Q1-K1-H11
cggacgcgtgggcatgaccgtagagaagtttaaaaacatcatggctgttgacaagaaggttgctgatggtctgttgagactcatccttctgaaaggaccgctagggtgctgtgtatttacgggggattatgacgggaatgcactcgatgaaaccctacatgcattctgcgacaactgagacatcccagttttggacatcacttctgtatgctagtactaggctatgtatcaatcagagaaaatattgtggtgtacattatcttcactgcctcattggtatattctttgtcagaaataatggtatattgttttaaagggctgtttgaagttgtagaagaaccatgcttataaactggcgtcaggtgttcttttaaaaaaaaaaatatttttttaaaaaaaaaattctttttttttct

SEQ ID NO: 535 - DNA, 401 bp, Zea mays
  Clone ID: LIB3115-004-Q1-K1-H12
caacaatttctaccagcactgagccaactagctgtggtgaaccctgtcgcctacttgcaacagcagttgcttgcatccaacccacttgctctggcaaacatagttgcataccaacaacaacaacaattgcaacagtttctaccagcgctcagtcaactagccatggtgaaccctgccgcctacctacaacagcaacaactgatttcatctagccctctcgctgtggttaatgcacctacatacctgcaacaacagttgctgcaacagattgtaccagctctgactcagctagctgtggcaaaccctgctgcctacttgcaacagctgcttccattcaaccaactgactgtgtcgaactctgctgcgtacctacaacagcgacaacagttacttaatccact

SEQ ID NO: 536 - DNA, 320 bp, Zea mays
  Clone ID: LIB3115-004-Q1-K1-H9
cccacgcgtccgcccacgcgtccgggaggcggtggcggctacggcggtcggcgcgagggtggtggtggcggctacggcggcggcggcggcggctggagggactgatgtgtgggcccatcctggcttcggccgagttatcttatctatctatagtatcgtgttaccgttcgcttctgtcaccgtgttagtgtccgttctacctttggattaggtgttggtacccctgttgttccctttgtttgctcccgctatgaaacgagacgagagaagaatgagcaaggtttttgttcaaaaaaaatatattttttcttattactaag

SEQ ID NO: 537 - DNA, 318 bp, Zea mays
  unsure at all n locations
  Clone ID: LIB3115-005-Q1-K1-A1
gagagacagagagagcgtgtggatttgggggagcttcttcactggagagtggagagctccgggggcgaggcgaangaaggaagagggaggaggggaatcagagaggtctccccgatggcggactggggccccgtgatcgtagcgacggtgctgttcgtggtcctcacgccggggctgctctgcacgctgccgggccggggccgcgtngtagagttcggcagcatgcacaccagcggactggccattctcgtccacgccgtactctacttagcgctcatcaccatcttccttattggccatcgggatccacgtttacgc

SEQ ID NO: 538 - DNA, 422 bp, Zea mays
  Clone ID: LIB3115-005-Q1-K1-A11
cccacgcgtccgcggacgcgtgggccagcaggtccagcagcaccagcagcagcaggcggttggcgcggtgaaatgcgagccgcccgtggccgcggcggcgtcggagctcatccggcggaacctcgcggagcagatggccatgacgctgacgcgggaccccagcttcaaggcggcgttcgtcaccgcgctgtccggccggctcttcgagatgtcgccgaccaaggactgacggaacggatcggatggattgggagattggcatcgcaggagattctggatcagattgtcttcgagcgcacgccgcaatggtcaactgcgcagcgcttgcttggctgtcagagcgaaacagcggtaacagagcaagacacgaggggtctgcactctgcagttgtgcaggaggaggaacagacacaaggggagga

SEQ ID NO: 539 - DNA, 371 bp, Zea mays
  Clone ID: LIB3115-005-Q1-K1-A2
ctcacctgcgatcggcagctggcgtacgccgagggcctccagcaagacggccaccatgtgaaggtcgtgtaccgtgagaaggccaccgtgggtttctacctgctgtccaacacggaccactaccacgaggtcatggaggagatcggcgacttcctcgcggctaacctctagcagcacatgcacacaaacttcacatgttatagcaagatgggtggtaagcttgactttatagttgtaccgatctgctgctgcttgggggggtggtgggctttgctgctgataaaactctctatctaggaaagaaaccacagtgactttttttttgttttgtcgtcgggttgctgatcacaaagctgcttgatgaactgcgt

SEQ ID NO: 540 - DNA, 345 bp, Zea mays
  Clone ID: LIB3115-005-Q1-K1-A6
aattaagggtcgacccgcgcgggcaggaaaatacatgtcccaaggacgagaagcagacattaatcaatcattttcatgagaagcttgttaagctgaatgacatgatgaagacacatgcctctaaaaggatagctgataaaaggcatatgttcatggaggaatttgtggctgaattctactaagagtccagtgtcatggcttgaggttgaacaaccacattttgagcctgtttcaaatagtgcacttggcgaaccatttcttaacaacccatgatgatgttggatacctggcctacttttttttcgatgaaaccatgttaataaacaatcgtttgtgcaatctatt

SEQ ID NO: 541 - DNA, 443 bp, Zea mays
  Clone ID: LIB3115-005-Q1-K1-A9
cggacgcgtgggcttttgggatgaatagtttatcagtatgggcttggatgttcttatttggacatcttgtttgggctacaggatttatgttcttaatttcctggcgtggatattggcaggaattaattgagactttagcatgggctcatgaacggacacctttggctaatttaattcgctggagagataagcccgtggctctttccattgtgcaagcaagattggtcggattagcccacttttccgtgggttatatattcacttatgcagctttcttgattgcctcaacatcaggcaagtttggttaatttagttatttttttttgtactgtatcagaacccagttcattactcttgatggagagggaggatccgcctttttagatttttggctattatttttctatctaagataagaaccatatacttggtaataataggaa

SEQ ID NO: 542 - DNA, 114 bp, Zea mays
  Clone ID: LIB3115-005-Q1-K1-B1
cccacgcgttcgtaaaaaaaaaataataaaaaataaatttttaaaatttaaaaaaataaatataagggggggactatataaaaaaaaataaataataaaaaataaatttaattg

SEQ ID NO: 543 - DNA, 365 bp, Zea mays
  Clone ID: LIB3115-005-Q1-K1-B10
cccacgcgtccggaaaaagaaagagaaagaagaaaaggcaaaacaaaagaaagaagaggcaaagatgaaggaaccagaaactgctgaagaagatttagctttgaaggaaatgactgatgctactgctagggaagaactgagaaaagcaaaagaacatgacaaagagaagctctgtaatatcagccgtgccttggctgtgctcgcatctgcatcttctgttagcaaggagcgtcaagagtttctgagcctcgtcaataaagagatagagctatataactccatgctcaaaaaagagggtactgaaggtgaagaagcagctaaaaaagcatatatagccgctagggaagacccagacaatgatgctg

SEQ ID NO: 544 - DNA, 393 bp, Zea mays
  unsure at all n locations
  Clone ID: LIB3115-005-Q1-K1-B12
ctacgctagcctgctcctcaccttcgcggcgtcgcagaccaagacgcaccgcacctgtcgctggacatcatcctctgcctcgtcgtcctctttgtctcctggctcatcaccagcgtccgcgaggagaaccgcgcgtgcatcatgaaagtgctctgctgcagcagccgggacaactgagcaaaacatatttccagcaccagcaccgntcattcctctctcttaacttttgcttgttcataggtgatgcgatacttgcttaattttaactggtttttctcagctagtacccatgaggaagtcacaaagatattttacgtgccagcagtggtatgtactctaatctgccttgctattggctgtgagagaaattaacattgcgtatggtaatcttag

SEQ ID NO: 545 - DNA, 364 bp, Zea mays
  Clone ID: LIB3115-005-Q1-K1-B4
gcgtcgagcaggagcacttcaagagggaggagaaggagcataagcacaaggagcgcctcggcgaggtgggcgccctcgcgggcggcgcctttgctctgtacgaggggcaccgtgcgaagaaggacccggcgaacgcgcagaggcacaagatcgaagccggcgtggcaacggcggcggcgcttggcgccggcggctacgcgtaccacgagcaccgcgagcagaaggaggcccactacgagagcaggcagcaagagcacagggtgccgcacgggcacgggcacgggcacggctactcctactactgcgactgaaacgactgatcattccatcgatcgagatatgcatgcagaactcgatatatata

SEQ ID NO: 546 - DNA, 445 bp, Zea mays
  Clone ID: LIB3115-005-Q1-K1-B5
gcgacctgaagaaggatccattagctctagagttcaaaggttggccaagtacaggtttctaaagaaacagtgagagcttctgctgaatgctgatgatcttgatgccatgtgggtttgtctaagagaaaattgtgttattgatgatgctactggtgctgaaaagatgaattatgaagatttctgccatatcgccacagtctgcacggagcagattggtcagaaatgcaaacgatttttcagcccttcaaacttcatgaagtctgcacggagcacttgcacagattgtttggctaattacaagattatctcagtgttttggtttggatttagagtacacttatgtatgaaatattgattggtactcatctatattatattaattatattattatttaatatatgtatgtgtattcttcttcaaatattataatgtggttctcaaatg

SEQ ID NO: 547 - DNA, 308 bp, Zea mays
  Clone ID: LIB3115-005-Q1-K1-B6
cggacgcgtgggcacaaggcccacgatgagggcgaccaccaccagccgggcgtacctgccccggcgcccgcaccgcccgtggcggtggacacgcatgctcaccaccaggagggagagcacaagccgcactttccggcgccggcgccttccccgcacgtggagacgcaccaccccgtcgtcgtccacaagatcgaggacgacgacacgaagactcagaccccaccacaggcaccggaggaggagaagaaaggcctgctggacaagatcaaggagaagctacccggtggccacaagaagccggaagacgc

SEQ ID NO: 548 - DNA, 424 bp, Zea mays
  Clone ID: LIB3115-005-Q1-K1-B8
cagcaatccacacaagcacttcgacgtcgcacgggcgctgcacacagacacaccaagcgtcggcaccaatggcttactaccaggaggtggactactgctcggaggaggtgaggtcggtggccccggccggcttcggccgccacggaggcggcgtccagcagcacgtcgtcaaggagaagttcgaggaggtcgacacggtctcacgcgccggcgccaaccaccaccaccaccaccatggtcaccacggcggccacggcttcgtggtgcgcgagaccagggtcgaggaggacatcaacacctgcaccggcgaggtccacgagcgcagggagagcttcctcgccagggctaactgagccgcccggcggccggcatccacgcccgttcgtgcctgcctgcgtgccttatgtatgtctgtggttgactg

SEQ ID NO: 549 - DNA, 406 bp, Zea mays
  Clone ID: LIB3115-005-Q1-K1-C1
cccacgcgtccgactagttctagatcgccgaaggtctccctggagctctactacgagtcgttgtgcccgtactgctcgcggttcatcgtcaaccgcctcgcggggatcttcgaggacgggctgatcgacgccgtccacctccggctcgtcccctacggcaacgcgcgcgtcgcattcaacagcgagatctcttgccagcatggtccgtacgagtgtctgctcaacaccgtggaagcttgcgccatcgacgcctggccggatctggatgggcattttagcttcatctactgggtggaggacctggtggtgaagccgcagtacaaggactgggagtcctgcttcgagaagctgggccttgacgccaagcccgtaacaaaatgctacaaaagcgagcattggcacaagc

SEQ ID NO: 550 - DNA, 329 bp, Zea mays
  Clone ID: LIB3115-005-Q1-K1-C10
cccacgcgtccgctagcatccgcagttcccccgcgcccgagacgcaaccccgcgccaggagtaagtttgttcttttatcgatatggcgagggaggagaatgtctacatggccaagctggctgagcaggccgaaaggtatgaagagatggttgagtatatggagaaggtggctaagactgtagatgtggaagagctcactgttgaggagcgtaacctcttgtcggtcgcatacaagaatgtgattggggctcgccgtgcttcatggcgcattgtctcttctattgaacagaaggaggagtcccgtaagaacgaaaagcatgtgaacctta

SEQ ID NO: 551 - DNA, 312 bp, Zea mays
  Clone ID: LIB3115-005-Q1-K1-C11
cccacgcgtccgccgtcttgagaggcatcaaggagaaggggctcaccaacttcatccgcgacgtccgcgacgaaggatacttcaaatgccttctggacgggaaccttttgcaaacgaaaattcacaatattggagcaacacttgtaggagttgacaagtttggaaacaaatactatgagaaactacatgacactcagtacggaaggcataggtgggtagaatatgcagagaaaggtcgctacaatgcatcccaagtgcctcctgaatggcatggatggctgcaccacatcacagatagcactggggataagc

SEQ ID NO: 552 - DNA, 341 bp, Zea mays
  unsure at all n locations
  Clone ID: LIB3115-005-Q1-K1-C12
cttcaagccgctgtgggccaagaactgcccgaggttcggcctggcgcacgcgctgtgcctcggcctcgcgccgtggctcgcggcggaagtcccgattctggtcgactcgggcatggtgaagcacaaggatgacgaggcggctccggctgaggcatctgcctctgctgctcctccttcgtagttgccacttgcaacaactgagtgtccggtgagctaagggcgatatcggaaatcaactcggcggtgaaccgtgaaccgccaaataagagagatacctgcaaatctaaacatcatgtgaaacatgttccatacctgctgatngctgtctgcgtactaatntc

SEQ ID NO: 553 - DNA, 384 bp, Zea mays
  Clone ID: LIB3115-005-Q1-K1-C4
gcgagtacatacatactaggcagccaggcagccatggcgcccaccgtgatgatggcctcgtcggccaccgccgtcgctccgttccaggggctcaagtccaccgccagcctccccatcgcccgccgctcctccagaagcctcggcaacgtcagcaacggcggaaggatccggtgcatgcaggtgtggccggcctacggcaacaagaagttcgagacgctgtcgtacctgccgccgctgtcgacggacgacctgctgaagcaggtggactacctgctgcgcaacggctggataccctgcctcgagttcagcaaggtcggcttcgtgtaccgcgagaactccaccttcccgtgctactacgacggccgctactggaccatgtggaag

SEQ ID NO: 554 - DNA, 312 bp, Zea mays
  Clone ID: LIB3115-005-Q1-K1-C5
gccagcgcgtgcgtgcgcaccttccaccacgctctggaagctgtttcccctttctcgagagtttaaaaagcttttgcacgcatggccggagagagctgcgtacccaatcccctcttcgacccttccatcttcaccaccttcccttatcgattcccacactgtgagcaacatcctgttggtccccaaccattatgaggatctccttgatccatccctcgacaagagcctcattttctaactacttgacctcaagggcgacgtggactaccccggccgccctctctggtttctgcaagacatcgccaaccagca

SEQ ID NO: 555 - DNA, 451 bp, Zea mays
  Clone ID: LIB3115-005-Q1-K1-C7
cgtccaccttcaccgccaccgatcggtagcaacgcgcaccaccgcgtcgtcgtacggcagcacacggaaagagagagagagagagagagagagagaggaatgggcgaccacgagggtcacggggtcgatttcgagaagaaggccgatcagaagctctccggctggggcctcttcggcaataagtacgaggaagccgccgacctcctcgacagggctggcagcttcttcaaactcgcgaagaactggagcagagcggctgcggtatacaaaaagattgcagattgtcatttgcagggggataacaagcacgatgctgcctctgcttatgttgaggcagcaaactgctacaagaagttctccctgcaagatgctgcacaagcacttaacagtgccgttaatcttttccaggaaatcagtagactgaacatggctgcaagatacagcaaggata

SEQ ID NO: 556 - DNA, 457 bp, Zea mays
  Clone ID: LIB3115-005-Q1-K1-C8
gacaaaaccagaccatcaaacaagtgccagcgctcctctcgcagtcgccgcaatggagagcacggtcatcatgatcaagcctgacggcgtccagaggggcctcattggtgagatcatcagccgttttgagaagaagggcttctacctcaaggccttgaagcttgtgaacgtggagaggtcgtttgctgagaagcactacgccgatctcgcctccaagcccttcttccagggcctcgtggactacatcatctctggccctgtggtggccatggtctgggagggcaagagcgtcgtcacaactggccgcaagatcattggcgccaccaaccccctggcttctgagcccggcaccatccgtggcgactttgctgtcgacattggcaggaatgtcattcatggaagtgacagcattgagagtgctaataaggagattgccctgtggttccccgagggccct

SEQ ID NO: 557 - DNA, 319 bp, Zea mays
  Clone ID: LIB3115-005-Q1-K1-D1
cggacgcgtggggttggcttctcctccccctccggttcgggttcgggttcgtgaggttctccgggggtcgggttcgtgggtgagcggatcgagatggcggcgtcggatgttgagtaccgctgcttcgtcggcggcctcgcctgggccacggacgaccacttcctccacaacgccttcagcacctacggcgaggtccttgagtccaagatcattctcgatcgggagacgcagatgtcccgcggcttctgcttcgtcaccttttccacggaggaggcgatgcggaacgccatcgagggcattaacggcaaggagctggacg

SEQ ID NO: 558 - DNA, 370 bp, Zea mays
  Clone ID: LIB3115-005-Q1-K1-D10
cccacgcgtccgactggacgtcagcctagcaattagctcatcgactccagattggagaactggacaccatgaaggtgctgatcgttgcccttgctctcctggcgctcgctgcgagcgccgcctccagtacaagcggcggctgtggctgccagacaccaccgtttcatctaccgcctccgttctatatgccgcctccgttctatctgccgccgcagcagcagccgcagccatggcaataccccactcaaccaccgcagctaagcccgtgccagcagttcggatcctgcggcgtcggcagcgtcggcagcccgttcctgggccagtgcgtcgagttcctgaggcaccagtgcagcccggcggcgacgcccta

SEQ ID NO: 559 - DNA, 452 bp, Zea mays
  Clone ID: LIB3115-005-Q1-K1-D12
cacagagaggacacgaggagcacgctgggccgcgtcgtggtcatcatctggctgttcgtagtcctgatcatccagtccagctacaccgcgagcctgacctccatcctcaccgtgcagcagctgacgtccccgatcaagggcatcgacagcctgatcgccagcgacgagcccatcgggttccaggttgggtccttcgcggagagctacctggtgcacgagctgggcgtctccccgtccaggctcaaggcgctcggcaccccggacgagtacaagaacgcgctagagctcgggcctcgcaagggaggcgtcgtggccatcgtcgacgagcgcccgtacgtcgaggtcttcctggtgcagcacgacaagttcgccatcgtgggcgcggagttcaccaagagcggctggggcttcgcgttcccgcgtgactcgcctctggccgtggacctgtcgac

SEQ ID NO: 560 - DNA, 347 bp, Zea mays
  Clone ID: LIB3115-005-Q1-K1-D4
cccacgcgtccgggggcgatgtgaatgttttgagaccaggtcctcaagcagtgatgttgcacggaggggtaaatcggaccttagaagaagcaaagtctatcagcaattcatgcaggcggtagcagcattggcgtctagaaccttatgtcccatggttgaaagctttgagctttttccgcttatccactaagggttctttactctgctgaataaatagctgtcacatgtttaagctgtaacaagcacttgttacacttggtacataatcatggagatacgtgcttatctaatcattatgtgaaaaatgttatattcacggattatgagttttacttttgtctgtgatt

SEQ ID NO: 561 - DNA, 146 bp, Zea mays
  Clone ID: LIB3115-005-Q1-K1-D5
ctgacgcctggtatcatctttattaaactatatatctataatatccatcatgtcttgttaatggcgagtatacttactaggaaggggtgctttctctctcttctattacttcttcatttcatatcctattgctcatcatatatata

SEQ ID NO: 562 - DNA, 460 bp, Zea mays
  Clone ID: LIB3115-005-Q1-K1-E1
cccacgcgtccgatcaatgaaggaggttaatgatgctgctcctaatgcaattgagattccagagatggaaccatcacaaagacctttgggtaagaagaaggcaaaagaggcggcacgtcagggtggcaatgatgcttgcaaagaagcattgaagtttctgtaggcaaaaaagattgaggatgatgcagagaaggagatgaagagagaagaaagacatgcaaagtcatttgctctggacaaagagatgcttgaactataaaaggagaggattgcgctaaagaaggagaaggttgccaacgaggcaaacaataatttcttgaagaggattgcagaagaagatagaataatgaccattgatctcagtgccatgaatgagatgcagcagcaatattacctgagcattcatgctgagattatggctcgtcgcatgaattagatcatagctcactgctagccttgt

SEQ ID NO: 563 - DNA, 411 bp, Zea mays
  unsure at all n locations
  Clone ID: LIB3115-005-Q1-K1-E10
cggacgcgtgggcggacgcgtgggcggactcttgggcggacgcgttggcgctccttcggggggcggagagcattggtcgggcgcgctgcatcngctggcgacagggccgctccggccggtgcccttccagcggcgctgttgttcgattgcgatggtgtgctggtggacaccgaaaaggatggccaccgcatcttcttcaacgaaaccttcgctgagagggaattatgtgttatctgggatgttgaactgtatggagaattgcttacgataggttgtggaaagtgaaaggatgacagcttactttaaccagacaggatggccggctaaagcaccgaatacagatgacctaaagaagggagtttatagcttctcttcacaagaggaaaacagaattattcatgtgcctaattt

SEQ ID NO: 564 - DNA, 431 bp, Zea mays
  Clone ID: LIB3115-005-Q1-K1-E11
gcgcttcaccgcctcggcccgcgcccgcatcgagaaggctggtggtgagactctcaccatcgacgaggttgccacccgtttccccaccggtgccaacaccgtcctcctccgtggacccaagaactcccgtgagtctgtcaagcacttcggcttcggtccccactccaacaagaagccctacgtcgagtccaagggccgcaagttcgagcgcgctcgtggccgcagaaggtccaggggtttcaaggtctaagcgattgcttgagcttgaggtggaacgtttattccgggttgctggcgtggtcacggtcatgggaactgatttacgaagcgtgcatcacggctggtatgagcccttggctggttctcaaaaatatactcaatgtccgtatatgcaatggacgcacaccaatgagcactcgaggctcatggta

SEQ ID NO: 565 - DNA, 449 bp, Zea mays
  Clone ID: LIB3115-005-Q1-K1-E12
ggggtgcaaatagggaggctgaaaaggaagcttttgaagaagctgaaaaggagaggaaagctagggaggatagggaaggtcaaaaggcaaaggacgatggtggccggcatcgaagacacaggcgtcataaaaaacactacagagatcactgggacgactaccatgatgagctataaaagtccccaaatattgcattcctcaaaagcataagctggaagttgcttcggacattgtgggtgcttttcaataataataattgattcgcctggtcagaacaacctgaagtgtttcttgctatgcgccaacaaattattgaactacaggatttgatatgtaatggacaaccgaagatctgcagggcattccagcgaaaacttggctctggtactgaaatagaggggacgagagactgtagtttgtgtctgtacaacggtgccggccatgtgcta

SEQ ID NO: 566 - DNA, 400 bp, Zea mays
  Clone ID: LIB3115-005-Q1-K1-E2
tcgcccacgcgttcgcacacatacatagtttcttctactacacgacgacaaacatggggaagcctgcgaagatcggagagtggggtggatacgccggcgatcgtcgggatctgagggctactccggaccggctgatcgaggtgaaggtcacggcggacaacagcagctgcatccgctccatctccttcatctacatcggagccgatggcaaaccgtacgaggaggggccatggggtttcggccatgctggcacggagtacaagattgatctgtgcaggttcgacgagagcttgacggagatcttcgggaccacgggcccagcctacaacattgacaatctggtcaagtctctcaaattcgtcaccaacaaacgcgcttacggaccgtacggcagggacga

SEQ ID NO: 567 - DNA, 456 bp, Zea mays
  Clone ID: LIB3115-005-Q1-K1-E5
cccacgcgtccgagtcgaccaacttttcgacctatttttctagttttctaggttctgataccggagtgacacattgtgtcaaatgtgaaaatcgctgatacattttactcaagatccaaccatagggacactcggtccggccaccatgtcataaaaccttgccacataccctccaaatttgtcaccagaggaggggaccaccgccacaaagttagcaagagcctttaaatattattcttatctctcatgtttggtatctatgtctataccactatataattgactagtttaaactttgcaaaaccaatccaaccaaatcacccccacacccgtaagtttcgctaaatccaccaaacagttgcacctagacttaacatatcatggtttagatcactatataaacccgtcttttttacccacatccaatggacaatattatttgaatcattcatcata

SEQ ID NO: 568 - DNA, 360 bp, Zea mays
  unsure at all n locations
  Clone ID: LIB3115-005-Q1-K1-E6
ctctcaccatcggcgaggntgccacccgggggcccaccnnngccaacaccngccncctccgnggacccaaaaactcccgagagactggcaagcacttcggcttcggtccccactccaacaagaagccctacgtcgagtccaagggccgcaagttcgagcgcgctcgtggccgcagaaggtccaggggtttcaaggtctaagcgattgcttgagcttgaggtggaacgtttattccgggttgcttncnntgncactgncatgggaactgatttaccaagcgtgcatcacggctggtatgagcccttggctggttctcaaaaatatactcaatgtccgtatatgcaatggacgcacaccaat

SEQ ID NO: 569 - DNA, 454 bp, Zea mays
  Clone ID: LIB3115-005-Q1-K1-E7
ccagagctcgtcgccaccggccaccgccaccctcgatcacgccgtccgtcgaggtaaggtcaggatggtgagggtcagtgtgctcaacgatgcgctcaagtccatgtacaacgctgagaagatcggcaagaggcaggtcatgatcaggccgtcgtccaaggtcatcatcaagttcctgacggtcatgcagcgccacggctacattggagagttcgagtacgttgatgaccaccgatcgggcaagatcgtggtcgaactcaacgggaggctgaacaagtgccgcgtcatcagccctcgctttgatatcggcgtgaaagacattgagggattgactgcaaggctgctcccgtccaggcaggtcggatacatcgttcctacaacttctgcaggcatcatggaccacgaggaagccccgccggaagagcgttcgaggcaacggtttagggttctttta

SEQ ID NO: 570 - DNA, 298 bp, Zea mays
  unsure at all n locations
  Clone ID: LIB3115-005-Q1-K1-E8
cccacgttttcggngacgcntgggccgacccgtgccgactttctaatattctatattaggagggggggctcctatcgcgtagaatggttccactactatgagcatcgtagcggtatacggatggtttgcaagcatgacaataattcgggcacgatatccgagatcttttacaaggtgtttgatagcatcaagcatgatgaagatacgtgcgcggacgaacagaacgacaacacccatatgcacgcgtattaggacaatgtgtgggagctcaacgccacggccagacaagcccgggaca

SEQ ID NO: 571 - DNA, 402 bp, Zea mays
  Clone ID: LIB3115-005-Q1-K1-E9
cccacactttcgagaacacgttatcgctatcctctgatgtcccgagccacttgctaggggacgtgaattataatctagtggactcataccaacattaaattatatatttaaaacactaaccatatatagtaaacacgcttgtacttaataaccttaaacttagagatcatgccatgactgttctcaccaaaaaaattgctttgattatcatttacatcacttgtataatctatgctgtgacacataatgagcagtactgacagggagcattctatttacaattattagacttttccactaaaatttctatttaacaatatataatatattattacaatctatttgattattgaccacttatagattagtcctttcttgtgtattgacctttccatatctacc

SEQ ID NO: 572 - DNA, 382 bp, Zea mays
  Clone ID: LIB3115-005-Q1-K1-F1
ccaccaactccgagaccgccgtcttcgccagcgcccgcatcgactggaaggagacgcccgaggcgcacgtgttcaaggccgacctccccagcgtcaagaaggaggaggtcaaggtcgaggtcgaggacggcaacgtgctggtcatcagcggccagcgcagcagggagaaggaggacaaggacgacaagtggcaccgcgtcgagcgcagcagcggccagttcgtcaggcgcttccgcctgccagagaacgccaaggtggatcaggtcaaggctggcctcgagaacggcgtgctcacggtcaccgtgcccaaggcggaggagaagaagcctgaggtgaaggctattgagatatctggttgagcatccaatccaatatggacgtg

SEQ ID NO: 573 - DNA, 292 bp, Zea mays
  Clone ID: LIB3115-005-Q1-K1-F11
aaaaaaaaccaaaaaaaaacaaaagagaggaaaaaaaaaaacccgcaagaaaaaaaaaaaggggggaaaaaaaaaaaaaaaaacaaaaagaaaaaaaaaaagaaaaaaaaaaaagaggaaaagagaaaaaaaacaaaaaaaaggaaaaaaaaaaaaaaaagaaagaaaaaaagaaaaaaaaaaaaaaaaaaaaaagaaaaaacaaaaaaaaaaaaagaaagaaagaaaggaggaaaaaaaagagaaagaaaaaaagaaagaaaaaacgaaaaaaagagaaaagagagaggag

SEQ ID NO: 574 - DNA, 357 bp, Zea mays
  unsure at all n locations
  Clone ID: LIB3115-005-Q1-K1-F2
ccggaannnccgggccgacccgcgcgggcgccaccaactccgagaccgccgncnncgccagcgcccgcatcgacgggaaggagacgcccgaggggcagcgggncaaggccgacctccccagcgncaagaaggaggaggncaagggcgagggcgaggacggcaacgngcnggncatcagcggccagcgcagcagggagaaggaggacaaggacgacaagnggcaccgcgncgagcgcagcagcggccagnncgncaggcgctnccgccngccagagaacgccaaggnggaacagggcaaggcgggccccgagaacggcgngcncacgggcaccgngcccaaggcggaggagaagaagc

SEQ ID NO: 575 - DNA, 474 bp, Zea mays
  unsure at all n locations
  Clone ID: LIB3115-005-Q1-K1-F3
ccgctcccgcgctcagtcctcagttcctcacctagcggtagcgtgcgcgcgggagacgtanatggcggcttcggaggcggcagcggcggcggcaacaccggtgacgccgacagaggggacggtgatcgcgatccacagcctggaggagtggagcatccagatcgaggaggccaacagcgccaagaagctggtggtgattgacttcactgcaacatggtgtcctccgtgccgcgccatggctccaatttttgctgatatggccaagaagtccccaaatgttgttttcctgaaagttgatgtggatgaaatgaagaccattgctgagcaattcagcgtagaggccatgccaacattcctgttcatgagggagggcgacgtcaaggacagggtcgttggcgcagcaaaggaagagctagcaaggaagcttgaactacacatggcctcgtagatcagtgatgccgtaatgtagtattc

SEQ ID NO: 576 - DNA, 429 bp, Zea mays
  unsure at all n locations
  Clone ID: LIB3115-005-Q1-K1-F5
aacgcgagccagtatggattggccgccggcgtgttcaccaacagcctggacacggccaacagggtgacgcgcgcgctcagggccgggactgtctgggtgaactgcttcgacgtcttcgatgctgcgattccgtttggcgggtacaagatgagcggcatggggagggagaagggcgttgacagcctgaagaactacctgcaggtgaaggcggtcgtcaccccaatcaagaacgccgcgtggttgtagacgctgcaagtgtggccttgtgcacgagaaccacgtatattcatttcctggtcacatccccgaacaatgtgaagcgttaatcagatagatgacgatgaagaagaacaactataataagatttgccctagcctgggttctcagttatctcttataaaacnnactttttttccctttttctatgg

SEQ ID NO: 577 - DNA, 365 bp, Zea mays
  Clone ID: LIB3115-005-Q1-K1-F6
gggatgctctcctaagtggaaagtttgaccacgtacgtgtcaacctgccaaatggtgacatcgtgggtcacactggtgatgtggaggccaccgtagttgcttgcaaggcagctgatgaagctgttaagattattttggatgctgccgatcaagttggtggtatttaccttgttaccgccgatcatggcaatgctgaggatatggtgaaaaggaacaagtctggtaagccgttgctcgacaagaatgaccgtattcagattcttacctttcatacccttcagccggtcccggttgccattggaggccctgggcttcaccttggagtgaaatttcggaacgacatccaaacctctgggctcgtcaac

SEQ ID NO: 578 - DNA, 368 bp, Zea mays
  Clone ID: LIB3115-005-Q1-K1-F7
ggggtggcggcgaccgctcctgctacaactgcggcgaggccggccacatcgcccgcgactgcgccacgtgaggtgtgtccgcgtccgtccagccacatcacatcggatcgctccaccacctgctggtctgatggcgccgcccccttctagatctcgcttaaaaaaacacccccctctcgctgtgtgtcggagtaccgctttagttttgccgatccgggcacgagtgcccgctgcctctttcctttcatgcgtaagaggaacccgtacggcgtttttagatttcgttcggtccgtagaaaaactctaaagttaagtaagttatcatggtgtgtgcttggtcgttggttcgtcgcgtcgttaacgtttta

SEQ ID NO: 579 - DNA, 319 bp, Zea mays
  Clone ID: LIB3115-005-Q1-K1-F9
gcgcgcggtggacaccggcaaggaggcaccatatgacttcctcaccgatggcctgccagatcgtgctgtcaccgggtggggggtctctcatggttggactccaatctctatcctatgctcagctactcctccatcatccttgtattgcgccctgatgtctgaaagaaatggatacaatagagtatattggagccgtagtatatattttctttgacttttctttgacttccttttgtagatctgccaaacacaaacacaactaagcaatgtagcacatactattggcacgacccttcactcatttacattctaaatttta

SEQ ID NO: 580 - DNA, 393 bp, Zea mays
  Clone ID: LIB3115-005-Q1-K1-G10
gtttatctatcctctgaagattgtcatcaagacctgtggcactaccaagctcctgctgggggggccaagaatccttgagcggtggtgaagagctgtctatgccacttgctgctgtgaagtactcccgtgggacgttcatctttcctggcgcacagccagccccccacaggagcttctctgaggaaggtgctgcacttaaccgctactttggcggcctgaaatctggtggtaatgcttatgtgattggagatccagccagacctggacagaagtggcacgtcttctacgccactgagtacccagagcaaccaatgggtaaccttgagatgtgcatgactggtctggacaagaagaaagcttgtgtctttttcaagactaatgctgatgggaaca

SEQ ID NO: 581 - DNA, 142 bp, Zea mays
  unsure at all n locations
  Clone ID: LIB3115-005-Q1-K1-G12
cccacgcgtncgaaaaaaaaaaaaaaaaaaaaaaaaaaaaaaaaaaaaaaaaaaaaaaggcggggttaatataaaaaaaaaaaaaaaagggccgcccctccccatctaaaactactcactagttctacatcgcgggcaccct

SEQ ID NO: 582 - DNA, 337 bp, Zea mays
  Clone ID: LIB3115-005-Q1-K1-G2
gcgaaacaagaacctgataatcaacttcattctcgtcccgtaggaggaatttgaaaacccaaacgtgcaggtgtgatacttcagctggagctgcaatggcaacgcccgatttgtccccggtctcgccggtgcggcgggactacaagcagtgcgcgccatcctcctcgtcgtgcacaattctgagagtgcatgactcgtccgcggccgatgctgtacgagcattacctgctgctgccggaactgtctagcttttgggaggccggttgctttctggagtgtgctgtctatggcctgtttaaaccttctcttcatgctcttgatgtctcctttcgcctgg

SEQ ID NO: 583 - DNA, 463 bp, Zea mays
  Clone ID: LIB3115-005-Q1-K1-G3
gcgcggacgcgtgggctctgcgtcacagtgaaagtggcatggtagatcaggttctgttaacaacagggggggatggtctaagaggtgtgaaggttatgatccgatctgttcgcataccacaaattggcgacaagtttagcagcatgcatggacaaaaaggaactgttgggatgacttacactcaagaggatatgccatggacaatcgaaggcattacaccttatattattgtgaatccacatgctattgcatcccctatgactattgggctgctgatcgagacgattatgggtaaagattctgttcatatggggaaggaaggcgatgccactccattcacggatgttactgtggataacatcatctaagcttttctttaatgggattatcatacccgcggctcttagacaatgtgcaatggtcacactggaagaaaaactactgcgataatttttctgggccc

SEQ ID NO: 584 - DNA, 188 bp, Zea mays
  Clone ID: LIB3115-005-Q1-K1-G5
gctgtaccggatgtcgctagacttccctccgtggctcaagcatgtaccgctcatgcacctggggcgggcacatttcgcagagaggggcttgaacgatgacctaccgcttggtcttggtcaacaagaaccgatgatcaattgcgcccaccacttgaacttggccgtattatattacaaactccggggcc

SEQ ID NO: 585 - DNA, 383 bp, Zea mays
  Clone ID: LIB3115-005-Q1-K1-G6
cggacgcgtgggcggacgcgtgggtaccaacaacaacagcaacggcgtggaggtgaagagctagttcaacaagtccgccgggagggcggcgagcaacaacaacaacaacaacaacagccacgccggcggcggcaacaagaagggcggcgccggggagtacggcaggaagaagcacgccaagagcgagggcgcggcggcggccacggacaagcagcggttcaagacgctgccggcgtcggaggcgctgccgcggggccaggccatcggcgggtacatcttcgtctgcaacaacgacactatggacgagaacctcaggagggagctgttcgggctgccgtccaggtacagggactctgtgcgtgctatccgcccgggactgcccc

SEQ ID NO: 586 - DNA, 363 bp, Zea mays
  unsure at all n locations
  Clone ID: LIB3115-005-Q1-K1-G9
cccacgcgtccgcgaccggaccgacgagcgacgaagcgcgcagaaagagaagaacctcggaggtgagatggcacaagccatggcgtcgatgaccggcctctcgcagggcgtcctgcccagcaggcgcgccgacagcagaaccaggacggccgtcgtcatcgtcagggcgtccgcggagggcgacgccgttgcgcangcgggccgccgcgccgtgatcgggctggtggccactggcatcgtcggcggcgccttgtcgcaggcggcgcgcgccgagaccgtcaagaccatcaagattggagccccgccgccgccctccggtggactccccgggactctcaactctgaccaggcgagggacttcga

SEQ ID NO: 587 - DNA, 448 bp, Zea mays
  unsure at all n locations
  Clone ID: LIB3115-005-Q1-K1-H1
gcgcccacgcgtccggttcccgggcaaatctttatgggagtgatggttaaccctcctaaacctggagatatctcatacccgaagttcactgccgaaagcaagtccatcctcgaatctttgaggaggagagcgcgcatgatgacagacggtttcaacagctgccgaaacgtggtgtgcaatttcacagaaggagctatgtactctttcccccaaatacagctgccagcaagagccatcgaggcggcaaagagagccggcaaagcagcagacgttttctactgcctcaagctcctggaggcaacggngatttccactgttccgggatctggttttgggcagaaggaaggggtgttccaccttcggacaactatccttccagccgaggaagacttccctaccatcatgtcgaggctcaagaagttcaacgactcattcatggagcaatacg

SEQ ID NO: 588 - DNA, 262 bp, Zea mays
  unsure at all n locations
  Clone ID: LIB3115-005-Q1-K1-H10
acattcgggtacgcttttttatcccaaaaacatcaaataacttcactcttatcaaataaactacatcgcggcgttctattaatactgcatccatcctccttnacaaatacataaacacctctttaattctcttccttaaaaaaccttcccctgataataataaacttttaacccacttctctatcttcatctctccaactcgactttctattctactaacacttatatccaatattcctcataacataagaaactattttta

SEQ ID NO: 589 - DNA, 245 bp, Zea mays
  unsure at all n locations
  Clone ID: LIB3115-005-Q1-K1-H11
attcccgagccaggccacgcgtacgnccaccccttctcttaaaaanaatgctatctaagacccgtactacacacaaaaaaaatgtcgctgcttgatactaatgctgcgcaacgactntatatattttccctacctctccttcatttcctgtctcacctcttccacggactaccactccctccacaacgccttcaatacctacggctaggtcctcgactccaatatcatcctccatcggtagactc

SEQ ID NO: 590 - DNA, 379 bp, Zea mays
  unsure at all n locations
  Clone ID: LIB3115-005-Q1-K1-H12
tcggcacccatggcgaaatgtctgaagcacactactatccacgcactgtggctggttgccatagtgcttcttgcatcctctgtcgtacttcatgcgcgcataataagcaggcaaaccaaagagaatagcaacactaggagcttgacaatgactatgatggggccggcaagcaacattattggcactggtgggcaactttctagagggaagtgcattaaggatcatgcatggttcgtgtgcgtaaagactatggagtgttttgtgaccttagtggagtgcttgatagggtgcagtggttatgactaacaagagggcgggcttttattcaattccaagatggaaatcattaaaatgttctaagctnnaaaataaaatttat

SEQ ID NO: 591 - DNA, 460 bp, Zea mays
  unsure at all n locations
  Clone ID: LIB3115-005-Q1-K1-H2
gcggactagttctgatcgcgacggccgccctttttttttttttttacagtgaacatggtgacaatgcatgggaaggattatccgtcttcgtgtacctctcgccacccataatacaatatacaaattacccttaaggccttaactatatataaattacctcacacaacagatacaaagcatatacttatatgcaaagaaacacacacattgataataacagaactagttaactgccgaggctgaaacaaccaacgtcgtggaggaggcagtagtagtagtagcacccaggccgccctgggctactagtacccaggcccgaccttgttgacgagtgcgagcgcgttgctggtgacctgcgcgacctcgacgaccctgccgcggacggcggcgcgcgtggcggcnttcactgcgcgggacgagagcccgtccaggcaggtgttctcgtccgtgagcgcggcgc

SEQ ID NO: 592 - DNA, 222 bp, Zea mays
  unsure at all n locations
  Clone ID: LIB3115-005-Q1-K1-H5
ggtgggttggcttctcctccccctccggttcgggttcgggttcgtgaggttctcccgggttcgggttcgtgggtgagcggatcgagatggcggcgtcngatgttgagtaccgctgcttcgtcggcggcctcgcctgggccacggacgaccactcccttcacaacgcctttagcacctacggcgaggtcctcgagtccaagatcattctccatcgggagacgc

SEQ ID NO: 593 - DNA, 475 bp, Zea mays
  unsure at all n locations
  Clone ID: LIB3115-005-Q1-K1-H6
cacgtaccggaactncattcccgacccaggcgtcccggtgggttggcttgtcctaccgctccgggtcggcgttcgggttcgcgaggttctccggggttcggggtgcgtgggtgagcggatcgagatggcggcgtccgatgttgagtaccgctgcttcgtcggcggcctcgcctgggccacggacgaccactccctccacaacgccttcagcacctacggcgaggtcctcgagtccaagatcatcctccatcgggagacgcagaggtcccgcggcttcggcttcgtcaccttctccacggaggaagcgatgcggaacgccatcgagggcatgaacggcaaggagctggacggccgcaacatcaccgtcaacgaggcccagtcccgcggcggtcgtggaggcggcggcggtgggtacggtggtggccgaggaggcggcggctaccgcggtggcgggcgccgtgatggcggtggcggc

SEQ ID NO: 594 - DNA, 237 bp, Zea mays
  Clone ID: LIB3115-005-Q1-K1-H7
cctcccgtctaggcgacgacgacgacgacgaagcagcgggaggagcataagcgccgccgatcgcgagcctccgagcgtgttctcccatcatcctccgcttcgtgccgcagatccctacgtactccgtccgccagccatggcccgctcctcctcgcagtcgcagtcctccgttggcgctggcgccggcgccggcgcgcgcccggccaccgtggggccgtgcggcacggtcgcggtggt

SEQ ID NO: 595 - DNA, 276 bp, Zea mays
  Clone ID: LIB3115-005-Q1-K1-H8
atggaacaagagatatggagagatttccctgaacatcttttcgaaactgtcatatcaaggcgtgtggggttgctgcaatttttcgattccccactgtctgcccaaagtggtcttcccttttgggctcaaacagcttctctctttattactcttaagctccacatggactgccatggttctatacaatcactcatgagaattcaaacaacaatgttgcgatgtatgatcctttgctgaagaaatggcaccaccaatctgttcctctcaatcatacta

SEQ ID NO: 596 - DNA, 397 bp, Zea mays
  Clone ID: LIB3115-005-Q1-K1-H9
ccgcctccgcctgatccatccaagacagggatcgccatgtcggactcggaggagcaccggttggagatcgaatgccgacgctggggcgtccaatacctaccctcagcaggctggcaccgtccgtaagaacggcttcatcgtcatcaagaaccgtccctgcaagggtgtggaggtttctacctccaagactggttagcatggccacgccaaatgccactttgtcggcatagacatattcaatgggaaaaagcttgaagatattgttccttcatcacacaactgtgacattcctcatgtgaaccgtactgagtatcagctgattgatatttttgaggatggatttttggagccttcttactttatatggcaacacttaagatgatcttagacttccaac

SEQ ID NO: 597 - DNA, 147 bp, Zea mays
  Clone ID: LIB3115-006-Q1-K1-A1
aaaaaaaaaaaaaaaaaaaaaaaaaaaaaaaaaaaaaataaaaaaaaaaacaaaaaaaaaaaaggaaaaaaaaaaaaaaaaaacaaaaaaaaaaaaaaataaaaaaaaaaaaaaaaaaaaataaaaaaaaggggcggcccttttaag

SEQ ID NO: 598 - DNA, 94 bp, Zea mays
  Clone ID: LIB3115-006-Q1-K1-A10
tcgcggacgcgtgggcggacgcgtgggctacgactccggctgcagcgaggccgtggagctcatgggtcgagtggtcacgttctttgctgggaac

SEQ ID NO: 599 - DNA, 422 bp, Zea mays
  Clone ID: LIB3115-006-Q1-K1-A11
tcaagcttgattatctatcctctgaagattgtcatcaagacctgtggcactaccaagggggtgctcaccattccaagaatacttgagcttgctgaatagctgtctatgccacttgctgctgtgaagtactaccgcgggacgttcatctttcctggcgcacagtcaggcgcccacaagagctttttttaggaagatgctgcacttaaccgctactttggcggcctgcaaactggtggtaatgcttatgtgattggagatccagcaagacctggacagaagaggcacgtcttctacaccactggggacccagagcaaccaatgggtaaccttgaaatgtgcatgacttggtctggacaagattaaagcttctgactttttcaagactaatgctgatgggaacacaacatgtgctaagggaatga

SEQ ID NO: 600 - DNA, 437 bp, Zea mays
  Clone ID: LIB3115-006-Q1-K1-A2
cgttcctgctggaccgcgtggggcgtcggcctctgctactgaccagcacgggtggaatggtcatctcgctcatcagcctcgggacggcgctcaccgtcgtggggcatcacccggacgccaagatcccgtcggtcgtcgctctgtgcatcgcgtccaccctggccttcgtcgccttcttctctatcggcctcgggcccatcacgggagtgtacaactcggagatattcccactacagctgcgcgcgctgggctttgcggtcggcgtggcgtgcaaccgcgttaccagcgccgttatctccatgaccttcctgtctctctccaaggctattaccatcggcggcagcttctttctctactccggcatcggcgcggtcgggtgggttttcttcttcacgtgcctttcggggacccgtggtcgtacgctggaggagatgggc

SEQ ID NO: 601 - DNA, 408 bp, Zea mays
  Clone ID: LIB3115-006-Q1-K1-A6
cgttcctgctggaccgcgtggggcgtcggcctctgctactgaccagcacgggtggaatggtcgtcgggctcatcagcctcgggacggcgctcaccgtcgtggggcatcacccggacgccaagatcccgtcggtcgtcgctctgtgcatcgcgtccaccctggccttcgtcgccttcttctctatcggcctcgggcccatcacgggagtgtacaactcggagatatttccactacagctgcgcgcgctgggctttgcggtcggcgtggcgtgcaaccgcgttaccagcgccgttatctgcatggacctcctgtctctcttcaaagctattaccatcggcggcagcttctttctctactccggcatcgtcgtcgtcgggtgtggtttcttgttcacgtgccttccggaga

SEQ ID NO: 602 - DNA, 102 bp, Zea mays
  Clone ID: LIB3115-006-Q1-K1-A7
accgaatcgcaatttccaggtaggcctacgcgtacgatgatctgactgctgattgactcttgttaaagtgcaattgcgcacagatcctaatcgggggacctg

SEQ ID NO: 603 - DNA, 232 bp, Zea mays
  Clone ID: LIB3115-006-Q1-K1-B10
tcgtccacgcgtgcgcgcactgaaagcaaggcagcatgcatgtcgtcgttgaccacaaaagtgtttggagtgccccatccagggtggtacagggtttattacatcattaataatattcaagagttagtaaccgctctgacccaagagcatccggtggtgctgatgttctgggcggactggaaccaggcaagcaaggccacgtactgtgatctggccatcgctaaaaaagatg

SEQ ID NO: 604 - DNA, 355 bp, Zea mays
  Clone ID: LIB3115-006-Q1-K1-B11
caccacaccacacacacccgacgacgatcacacacacgtagaagatcgagttcgttcgatcgtgaccgtgacgcaggaagctataagctagccaagacaggaataataatggcggcgtcgacggtggcgagcctctctgtcccggtgacgacgacgaccttcgcggcggcgggcggcgccgacgtgctgatcgtcgttccgaggagggcgggcgccgggcgcgtcgtctggttccccgcggcggcgcgccgcggcggcggcagcgggcggttggtcggcgtgcggtccagcgggccggccacgccgtcggagatcttcggacaaggtgtctgagagcataaagcaagcggaggag

SEQ ID NO: 605 - DNA, 225 bp, Zea mays
  Clone ID: LIB3115-006-Q1-K1-B12
gcgaggagtagtacggctgctgattgaaggtccgtctatcgggagttatgtcgtactggagcggtctatcaggttcagagaatattagggtccgtctgtatgtatgtgtgtgtcgcacctagcaccaggagtatgtatgtatgcatgcgaatgtaggtacagagaagattatgaggcctatgtatatgcatgtgtcaagattgctatggtcttttggattggatg

SEQ ID NO: 606 - DNA, 54 bp, Zea mays
  Clone ID: LIB3115-006-Q1-K1-B2
cgtacgcgttcgaccacgtgttgcatcctcctatgctgccaaaccgcacaattc

SEQ ID NO: 607 - DNA, 345 bp, Zea mays
  Clone ID: LIB3115-006-Q1-K1-B3
cgggtcagaccacgcctgccgcgtgggcggacgcgtgggagcttccgatggcgccaaagcccctagccaggttcctggccccctcatgggcgcccgtctatgctccctgatgttctgcccacgccagcaacagcttgcccttctgcttatgtgctccatgaatgaaagcccaagcgccagacgcctcccttttgtcaagtggtacgccaattgatcacgtgatgtggaagacaaacgttggatggatctcaagataatgctgatggacgaagctaaaatgggcgaatcaaaccagtgccagaatgggagatgctcgccaagcatacatcctctagcagcactgac

SEQ ID NO: 608 - DNA, 284 bp, Zea mays
  Clone ID: LIB3115-006-Q1-K1-B4
gtggacgtcagggactggttcggcacgtcgcttaacatggtcacgccgctcaaggccgtacccgtgccttcgtcccggtgatgcactgcggcggcttgctgtgcatgtccaggatatggttctacttagcccagtctcggcgaagacttctatagcgctgcgttataactatccgacaggtttcatcacgatgaaattgtcgctttataatttccctgttaaatcattaaatttggtaatgtatcagtgttaaatgtaaataaaactaagacaaaatttcaccg

SEQ ID NO: 609 - DNA, 332 bp, Zea mays
  Clone ID: LIB3115-006-Q1-K1-B5
ctgatctgactgggattgactatagtgaaagtgcaattgagcttgctcgtagccttgcaatcggtgatgggtttgagcacattaatttcttggttgatgatgttttggagtcgaagttggagagaagatttgaacttgtcatggatgaagggactcttgatgcgattgggctccatcctgatggacctgtgaagagaatgatgtattggcagtccgttgatagcttggtttcccgtggtggtatattggtcatcacatcatgcagcagaaccaaggatgagttggtgcaagaagtagagaacttcaaccaaaggaagcttggtgctttgggc

SEQ ID NO: 610 - DNA, 382 bp, Zea mays
  Clone ID: LIB3115-006-Q1-K1-B6
gcgctgatcggactgggattgaccgtcgtttatagatcaacacacctttcacggacccacgcgagccttgatgcctgtgatgccatgaatcggctggctgatcatgtccaggatatggagctacttagcccattctaacttgacactgatatagcgacgcgttatgactatgcgactggattcataacgaccagagtagagcttgataaattgcctgttcaatcattgcatgtggtaacgtatcagtgtataatgcatctcatactgcgacaaaacctcagctgacttgaagcaagatgtagaagaacttaggccgggcgatctatataccctagcttaggctccgaacgttcgacggcatagcaatcctatagtgtcacct

SEQ ID NO: 611 - DNA, 79 bp, Zea mays
  Clone ID: LIB3115-006-Q1-K1-B7
ctgatgcctaacgcgtcgcatcttctgacagcgcaacagagcctagacgaactcgtggaatctggatggccaccactct

SEQ ID NO: 612 - DNA, 242 bp, Zea mays
  Clone ID: LIB3115-006-Q1-K1-B8
gcgcgtaagggactggttcggcacgtcgtttatcatggtcacgccggtcaaggccgtacgggtgccttcgtcccggtgatgcactgcggcggcttgctgtgcatgtccaggatatggttctacttagcccagtcttggcgaagacttctatagcgctgcgttataactatccgacaggtttcatcacgatgaaattgtcgctttataattgccctgtctaatcattcaatttggtaatgtat

SEQ ID NO: 613 - DNA, 171 bp, Zea mays
  Clone ID: LIB3115-006-Q1-K1-B9
cattaacaaaagatatgcaggttcaagaatgtagtgatgctttatttcacattttcttcattccctcatctaagattatatacaaagtcatttacattacggtaacattcttagatgagggaatgaagaaaatgactttgcatataatctttttcaggatagttcttgtgc

SEQ ID NO: 614 - DNA, 403 bp, Zea mays
  Clone ID: LIB3115-006-Q1-K1-C1
cgattcgaatcgtctgtttctcgtagctaatgagactgcttgaccccttgtactgcattgagtaaaaaagaaatgattttttacttgagataacatgttgaattgtactaaatgattgttactatgtctgcttagagaggaggaaacctagcttaattatatatactagaactggtaaagctaaaactgtttttagactcagctagtgcttttggcaaaccaaacccctcagccaaacagctgcatgctctagaggtagaggagtagactcctcacaccgggtaagtctagctgagtattagtatactcagccttgcttgtggcatatttttttcaagtacgctataagacatggttgatggtgtgacttggccttccaccctgccaccgggttggacggtca

SEQ ID NO: 615 - DNA, 407 bp, Zea mays
  Clone ID: LIB3115-006-Q1-K1-C10
aaattgtcggaacacacgttggccaggcatacatccgggcctttttcgtaaaactattcgaataacggcttggtctacttgatagagaagagaggataacagacttgacactggacaatggtgtacgagcattgttgaggggctgcaccaagcttctgaggtttggtctgtactttaaaccaggaaggctttcaaatgcaggtctcgggtacattggacagttgcagcggaacatccagtacatgcttttacgtaatgttggggaaactgatgatggattgataagcttctgaattgggttgcgtaaacctgcgaaagcttgaactcaggagttgctgttccagcaagcaagcactgtcccttgcaatattacatattgccttccttgaggtccttatgggttaagg

SEQ ID NO: 616 - DNA, 233 bp, Zea mays
  Clone ID: LIB3115-006-Q1-K1-C11
ttttgaacaagaggcaacggtcttatcgattaggatttgttaagctggatacaattttacagggggaagatcaggaatatgagtacatttaatgaatttatattattttactaaaccaacattgcgggcgtgttattgccaaacattttttttgggttcggaaaatgctcaaaatctaggttttagctcgctttttttacaccttaaaaatggctcttacactatacacacat

SEQ ID NO: 617 - DNA, 416 bp, Zea mays
  Clone ID: LIB3115-006-Q1-K1-C12
cggacgcgtgggcgcaagggaggctgctctgaaaggcgaagcagctgtccgagctcaggtccttgaagacccgcatggatgtctaggatctcttcatgtaaagaggctgaagctggacccattccatcgaaccattccataccctgacgtttgcccacagctgaagggtctttactcctattgagcccctgtgctctactctggacacctccttggaactgaatactacggaaatgtccataaccctggaatggacctcccaactgccacttaaggatgtcaagcagccttgcactgaccttgtcctgaattgaggaaaagttttggttccactttcaccatttgaattttaaaccttttggttcctcttgaacacctggcttacggccttaactaccatttaaacctgggaattt

SEQ ID NO: 618 - DNA, 217 bp, Zea mays
  Clone ID: LIB3115-006-Q1-K1-C2
ggatgctgacagtgatgtccatgttaaatactcgagccgacattcgggagaacactgtaaagtgcttcatggaaactgagttacgtgagatatcatcagaattggaagtccatgatgagatatatgagcacatacaaaggatcaaagctactatagttacatctgctaatactggtgatgataccactgtactgaggactgagctaatgcttaatga

SEQ ID NO: 619 - DNA, 307 bp, Zea mays
  Clone ID: LIB3115-006-Q1-K1-C3
cgaacccgtgggcggactcgtgggcactcgtacccatatcacggcgcctgcagtcgacagcggggggaggcggaggctgagcagttgaagagggctgtccgctagttctacatggacacgcgctacgggccatgcctcggcgtgacccgtacctaagctgtgcatccgtgccgccggtgctcggtctcgcaccgtctacagtgctcttcggcttttgcgccgacgaacagctctgcctatgggagggccgcgtttaggctactggcgggatgcacattcattgctcgcgtttagccgacatgctcca

SEQ ID NO: 620 - DNA, 430 bp, Zea mays
  Clone ID: LIB3115-006-Q1-K1-C4
aagtgataaaatctgatgccgagagattggacaaacgtgggctagatgccaaaataagatatagtggtggccaggaccttgatatattacctcaaggagctggatagggccaagcacttgcatatttgcttaaaaggctaagatcatgtggaaaaccgtctaccaatactgttgattgtggtgactctggtaatgatgcataattattcatgatacctggtgtacatggcgcaaacggcagcatgcgctagaaggaaactcgtaaactgctcacacaaaatgcgaatggctgcctattaatattctaatccaatgatagatgtgcagctggtattatacaagctatggcacacttcaagctaggacctagaatttctcctatagacctgcattgtacttatgcaaaggaagccgctttcaaacctacaga

SEQ ID NO: 621 - DNA, 186 bp, Zea mays
  Clone ID: LIB3115-006-Q1-K1-C5
cgaattggagtttcgactaggcgtaccgtgacgcgtggtcagactcgttggcacgtgattgcacatcacggcgcttgcagccgtcagcggggggaggcgtaggcttagcatctttagagggcggtccgcgagttctacatggacacgcgctacgtgccatgcctcggcgttacccgaccccagctg

SEQ ID NO: 622 - DNA, 433 bp, Zea mays
  Clone ID: LIB3115-006-Q1-K1-C6
aagtgataaaatctgttgccgagagattggacaaacgtgggctagatgccaaaataatatatagtggtggccaggaccttgatatattacctcaaggagctggaaagggccaagcacttgcatatttgcttaaaaagctaagttcatgtggaaaaccgcccaacaatactcttgtttgtggtgactctggtaatgatgcagaattattcagcatccctggtgtacatggtgtcatggtcagcaatgcccaagaggaactacttcagtggtacacagaaaatgcgaaggataacccaaagataattcattcaaatgagagatgtgcagctggtattatacaagctattggacacttcaagctaggacctaatatttctcctagagacctgcagtttccttatgcaaaggaagcctctttcaaacctacagatgc

SEQ ID NO: 623 - DNA, 453 bp, Zea mays
  Clone ID: LIB3115-006-Q1-K1-C8
acgaagagataaactctgatgccgagagataggacaaacgtgggctagatgccaaaataatatatagtggtggccaggaccttgatatattacctcaaggagctggaaagggccaagcacttgcatatttgcttaaaaagctaagctcatgtggaaaaccgaccaacaatactcttgtttgtggtgactctggtaatgatgcagaattattcagcatccctggcgtacatggtgtcatggtcagcaatgcccaagaggaactactctagtggtacacagaatatgcgaaggataacccaaagataattcattcaaatgagagatgtgcagctggtattatacaagctattggacacttcaagctaggacctaatatttctcctagagacctgcagtttccttatgcaaaggaagcctctttcaaacctacagatgctgtagtgaaggtctacg

SEQ ID NO: 624 - DNA, 234 bp, Zea mays
  Clone ID: LIB3115-006-Q1-K1-C9
tcggtggacgtcagggactggctcggcacgtcgttcaacatgggcacgccgctcaaggccgggcccgtgccttcgtcccggtgatgcactgcggcggcttgctgtgcatgtccaggatatggttctacttatcccattctcggctaagacttctatagcgctgcgtttaactatccgacaggtttcatcaccatgaaattgtcgctttataatttgccttgctaatcattaaat

SEQ ID NO: 625 - DNA, 362 bp, Zea mays
  Clone ID: LIB3115-006-Q1-K1-D11
gcggccgaggagatgcgaaaggacccgaccctggctgtcctacaacaccggatcgaagccatcgttgaggggccaagaacgacagggaactcatcgacgattacgacgatatcatccgaaagatggacgacggcctcgcctaggccaaggacgaccactagctctacaacgcctacacaatctacaccgaggtactagagtcaaatatcataatgattcgatagacgccatagtcacgcggctacgacttgcataacatgcacacgatggacgcgatgcgcaacgccatcgatggcatgaacggtaaggagctcgacggtcgcaacatcaccgttaacgaggcccagttccgcagaggacgt

SEQ ID NO: 626 - DNA, 120 bp, Zea mays
  Clone ID: LIB3115-006-Q1-K1-D12
cggagcgacccacgcgaccgagcacgcggccgaaaaaaaagaaaacaaaaagaaaaaaaaagaagaacaacaaaaaaaggggggggggcgcaagaggagccaagcgaacaaacgcgagca

SEQ ID NO: 627 - DNA, 361 bp, Zea mays
  Clone ID: LIB3115-006-Q1-K1-D2
atgttatataatcagacgcctcgagattggcttcacggcggctagctgccaaaataagaggggggtatttttcaggaccttggtgtattaccttaaggagctagcatcggccaaacactcgcatacttgcttaaaaagctaagtccatgtggaaaaccgaccaacaatacactcgacagtagagactctggtcatgatgcataattattccacatacctgcagtacatgccgtcatggatagcaattcccaaatggaactactccagtggcacacctaaaatgccaacgataacccaaacataattcattcatatgagatatcgtcatctggtattatacaagctattggacactttaatc

SEQ ID NO: 628 - DNA, 276 bp, Zea mays
  Clone ID: LIB3115-006-Q1-K1-D4
gtggccttaagccttgaggcttgaacgaacaacgtacgtccatgtgcttatagtggcacagttatgtgtgtaactacggatcgtggaacggcctaatgtatttcggttgcctcagatcgatctatatgtgcgtatacattatgtactgaaaagtgtgtagcgtctggttaatgtatgagcagtgtgtatgtgaccgggacccggtgtgtagttgctattactaccatatccggtgaatgatcaaaccttttggtgtattaaaactagatgttcatt

SEQ ID NO: 629 - DNA, 214 bp, Zea mays
  Clone ID: LIB3115-006-Q1-K1-D6
tcgaagcgacaacgaccgacgcccgtcgacgggattatcgtggcccagacgcctatataatatcggatcgtggccaggaccaagggatatcacctgaaggagatggatacgtacgagcacatgcatatctgcctaataagctcagtgcacccggaaaacacgaccaacattactgcagatcgcggagactcacgggaatgaagcagtattatac

SEQ ID NO: 630 - DNA, 444 bp, Zea mays
  unsure at all n locations
  Clone ID: LIB3115-006-Q1-K1-D7
agctgatgaacatgtacgacaccaacttcatgacgagcaagaccatgagcagtagtgacagcgtcaccatcatggagaggccgaacgcgatgccccagaggatccagatggacgagggcttcttcggacagggcaacggagtcttcgacgacgtcaatagcatgatgcagcaacaacagcagcaggcaccacccgtggtgcagcagcagcagcagcagcagttcttcatccgcgacgacacgccattcatgagccagatgggcgacatcaccagcacggcggagttcaggttcggctctggtttcaacatgtctagcaccgccgccgctgattacccaggcgcggcgcagaagaacgacggggccaattggttctactgaagaataaaacttgtagggctcctcgttataagcttcggattcctncatggctctcccaagttgt

SEQ ID NO: 631 - DNA, 276 bp, Zea mays
  Clone ID: LIB3115-006-Q1-K1-D8
gtggcgtcaagccttgaggcttgaacgaacaacgtacgtccatgtgcttatagtggcacagttatgtgtgtaactaccgatcgtggaacggcctaatgtatttcggttgcctcagatcgatctatatgtgcgtatacattatgtactgaaaagtgtgtagcgtctggttaatgtatgagcagtgtgtatgtgaccgggacccggtgtgtagttgctattactaccatatccggtgaatgatcaaaccttttggtgtattaaaactagatgttcatt

SEQ ID NO: 632 - DNA, 224 bp, Zea mays
  Clone ID: LIB3115-006-Q1-K1-D9
tcgaaaaaaaaaaacttacaataaaaaaaaaaaaaatataataaaaaatctatatttccacaaattaggggggtctctctaaaatatgcaggctatctaatctcattcattctattctttatcttttttaatatttactcctacatttcaattcactcactttctctctacaactacttttctgctaaaactctaactatacccaacttactctcctttcttca

SEQ ID NO: 633 - DNA, 426 bp, Zea mays
  Clone ID: LIB3115-006-Q1-K1-E1
tggattgttaccaatgatccgaatggtgtatttcagaggactaaggtagtgcacagcatcaagagctaccttgatatctcctctgatcctgcaacatttgtccagggagcaataccaaaactcgtggagaacacaaaggaggaattcttcgaaaaaactatcgaaattctaaaacgatgtgtagatatatgctgtgaaaagctgaagggcatcaatgcaatcacgtgcccaagcaaaccagagggatccatgtttgtaatggtgaaactggatctggcccggcctgaaggccttaaaaaataccatgaactcttgttgccgcttgccaaaggaggattaagtggtggtcctgccagaatgtcctgccgaatccaaggatggcctccgattaaccttggcaatggaccaatctcttttgaaaaaggg

SEQ ID NO: 634 - DNA, 255 bp, Zea mays
  Clone ID: LIB3115-006-Q1-K1-E10
gagcacaagtaatctagagttgccacccagagttcttttgagctgacaaagcgtagatatgggtcctatcaaatgttgcttacaggtcacacaaatgcaaaatatttgtggagacgagtgcccattaacctcatacaaagtatctgtatgacaaaagtcccactactcactggacgcggaaatggcacttgacttcgttaataatctaaaaagattggcagcaattaacaaatagttcttttaggggaaataatt

SEQ ID NO: 635 - DNA, 371 bp, Zea mays
  Clone ID: LIB3115-006-Q1-K1-E11
gacaagaacaagcaggcgaaaatggaatcatccctcacttgatgaaatttgtcatgtcagactggcctctgcggcagtatgccctgcctttgctgtgtgatatggctcatgcttttcgcaactctagagagcacatgatggttcatggaagactagatgtgtacttaaatctgctggaagatgatgcatgggcatgcacggcattagattctattggtgtatggttggctcatgatgatgatcacaggaaagtggaacaagcactgttgaaaaaagaagccattcagaaattagtgaaagtctttcaaaattgcccagaacagtattttgggcatatattggacgctttcttgaaaataatcacgaaatct

SEQ ID NO: 636 - DNA, 436 bp, Zea mays
  Clone ID: LIB3115-006-Q1-K1-E2
tggattggtaccaatgatccgaatggtgtatttcagaggactaaggtagtgcacagcatcaagagctaccttgatatctcctctgatcctgcaacatttgtacagggagcaataccaaaactcgcggagaacacagaggaggaattcttcgaaaaaactatcgaaattctaaaacgatgtgtagatatatgctgtgaaaagctgaagggcatcaatgcaatcacgtgcccaagcaaaccagagggatccatgtttgtaatggtgaaactggatctgtcctgcctggagggcatcaaagatgacatggacttctgctgccggctggcaaaggaagaattagttgatgttctgccaggatgtgctgtcggatacaaggattggcttcgcatcaactttgcgattgatccatcttctctggaagaggggcttgacaggc

SEQ ID NO: 637 - DNA, 197 bp, Zea mays
  Clone ID: LIB3115-006-Q1-K1-E3
tacgagatcgttgccgttcaggacgcctgcgcgttttagctgcgcacgtaccggcagcgcggcgggcgcacgatacccggccggccagcgatagagcgcgtactgatacgggccgcggcgcacacgtgaaccgtgcagcaacggttcgtaatagccggtgacgagcccgtcgagcgtgccgtcggtgttcgcgagct

SEQ ID NO: 638 - DNA, 244 bp, Zea mays
  Clone ID: LIB3115-003-Q1-K1-D1
ggcatgttgaagatttaggagcgcagatacccatgctcggaagccacagcctcttgtaaatatgtagatgtgcccgggcatggtgtttctgagtagcagcaaagagatctaccatgtataggagtttctccttgtaaataatagtagcacgccaggagactccatcccaggttccgtactgcttgcgcgaccagatgctgtaaactagccagatacttgaagaccaatataaatggatatgtct

SEQ ID NO: 639 - DNA, 438 bp, Zea mays
  Clone ID: LIB3115-001-Q1-K1-A10
gcgcagagtttccacattgtagtaccatggaccgcggcatcaagaggagcgtcgcggcagcgggcggcggcccgccaccgcccaaggtgtaccgcgtggagcccagggacttccgggagctcgtgcagaggctcacgggcgccggcacgcccgccgccgccgccgcggcgctggtgccggcgcaccggagggcgacgctgacgccggccatggccgcggagagcaggcgcgcacaggccgcggcggccgtgcccgtggcggccggggcagagcagttcgactacgcggcgtcatggttctccgcgccgctgctgagccccgggtacggcgcgccgggcttcggaagcggcggaggcggccaccagcaccaggggaacactggctctctgttttagggccctaggtagaaacagagtccctgtatagctccgtcgtcac

SEQ ID NO: 640 - DNA, 437 bp, Zea mays
  Clone ID: LIB3115-001-Q1-K1-A11
aattcccggaacgaccgcgatgcgacccacgcacgcgtggacgcattgtcttagtacatcctgcatctttctattatcgaatcaattaacggccaaagtctctcgtaagggagagagaaaaaaaacaagaatacgtttctacaatcctccgtctccgatcttcacaccaaccccaatccagcagacccaaaggaagccaggaacccagccaatcaaatcgcccccggtcgatccaggtgggtagcaagcgagatccaaatcacagcgcgatgttgaggcgctcggcgtccgtgccgccgagcccgagccacgaggaggccggcttcgccttctacgcctcctcggatggggacggacgggcgtagggggcgcgctccacgaggcggtccttgcgcttggccaggaaccgctgcagcgacgccttacgggcgatgggc

SEQ ID NO: 641 - DNA, 410 bp, Zea mays
  Clone ID: LIB3115-001-Q1-K1-A12
gaacgaccggacgcgacccacgcgtgcgtccacgcgttcgagctgaaggacttcaatgtctatagccataggaagggaagaaggggcgagggacatagatagcgcgggtgtgtcgcatcggaaaaaatcatttggtctggaactacgtagcgtaatcaggtcaatcagatcattttcttgcttctttgtgtctgattatgcttacccagtggtaaatccgtccattgtatcggatttaatttaaaaattctgtattacagacgtgtcgtgaaatagctgatgacgcaactggaagttagtggagactggtgaccaaagaacatatgctctgcttatgatctacaacttaggttctgacatgacaatatatactatttatttgcaacggatgagatgctcctatttcattt

SEQ ID NO: 642 - DNA, 464 bp, Zea mays
  unsure at all n locations
  Clone ID: LIB3115-001-Q1-K1-A3
ccgacatctactccattccgagggttcttgccccgatgccgtagaagtacgcgaggtgcacgaagaaaaactttggccgttaccacgtgagcgagccaccagttgagcatttgcgcgatccactgtacaagacagagagggagatcatgaaggttttcttgaccaagcactacagaaacaggcgcgctgatgacccagatttttttcttgattttgaggagatctatgttattgactcgagaacaaggtcaatcacaagagctaaagttatggttagtgttcctgaaggaaagaaaagagaccggcggaacgacctgctactgatccgtgacgggggtgagtctttcagaatcatcgacaagactaaaagggacgacgcaagcactatcatacanagagaggagtgggccaagtcgagacaagacgtggagaagcatttcaggaagctcagagactttgactac

SEQ ID NO: 643 - DNA, 475 bp, Zea mays
  unsure at all n locations
  Clone ID: LIB3115-001-Q1-K1-A4
ccgtgctgttctgctggtggatccggtgactattgaggctgacctgaaagttaaaggccgtactgaatctgaggataaacacttgagctttctagcagtgccattcttggtcatgatcccgctcgagtcatgcctgcgtacaagagatttcaccagcaagcttagcacgctgaggtttgctctcgcaattgttgttctctcagtggaggctacaattagtgtgcgagttcgtggtgggtcatggcctgatggtctccgtgcccagtttgctgcccacacggtgagtataggtcgtgaggaagttgtcttgcttgattctggggacgataaactgcctgtttctgatgatggcactatcaaacttggtcgtcgagttgcatctggtgaagtgagtggngagctgaacgtttctgtcaaggcatggcaagggtggtgaagtctttacgcacagagagaggggtttcaaacctaaaga

SEQ ID NO: 644 - DNA, 442 bp, Zea mays
  Clone ID: LIB3115-001-Q1-K1-A5
tcggaagagatgacgtgggggtggttgaggagatgacaggggctactactgaaagctatgatggctttttggcctctctcccagagaatgactgccgatatgcgctgtatgatcgtgattttgttactggggagaatgtgcataatagcaagattttcttcattgcctggtccccatcgacatcccgcatacgtgctaagatgctgtactccacgtcgaaggaccgcatcaagtacgagcttgacgggttccactacgaaatccaggcgaccgacccatcggaggtggacatcgaggttctccgggagcgggctcactgaagctggttctccttttgaagggacctgtggagggccgagaaccttcagccagatgcagattcaattatcaacgttgaagctcccgccgaggtgtttgttgataagttcctgtaggcatatca

SEQ ID NO: 645 - DNA, 370 bp, Zea mays
  Clone ID: LIB3115-001-Q1-K1-A6
ccgcaggtgaccagagctccaatggacgtgaccggcgatcggcctcaggctgggcgcttcctgggaccgagcaaggccgtgatccgaggcgcaacgggaagccaaaatcacgggtcatccctatctcctgaagagcatggacggagtagatatatagagtagataaataaacagctggtttgtactactatgcaaggtttaggttcaagatcgtttcaaggaaacgacctgaggtccaggtaaccggagtccgcccagcacctcgcgtgctattgtctgattctgtagctgtacagtgctctgctaccttattatccgtgatgtgaaacaatttgtgtcgtccagtcttgctgtaaaatcatcatcgcgt

SEQ ID NO: 646 - DNA, 337 bp, Zea mays
  Clone ID: LIB3115-001-Q1-K1-A9
gcgcggacgcgtgggcggacgcctgcttggacgctagtgctcgaccgagaaacctaagcgctcagaaaacttgttctacgattcaggggcatcgaactactttatggttttgctagagttcattctggttataattgtagaggaacgaaacgatgagagaacactgacttttccgtttctctgcaattcatgtaatatgatctcggaagcaataacatttcatcttctatagcttcgagcatcacagatatggtcaaatgacactgatctgcattacatgttattgtgaaacatttgcttttgaaaatgccaataaaaagaatcatactgtttaatc

SEQ ID NO: 647 - DNA, 340 bp, Zea mays
  unsure at all n locations
  Clone ID: LIB3115-001-Q1-K1-B11
accggtcttgaatgaccgactcgatccacgcatgcctncacgcacgcgtcgaaaaaaatttatcattcttaaagaacttgtaccagaactggctcaaagaacatattgcctgtgtgaatggattgctgcttttacacaatcacagcttacttacccgtggctccatccaaacaatcccatatagagcgtatttaaactcaatcatgcgctcgggttttgataatgcctgtatgtgcacaacatattcatggccctgttaacaaacacgtcccaattatctgaactcggaattatttacacctcggcaaaaaccataaccaaatcgaccttaaaagactgg

SEQ ID NO: 648 - DNA, 440 bp, Zea mays
  Clone ID: LIB3115-001-Q1-K1-B12
cggacgcgtgggaaaatgccccaaacataccggcaaaaaactttcatgcattgacgaggttggatgaaaatagagcaaagtgccagctggcactaaaagcaggtgtattttatgacaaagtatcaaacgtgactatttgggggaaccattcgacgactcaggttcctgatttcttgaatgccaaaattgatggaagaccagtgaaagaagtcattaaggataccaagtggttagaggaagagttcaccctcacagttcaaaagcgtggaggtgtgctcatccaaaaatggggcagatcatcagctgcatcgaccgctgtttcgatagtggatgctattagatccctcgtaactcctaccccagaaagtgactggttttctacaggggtttatacgactggaaatccttatggcatagcagaggatatcgtgttcagcatg

SEQ ID NO: 649 - DNA, 470 bp, Zea mays
  Clone ID: LIB3115-001-Q1-K1-B2
cccacgcgtccgagtggtgccaacggtggtgaggtcattgtgagtggaaagctcagggctcagagagccaagtccatgaagttcaaggatggctacatgatctcatctggtcagccagtgaatgagtacatcgactcagctgtgagacacgtcctcctcagacagggtgttctgggtatcaaggtgaagatcatgcttgactgggacccgaagggcaaggttggcccgatcacccctcttccggacctggtgaccatccataccccgaaggaggaggacgagctgcgccctcctgtcttggcagctgaggtctaaggtcccaacagcgtcctcgaaatggcagtttgatctgggcctagctaggtttgtatcttatgataagggcagtgctaagacagttcgttccgtgtcacttctgtttaaaattaagttttgccgaaacaagctatatgtaccggatgaaagtgtgg

SEQ ID NO: 650 - DNA, 444 bp, Zea mays
  Clone ID: LIB3115-001-Q1-K1-B3
gctacggtggttctggtgggtatgggggtgcttctagaggaggccctggaagacattacatgggtcattaggatgaggataactattttactgtggccagaatgccagatgattctacatgttcctgcttggcacttataaacttgctgttttaagctgtttctggctactcaattatggctgtggtcaaagttttcataggaactttggttccctccacctatcatttcaaaacgaaattaccgtttagattttcaaaagggcatcttatggctgcaagactattgtagaagacttcatgtggatctaaagcattgtggtatttaatgatattactgtttttgtacggttttcaaaaggccaaattaaggcttgcaaaactattgtaaaagactttctgtgggtttaaagcactgagctatttaatcacaacgggttttgttc

SEQ ID NO: 651 - DNA, 478 bp, Zea mays
  unsure at all n locations
  Clone ID: LIB3115-001-Q1-K1-B4
cccacgcgtccgaggtgctgctggagcgcaggcgacggcgggctcgtcttcgagcccagccagttcaccgtcaaggccggcgacaccatcacattcaagaacaacgccggcttcccgcacaacgtcgtcttcgacgaagacgaggtgccgagcggcgtcgacgccaccaagatctcgcaggaggagtacctcaacgcgccaggcgagacctactccgtcaccctcaccgtgccgggaacctacggcttctactgcgagccgcatcaaggagccggaatggtcggcaagatcaccgtcaactaattaagctagctatcgatcgatatccattcatgtattagctgttgcttcctgctntgtactccgccgatctgtccatctctacatgttttcgtcttcacacaacaacctctgctacgactacgtatatatgcatgctactagctgattgattntaacgcgaccaggccgaccccga

SEQ ID NO: 652 - DNA, 455 bp, Zea mays
  Clone ID: LIB3115-001-Q1-K1-B5
caagctttagcgagaatctagctgtggagagaatctgagtatcattaggattacgtgcgaaggaagataaagttgtccatggggctcaggatctataaagtgacggattactactattgcgacgaatcaaccaattatatgttgattttgaatggtttttacccaaacgaattttatagaagctggctgaaaagctgagtgtttggcagtccgcagcagcttttggtggccaaaagttgcgaaaagccgaaacaaacaggggctaagccttatttatgatctatgaggactagacgagaatactttgacgtcctacgagacacgtaagacaacgaagggaaaacaggaggacatgctacgaaggcatgtatgagtatgacgatgacacgaaaacaccagggcaggctacgaagaccattagggcatgtacaatggtgtttaatgtgggagctttt

SEQ ID NO: 653 - DNA, 453 bp, Zea mays
  unsure at all n locations
  Clone ID: LIB3115-001-Q1-K1-B7
cccacgcgtgcggcggcgggcactgcaggcgctcgaggccggcgagggggcgcgctgcggggccggcggccacgggcacggcgaggaggcgcgcgtgcttctgcagcagcccgccgccgccgccgccccggcgcccgtggaggtcctggagctgcgcgtgtcggaggtgggcgaccgcgtgctggtggtgaacgtgacgtgcagcaagggccgcgacgccatggcccgcgtgtgccgcgccgtcgaggagctccggctccgcgtcatcaccgccagcgtcacctacgtcgtcggctgcctcatgcacaccatcttcgtcgaggtacgtcgtcggcaggtggattcggaccagacgaatcgtatccagatcaagcacatgatcgaggccgctctcgcccagctagatgatgcctncgcgagcccgccgagcgtgatgagctactattagaatcg

SEQ ID NO: 654 - DNA, 464 bp, Zea mays
  Clone ID: LIB3115-001-Q1-K1-B8
cccacgcgtccgcccacgcgtccgcccacgcgtccgcccacgcgtccggcaccctccggggcatgaccaaggggcgagcgtcctacacgatgcagctcgccaagtttgacgtcgtcccacagcacatccagaaccagatctccgtggcaaaaacagaggaagctgctgcttagttttggttttccgtagatatatccatacagcaacaggagagcaggttgataggaaggacatcaaggtgtatgtagctttgtagtgtaaatctcttaaggcttgttcggatgattggaggggattgatatggattgagagagattttaatttactatggattgaaacttcctcaattcatatggattggactagaaccgaacatggtctaagggagcattatttgccattgattttgcacctgataataatggcctttgttgagttttcacaatgacaggacagttgaatta

SEQ ID NO: 655 - DNA, 414 bp, Zea mays
  unsure at all n locations
  Clone ID: LIB3115-001-Q1-K1-B9
taccggtctcggaatgaccgatcgtncgcgccaagtgctcgacgtgtacgaggcgcacctggcccttaacaagtacctcgccggggacgagttcacgctcgccgacgccaaccacgcgtcctacctgctctacctcagcaagacccccaaggccgggctcgtcgccgcccgcccccacgtcaaggcctggtgggaggccatcgccgcccgccccgcgttccagaagaccgtcgccgccatccccttgcccccgccgtcctcctcctcggcttgacctcgccttgcgctgcctgggtcgcggatgcgtcggagccccgagtcgaataaaagaggccgcatcctgtcttgcatttgctgctgcgccatgtgctataacagcctgtgtaataaacactgttgctttcgtgtgtgttc

SEQ ID NO: 656 - DNA, 432 bp, Zea mays
  Clone ID: LIB3115-001-Q1-K1-C12
cggcggtcctccgtccgctttgtgccatccgagattgcaaggatggagaaattggctgcagatagaaaagaccaagtctttgataacaagttctgccagaagcttgcagaagaatttaatcgttctgttggccgtgctggaagtaaagcgttacaagctacacaggttcaaggatggttccttaataagtttccagcatcagccactaaacctacttgtgtgcccactgcttcccaagaaaagacttcagcctcagaaataaatgtatcagtttctgaaaaaaagatctgcatcgttcgaagagaaacttttccctcttgatacaggtgtttcaaataatgaggatgaggtttctcctgtttttccattagaaactaaagatatgattcctgaacttgaagacctggagtttgaggccaagtctacaaagga

SEQ ID NO: 657 - DNA, 466 bp, Zea mays
  Clone ID: LIB3115-001-Q1-K1-C3
ttctgattttttgccagtgagatgagtgcactagtttgctgctggcaccaaaggaagatctaatggaacgtggaagatgaagatcttgcttgacaaatgttaaaacaccaggaacgagcaattgacttttggcaaaagcattggatatgttgaaccactcacccaatgctaattgcttcctgcattggcgttttaaagaccgtatgcttgaagttatgattaaggctggacaagctatcaagaaaggagacgagatgacgatagattatatgagtggcgtcaacagcaaatttatggaaagatatgggttctcatcaccaacgaatccttgggagctcataaatttctcgagtcctgcaacaattcacatggattccttcttatcggtcttcaatatcgctggcttgcatgatgagctggaccacaattctgcattgacctcagtagtagaaaccgactttgtgga

SEQ ID NO: 658 - DNA, 460 bp, Zea mays
  unsure at all n locations
  Clone ID: LIB3115-001-Q1-K1-C6
gaattcttaattcatgagttgtagggagggacttatgtcaccacaaacagaaactaaagcaagtgttggatttaaagctggtgttaaggattataaattgacttactacaccccggagtacgaaaccaaggatactgatatcttggcagcattccgagtaactcctcagctcggggttccgcctgaagaagcaggagctgcagtagctgcggaatcttctactggtacatggacaactgtttggactgatggacttaccagtcttgatcgttacaaaggacgatgctatcacatcgagcccgttcctggggacccagatcaatatatctgttatgtagcttatccattagacctatttgaagagggttctgttactaacatgtntacttccattgtgggtaacgtatttggtttcaaagccttacgcgctctacgtttggaggatctacgaattccccct

SEQ ID NO: 659 - DNA, 376 bp, Zea mays
  Clone ID: LIB3115-001-Q1-K1-C7
cggacgcgtcggcggcagtgagttccgcttctcggatcagccggcgacagctggtgctgctgctgcagctgatccgtttgcttctgcgggtgctgcggctgatgatgacgatctatacagctagttgggttgttcaatatcagtcccgtcactcatctgtttaaaactgatcatactaaacacgcttgtcatgcaatgatatttatttgccgtacatttggacgtcgctgagatgatgcactctcggccttcggttaacttttcatgccatattctccatgtcattgtctgggccatgacattttattaattattgtgaaatctatcatctctcaaaaaaaaaaattataaataatattattatatataatttatt

SEQ ID NO: 660 - DNA, 428 bp, Zea mays
  Clone ID: LIB3115-001-Q1-K1-C8
cggacgcgtgggctaacaagggaggactcgttcacccgcggacgtcggtagaggacctggacgagctgtccacgctgctgcaggtgcccatggtcgccggcaccgtcaacaggggcagcgaggtggtctccgccggcatggccgtcaatgactggacggccttctgcggcgcggacaccacggcgaccgaggtgtcggtcatcgagagcgtcttcaggctgagggacccccgccctgtggcgctgggttcagacgtcaaggactacacggttcaggatttctttacgagttgagctgagttttgctgcaggagagtagagagaccagtcgcattggccgccgaattgcctgcatctgcattgctggctaccagcaatttgtatcatgagaacctattattatcagacgtaaaatgttttttctttcct

SEQ ID NO: 661 - DNA, 290 bp, Zea mays
  Clone ID: LIB3115-001-Q1-K1-D10
cgttgactacgtgttcgtcgctgctcttgttgtgatactggatgagattcatagggaacggtgcgactgaggaacataccacaccacaccaccaagcttctccaccgttgctcgaccatgctatgctatgtatcatcatcacaggttattcttgtcaattatatactttccatgtatgtatatgtaagtattaatgagttaatacactatcaaaaaaaaaaacaaatactcaaaaaaatataagcatgaacgtagataaacaaagaacaaagaagtaacatgggaataag

SEQ ID NO: 662 - DNA, 432 bp, Zea mays
  Clone ID: LIB3115-001-Q1-K1-D11
cccacgcgtccgctagcgcgtgccggaccttttcaccggcaagcagctcgtcggcaccggggggcccgatagctttggcgggcgcttactcgtgcccagctaccgtggctactccttgctcgaccccaagggccacggcggctccaccggatacgacaacgccgtcgcgctccatgccgggggcagaagtgacgaggaggagctccagaaggagaacatcaagaacgccgactactacaccggcaacatcacgttgagcgtcaccaagagcaacccggagaccggcgaggtcatcggcgtcttcgagagcgtgcagacgtccgacaccgacctcggggccaaggcgcccaaggatgtcaagatccagcgggtctggtacgctcagctcgagtgatacgagtgtctaactgctaagtgtccgaccgacgtcat

SEQ ID NO: 663 - DNA, 168 bp, Zea mays
  Clone ID: LIB3115-001-Q1-K1-D12
aacttgcccaaaattttgagtcgaattttaatcactctcaggtcagactgaattttccaaattcgtattcgtgcgagtgatgaatttttaaataattaccggatacaccgattttcggaacaacgatgttccgaacatcacgaaaatttaggaagagtccggatagat

SEQ ID NO: 664 - DNA, 407 bp, Zea mays
  Clone ID: LIB3115-001-Q1-K1-D4
tccggtcgaccacgcgtccggcctatgttgttctgaagcataatcgataatgcaaaatgcttttcttgatgaaatatatgggtactactcggggagaagtttcgaatggattaagctctactccttgccagattaccttgctaaggtcaatatatgtataatattgtaggaatcaatggcattcttctacagcttgtagacactgctgattatagtgtcttacaggttgacgaaagtatggaaatggaaaccaagatgctggcttactatctggaaatttcaagtggtgatagctacccgctctgtttgcaggctgttaatgctcctttgatggaaacatatgtcagctatgtgacaaagaaacaaatcggtggtcaactgatgcttgaaacttacaagattgttga

SEQ ID NO: 665 - DNA, 458 bp, Zea mays
  Clone ID: LIB3115-001-Q1-K1-D5
tgtgaagacatgggctggcaagaccatcaccttggaggtggagagctctgacaccattgacgatgtgaaggccaagatccaggacaaggagggcattcccccagaccagcagcgtctgatctttgcgggcaagcagctggaggatggccgcactctcgcggactacaacatccagaaggagagcacccttcaccttgttctccgcctcagaggtggtatgcagatctttgtaaagaccctgactggaaaaaccataaccctggaggttgagagctcggacaccatcgacaatgtgaaggcgaagatccaggacaaggagggcatccccccggaccagcagcgtctgatcttcgccggcaaacagctggaggatggccgcaccctagcagactacaacatccaaaaggagagcaccctccaccttgtgctccgtctccgtggtggtcagtaagtcatgg

SEQ ID NO: 666 - DNA, 327 bp, Zea mays
  Clone ID: LIB3115-001-Q1-K1-D6
cccacgcgtccggcaagctagcttattggcgcggtgggaataaattaaaaaggtactcagtgccccacgtatttgacgtatgtctgtaaataagtggcacattcgagcgctcttcgctctgccattgaggtggatcgaagctgccacatattttctccgcaggacatcggcacgaattttgtcttagcaaaccagttaattttgtactctttagattctttaattggttccatgctctctttggtacttttcatgtcagtttgctttgcaaacattatcagcgtgcccttgtagatttcgtaatggttatatgtatatgccctattg

SEQ ID NO: 667 - DNA, 247 bp, Zea mays
  Clone ID: LIB3115-001-Q1-K1-D7
atcacgagcgagagcaggacggtgtcttcattgagctggaccacgcctaatgactgtgacaggtacatcagtgtacgccaagctctttacgactaggtgccacaaggactacatcataatctatagagagcgaagagctggacaagctttctatggtgctgacgctatcacgacagactcacctgagtagctgtggagctatcacgagcatgcattgattgcgaccggactgacatggtatgaatag

SEQ ID NO: 668 - DNA, 360 bp, Zea mays
  Clone ID: LIB3115-001-Q1-K1-D9
aacgacccactcgtccgagaccaaacatattcattcaataatctcagaagacacatttttaacgggatcaaacggattggatcgaaggcgctcctatcctgtggccaggtctcggtgctaatcgcgtgtatgttcagtggtgggattttgcgatctgacacggtttctgatcttggcgattacatgctcccacttgccgattcaaaccataaatgatctgctgatgcgacctccgccgccagtgactctccacctgatgtctgcagaccgaccaggcaatcgagcctactttcaagccggtgccggcatcatgtaagctgactgcgcgctcaccctggaatcacaaggaccaggcttcgg

SEQ ID NO: 669 - DNA, 405 bp, Zea mays
  unsure at all n locations
  Clone ID: LIB3115-001-Q1-K1-E1
gngtgggcggagcatatcagcgtggtgatcaagggcgagggcgagaaggaggatagcgaggacgaggcctggccgcctccgagatacagcggtcgcatcgagctcgcgccagaggtttacaggatggacaagatcaaggcggagatgaagaacggcgtgctcaaggtggtcgtgccgaaggtgaaggagcagcagcgcaaggacgtgttccaagtcaacgtcgagtagatgtttccaaatagaagcaagtgccggtacgggatggaggattggaggggcactgccaaactaggattcctctctctcaatctgatctggattctggaatcagatttctcttctttcatttttctcgtctatnctctatcaatatgaaataagcaacgtcgcttcagttttcgtgtc

SEQ ID NO: 670 - DNA, 406 bp, Zea mays
  Clone ID: LIB3115-001-Q1-K1-E10
cccacccgccacgaccaccagaccactcgcttccccgaagcttcagctccgcgcttctctgggcgagcgagccagcctccagcaagagcgagcgagcgagcgagcgagggcaacgggcatggcggcggctgtgtccttctcccgggtgcgagctctcccgacgtggtccagctccgtgtccggcgacgacgaccaccgctcctactccgcggcgctggccatgtcggtgtcggtgcggccccggtgtcgcgcgcggtcgccggcgcggatgatgggcaacgtgaacgccggcaaggggctgttcgcgccgctcgtggtggtggcgcgcaacatcatcggccgcaagcgcttcaaccagctcaaggggaaagcaatcgcgctgcactcgcaggtcattaccgagttc

SEQ ID NO: 671 - DNA, 439 bp, Zea mays
  unsure at all n locations
  Clone ID: LIB3115-001-Q1-K1-E11
aaatctttaagatgcctaaatagttcaaaagaagatatatagctttgtagcattatagctacggtaatgtacttgaactgtataacgtggagatattgtatgtgaccatgtcatgtttggtaccaaatatagccacaatgaaatgtctttttaaaatggttgttttattttgatgcttatattattgaatcaagaagggtagacctcgtgcagtggtgagagctgtctcactgagtcaccatgtcgcgggctcgaagcagcctctccacatctgcaagggaaggcttgcctcggtttatcctttttccagaacctactcatgtggggagcctctgggtctgtcctttcttttatattattgaatcagaatcttgntatgtttgacaaatattcttcttgttcagatgatgtgggctgctgattttgatgaagaagcagt

SEQ ID NO: 672 - DNA, 464 bp, Zea mays
  Clone ID: LIB3115-001-Q1-K1-E3
ctcctcccgcggtcagggtaacgcggcgtgtgtcccgtcgcatactcgctcacacccatggccgcaccgccggccgcctcgctagtggcacgcgccgacctcccgccgcgccttcgcccaaccaccgcttctccccttggccccgccgtcctcggtcccagcagccgccgccggtacctccgtctccgccgctcgccatcgctggcggagactgccgcggcggcggcgagctccccatccgtgccttcctcgtttccggtgcccgggccaggtatcggcgatgccctcggcgacgtcgaaatctactccgcggccaccggcgagcccgtcctgttcagagacctgtgggaccaggacgagggaatgtctggtggtgcgctgctaaggcatttcgggtgcccatgctgctgggagttggcctctgatctgagggacacaaaggagagatttgaatctgctggagt

SEQ ID NO: 673 - DNA, 280 bp, Zea mays
  Clone ID: LIB3115-001-Q1-K1-E4
cccacgcgtccgggtgggcgccggcatgagcgctcctgtccgtggtcgaccgcgtggcgctggagccggtcgggagctgctggcgctgccgtcactgcatgggcggccggtacaacctgtgcgaggacatgaagttcttcgccaccccggcggtgcacggctcgctggcgaaccaggtggtgcacccggccgacctgtgcttcaagctccccgacggggtgagcctggaggagggcgccatgtgcgagctcgtgagcgtgggcttgcacgcgtgccgtcg

SEQ ID NO: 674 - DNA, 448 bp, Zea mays
  Clone ID: LIB3115-001-Q1-K1-E5
cgggtcgtgttttttttcatgctcaaaaaggtgtttctcatcagcttttggtaaagtcattagtttgagttcatacattaactatcctcatacgggcaacacttacaataatcaaatcccgtatgaagatcacttctttttttcctttaagccaaggtacagatttgcccgtccaatttgcatttcctcacctgggttacgcttacgcagtttccgttgcagcaaagactcgtctccactcgattgttcactcacagatagagtatgaaactcccagtcatgtctcaaagatgcccttcacatagaccatccccttctcgctgaacttgaggtccttcctcatctgctcaacctggacgtcatcgccctgcacaaggatctcggacacgttcccgtcatcggataggatcatcttgaccttgatctcttctttccttgacgctttcgt

SEQ ID NO: 675 - DNA, 469 bp, Zea mays
  Clone ID: LIB3115-001-Q1-K1-E6
cgcacacgttcgtcagaggagtacaagtgctggtaccgtcaccatgttccagaagtgctcaggcgcttctatagcttcccttaatgcctagcacctctaaccaacggtctctttggaatgtgagaacccacttcttcaaccctacaagatccaacatgcaatcgcagctgtcatataacctcaatcacccttgatacttcaacaatcattagccgtattacagcagctacctttggtgcatgtattggcacacaacatacaggcacaacagctactacaacacgtgctatcaaaccttgctgcctactctcagcaacagcagtatcttgcatttgactatctagctgtattgaactctgctactatttgcaacatcatcaactaccattcaaccagcttcctgttgactacccccagcaataacttccattcaaacaactggcagcattgaactctactgcttatttac

SEQ ID NO: 676 - DNA, 461 bp, Zea mays
  Clone ID: LIB3115-001-Q1-K1-E7
gatctggcagatgagcccggctaatgctgatgacaatgaggtgaccaatgcaaatggcaagacaactgctggggtaaacgaagttacaaccaagatcgaaggcttccacattcccaaggaggggcagaccgaggggtaggatctcatgtgttttgtggtgcttgtggttcttattgcgaggagattgccatcagagctgcagtggtcattcagtttccctctgcggagtcatcatgtctgcgatccaagggtatcctggcttcatgagtcatcatccactggggaaaaacaagcaagcaaatggtggtgggtttttggatggggccctcgctttgatagaacatagcaattgtagcgtcaaaaataaacaagagttgggtagtttaggtaccgtgtttgcgttcattaaagtgaagtattctgtatcaccacaggtaaccttgattgtggtgactagtttt

SEQ ID NO: 677 - DNA, 471 bp, Zea mays
  unsure at all n locations
  Clone ID: LIB3115-001-Q1-K1-E8
ggctcaatctcgtcatcaaacaccatacctcattttaagtggcaatgcaaaaacaggtcagacaagtgatagcggcggctatgctaccttggagacagagcaacctgggagcctaacgcccatgcttggggacaaaaaggtcgagcattttttgggcatcaaacgaagtgccaagcctggaagcttacctcctccagtcccaaagaaaccgaagaactgaacctggtggtagcactcagccaacgaagcaggctacaacgcatttactgtgagcagcaatcagcccacaagcttccacggctcaaccccccgccgccgcactagaaatgcaatatcctctgtatttcttctaagctgattacactaacattctggcatgttcgatggggttttgtaattcagtgatatacgtgtgcatccttgatctgccttgaacatgtaagtgatggaactaaatatngttctaacgac

SEQ ID NO: 678 - DNA, 407 bp, Zea mays
  Clone ID: LIB3115-001-Q1-K1-E9
accacgcgtccgcaattggccgcactgaaccccgctgcttatttgcagcagcaaatactacgaccatttagccagctagctgcagcaagccgtgcttccttcttgacacagcaacagttgctgcctttctaccagcagtttgcggctaaccccgcaaccctcttacaactacaacaattgttgccctttgtccaacttgctttgacaaacccagcagcctcctaccaacaacacatcattggtggtgccctcttttagattgcttattagttgtaattcaataataaagttttttggatgatgtatgtggccaaccagaaataagaagttacatttccagattctaatgtgaaaaaaaaaaaaaaaaaataaaaaaatataataaaattaaataatttaatttaatt

SEQ ID NO: 679 - DNA, 439 bp, Zea mays
  unsure at all n locations
  Clone ID: LIB3115-001-Q1-K1-F10
gcttatcagaagaacagactgttagcacgatactgagaccaagaatggctggaaacaaaatgatgggaatgataacagagccatataggctgacacggcgatgtgaagtgactgcaattcttattctgtatggtctcccaagattgttgacaggttcaattttagctcatgagatgatgcatgcatggttgcggcttaaaggataccggacactgagcccagacgtagaagagggcatttgccaagttcttgctcacatgtggatcgagtcagagatcatggccggatcaggcagtagtgccgcatcgtcatcctcaggatcttcgtcatccacatcatcgaaaaagggtgggcggtcccagtttgagcacaagcttggggactttttcaagcatcagatcgagacggatacttncatggcctacggagatggtttcag

SEQ ID NO: 680 - DNA, 346 bp, Zea mays
  Clone ID: LIB3115-001-Q1-K1-F11
aacaaacaaacacacagaagcgaaaagaactattcatgaattaacctaggcaaaataacccaagggtgataagtgaaaactgaatcagtatgtctggcaaccaagaagaccacacactgaagctggtaagacagcaagtgcttgcaaaccagtgagcacccttaagatcctcatcaatggaatgctcaccgctgaagacacgatgcttgcataggggaacctaaactgcagacatcatcgagtgcattcacaaagcgctgcatctgaactacgtgccgtcgaccatcatagccctataagacgtcatgaacgtatccccatgccagctatccgtgtaaggcccctg

SEQ ID NO: 681 - DNA, 192 bp, Zea mays
  Clone ID: LIB3115-001-Q1-K1-F12
cacactttccatagcatactcaagtcgatatactgaatggtcttccaacactactatcaaccatatttatacatcattagaggattcatgcacctgcccctcaaccgtgattccagacactcaccccaaaacatcaaagagtacaaccaccaagctcttgctcacatctccatccacttcaaacatcatggc

SEQ ID NO: 682 - DNA, 278 bp, Zea mays
  Clone ID: LIB3115-001-Q1-K1-F2
cggacgcatgtgcgcagtcgtgggagcccatattctgatggagttttcctagttacaatcgagtttccttctgattatcctttcaaaccaccaaaggtggcatttcgcactaaggtgttccatccatacatcaacagcaacgggagcatttgcctcgacatcttgaaggaccagtgtagtccggcactaaccatctgcaaggtgctgctgtccatatgttacctgctgactgatccgaaccccgacgaccctttggtccccgagatagctcacatgta

SEQ ID NO: 683 - DNA, 463 bp, Zea mays
  Clone ID: LIB3115-001-Q1-K1-F6
cggacgcgtgggcgtgcgcgtgggagcccatattctggtggagttttcctagttacaatggattttcctcctgattatcctttcaaaccaccaaaggtggcatttcgcactaaggtgttccatccaaacatcaacagcaacgggagcatttgcctcgacatcttgaaggaccagtggagtccggcactaaccatctccaaggtgctgctgtccatctgttccctgctgactgatccgaaccccgacgaccctttggtccccgagatagctcacatgtacaagacggaccggcacaagtacgagaacaccgcgaggacctggacccagaggtatgccatgtagtattttctctacctggcctttggggtcgctgctgcgttgtgttgccgggacctggacgtgcctccatgtattcgttctatccttcctgtataatgatgaaccgaattgggtttgcagtaca

SEQ ID NO: 684 - DNA, 334 bp, Zea mays
  Clone ID: LIB3115-001-Q1-K1-F7
atttcatcttctcttttttttggaaaaaaatctttagcctatctgttcctgaaatttgttcgttgctaacgtgtcacattgtatcatgtagatagccaaaaaaagaccactattgattctgatgctctgtcagagagagagctaggataattgcgagtagagctagcagcggatttggatcatccaaaatctaattggatatttgttgttttggataaggtggagagcaacttaaaaaaacccaatgtccattagatatctttggacttgacttgtttctaatgtttggagacatgctgatttttatgaactaataacacagtagctggttgtt

SEQ ID NO: 685 - DNA, 419 bp, Zea mays
  unsure at all n locations
  Clone ID: LIB3115-001-Q1-K1-F8
atcaccggcaccggcatcaaccccgcgcggagccttggcgccgccgtaatttacaaccagcaccatgcgtgggctgaccactggatcttctgggtcggccccttcatcggcgctgcgctggctgccatctaccaccaggtgatcatcagggcgatcccgttcaagagtaggtcttaaaggagccgatgctgctgcttcgagatgctgccggtcttgaaaggatggattcgtggctgtttcaaatgatcccctactatgttacgtggagttccattcctctttcaaagttcggagctgcttttatccgaacccagacttgtaattcatctgtaccaattgtgtaatatgccgcgcctctgttatgtgcaattcanaattatgagacagcgagtcaagctttaaaaaaaaacatannanat

SEQ ID NO: 686 - DNA, 156 bp, Zea mays
  Clone ID: LIB3115-001-Q1-K1-F9
agtctttgctatacctgatgtccaactgctaattcaagctttagatgccaggattatggcacggcgtgcaggtcttcattctacatggatctgtgaactgcgaccctcatcatcatcgcgcgtactaacataaagtgctatcttatctggtggaga

SEQ ID NO: 687 - DNA, 475 bp, Zea mays
  Clone ID: LIB3115-001-Q1-K1-G1
cgggtcgaccacgcgtgcgacccaatcgaaggacctagcgatgggcagtggcggcggcgatcggagaagatggtgcgcaaggcgaaggttgagttcgacgagcagccgtcggataacttcgacccgaagaacccgtatgccgacccggtggcgatgctcgagtaccgggaacacctggtgcgagagaagtggatccatatcgagaccgccaagatcatccgggagcgcctccgctggtgctaccgcatcgagggcatcaaccaccaccagaagtgccgccacctcgtcgaccaatacctagaggctacccgcggcgtgagttggggcaaggatgcccgcccgcctgaactccacgagcccaagaagaccgtcaaggcggagtaacggcgctgctgtcttgcttctcgtgctgctgttcctggattgcagaggtgatctgaccctttcattgagttgaatgaagtatcctggaact

SEQ ID NO: 688 - DNA, 244 bp, Zea mays
  Clone ID: LIB3115-001-Q1-K1-G10
ctttcttattccaaattttatccattatcatctacttactacttatcagtgaatatgtgcaatattcatatggtcattgtatttcacatttctttcaatatccaatatcagatgataagtcttccttttacactaaaatcaaccatctttatacactagtgacctttcttgtttccttctccttaattgctactacctaacttaattatataataatattactaataaaacatataataataac

SEQ ID NO: 689 - DNA, 209 bp, Zea mays
  Clone ID: LIB3115-001-Q1-K1-G11
aattaccgggccgttcacacgtgccgccagttcgaagaacgcatactctacaagtttttcaaacagttcgctatcctaagggccaagtgccttttgacttggaacacggcgcatgctgctcttgtcctatccattgagaaaccaataacccatgcactaagcatcttgctatcactatatattttcccattattatcacactgtaatat

SEQ ID NO: 690 - DNA, 416 bp, Zea mays
  unsure at all n locations
  Clone ID: LIB3115-001-Q1-K1-G12
aaaagaaaagcaaggatgactctgatgattctgatgaggatgagtctgatgattctgatgaggatgattctgatgattctgatgagggcgagggattatctcctgacgaaggcgatgatgattcaagtgatgaggatgataccagtgatgatgacgaggaagaaaccccaactcctaaaaagccagaggcaggcaagaagagaggtgctgaaaatgctctgaaaacgcctctttctgataagaaagcaaaggttgccacaccgccagcccagaaaacaggtggcaagaagggtgccacccatgtggcaactccacacccagcaaaaggcaagacccctgcaaacaatgacaaatcaacggagaagtctccaaaatctggtgggtcagtcccttgcanatcatgcagcatgacattc

SEQ ID NO: 691 - DNA, 372 bp, Zea mays
  Clone ID: LIB3115-001-Q1-K1-G4
cccacgcgtccgcaaacaggtggagatgaaggacacattctacgatttccatctgaacacgagagccgtcaggtcaacgatagtgcatttccaggtcaacaacaagcagtggcaggacgtttgggtgtgcgctatctgcagttagtcttgagtgatactagctgcaatttaatcagatcgatcaggtggatgggcatcctcagcagccgggaggagtgactccagcagggggttggaaagcttgcaatatggtatggcaggacgtttcgagatggacgaatctgttgaaacgggtcaccttgagttcctcattttttttgcaagttcatttgctgcatgttcatttgtggcacgccttttcgtgttaatggg

SEQ ID NO: 692 - DNA, 463 bp, Zea mays
  Clone ID: LIB3115-001-Q1-K1-G5
gaccaactagcagcatagaaagcacaatagtgtaccaacaatggcagccaaaatattttgcttccttatgctccttggtctttctgcaagtgctgctaccgcaaccattttcccacaatgctcacaagctcctatagcttcctttcttcccccatacctctcaccagcggtgtcttcagtatgtgaaaacccaattcttcaaccctacaggatccaacaggcaatcgcagcaggcatcttacctttatcacccttgttcctccaacaaccgtcagccctattacagcagttacctttggtgcatttgttggcacaaaacatcaaggcacaacaactacaacaacttgtgctaggaaaccttgctgcctactctcagcaacagcagtttcttccattcaaccaactggctgcattgaactctgctgcttatttgcaacaacaactaccattcagtcagctagct

SEQ ID NO: 693 - DNA, 458 bp, Zea mays
  Clone ID: LIB3115-001-Q1-K1-G7
agcaaattcacttgcgtgacgcagagctaatgacgaagaaccaacaggaagcgatgcttggaatttttgccttagtgtaaactgctgcaggatgtagattcagctgctgccggttccaaatcaatctcgcaaccccgtggcagatcttgttcagaagccagcgacccaacatgccggcttgtaagcaggattggctggcaaaaaaaaatgctgttaatatctgtccttgtgattattctatttttgcacagtgagaatacagctgttgtatcggaataagtaggcagcaataccgtgggtattatacaactgggttcgtgtagtggcctgtgcgtttattaatcgcgttctttcctcatctggattcagttacttgccatttgggttataaatagttcatcgtgtaaactaactttttggctactttagtctggttgtaatgggagatctcatttaat

SEQ ID NO: 694 - DNA, 438 bp, Zea mays
  Clone ID: LIB3115-001-Q1-K1-G8
cccacacttgccagacggcgtcgaatctgagaggcaaccaatggacacatgctgcacttcgggacagctaacaactacactagatcacttagacgagcacaagtcccaactgctggaacagcttcatagcctagattgctgacctgaatctgctgcaaacggatttgcatgcaagcacaccctctcattggaaccaccccaagtaggaagatgaccgacctatggcatgatagggaactctcatgcatgagtgaattcatgccatgctgtcaatctcagactactgcatatgctagtgcatatgactcgtgctgttcgatacggtatgagctatcatgccgtacgaagactgctccttaaacgtgatgtggacaatagtcttttctgtataccacgttgtcatggaaagatgccttttagacaagtttttccagtgtt

SEQ ID NO: 695 - DNA, 330 bp, Zea mays
  unsure at all n locations
  Clone ID: LIB3115-001-Q1-K1-G9
gcgcacacgctgacgctcaacaactccgaacgtctttacctacacaaaatggaccaggctgctgagtganacctgccttgctatgtcgccttacaagtcgaccgtaccctgagctcgaacgacgtcaactggtcgcttaccatcaccacactgccgattcttgtcaatggagtgcttaccgttgaagacacgatgctcgcctttgccaacggcgctgtaaatatcatgctgtctaaccactgcccacggaatgttgaatacgtgccggagaccatcaaacctctggaggatgacgggaaagccagccggcgacagctccccgtgatcgtc

SEQ ID NO: 696 - DNA, 426 bp, Zea mays
  unsure at all n locations
  Clone ID: LIB3115-001-Q1-K1-H10
ggacgtgtcgcggcgggtgatgctggggcgcacgcgcgcgcagcagcagcaggcggtgcgcgaggtgctgctgtccatgctgccccccggcgcgccggcgcagttccggcggctgttcccgccgacgcggtgggcctgcgagttcaacgcggcgctgaccgtgcccttcttccgctggctcgtcggcccctcggaggtggtggaggtggaggtcggcggcgtccggcagctcagcggggtgcgcatcgaaaagtgccgctacctggagagcaacggctgcgtggagatgtgcgtcaacatgtgcaaggtgcccacgcaggacttcttcaccaacgagttctggctaccgctcaccatgaacccaaatttcgaagacatgagctgcgagatgatatacggncaggtgccgactgcgttggaagagga

SEQ ID NO: 697 - DNA, 406 bp, Zea mays
  Clone ID: LIB3115-001-Q1-K1-H11
actagttctagatcgcgagcggccgcccgcacaacgtcgtcttcgacgaagacgaggtgccgagcggcgtcgacgccaccaagatctcgcaggaggagtacctcaacgcgccaggcgagacctactccgtcaccctcaccgtgccgggaacctacggcttctactgcgagccgcatcaaggagccggaatggtcggcaagatcaccgtcaactaattaagctagctatcgatcgatatccattcatgtattagctgttgcttcctgctttgtactccgccgatctgtccatctctacatgttttcgtcttcacacaacaacctctgctacgactacgtatatatgcatgctactagctgattgattttaacgcgaccaggccgaccccgaaagctagcttggacca

SEQ ID NO: 698 - DNA, 246 bp, Zea mays
  Clone ID: LIB3115-001-Q1-K1-H6
cttggcgccgccttaatgtacaaccaggagcatgcgtgggctgaccactggatcttctgggacggaccctatatcggcgctgcgctggctgccatctaccaccaggtgatcatcatggcgatcccgttcaagagtaggtcttaaaggatcccatgctgatgcttcgagatgctgccggtcttgaaaggatggattcgaggctgtctcaaatgatcccctactatgttacatggagttacattccta

SEQ ID NO: 699 - DNA, 345 bp, Zea mays
  Clone ID: LIB3115-001-Q1-K1-H8
cccacgcgtccgcttcggtggtaacgtatatgtacgttatttcggtccctccctcaggcaggatcggggccgcgattgactagtaggcaggcgtcagtttattcttgttccgatctgaccctgcgcaaatgtcaaagggcaggcagagacattgttgctgcgtgggggccaggcggtcaggccaatcgacgcggcggtgagtggtaaaagcgtgaggcgcttttggacacgacaacgacgcgcgcgccagacgcgcgagagcattgttgctgtcttgctcttgccgccgtgcgcgtgccgtcgatgccggggccgggacctggagaccgcatgctttatttgtgc

SEQ ID NO: 700 - DNA, 443 bp, Zea mays
  Clone ID: LIB3115-001-Q1-K1-H9
gaagaagatgctccatgcctgtctgcaggccacaaatgattttataaacgacttgccagaccacacagggtcaccttgccctgctccatatgcccctgaattgaaatgagattgcatgttttcttttcccagatggtcataccattaagaatgtcaaaatttgatcaatttgcatatctatatgaagaccatatatgctgcaaggtggatatactatttgaaagaatctgctgcttgtttcctttagagattacagatcttaattgcatgctagaaggaaatcgcatttcttgctgttcgttcaagttaataaggatatgattggtctccagcgggatatggctatggtctcgaaagggatgtggtcatgttgtagttagttgcgatgcacagaaagtatcacttttgttaatctagttggtgttgtattaacaacctccttt

SEQ ID NO: 701 - DNA, 371 bp, Zea mays
  Clone ID: LIB3115-002-Q1-K1-A1
ccgagctgttctgatggtggatcctgtgactattgaggctgacctgaaagttaaaggccgggctgaatctgaggataaacacttgagctttctagcagtgccattcttggacatgatcccgctcgagtcatgcctgcgtacaagagatttcaccagcaagcttaccacgctgaggctcgctctcgcaattggagctctctcattgcaagctacaattagtgtgcgagttcgtggcgggtcatggactgatgggctgcgtgcccagtgctgctgcccacacagtgagtataagccgtgaggaagttgtctcgcttgattctggggacgatcaactgtctgtgtctgatgatggcactatcaaacttggtcgt

SEQ ID NO: 702 - DNA, 431 bp, Zea mays
  Clone ID: LIB3115-002-Q1-K1-A10
ggctagcttttggctcggcagctaacgacctgcagccaaccatctaccagcgactcagcgagcgagagcagcacacactgcacgcagctagctaggagcagcagcagcggcggcgatggcggcctccatgatctcctcgtcagctctggcggtggcgcctcagggcctgccgcccctcggccgccgcgcctcctccttcgccgtcgtctgctccaagaagaagatcaagaccgacaagccctacgggattgggggtggcctgaccgtcgacgtcgacgccaacgggagaaagggcaagggcaagggcgtgtaccagttcgtcgacaagtacggcgcgaacgtcgacggatacagccccatctacaacgaggatgactggtctcccaccggcgacgtctacgtcggtggaaccactgggcttctgatctggg

SEQ ID NO: 703 - DNA, 425 bp, Zea mays
  Clone ID: LIB3115-002-Q1-K1-A11
cccacgcgtccggtgattcataccgtggtagtggtgtttctgtgaacagcggtggcggctatggatatggtggtggttaccgatcagctgctgcagcatattatggcagcacagcatatggtgcctatggcagagggtatggatatggtgctacttctggctatggctcaggttatggctctgcatatggtggctccatgtatggaggtccatatggtgcctacgggtcatatggtggtgcctatggaggtggtgcgtatggtgctccaggagggtatggtgggggaggatatggcagctacggtggtgctggacgcatgggtgggggtggcagcgctggtggtcggggctccagcagataccacccttatgggaaatgatcatccattctgtgtttctctaggatctgataataaagccatacc

SEQ ID NO: 704 - DNA, 383 bp, Zea mays
  Clone ID: LIB3115-002-Q1-K1-A12
cccacgcgtccgagctgagggactgcagtgccatagccataggaagggaagaactcgagatgtacatagatagcgtgggtgtgtagcatcggaaaaaatcatttggtctggaactacgtagcgtaattggtcaatcagatcattttcttgtttctttttgtctgattatgcttacccagtggtaaatccgtccattgtatcggatttaatttaaaaattctgtaatacagaggtgtcgtgaaatagttgatgacgcaactggaggttagtggtgactggtgaccaaagaacatatgctctgcttatgatctagaagttaggttgtgacatgagaatatatactatttatttgcaacggatgagatgctcttatttcatttagc

SEQ ID NO: 705 - DNA, 466 bp, Zea mays
  Clone ID: LIB3115-002-Q1-K1-A2
ggggattgcaattgcaagttgccgctgtgcggttgcggtcgctcccctcccgactctggccagcagcagcgacggtgccggcagtcgattactccacgcggcggaggcggcggtagcccatcctttcccgttttctgatccagtcctactgataccgcgcacagcacgcctgctctattaaaggtacggcgtgaagatgagggttctcttggtctcgtgaaggcgacgctcttgtctgctaactacatattatagaatgttttgcttgaggggctactggtcgccttcactagctccagtgagggaagggcctgttcgacatcatataaagttcaattctgtagtggtttgtggtgctaggggaccgagaccgagatatccccgtgtgtggaaaactcgtaagaaaattgggactatttccaagtcgcagaagcttgtcgaatgtgtcattaaaaggatgttcaac

SEQ ID NO: 706 - DNA, 449 bp, Zea mays
  Clone ID: LIB3115-002-Q1-K1-A3
caactagcaacatagaaagcacaatagtgttccaacaatggcttccaaaatattttgcttccttatgctccttggtctttctgcaagtgttgctaccgcaaccattttcccacaatgctcacaagctcctatagcttcccttcttcccccatacctctcaccagcggtgtcttcaatgtgtgaaaacccaattgttcaaccctacaggatccaacaggcaatcgcaacaggcatcttaccattatcacccttgttccttcaacaaccgtcagccctattacagcagttacctttggtccatttggtggcacaaaacatcagggcacaacaactacaacaacttgtgctagcaaaccttgctgcatactctcagcaacatcagtttcttccattcaaccaactggctgcattgaactcttgtgcttatttgcaacaacaaataccattca

SEQ ID NO: 707 - DNA, 394 bp, Zea mays
  Clone ID: LIB3115-002-Q1-K1-B1
ggacgcgtgcgcggacgcgttggtcccaccagagtgcaggatggtggcagagtcgaatctgaacatagaggagggcaaccaatggatgacgacatcgagccctgcaagctagctgctcaagcagatgccagagcaatggccatcgatgaaccaagcaatgtccagaatgaacctgaaagctgagctaaattgcacggccaaccagatgtagtccacaagccatagcgtgcaccataactagtggctgtactgctgctcggctacttgctgcttgatgtggacagtgcacaccacagacttgaatacgtaattcgtgcctgacattcaaaaatggactaggtgacacctatcggtgacaatgttaacgttatgagaatccatggcactagtgaag

SEQ ID NO: 708 - DNA, 433 bp, Zea mays
  unsure at all n locations
  Clone ID: LIB3115-002-Q1-K1-B10
gggacgacaccaacctggtgaacgcatggatcacgtggaccagcagcatcaccgcggggagcttctacctcggcgtcccagcgtctccccaggccgcgggcagcgggtacatcgaccccggcaccctgacgggcacggtgatccccgccatccgaggcattggcaactacggcggcatcatggtgtgggaccgctttaacgacgtgcagaacaactacagcagccaggtgaagggcagcgtctgatgggcataccgcatacgaagcttcaagctacagcacctagccatgcatatatatatagtggctattcgtcaagttatcggactgctagatacaaatataataagagcggatcatcgggagacaaagacgcatgtcagctatcgtctcgttntctaagcaacgagcgagagctgcatgcgctggttaga

SEQ ID NO: 709 - DNA, 147 bp, Zea mays
  Clone ID: LIB3115-002-Q1-K1-B12
aaaaaaaataaaaaaaaattaaactaataatttatataatacataaaaaaaaaaaggctaaatgtacaaataaactctaaaaaagggataaaaagtaaaagaataacaaaatacaattataaaacgtttactatttaaaaaaacaat

SEQ ID NO: 710 - DNA, 237 bp, Zea mays
  Clone ID: LIB3115-002-Q1-K1-B4
atattcttttggcaatttgtattgcttttaaaaaaaatctacttctttcactaaaaacttcggtatccatgtgatatccgatgtattctacataactccaaaattgctaccgggcaatactcacccttacctattcttttaactgatatgtccaccttttcaggttattttggctattcattttaatgattgtatgtatgtgcctatgtatgataaaaaaaataatgtcgttttttt

SEQ ID NO: 711 - DNA, 450 bp, Zea mays
  unsure at all n locations
  Clone ID: LIB3115-002-Q1-K1-B6
tgcaagcgcaaagcagcttcctttcgcctgctgacaaggactagtcgagcggcgagcgagggggcggatgatgggccgcggccggggcgtgagctacgggggcgggcagagctcgctgagctacctcttcggcggcggcggcggcgacgaggccgccgcggcgcccgccaagccggccgcggcggcgcctgcgcctgcgccggtgccggcggcagcagacggcgagaagctcaaggggatcccggccggcgtccgcggcaaccagagccagaccaacaactacttccgggcgcatgggcagaactgcggcaacttcctcacggaccgcccgtcgaccaaggtgcacgccgcgccgggcggcggctcgtcgctcggctacctcttcggcggcggaccttccgggagcaagtgatgtgatgggcaccttctncgtcgagacttttcggagca

SEQ ID NO: 712 - DNA, 421 bp, Zea mays
  Clone ID: LIB3115-002-Q1-K1-B7
cggacgcgtgggcaaatgtctgtccaggatgcaaacatgtccagtgacactgatatgagtaaggtgtttgaagacagaacgtttgtgtcatctatccttaattcgcttcctggtgttgatcccaatgatccatctgttaaagatttgctggcatcgttgcacagccagggagagcaagagaagaaggaagacacgtcagacaaaacagaagacgagaagaactgatgtagccatgttcacgcttccatgcgtacaaagaaattgaagaccggtctccattgactgcgtttactctcttggtcgtggagtttgtttatcctcatataaccgtgctttgattataacttaccgccgagggaatttgtattatgacactgcaacaatcttctctccatatatgttcaagggattttcgtgtttc

SEQ ID NO: 713 - DNA, 290 bp, Zea mays
  Clone ID: LIB3115-002-Q1-K1-B8
gacccactcttcctctcacgcttctgctcatgtttgtccacgatttttacatctccagttacacggatattattagcgtgctttaagacataccatgggcctcatatatccttcattccttccttcgttaaccaaatgatcatttacaaacatcttctatcatttctactcatccatttatatcactattttaattaatacacctcttacaaaacacaacacaaccccaacttatttatccatgttcacgcttacatgcttacatccaaattttataccattccccattt

SEQ ID NO: 714 - DNA, 408 bp, Zea mays
  Clone ID: LIB3115-002-Q1-K1-B9
cccacgcgtccgcggacgcgtgggcggacgcttgggtgagcttgcagagcttggggggctagggacatccatgaggaagcttgcgagagagctgagggacagataaatatgagaacgagcagtaccaggacaaactgaggcagtcagatgaacggctcctggccctggtcaaggcggccatggacgtagtcgtggccgtcgggcttcttcagctggcgcccaagaaggtcactccgagagtgacaggagcctttgggttcgtcacctcgcttatctcctgctatcagcaacttccttgccgcgctcctgttgccaaagtcaaagtttgagaggtgtcgccgacctagtaaaaaataaggagcgacgctggacatcgatctctgtttcacaatggatcgtaatataatt

SEQ ID NO: 715 - DNA, 435 bp, Zea mays
  Clone ID: LIB3115-002-Q1-K1-C10
cggacgcgtgggccaaggaccccgccaagttcgaggagtacaagctcaaggagatcaagaacggccgcctcgccatgctggccttcgtcggcttctgcgtccagcagtcggcgtaccccggcaccggcccgctggagaacctcgcctacgacctcgacgacccgtggcacaacaacatcggcgacatcatcatccccagatcaatctccccttgagctcagctcagctgctggttgctgtttcctgtgtacgactaggccctgcctgtacaacgagcgacgacggtgacttcccgaccggaaattaaaccctggtaatgtaaagcttatgttattaagtagcggctactcttgtagtcttgtctggatcaaatataaactggtttgctagctgaatcccaagttatttctgagcctaaccaggggaaatttagct

SEQ ID NO: 716 - DNA, 436 bp, Zea mays
  Clone ID: LIB3115-002-Q1-K1-C11
ctaaatgatgcatgtaagctcgaggtcacatatgatcaggctccagtcaactcggctgaaccgtgcttgtcttcatttgctccactgtcggaaatctgccccagcatgagcaatggtagcagtaaggaagataaccaccaggctaatcctggcattggcatgccaatgcaaggtctacccaaaaggagtggatttgatgttgtcccatgccctgaccgtgactcggtcatttcgcgctataaagcgaagaggaagacaagaagatttgacaggcaggtccggtatgagtcgcgcaaagttcgtgctgatggcaggctcaggatcaaggggcgttttgcaaaggcaaaccagacatgaacctaaatctgcagttctgcactatcctaagcatctttcctcaagaaatatgctaagtatcttccaacacgaagaagaa

SEQ ID NO: 717 - DNA, 429 bp, Zea mays
  Clone ID: LIB3115-002-Q1-K1-C12
acattatatgaaaatgcaacgattgaggatctgtatattgcatatgagcacctgaaagttgacgattcttctttgtttgctggcattgggattgctggcgctgaatctggtgaagatacaaacgatgacgagcctgatgtggatcttcatggcatgggtcccatgggaggccggtgtctttcaacaatgaccagaccaaccacatgatcaccattgggatggccaacccttccaagggattaaccttgctacccaagacagggagtcacatggccctaggagactgcatgttgactgtcgtttcccagcaaaactgtttaaagataattcaagcatttgatctggatctggaagactatgatatcctgagccacaaccaatagcttggtggctgcattctttccccgatgagcgttgagttaatgactc

SEQ ID NO: 718 - DNA, 464 bp, Zea mays
  Clone ID: LIB3115-002-Q1-K1-C3
caccgcacgagctacggatctgcggcccgacgactacgacgacggggaggtaggggacgaatcgttgcaagcgacgaggtcagaactaaggaggccgatccatcctccagcctccgatcccatccgacgacatggtctgcgtcgcgtgcctgctgccgctcttcctgatcccggtggtcaacgccctcccttacctcatcgacctcatcatcagcaaggtgtatcggctatttggatgggagtaccggagacctgaaagagtcccacctgcatgtccatacaagcctgcagctcagaagaacgatgagggtgcgagtgaatcaaaacccctggccgaaccgcacggtgctggtgctgcggcggcagaagataagaaagtggaatgatgcagcaggcgcttaaaatggtggccacggctctgtgtggttagctaagaaacaataattggtgtggatggttatgta

SEQ ID NO: 719 - DNA, 458 bp, Zea mays
  Clone ID: LIB3115-002-Q1-K1-C4
cgtttgccaaatcaacaccagcaacagcaaagcgactacagagagtaggagatgcttactctgcacaccattcagtcatgcccctcgctgcgcagatcctctctgttccggcgtgctctgctaggcaggaagagatctttcatttctgccagcagttctgaggatgccgaatccggcactcccccgccgcttggtggcgacaaacaccagcaggaggttcttgcacagatcgccatgcttcagacgcagaaggtgcgcatcacagacttcttggacgagcgctctgcttacctgaccaagttcgccaaggacgccgactcggagttcgacctgattgggcagaacgctatgaaagaacttgatgccgttggtgaccagatactggagaggctcgacagcaagatgcaagccttcgaggagacggctgaggtgcaacggcaagagatagaaatgaacga

SEQ ID NO: 720 - DNA, 363 bp, Zea mays
  Clone ID: LIB3115-002-Q1-K1-C6
gctgccgccgacaccgagagcctccacgtcaaggactacaagtactgagttgcttctctttgcgtgcccgttttggaactcctgcctacgagctaggttgcggagtgtggtttgctcgttagagcttattttcggacatccaaaaaacatgcttcctatgtgggatgatggttatctttatatttgtatgttaattagtctctttgctgttaaatttcgtgtaagttggtcctgccgatggagaatcgagcagccccctttttttgttctatcaactatgctgtaatgctggctatgtatcggcaaaaacaattctatatgctgagttggagtcggcaaaaattcatatatgctgagttggag

SEQ ID NO: 721 - DNA, 470 bp, Zea mays
  Clone ID: LIB3115-002-Q1-K1-C7
cccacgcgtccggcttgtccaggtccaaccgtccaaggataaaaaatgagcacgaacctgggaggagcctcttgcttcggcttcggcttgactcagctgcagcccgccgccgttaggctccggttgccgcctgctcgcgccgcggacacttcgtcctcccagtcgccggcgcgcttgacggcggtgctggagcaggtggaccagttgctaagccaggggaacgacatggccgcgctctccctcgtgcgcagtacgcaggggggtgacggcgggctccgggcctttggcgccgccaggcaggtatattttggtggtggggtgagaaacttggttcttgatacaattggtcactatcttagccagaagtatcacaacagagttatccagcatgaagctggtcacttcttgatagcttacttgcttggagtgcttccaaaaggatacacaatcacaagcttagatacacttat

SEQ ID NO: 722 - DNA, 390 bp, Zea mays
  Clone ID: LIB3115-002-Q1-K1-D1
ggcacatgcacgtgcacatcgtcatccatattgcactacgcttttttagatgaaatatctgggtcctactcggggagaacttccgactggattaggctctacatcttgccagattaccatgctatagtcaatatatttataatattgtatgacataaagctattcttttacaaactgtagacactgctacttatggtgtcttacaggttgacgaaagcattgaaatggagaccactaggctggctaactatctgtaaattttaagtagggatagctacccgctctgtttgcatgctgttaatgctactttgatggaaacatatgtcagctatgtgacatagaaacagatccccggtcagatgatgcttgaaacttacaagattgtagaag

SEQ ID NO: 723 - DNA, 435 bp, Zea mays
  unsure at all n locations
  Clone ID: LIB3115-002-Q1-K1-D10
agacaatcacccttgaggtggagtcttcggataccattgacaatgtcaaggccaagatccaggacaaggagggcatcccaccggaccagcagcgcctcatcttcgccggcaagcagctggaggatggccgcaccctggcggattacaacatccagaaggagagcactctccacctggtgctccgcctcaggggtggcatgcagatttttgtgaagacattgactggcaagactatcaccttggaggtggagagctctgacaccattgacaatgtgaaggccaagatccaggacaaggagggcattcccccagaccagcagcgtctgatctttgcgggcaagcagctggaggatggccgcactctcgcggactacaacatccagaaggagagcacccttcaccttgttctccgnctcaggggtggtatgcagatct

SEQ ID NO: 724 - DNA, 439 bp, Zea mays
  Clone ID: LIB3115-002-Q1-K1-D11
cccacgcgtccgcgagcgcgtgccgttcctcttcaccgtcaagcagctcgtcgccaccggcgagcccgagagcttcggcgggcccttcctcgtgcccagctaccgtggctcctccttcctcgaccccaagggccgcggcggctccaccggctacgacaacgccgtcgcgctccccgccgggggcagaggtgacgaggaggagctccagaaggagaacatcaagaacgccgcctcctccaccggcaacatcacgttgagcgtcaccaagagcaacccggagaccggcgaggtcatcggcgtcttcgagagcgtgcagccgtccgacaccgacctcggggccaaggcgcccaaggatgtcaagatccagggggtctggtacgctcagctcgagtgattcgagtgtctaactgctaggtgtccgaccgccgtcatggatctt

SEQ ID NO: 725 - DNA, 303 bp, Zea mays
  Clone ID: LIB3115-002-Q1-K1-D2
gctgcaggccgtcgccgcgctcgtctgcgttgtcggaggcgccttcgcggtggccgcgtccacgtttgtgtcgaggctgcagggctcctccagctgacgagcgcatttgcagccgtatctaatttcccgtgcatggctaagcagagaattgctctatgcttataacgtaataaatagtgcgtgcgttgcaacgggaacatataatatcacgataacttatatataaaatgtgtgttatactgttattagaaaagatttcataatttatttatgatcctaaccatacataaattttgttatttt

SEQ ID NO: 726 - DNA, 433 bp, Zea mays
  Clone ID: LIB3115-002-Q1-K1-D3
acatcaaactgacctcatttatcaggctgaaagcatggccctgccttttataggtacatatgtgtccaacgtaagtgtcagtgcatcccatgatggcatacatacatattttgcgtacatacacatcacatgactggataattacatatgtccaacgtaagcgtcagtgcaccccatgatggcatacatacatattttgcatacatacacacatcacatgactggagaatcatgcagagatctctcatctcagccaagatcaggaacgatgaagtagtcctcgtcgtcgtcgtcaggcacctccatgcgtgacttcttgaacaggcgcgccccgttcgccttgtagaacccggcgttactcactggctgcggcgaggcgaagaactccgccatggcagttttagctggcgaatgggcgtggaacaggtcgatg

SEQ ID NO: 727 - DNA, 405 bp, Zea mays
  Clone ID: LIB3115-002-Q1-K1-D4
tccacgcgttcgattaaaaatagtgtagaaaatgaagatatggctctagtagatggggtactgtatttaagacccgggagactgagccctataactgtttgatgagtttttataaaataggacccctgttggagtatgttggagtatgtttctggtgttagggtcctatatttcaaaataggatcctatttaggactcttgttggagatgctctataggtgattatatcttgggccttgacttaaccggtcattgggactaacttcaactgtacatagtatagaggtgttcatcactggtgggaatctacatgttgcggctcgtggcgcgtgtaaattatcatacaagtggacagcaagtttggtgcaatgcataaaaagctttcctaaaaaaaaaaaaatgcca

SEQ ID NO: 728 - DNA, 460 bp, Zea mays
  Clone ID: LIB3115-002-Q1-K1-D8
gactagttcttcgtcgacaagcaggggagttaggtctcacatgcatgcttcatcacattgttgactgcataacgaaacacatcgtcgtcggatcggagatgatgagttccgtcgtcgtggatgctgctgctaccagcagcagcgagaagaagacgtcgtggccggaggtggtgggcatgtccatcaaggaggcgacggagactattctcaaggacatgcccaacgcgtacatccaggtgctgcctgttgggtcgcccgtgacgctggaccttcgccccgaccgcgtccgtatcttcgttgacaccgtcgccatgactccgacagttgggtgatacataccaaatgcaataaacaaaccctactttttattttatgtttccagttaataataaaccaggccttagcttcttggttgtccttccttggttggtgttagcttctaagctactagtacaccatt

SEQ ID NO: 729 - DNA, 434 bp, Zea mays
  Clone ID: LIB3115-002-Q1-K1-D9
cggacgcgtgggcagaattgctcccagtgcttcagctggatgatattagagaagcttctgggtctgcgccagagatctccatatgcgaacctaacctgtgctccagtatgaactatggcacagtgcctggaagacactccatgtcagaagagcggcagagttatttgaaaagattaggttaccctgaattgcactcttcaaatttctttgaccttgatttgttgtcatcttcaggaaattcgtttgacgaggaagtttttgagaggtcattactgatcaattcacctatggatgtgatcagtcctgaatcatctatgtcatacagtgaacaaggacacactgatgagggaagagatgacacggatctttcccgttctagcagccagctctcagacattcgggactactctgaccactttgcgcagtgggtcgtg

SEQ ID NO: 730 - DNA, 435 bp, Zea mays
  Clone ID: LIB3115-002-Q1-K1-E10
caagctctcacgagaagcccagcattccctccgcaggactatggaaaagtatagctcatcgtgtagactgatcctatgctgtaacagctcctcaaaagtgacagaagctgtaagatcccgttgcttaaatgtgcgagtaaatgcacccagcgaagatcagattgtccaagttctagagttcattgggaagaaagaaaatctgcatgttccagctggatttgctgctcgtatcgccgcacaatcaaaccgtaatcttaggcgggcaattctgttctttgagacttgcaaagtgcaacaatatccatttacatcaaatcaagtggcgcctcctcttgactgggagcaatatgtgtctgaaatagcaactgatatacttacagaacaaagccctaaaaggctatttgctgtacgccagaaattctatgaattactcgt

SEQ ID NO: 731 - DNA, 257 bp, Zea mays
  Clone ID: LIB3115-002-Q1-K1-E11
tcggaagcagcaatatctatcatattgttacttttgctccatttaagtttcaacctcggacagggctaaatgagatacaatttgagtgaccaacatctgaatgcttgataggttggcggataaagcagatccgggcaagcaattacgccttctggttgtagacataggtgaggcctcacttgccgtagtaatggcggtcgaagtggttggccatgaagactgcccgcgccgcactctgtgttggggcactcgcgcta

SEQ ID NO: 732 - DNA, 404 bp, Zea mays
  Clone ID: LIB3115-002-Q1-K1-E12
cggacgcgtgggatttatctggtcgaatgccaaattttctaagtggtctaaatcttagtaaactagacctaccgtacaataataatttccaaggagaaagatcaagaactggtctatttgataatcctacagtcatatcgctagatggaatctgggattgtgtggaggagccatggttttgcatatgcctccttgccatgttgcttcaagaatagtagggagtgcaacattattgatcaaaaatattgatcccaatatttgggttcatgtctctcgtattgcaggtgtagttttactcctagaaaagaggacatcaagaagagcatatagatcagagcaatcttattatgagcattttgagacagttacctataactgacttagctcaagcacacatgacttct

SEQ ID NO: 733 - DNA, 460 bp, Zea mays
  Clone ID: LIB3115-002-Q1-K1-E2
ctcgcagtctctcgcacgcgccggcatggcgacgctcgcgcggtggcatctacaacctcctgctgcccgcccgctcgctcaccggcggaggatcccgcgtcgggctgcgaccgtggtttccccgcgcgcgttcagccgcgcggacttcgatggcttcgtgcggcgcgcgtggcagggcgccaacgcgggggccgagcgcttcgccttcgaggcacggcatgccgcgcagcggctggacagcaggttctcgatctcccggaggctcgcggacgctttccgtgccgcccgcgcccgcgccgttgagatcgacgccgagttcggcatcaggcggcggtggcgctccttctctgtcgacttctcccgcaattggcccaggtatcggagggacatcaatgacttcatgggaactcccatcgggagagcattagctacaatatttttcctgtggttagcactgtca

SEQ ID NO: 734 - DNA, 471 bp, Zea mays
  unsure at all n locations
  Clone ID: LIB3115-002-Q1-K1-E4
tcaacggctacaccatccccgccggcacgcgcgtcatcgtcaacgcgtgggcgctcgccagggacccgacgtgctgggacaaggccgaggagttcttcccggagcgcttcctggaacaaggccgcgacgccgaggtcgacatgtacggcaaggacatccggttcgtgccgttcggggctgggcgcaggatctgcgcgggggccacgttcgccatcgccaccgtcgagatcatgctcgcgaacctcatctaccatttcgactgggagatgcccgccgagatggagcgcaccggggccaaggtggacatgtccgatcagttcgggatgacgcttcgccggacgcagaaactttaccttgttcctagaattcccaaatgagtgtcgtcgtcgtcgtacaaatggcatgcatcttattgtaagttttggagtttggtgttgcacacgcaacgatggaccgnctgtgatatcttta

SEQ ID NO: 735 - DNA, 467 bp, Zea mays
  Clone ID: LIB3115-002-Q1-K1-E6
gtggtttgacccgctcggctggggctccggctcgccggagaagatcaaggagctgcgcaccaaggagatcaagaacggacgcctcgccatgctcgccgtcatgggcgcttggttccaggccgagtacaccggcaccggccccatcgacaacctcttcgcccacctcgccgaccctggccacgccaccatcttccaggccttcacccccaaatgaggagctctgatgaacttggcagttcgaggagtgctaccacacatgcatgcattgttaggtttgatggccgatatggaactttttctttttgttgggggcggactactgggtagactgtcaacgatgatgatgatgatgatgaaatgttcgtggtgcgatgcatggtgtacttgtactatgttgtaactaatgtaaaaatgcgatggtcgttagatgctatgtcctcttaattaaggcggacctacatgcaagt

SEQ ID NO: 736 - DNA, 440 bp, Zea mays
  Clone ID: LIB3115-002-Q1-K1-E7
cacaatttaatgaatcctccacttatttgatgggatggttaagagattacctatggttaaactcttcacaacttattaatggatataatccttttgggatgaatagtttatcagtatgggcttggatgttcttatttggacatcttgtttgggctacaggatttatgttcttaatttcctggcgtggatattggcaggaattaattgagactttagcatgggctcatgaacggacacctttggctaatttaattcgctggagagataagcccgtggctctttccattgtgcaagcaagattggtcggattagcccacttttccgtgggttatatattcacttatgcagctttcttgattgcctcaacatcaagcaagtttggttaatttagttattttttttttgtactgtatcagaacccagttcattactcttgatgg

SEQ ID NO: 737 - DNA, 330 bp, Zea mays
  Clone ID: LIB3115-002-Q1-K1-E9
aaaaaaaataaataaaaaaaaaaaaaaaatattaaaaaaaaaacaaaataaacatacgggaatgggcttgtactgtataacagctgtacatactcaatcataccactgtcaaaaatggtccctagtttaacccaatctgaattgactttccaaaattgtccaacgatttggctgctaaaaccatggcatcaccaaacttattccccttgcagtacatacagctttctcaataaatcatcatatcgaccagtcttaacccgatcgccatatctaccagttacacacttctgtatggttattgttacttccccatcctactgctctttaaaa

SEQ ID NO: 738 - DNA, 338 bp, Zea mays
  Clone ID: LIB3115-002-Q1-K1-F10
agacagcagactgctcccacgattctgagaccaagaatggctggaaacaaaatgatgggagggataacagagccatataggctgacacggcgatgtgaagtgactgcaattcttattctgtatggtctcccaagattgttgacaggttcaattttagctcatgagatgatgcatgcatggttgcggcttaaaggataccggacactgatcccagacgtagaagagggcatttgccaagttcttgctcacatgtggatcgagtcagagatcatggccggatcacgcagtagtgccgcatcgtcatgctcaggatcttcgtcatccacatcattgaaaaa

SEQ ID NO: 739 - DNA, 421 bp, Zea mays
  unsure at all n locations
  Clone ID: LIB3115-002-Q1-K1-F11
cacacctgacgctcaagaacttcgaaggtctggacctcggcaaaatggaccaggctgctgattcagggctggcttcctatgtcgccggccaagtcgaccgcaccctgagctggaaagacgtcaagtggttgcagaccatcaccacgctgccgatcctcgtcaagggagtgctcaccgctgaagacacgaggcttgcggtggcgaacggcgcggcggggatcatcgtgtcgaaccacggcgcgcggcagctggactacgtgccggcgaccatcagcgcgctggaggaggtcgtgaaggccgcccggggccagctccccgtgttcgtcgacggtggcgtccgccgcggcaccgacgtcttcaaagcgctcgcgctcggcgccgncggcgtattcgtcgggaggccggtggtgttctccctggc

SEQ ID NO: 740 - DNA, 198 bp, Zea mays
  Clone ID: LIB3115-002-Q1-K1-F12
cccacgcgtccgcattgtctttcggatcggagagggtgtacgtacgtggattgattgatgctgcgagatgcatgtgtgtcttttgtttcacgttgcattgcataggcaagtcgagatgatgagttggcgttgtacactaagatgaaccatgtttgtgcaatagtggtggtttttgtttcctgctggttaattgttgat

SEQ ID NO: 741 - DNA, 447 bp, Zea mays
  Clone ID: LIB3115-002-Q1-K1-F4
acgacacgacaccaagtcgaggagctcgagagggcaccaataatggccggcgtgaactccggcgtcgtcgggctcaagcccgccgcggcagtgccgcaggccgccgccgcctcatcgccggcgaagcgggtgcagctggccgcgcccgagggccgccgcgccgctctgctcggcctggcggccgtcttcgccgtcacggccaccaccgggtcggccaaggccacgatcttcgatgagtacctcgagaagagcaaggccaacaaggagctgaacgacaagaagaggctggccaccagtggagccaactttgcgcgcgcctacaccgtggagttcggcagctgccagttcccctacaacttcactgggtgccaggacctcgccaagcagaagaaagtccccttcatcagcgacgacctcgagattgagtgcgaggggaatgagaagttc

SEQ ID NO: 742 - DNA, 368 bp, Zea mays
  Clone ID: LIB3115-002-Q1-K1-F5
cggacgcgtgggctgaggccaggtgatcgctgatccatacataaacagaggctacagacacgccacctgggaacgcggatccaagagcacacacggatcgtacttgacgaggaaggagggaggagcagtgtggcttgagctctccagtgttgtacaaagacatgtttctttctgaacccaaaagggagaaagatgtatgaagcgtgtatataagatcttagctagcagtttgttttcatttgtatgagcgatcgaaggctgtaaaaaatgaaaaagaaaaaagaaaagggaatgagaaattgactaaagctggtcaaaaaaaaaacataagaaacaaatgaacaaaaaagaaaaaaacttgattgtgt

SEQ ID NO: 743 - DNA, 444 bp, Zea mays
  Clone ID: LIB3115-002-Q1-K1-F6
tcggctggcttctcctccccctcttaccaagtcctactcgggttagggttccggagggttttggggatggtcgatggcggcggctgatgtggagtaccgatgcttcgtcggcgggcttgcctgggccaccagcaacgagtcgctggagaatgccttcgcctactacggcgagatcctcgactccaaggtcatcaccgaccgggagacggggaggtctcgcggcttcggcttcgttaccttctcctccgagaactccatgctcgacgctatcgagaacatgaacggcaaggagctcgacggccgtaacatcaccgttaaccaggcccagtcccgtggcggtggcggtggcggcggtggctacggcggcggtcgcggcggcggcggctatggtggcggtcgccgtgacggcggttatggcagctgtggctgctacagctgtcggcg

SEQ ID NO: 744 - DNA, 437 bp, Zea mays
  Clone ID: LIB3115-002-Q1-K1-F8
cgttcgaacgacacgtcaccaaactcatgagctgactcattggaaaaattttccacgaatcgaccacgggccaacccggaggaggcaaccaggtgactacgggcctaggtcatgggtgacagacaatactccatctcggttaccactttcagccccgtaggaaagcctgtgcagattgatcacgctctcaaacgtgttcgatgccaccgagaccacctagggatccaaagtcacaaccgtggatgaattgccactgaaaagaaactgccctctatatctgtacgatgaaacatatgttcaaaagattcaggcactaacaccaaatattgtacatgtctatagtgggatgggtccagattttcacgatctggctagaaaaaatcgaaagcacgcacagcagtaatatccgttgtacaaagagcatatacctgtaacac

SEQ ID NO: 745 - DNA, 434 bp, Zea mays
  Clone ID: LIB3115-002-Q1-K1-F9
gggagcagaagccaaccggctcgtccgcccgttgcctgtcgtcgctatggccgccgtggaggtgtgcgtgaaggccgccgcggggaaccccgacacgctcggcgattgcccgttctcgcagagggtgctgctcacgctggaggagaagaaggtcccgtacgaggtgaagctcgtcgacctcggcaacaagcccgaatggtttctgaacatcagcccagagggtaaggtgcctgtgttcaacggtggagatggcaaatgcattgctgattctgatgtaatcacccaagtcattgaggagaagttcccgactccttctctggtcacccctccagaatatgcatcagtgggatcaaagattttcccagcctttgtcaagttcttgaagagcaaggatggtagtgatgggtcagagaaggcgcttctggatgagctgc

SEQ ID NO: 746 - DNA, 477 bp, Zea mays
  Clone ID: LIB3115-002-Q1-K1-G1
gcttcagttcagaacttcagtgttgtgtctgtggacgaggctcaaatttctgctaacctcatgaaacatgggccattggcaatcggcatcaatgctgcctacatgcagacatacatcggaggcgtgtcatgcccatacatctgtggcaggcaccttgaccatggtgttctccttgttggatatggtgcttctggtttcgcccccattcgcctgaaggacaagccttactggatcatcaagaactcgtggggcgagaactggggggagaacggatactacaagatatgcaggggttccaacgttcgcaacaagtgcggcgtcgattccatggtctctaccgtgtccgcagtccacgcctcgaaggagtagactctggtcagcggtgataatcgtgattccatatattgtagaactataatccctgctagtaatccatttgtgctggttatgtatcgaaggcagcaaagatgtgtgaag

SEQ ID NO: 747 - DNA, 320 bp, Zea mays
  Clone ID: LIB3115-002-Q1-K1-G10
acggacgggtgcaatatgacgacagatggtgaagataaatataatgattctgatggggattatgggtgataatcttagatgaaggcgagagattatcacctgacaaatgcgattatgattcatgtgatcaggatacataccactgatgatgacacaggatgaaacatgaactcctaaaaagccacatgctggcttgaagagaggtgctgaaaatgctctaaaaacgcctctttatgataagaaagcaaacgttgacacaccgacaacctagaaaacacttggcaagataggttccacccatgtggcatctacacactcag

SEQ ID NO: 748 - DNA, 430 bp, Zea mays
  Clone ID: LIB3115-002-Q1-K1-G12
gttgaatctactcttgtacaaccaacatttgtccttgactatccagttgagatatcaccattggcaaaaccacatcggagtcatgttggccttactgagcgattcgaacttttcatttgtggtcgtgagattggcaatgcgttttctgagctcacagacccaattgatcagagaagccgttttgaaaatcaaataaaacagcacaatgctaagcgtgctgcaatggctaaggaggtcaaatctaccgagggtgaaggcgacgacgattactcgtatgaagtttctttagacgaggacttcttgacttcattggaatacggaatgccaccggcatcaggaatgggcctcggtatcgaccggttagtaatgcttttgacgaactcttctagcataagggacgttattgcctttcctgtcttgaagattcagc

SEQ ID NO: 749 - DNA, 473 bp, Zea mays
  unsure at all n locations
  Clone ID: LIB3115-002-Q1-K1-G2
ctgcaatccgatctcattcagttcaagcccaagctacctgtcagttagttgttcctacctacgacctcgatctgtcatcagctgatcgattatatgttctcaatattaattatagtatattaatttgatatatggtcgtttcctcttgtctgccccagacatggaaggttagggcgatctaccaattcgacatggccgtgtacaccaagatcttactcaagttccccaggaagttctggcctgaagggaaaggaagggagttcttcctctacgccagcagcaggagaagttactacggagtgtggcaggagttcgagaagcagtaccctgacgccaatgtcctcctggtcaccgtgaccgacgaggagtcgaggcgcatcgagcagcagtcggacgagcagaccaaggcggagatcatgcangtgctgcggaagatgttccccggcatagacgtnccggacgccaccgacatt

SEQ ID NO: 750 - DNA, 481 bp, Zea mays
  Clone ID: LIB3115-002-Q1-K1-G4
actcgagagagattccgacaccgctgggctcagatgccgccgccgccgccgccgccgcagcagcagcagcagcagtccggcatgactctctgccgcctccccacggccactcttggccttcccctttctctcccctgtttgctacctcgttcccgcccccgcctgtgcttcgccgcacgtcatgccagggccgtcgccgccagggcttcctcatcctctccatcaccggactcttcattcggttcgcggatggaggagtccgtcaagaagacggtggccgacaaccccgttgtcatctactccaagtcatggtgctcatattgcatggaggtgaaggcgctcttcaagcggatcggtgtgcagccccatgttatcgagcttgaccatctcggtgctcaaggaccacatatacagaaggtattagagaggctgactggacagtctactgttcctaatgttttcatcggtggaaagcatgttg

SEQ ID NO: 751 - DNA, 459 bp, Zea mays
  Clone ID: LIB3115-002-Q1-K1-G5
cccacgcgtccggctgaacaagcagaggattccacttagcaacaacagtgtcatagaggagggcctcgggaagcacaatatcatctgcattgaggaccttgtccacgagatcatgacggtcggcccgcacttcaaggaggccaacaacttcctctggccgttcaagctgaaggcacccctcggcggcctcaagaagaggaaccactacgtggagggcggtgacgccggaaaccgtgagaactacatcaacgagctcatcaagaggatgaactaggctctctcttgtatcctgtgagaatgcttttctgtgtcagcgtggttgtttttgctctagtaagttgacggataatgatggatatgcaattatttttttggtgttccatggctctaatacagccagacttcactaggaactgtgtcgctgtttatgttggcagttgcttctggaggtttttgtct

SEQ ID NO: 752 - DNA, 435 bp, Zea mays
  Clone ID: LIB3115-002-Q1-K1-G6
cggacgcgtgggcggacgcgtggggagagaagagaagctagcgttcaacagaggaagaagcgagagagctgacaaaaatcgactgcccatcaatggctctggcgccggcgcctatccagtgcttcctcacgagcagcagaccggccgtatgcacggcgacgccgcccaataagcgcgcgaggaggccgtcgaggatctcgtgcagggcgtccggcgatgacaaggacaaggtcccgtcgtcgggagggaacgatcttggggtcaagcagctcgggaagctggccatggtcgcgctggccgccggcgtgctggcgctcggccccgtcgacggcgccgtggcggccaagtccggcggcagggtcggcgggcaagcgttccggtccgcgccccggtcgtccggccctcggatcaacaactccaggacgaacatctaca

SEQ ID NO: 753 - DNA, 286 bp, Zea mays
  Clone ID: LIB3115-002-Q1-K1-G7
cccacgcgtccggtttattcttgccaaagaggggagccctttgctagatcaattgtaaatctgtaattggttgctaccggaaaggatatccagaactccacaggtaacctaacagaggacgcctcacattgtatttatcaatcaatattgttgttggcggcactgttacatgtatggggccatgaaatcttataaatgaatatttagtcgataagaatcgagagctgaactgagactgatacaaacaaaacacttcaatgttcatctgatgtctgtccttttattg

SEQ ID NO: 754 - DNA, 444 bp, Zea mays
  Clone ID: LIB3115-002-Q1-K1-H1
cggacgcgtgggcctcgcccaaattgcaaccttccccgagtgctccaggtcccgtggccggcccccagatcctgtccaatcccaatccaagtatcgaacggatcccatcggtggcgctcgagcgagcgagtgcggccggaaccgagcgaagatgggcatctcgagcatgccggcgcccgaggacagcctgctggggttcgtgctgtacaacacggcggcgtcggtggcgatcctggcggggctggtgcgcgccgcgctgctgttcctgggcctggcggcggcggaggacgaggagccgcggcagcaggcggaggccgtgacggtcacggccgtggggcccagcctcgcggaccggttccggagcaagttccggccgtcgcgctacgggcggcgccggtgcggtgactgccgcgtgtgcctggtgcggttcgagacggagtcggt

SEQ ID NO: 755 - DNA, 286 bp, Zea mays
  Clone ID: LIB3115-002-Q1-K1-H10
aggcctcctgcggctgctctaagaggggcacaggcactcacacgctacacatgagcatcggggacatgggcatgacatgcatggccactgcgacgagcaccagcattcagacaccgttgctgagaatgcttgcgaccatgagtgccacgctgagctcaacagtgtgcactctgcgtaaacacaccactgccatgaccacgaccatgatcacggacagcatgatcttgcagagatcgaggaacccgtcaaagactgccactaccacgaacagcactgcttgcatgag

SEQ ID NO: 756 - DNA, 472 bp, Zea mays
  unsure at all n locations
  Clone ID: LIB3115-002-Q1-K1-H3
cggacgcgtggggttctagatcgcgagctagaactagcggacgcgtgggctggtgaagtgggtgcgcgtggacttcaaggagcccgtgtggttcaaggccggcgcgcagatcttctcggagggcgggctggactacctgggcaaccccaacctggtgcacgcgcagagcatcctcgccgtgctcggcttccaggtcatcctcatgggcctcgtcgagggcttccgcatcaacggcctcgacggcgtcggcgagggaaacaacctctaccccggcggccagtacttcgacccgctgggcctcgccgacgacccagtcaccttcgccgagctcaaggtcaaggagatcaagaacggccgnctcgccatgttctccatgttcggcttcttcgtccaggccatcgtcaccggcaaggggcccctcgagaaccttcgaccacctcgacgaccccgtcgtcaacaacgcctgggtcta

SEQ ID NO: 757 - DNA, 421 bp, Zea mays
  unsure at all n locations
  Clone ID: LIB3115-002-Q1-K1-H4
ctcaagactcgggcagagcacacatcctttctaatggtgtatacatatactttccctgtctatcgtggccatggactttgcaataccatagataccatacgaaaacacgaaacgggagaagcaaggaaacgttacagatcgtacatgtggatacaacactaaaacaagcgttccacacagctagcacggcactgatcactgtgcctgatcccgtggagtgaagcggtgaacggtccggcccacaggacaactgaactgaactgcacaggcggcggcggcggcaagacagaggaactggtggtgaagaagaggccggtgggcggtgggttcagaagaaggagctgcatgtatttttcaccaatggttgtgtatgtcaaatacgaaaagatatgaacaccattaccaccgcgtaaaanaaaaa

SEQ ID NO: 758 - DNA, 401 bp, Zea mays
  Clone ID: LIB3115-002-Q1-K1-H5
cccacgcgtccggcgtgtcatagaaggagcaaatcataactacacctcacatcgcaaagaaggtgctgatgcagtagtagatttcatcacgtccaatgtaaccgtataataaggctgggggatgaatgtcattccagaccacttggtcatgcacctatcgatcccctccatcatggggcaatactggtactaggtgtctattatcttctgaaccgaaaaccccatgtcatgcaggtttgatatgatgatgttgctcgtatgtgctcttaagaattactgtaaatattgaactcctggtagacttgtatgccgcagctcgcagtttatataggctcatatctctatagtttttttctttcttctttgttcgagggctctattcccttgctcttttttgcatg

SEQ ID NO: 759 - DNA, 189 bp, Zea mays
  Clone ID: LIB3115-002-Q1-K1-H7
tcgggacgccggccgcctgtccgcggcgtggcagctgtacaaggcgcaagaagagatggctcaaggggccaagcgctaccgcgtcaagctcaccttggtccacggccgccgaagcaccgtgggcaagggtggcgggcccacgcaccttgccattctgttccagacgccggacaccatcaacgggtccat

SEQ ID NO: 760 - DNA, 93 bp, Zea mays
  Clone ID: LIB3115-003-Q1-K1-A10
tcgcggacgcgtgggccgacgcgtgggtttttggtgtagacagcaacgacagggaacgtgttggtgaggctagagatgagcttcacaagatgc

SEQ ID NO: 761 - DNA, 274 bp, Zea mays
  Clone ID: LIB3115-003-Q1-K1-A11
cactcgatgaagacacagaactcgagctctatgacatcctgacctctaatgcacgcaagtctgcgtcgatgatggcactcccaatggaaaggacgaagaggtgacttatgcatcagctgatgaagtgaagcagcttatgtgtgaacttaaatctctgtatatgactgatcgtgtgaacttgacttcgtgaaacttttgtgtgtgaactcgatcgctatgtgacactgttgcgtgcgaactcgacggctttataaaactactatgtgaagatctg

SEQ ID NO: 762 - DNA, 370 bp, Zea mays
  Clone ID: LIB3115-003-Q1-K1-A2
gatagtgaagatgttgatgagctccttggcactgttgcatctgtcagtgttattgaagctactggtgttgctatgagtgaacacctctcaaagatgaaacttgatgatgacagccttgcagtgaagactaactcaagttgctcagcagcagaacagcatccagttgattcagtaaaagtacataacaatgcatctgttgtgctgaccaaaaaaatatctgatttatctcttgagtggcgatcagatttatcgaaaactgatgtctggtatgccagttttggatcaaacatgtggagaccaagatttctatgttatgatcaaggagggaaggctgaaggtatgaatataccatgctgcggatcacgtgaca

SEQ ID NO: 763 - DNA, 342 bp, Zea mays
  Clone ID: LIB3115-003-Q1-K1-A5
agcgttttcagcttcagctaaagagaagcttgaggcagctggttgttccctaactctgttacctaaacgaaagaaatggcttccacaaaattatctaaagaaccaagcccgagcagaagagtactttgccaagaaaaaagctggtgctggtgaatctgatagcggctctgcatagaatttctttgcgatgtactcttctcttgcttttagcatatgcttattactgagcaagacacaccggctcaactaaaaatgttcataacttcttcatccaaactctgacttcgatgatattagacatttcggaaattttatttaaagggctacgatagccactttaat

SEQ ID NO: 764 - DNA, 360 bp, Zea mays
  Clone ID: LIB3115-003-Q1-K1-A6
agcgttttcagcttcagctcaagagaagcttgaagcagctggttgatccctagctctgttacctaaacgaaagaaatggcttacacaaaattatctaaagaaccaagcccgagcagacgagtactttgccaagaaaaaagctggtgctggtgaatctgatagcggctctgcatagaatttctttgcgatgtactcttctcttgcttttagcatatgcttattactgagcaagacacaccggctcaactaaaaatgttcataacttcttcatgcaaactctgacttcgatgatattagacatttcggaaattttatttaaagggctacgatagccactttaataaataaaaaacaagtgac

SEQ ID NO: 765 - DNA, 346 bp, Zea mays
  Clone ID: LIB3115-003-Q1-K1-A8
gcgaaagcagcagcaaagtcaccagcaaccagcagatcccgtcgccggcacgatggccagctggtcgtcgtcgtcgtcagctctggtcgtcctcgtggtggttctagccgcggcggtggcgtgctccgcgacgcgccccgtccccgcgcggcagcgggcggcggcggcggcggaggaggtgaggcggccggacacgctgcacgagggcacggtgctgatcccggggatggggcgctacgagatcggcagccactacttcccggacatcggcgggctggaccacagcgtccccgccgccacccacggccagtccatccccggggccgacgacacctgggggcccaac

SEQ ID NO: 766 - DNA, 204 bp, Zea mays
  Clone ID: LIB3115-003-Q1-K1-A9
caagctcgcatatacatcctctgaagattggcatcaagacctgtggcactaccaagcttctgctcaccattccaagaatccttgagcttgctgaagagccgtctatgccacttgctgctgtgaagaactcccgtgggacgttcattttttctggggcacaggcaagcccccacaggaggctttttgaggaagatgctgcacttt

SEQ ID NO: 767 - DNA, 405 bp, Zea mays
  Clone ID: LIB3115-003-Q1-K1-B10
cggacgcgtgggcggacgcgtggggtaaaatttgttggtgatggatatatccattgtgaagcttccggtattggtagatgtgagatcaacaatggagggtgctggcaggaaagtaaagatgggaagacaatctctgcctgctcaaatgaagtatctgaaggttgtaaatgtccagtgggtttcaaaggtgatggagaaaaaagttgtgaagacattgatgaatgcaaagagaaactttactgtcagtgcaagggttgcagctgcaagaatacatggggaagctacgagtgcagctgtggtgatgacaatatgctatacatgagggagcatgacacttgcatcagcaaagagggaactgccactactgttggctggagcttcctctgggttattttctttggactt

SEQ ID NO: 768 - DNA, 355 bp, Zea mays
  Clone ID: LIB3115-003-Q1-K1-B11
gcgcggacgcgtgggctcaagggtattatgggctacgtggaggaggatctggtttccaccgacttcagcgacgacagcacgtcgagcatcttctacgccaaagccgggattgccctgaacgaccacttgatgaagctcgtctcttggtacgacaacgagtggggctacaggaaccgcgtcgtcgacctgatccgacacatgttcaagacccagtagagagagatatctctgcctggctatcgtgggtcgttcccaatggcctttggtcgcagaccatctttgctgcttggctatgctgagaattaatgtgaaccgtgcccttggacactggatccatgctggttatggacacgtt

SEQ ID NO: 769 - DNA, 273 bp, Zea mays
  Clone ID: LIB3115-003-Q1-K1-B12
aaccaatggggccttggaatctatcgggacattctgcaaaaaactatacgacttccggcttgttctacttgatagagaagagaggataacagacttgccactggacaatggtgtccgagctttgttgaggggctgcaccaagcttcggaggtttgctctgtacttgagaccaggagggctctcagatgcaggtctcggctacattggacagtgcagcggaaacatccagtacatgcttctcggtaatgttggggaaactgatgatggattgat

SEQ ID NO: 770 - DNA, 234 bp, Zea mays
  Clone ID: LIB3115-003-Q1-K1-B2
catttgactcacgactgcgcctccatgcccagcgttgtaccggcgagctcctggcctgcttcatgactgggactcgccagctgtcgacacgaatggtcctgagaccattccgcattacactgcttgtggagcaactatctgacatacctgcggatatgcagcttgtgccgcacctaatcgggtgactctaaaagccatgcgtcaagctcgtaataaagggcgcgatcttgctcg

SEQ ID NO: 771 - DNA, 463 bp, Zea mays
  unsure at all n locations
  Clone ID: LIB3115-003-Q1-K1-B4
cggatggactcccacggcaagcccaagccgtcgacgccgtcgaagccgtcgaagccgccgacgccgtcgaagccgtcgacgccgacgccgtcgaagcccgaggcgaggaaggggttcatgcgccgcatcttccctttcctcctagccgccaacctctttgtcgtagcttatgtcctcgtgcgggccaaccaaaaggactcagcaaagaaggacccaacgactgatcctgctactgcaactgctgggaagcctgctgagccagtctctatccccagaaaggagctcccaccaatccctgaagatgaccagcgcaagctctacaaatggatgctggaagagaagcggaagatcaagccacgcaatgctgccgagaagaagaaactcgatgaggagaaggcccttctaaaagagttcatccgagcaggatccctnccaagcttatgagctcacccatttgggtctc

SEQ ID NO: 772 - DNA, 344 bp, Zea mays
  Clone ID: LIB3115-003-Q1-K1-B5
tcgtggacgcgttggtagaggtgggtcggcttgtcctccccctccgattcggcttcggcttcgtgaggttctacggcgttcagtttcacgcctgagcagatcgagatagcaacgtctgatgtcgagtactgttgcttcttctgctacctgtcatgctccacgtactaccacatgttctacaacgccttaagcacctacagtgaggtcctaaagtccaagatcatgatccatctacagacgcagatgtcaagcctgttcagctatcgctatattctcaacagagaactcgatgcaatacgtcatcatgaccatgaactgctatacacatggacgctcgaacataa

SEQ ID NO: 773 - DNA, 329 bp, Zea mays
  Clone ID: LIB3115-003-Q1-K1-B7
acgccggcttcccgcacaacgtcgtgttcgacgaagacgaggtgccgagcggcgtcgactcctccaagatctcgcaggaggagtacctcaacgcgccaggcgagacctactccgtcaccctcaccgtgccgggcacctacggcttctactgcgagccgcaccaaggagcaggaatggtcggcaagatcacagtcaactaaagctagctatccattccatgcatctcgatctgtatgtactccgcccgtcgatggatgatgcatccatctctacttgttttcctcacatgtacaacaattaatgcaacaaattaagtacgtacttgagag

SEQ ID NO: 774 - DNA, 327 bp, Zea mays
  Clone ID: LIB3115-003-Q1-K1-C1
cggacgcgtggggtttgatgatccagcgattcttttcgaagagccgactcggaagatcaagtgagcaatctagaaggccatgagcatccactcactctaggctgtcagctaattttcccctcaatccccagaggggtagccctaaattgggaaaaggtgctgtcagcagtggcactgcagaactgcaagatcttgtggcaattggcattttgcaggtaggtagtgcatagtttgaacttggaaggcctggtcattttaatttagccaattctcaccagaaaatggaattaccattctcagtagaagcagggtatagtataatactag

SEQ ID NO: 775 - DNA, 371 bp, Zea mays
  Clone ID: LIB3115-003-Q1-K1-C10
ccagccgcaccgcccggcccatcaagtacccgtcggagaagagggacgtcgactcgctcctcgccttcgtcaacagcctccggtgaggcccgccagtgagcgagaaccatcgttctctgtcagtatgtactgtattacatgttggtatccatctaggtgcgctgtacgtagagagggaggcggagggaactgggatgctagaaaaaacagatgcaggtgttgcttgtaactgcagaatgatggtaggtatgcatgaagtctgaggtcctggggtatttggcagctgaaggagagatttgtgcgtgcttgtagttgtagctagtggcgatggagtattctaaggaaaatcaaattagaatcgaagttttgag

SEQ ID NO: 776 - DNA, 329 bp, Zea mays
  Clone ID: LIB3115-003-Q1-K1-C11
aagacgacttgcttcattgattcttgaagagatcgagcttcttttgcaccacatggtcgagggtgatttgcaactgaggatcaagctgcgagttcggctcaagctgcaagtgcggtaagaagtaccctgacctggacgagacgatcaccgtcgtgcaggccagcgtcgtactacgcgtgagcccggaaaagaaggccgcgcccgtagtactcgcggactgggcggagaccggtgaagccgaacactgctgtaactgacgtggcaactgcaagttcgacacctgcaactgcttatcacattgatcgacgaccatggatatgattattatc

SEQ ID NO: 777 - DNA, 262 bp, Zea mays
  Clone ID: LIB3115-003-Q1-K1-C12
tgaaggtttctggtgatgtctggtttggctctggaattacactcaagggcaaggtgacaattgtcggcaagcctggagtgaaggtggagattccagatggagacgtacttgagaacaaggatgtcaatgggcctgaggatctttaagcaatgtttgtcatcaccagtttttcccaaggacatgtgacaggaactgccaaacctagtcactcctactgagctctatattttgggattttcatgtgcattccgaatgcagtgtg

SEQ ID NO: 778 - DNA, 164 bp, Zea mays
  Clone ID: LIB3115-003-Q1-K1-C2
gtttctgcaggctggcgtatcccccgttgtgcttttcgaagagccgactcggaagatcaagggagctatttagaacgccatgtacacgcactcactctatgcatgtagccaattttaacgtcaatccccagaggggtagccgtacttcgctaaaaggtgctgtc

SEQ ID NO: 779 - DNA, 437 bp, Zea mays
  Clone ID: LIB3115-003-Q1-K1-C3
cggactcgtgggtattgagaccaacaagcaacatagaaagtggaatccagtagcaacaatagggcaacattggcgaccaagatattttccctccttatgctccttgctctttctgcatgtgttgctaacgcgacaattttccctcaatgctcacaagctcctatagcttcccttcttcccccataccttccatcaatgatagcttcagtatgtgaaaacccagctcttcaaccctataggctccaacaagcaatcgcagcaagcaacatacctttatcacccttgtttcaacaatctccagccctatctttggtgcagtcattggtacaaaccattatggcacagcatctgcagcaactcgtgctacctttgatcaaccaagtagctcttgcaaacctttctcccatactctagtcacaacaatttctttcattcaa

SEQ ID NO: 780 - DNA, 402 bp, Zea mays
  Clone ID: LIB3115-003-Q1-K1-C6
cggacgcgtgggcgcgagtgagtgaacaccagccgtattgtcccgaccccgaccgatcctcgcctgctgcagccatggcgacctccgcggcgctctctaccgccgccaatcccacccagctctgccggtcccgcgcttcgctgggcaagccggtgaaggggcttggcctgagcatgggccgcgagcgcgcccagcggagcattgtgtgccaggcggcgagcagcatctccgccgaccgcgtccccgacatggagaagcggaagctgatgaacctcctcctcctcggcgccatctcgttgcccaccgtcggcatggtcgtcccctacggcgccttcttcgtccctgccggctccgggaacgccggcggcgggacctacgcgaaggacaagctgggcaacgaca

SEQ ID NO: 781 - DNA, 386 bp, Zea mays
  Clone ID: LIB3115-003-Q1-K1-C7
cccacgcgtccgagaccctgtcgggttgagtcgacggtccatcaggtcatgtggtccgagctgaaaggccgagactcgaagacagttcgtgtgatgcgttcttaatcgactgagggctaaggaatgtgacgtactggtatatgtacattagttgaagcggaggctataaagggtgtagagattgtttcatcagtgtatatcatctgtcccgatgggttttgttttgtgcttttcacgattcattgtggaagcacatgtattattagtacaagaactgctagtagatatataggcttataattaagcacgacttctaaaacctcaacgtacgtatgtgaaagccccatatgatggtaaacaaaaggaaaatacaacattacatgtgt

SEQ ID NO: 782 - DNA, 412 bp, Zea mays
  Clone ID: LIB3115-003-Q1-K1-C8
ggcgattacctgagcgtcgcgatcatgtaagccggtgcccgcaatgagttccggcgactgcggtggatataactgatgtgatgtcaaaaatgcattggttgcgacgagcaagggatgcgtatctgttagcgctaggaagtggaaccaaaactgtctgtaatgccggtgctaccaaagttgcctagacactttgaacgatcaaggcgtatggtatggcttcttgttagtatggtgcttgtctgcacgtcaatggctccatgttaagatgggctgaacggtattccaaggggcgggcatgataaccattatctgaaccattatccatacctgaactacctgaacctgtacccgacctacccgaacctaaataacccaaacactagttcagatcctaagtctcaaaacccaaaat

SEQ ID NO: 783 - DNA, 459 bp, Zea mays
  Clone ID: LIB3115-001-Q1-K1-D3
taccaatcagttcaggttctaggaagggccgccattgtcccaccaggcaacgaatccacggtgcagacgagtccatggaggctctgcacagtgacacaggtcgaggagctaaagatgctgctcttgacgctgcctacctgggcgtcgttcgtgattttctacgcagtcacgtctcagatgcagtcgacgatgattgagcaaggcatgctcatggacaaccacgttggctcgtttgccatcccgccggcatccatgccgatcattggtgtgctcagcttcctcatctgggtcgccgcctatgaaaccgtcctagcgccattggcgcggcgcttcaccgggaacgagaagggcttctccagtggcagcgcctcgcgatcggccaagccctgtccattctgacaatggcgcttgctgcgcttgtggaaaacaggagggtggcgatcgcggaagccagcgggc

SEQ ID NO: 784 - DNA, 391 bp, Zea mays
  Clone ID: LIB3115-001-Q1-K1-H12
gcactgcgaaggggacagccactcacacgctacaggtgagcatggctgccatgaacatgatgcgcacagccactgcgaggagcacggtcattcagacaccgctgttgagcatgcttgcgagcatgagtgccatggtgagcaccaaactgtgcacgctgtgtaaacacaccactgccatgaccacgaccatgagcacggacagcatgagcttggggagatcgaggaacctgagaaggactgccacgaccacagccaccactgctgccatgagcctcacggcaaggacaaggtcgcggccgagccagttgaagaggtcacgatctcaatcgctgccctgcccaaagacgaatgccaccaccacagcgaggaacaacacaatggggagcactgc

SEQ ID NO: 785 - DNA, 389 bp, Zea mays
  Clone ID: LIB3115-002-Q1-K1-H12
gcactgcgaatgggacagccactttcacgctacaggtgagcatgggggccatgagcatgatgcgcacagccactgggaggagcacggccattcagacaccgctgttgagcatgcttgcgagcatgagtgccatggtgagcaccaaactgtgcacgctgtggaaacacaccactgccatgaccacgaccatgagcacggacagcatgagcttggggagatcgaggaacctgagaaggactgccacgaccacagtcaccactgctgccatgagccttacggcaaggacaaggtcgcggccgagccagttgaagaggtcacgatctcaatcgctgacctgcccaaagactaaggccaccagcacagcgaggaacaacacaatggggagcact

SEQ ID NO: 786 - DNA, 355 bp, Zea mays
  Clone ID: LIB3115-002-Q1-K1-H9
tacagctgcaacaagagaccgcacggctttttcataatacgaagacatatgtgacgagctgtgggcacatcaccaagatctctgtggaagtgtacctcaacgcgctaggttatacctactacgtaactctcaccgtgccttaaacctacgggttttactgctagccgcatcatagagccggaatggacagcgagatcaccgtctactaattaggctagctatcgatcgatatccatacatgtattaactgttgctatctgctttgtactccgtcgatctgtacatctctacatgcttccgtctttacacaccatcctctgatccgactacgtatgtatgcatgctactacactga

SEQ ID NO: 787 - DNA, 460 bp, Zea mays
  Clone ID: LIB3115-004-Q1-K1-C11
cgttgttgaatctagccctcttttagaaactataagttttgtatgtttgaaattgcttgaatgatagaatcttgtccgtgtctgcctgaaaaaaaaaaaataaaattttttttttattattaaaaaataaaaaaataaaaaaaataatttttttttttattaaaaaaatatttataattaataattttttttaaaaattttattatatattattattaattaatatttttatttttttttaaatggggcgggcccttttttaaaaataaaatttttttttttttaaataaaaataaaatatttttttttttggtgtaacaaattaaaaattatgggacgtaatttttaaaatgttgaattttaaaaaattttgttttacaaaaataaatattttttaaaaaaatattttttttataaaattttataaataaaaaaaaatgtctaaaaatattttttttta

SEQ ID NO: 788 - DNA, 364 bp, Zea mays
  Clone ID: LIB3115-009-Q1-K1-G1
aagcaacatagaaagtggaatacagtagcaacaatagagcaacaatggcggccaagatatggtccaggcttatgctccttgctctttctgcatgtgttgctaacgcgaccatttttcctcaatactcacaagctcctatagctgcccttcttcccccataccttccatcaatgaccgcttcagtatgtgaaaacccagcccttcaaccctacaggctccaacaagcaatcgcaacaagcaacttacctttatcacccctgttctttcaacaatcgccagccctatctttggtgcagtcattggtacaaaccatcaaggcacaacagctgcagcaactcgtgctaccagtgatcaaccaagtagc

SEQ ID NO: 789 - DNA, 347 bp, Zea mays
  unsure at all n locations
  Clone ID: LIB3115-009-Q1-K1-H10
cccacgcgtccgctcggactcggaaacacgcgttggtgataggaagcgtcttctaggatcgctcctgggcggccttgtggctggtggagtgaggtgtccagtcagacacggtttcgcctctactaccacagtaccactactacttcattgtaatataatccttggcattctaaaaaatgccatgcctggtctaattcttctgttcttgcggaacatacacttctcgcttccgttcggtcgacaacggttatgtaaatatagcgaatgctagcgggcagctcgaatcatcccaagtggtagggtcacgatagaattgtttgaaatggctcgttcttgtgcttttnana

SEQ ID NO: 790 - DNA, 143 bp, Zea mays
  Clone ID: LIB3115-009-Q1-K1-H5
cccacgcgtacgcagacgcttgttctgacacttgggctgtgccagacataaaggggtcaggaggacattgtagactaaggaacattttataactatcgttgtatcaaaactgttctgaactgtaatgttattttccaaccccc

SEQ ID NO: 791 - DNA, 300 bp, Zea mays
  Clone ID: LIB3115-010-Q1-K1-G10
tcttgtgttgttcggagcgggcagcagcacaggggcccatcccgatcctagtcgatcttcttcccctcctcaaggaagaaaagaagctgaaccatggggaagagaaagtcagctgctaagccacctcctaagaagcggatggacaagcttgacactgtcttttcctgcccattctgcaaccacgggagtagtgttgagtgcctaattgacatgaagaatctgattggcgaagcatcttgtataatctgtcaggaaaacttcagcacaactgttaatgcactcactgagcctattgatata

SEQ ID NO: 792 - DNA, 378 bp, Zea mays
  unsure at all n locations
  Clone ID: LIB3115-010-Q1-K1-G9
tcttgtgttgttcggagcgggcagcagcacacaggcccatcccaatcctagtcgatcttcttcccctcctcaaggaagaaaagaagctgaaccatggggaagagaaagtcagctgctaagccacctcctaagaagcggatggacaagcttgacactgtcttttcctgcccattctgcaaccacgggagtagtgttgagtgccgaattgacatgaagaatctgattggcgaagcatcttgtagaatctgtcaggaaaacttcagcacaactgttaatgcactcactgagcctattgatatatatagtgaatggattgatgagtgtgagcgtgtcaacactgttgaaagcgacgatgatgcgtgagctngccccatgtga

SEQ ID NO: 793 - DNA, 282 bp, Zea mays
  Clone ID: LIB3115-012-Q1-K1-A2
tacttcgatgctctcttttttggcagctagtatgtatcgagcattatcatcaaatatcgcaacatcccggactgttatctgaaactcactaccaggtgttgatgtgattctggataacattggaggatcatatctccagcgcaacctgaatagcttaggtgttgatggtagacttttcatcattggcttccaagggggcatagcagctgaagtgaacctgcaagctgtgcttgcacgccgtttgaccatacaagctgctggactgcgcaacaaaagccttgc

SEQ ID NO: 794 - DNA, 140 bp, Zea mays
  Clone ID: LIB3115-012-Q1-K1-E11
taattaataattattacaatccaaagcatggcatattaaaatcaaatctataaattattcatgagaggtttctaaccgctcatgattgcgatctccgctcatatggttgattgcgtcggaaccgtatcatttcactggtt

SEQ ID NO: 795 - DNA, 178 bp, Zea mays
  Clone ID: LIB3115-013-P1-K1-D3
cccacgcgtccgaaggagtacctggacgtctactaccccaacgacggcgagctccagcgcgacgtggagctgcaggcgtggtggaaggaggtgcgcgaggaggctcacgtcgacctcaaggaccgagactgttggcccaggatggacgccgtccagcggctggccagggcgttcactg

SEQ ID NO: 796 - DNA, 63 bp, Zea mays
  Clone ID: LIB3115-013-P1-K1-G7
ggtggagccctcttttagatttcttatgtgttatagttcaataataaagttttttgtgtggag

SEQ ID NO: 797 - DNA, 325 bp, Zea mays
  Clone ID: LIB3115-014-P1-K1-A7
atccattctgcatgctaacgttttatatcttctccccgcctatggcactactgggcttaacggcaaactacccaaggctgatgcattaacaacaacaccaaagatctccgacatggttttactggcaagcatcctacttgacacttacaccaagtctttcacaccctcacaaacattgttattgctataccccactcgatggcctctcaaactcacgttaagatacatgttttcgcttataacacagatgttgtcgaggataccaacgttatcgctatcgatatatacaaatccactcgtgactcttctaacaatatttattgag

SEQ ID NO: 798 - DNA, 343 bp, Zea mays
  Clone ID: LIB3115-014-P1-K1-A8
gttcgacgaactgaaacttattttaaagacagacggcagtgtcattgtgaaggggggtccgaggtgcagcctaaggactcataaggtgtacagtgacttgaatgttgactacctaaagatgttcctcctaaatgttccagccaccaccgaagctctgggactgttctttttcattgatgaattgactggttttgagatcaatgttgaccatctgccagagcctttcggattcattttcacatggtttgctgctttgccactaatattgttcttagcgcaatcattgactaaggctatagtgcaggattttttaatttcttaaggcaccatgtcctaatttttt

SEQ ID NO: 799 - DNA, 268 bp, Zea mays
  Clone ID: LIB3115-014-P1-K1-D10
ccgaaccggactgcccgggtcgacggacgcgtacattgacgcttgggcggacgcatgtgtatacgtttgggcggacgcgtgggcgtggggccgccggggacgcatcagcgggagactcgccaaggagagcccgcaaggaggcgactatgagggccaagtggaagaagaagcgcatgatgaggctgaagaggaagcgttgaatgatgaggcagatatccaagtaggctgatggggattgtggatggtggtgtctgcatagttgttttac

SEQ ID NO: 800 - DNA, 451 bp, Zea mays
  Clone ID: LIB3115-015-P1-K1-A1
aagatcctgagcatcagtttggtgaagggtgctcgggccattttcctagagtacctcttcggaagaacatgttcgttgaagcgtcccgatcctctgggactcaaatgtgatacaattactagtcccaggaggctagtaaacacatttatacatcagatgatttcagatctgcttaaatgagacaaacctataaaggtggcgatcaactttaagagttggtccacaacttgggaaaaatcatcagagtggggctgaagcagcccgatatacgcagcgaagcaaatcagcggtccaacagccacaggcaaggttgagaacagtcgtaactcttacccgatctccttttctgaaaaacaacaaataagcaaggatgagtacaaacgtactcagcagcccaccttcacccgcggaatgggggaatcagatataatgcatggaatatgtggagctc

SEQ ID NO: 801 - DNA, 442 bp, Zea mays
  Clone ID: LIB3115-015-P1-K1-A11
cgcgatgccgggctggaggttcatgtgaagtggctccagagtaacttcaccttcatggaagagaaaacttgatgccaggtgcaggtacttgttcctgtgcacgcatattcagcacccaagtatatcgggcgcctgaagaaaaccttgctctgtacatggaaaccgaaaaaaaaggtaaatatttgcttgcctcagtgctccattccgaagcttgtacgctattgctgcacaattccggcattcattggctcaagtgaatagcgatgtaaatgtattttaagggaagccaactttgtaccagtaacgatctgattccgaaattatcgaacagattgccaagttcagtaactctgcatgtaagatttgctgaaactgttgtaccatagccactatgggcaattgtaactttgtatctataatgaaaaaaaatcatattattttg

SEQ ID NO: 802 - DNA, 347 bp, Zea mays
  Clone ID: LIB3115-015-P1-K1-A12
cgcgatgctgggctggcgcttaatgtctattgtcttcattgacggttaacatgtatggaggaggaaccttgtatgccagttgaaggtacttgttactttatcacacctcttaattcacccaactatatggaccgctatgcagaaatctttgctttctacattgaaacctatacataaatgttcaacactaagacttgcctgagctttgctttacgcatcttgtaccatattgatgcaaatttgcggttttaatcgtctcaagtctttaacaatgtgaatttgttgtaagggaagccaactgtgtacctataactaactgatttcacgaattatctaaacagattgct

SEQ ID NO: 803 - DNA, 430 bp, Zea mays
  Clone ID: LIB3115-015-P1-K1-A4
ctctccgtttccaagatgtcgaagcgagggcgtggaggttcggctggtaacaagttccggatgtcactgggtctaccagtggcagctactgtgaactgtgccgataacactggagccaagaacctgtacatcatttctgtgaagggaatcaagggtcgccttaacaggcttccttctgcctgtgttggtgacatggttatggcgaccgtgaagaagggaaagcctgaccttagaaagaaggtgatgccagctgttattgtgaggcagcgcaagccatggcgccgaaaggatggtgtctacatgtactttgaagacaatgctggagtgattgtgaacccaaagggagagatgaaaggttctgccatcactggacccatcggaaaggagtgcgcggatctctggcccaggattgctagcgcggcaaatgcga

SEQ ID NO: 804 - DNA, 216 bp, Zea mays
  unsure at all n locations
  Clone ID: LIB3115-015-P1-K1-A6
acccacgcgcccgaccgacgggaggacgagacagaacaacggggatttanacgacgacagggaaaagagaagacggggcaagacaaaaaggaacaggggggcaggaaggaacccaaagacaccgcacaaggagcaacgggagacaacagagacgaaccagcacaagacaaacaaagacgcacagcagaggcaaagcaggcaagacccagcaacaca

SEQ ID NO: 805 - DNA, 423 bp, Zea mays
  Clone ID: LIB3115-015-P1-K1-A7
gccggcttggtttcctcgaaggatcagcatctactcttgattgtggactttgtcacatctgatatcaacttcataaatctttatccgagatggcgctgcaaaacattggtgcttcaaacagggatgatgccttctacaggtacaagatgcccagaatgattaccaagatagaaggccgtggtaatggtatcaagacaaatgttgtgaacatggttgacatagcaaaagcacttgccaggccagcttcctacacaaccaagtactttggatgtgagcttggtgcacagtccaaatttgatgagaagacagggatttccttggttaatggggctcatgatactgcaaagctggctggcctccttgaggtattcatcaagaagtatgtccaatgttatgggtgtgggaatcctgagactgagattc

SEQ ID NO: 806 - DNA, 419 bp, Zea mays
  Clone ID: LIB3115-015-P1-K1-B1
cggacgcgtgggcagcctcctgtccccggccgaggccatgaagcgggaggaccctggctggttcggcggcgccgaggagctgcgccagggcgtctggaccgtcgaggaggacctctacaccacgctcaagaagaaggtgagccgggtgtacgccgcgccgccagaggagaggaagaagcgcgtctacagcaccgcgccgtccaagttcaccaccatcgatcagtatagcgggctcgggttcaggttggtgaggatggggttcgacgacatgtacctctgcagcccgggaggcatgtacgacaagttcggcaaggactactttctgtgcacggggatggcgtccatgttggtgcccgtcgtcgtcaaccccggcgaggagtggaatgcggcgcaagtcatcgagcatgacaaacttgaac

SEQ ID NO: 807 - DNA, 435 bp, Zea mays
  Clone ID: LIB3115-015-P1-K1-B7
cctcgaaaagcacctttttcgccgggtttgccttaatatgccatggtcaacacgcatgaagagggcattgggtgctgcaagggggctcgagtaccttcacggagctgagagatccatcatttatcgagatttcaagacatcaaacatcttgctagatgcggattacaatgctaagctttcagactttggtctcgcaagaacaggtcctagtggagaccaaacccatgtgtcaactcgggtcatgggaacttatggatacgcagctccagaatatgtcatgactggccatctgacggcacgaagtgatgtttatggcttcggagtggtgcttctagagatgattatcggaagaagggctgtggacaagagccggccaagccgtgagcataacctagttgactgggcacggcccctcctcgtccataacaggaagct

SEQ ID NO: 808 - DNA, 249 bp, Zea mays
  Clone ID: LIB3115-015-P1-K1-C10
gcaatagcactgggcgccgccggcacctggcctgaggccgtgatccagtgcctcctcttcctgctcgccgctggcatgctcctcgcgcttcactccctcccccgccgcgccgcccttcggctgcgccgctccggcgccgccggcggctcctacgcggcccagtcgcgccggcacttcgctcagggtgcccagcttctcgcccgcgcgcgcgctacggcccctatgcccccgtgcccgctcgtccgcgcg

SEQ ID NO: 809 - DNA, 410 bp, Zea mays
  Clone ID: LIB3115-015-P1-K1-C11
taaaaaaaaagaaagaaggaaaaaagaaaggagggaagagaaaaaaaaaaagaaaaagaaaaaaaaaaatttttaaaaaggaaaaaaaaaaaagggggtataaaagaaggggggaaaaaaaaacaaaaaaaaaaaaaaaaagaaagaaaaaaaaagaaaaaaaaaaaaaaaaataaaaaaaagaaaaaaaaaaaaagaaaagaaaaaaaagaaaaaaaaaaagaaaaaaaaaaaaaaaaaagaaaaaaagagaaaaaaaaaaaaaaaaaagaaaaagaaagataaaaagaaaaaaggaaaagaaagaagaaaaaaaaaatagagaaaaaaagaaagaaaaagaaaaaaaaaaaatggaaaaaagaaaataaaaaagagaaaaaagaaaaaaagaaaaaaaaaaaataaaa

SEQ ID NO: 810 - DNA, 441 bp, Zea mays
  Clone ID: LIB3115-015-P1-K1-C12
cccacgcgtccgcggacgcgtgggcaacggccgctacgccatgctgggcgcggtgggcgccatcgccccggagatcttcggcaagatgggcatcatccccccggagaccgcgctgccgtggttcaagacgggcgtcatcccgcccgcgggcacctacaactactgggccgactcctacacgctcttcgtcttcaacatggcgctcatgggcttcgccgagcaccgccgcctccaggactggtacaacccgggctccatgggcaagcagtacttcctcggcctcgagaagttcctcgccggctccggcgacccgtcctaccccggcgggcccctcttcaacccgctcggcttcggcaagaccgagaaggagatgaatgagctcaagctcaaggagatcaagaacggcaggctcgccatgctcgccatcctcggttacttcat

SEQ ID NO: 811 - DNA, 428 bp, Zea mays
  Clone ID: LIB3115-015-P1-K1-C3
aggccaccgagggcggaagctgtccagatcgcgtgattccgcatcccgttcgcgagcgcgacacacgctgacagctcacggctgaccttcccgacggcctccagctccatcttgattcttgaggcgaagccccggtgcgtaagagtctgccatggccagcgagaataaggtctttgggttcgaggaagtcgccaagcacaacgtcaccaaggactgctggatcatcatcgccggcaaggtgtatgacgtcactccgtttatggatgagcatcctggtggagacgaggttttgctagctgtaaccgggaaagatgctacagctgatttcgaagatattggccacagtgattccgcaagggacatgatggagaagtaccacatcgggcagatagatgcttcaacaatcccagcaaagcgtgctcatgtgc

SEQ ID NO: 812 - DNA, 429 bp, Zea mays
  Clone ID: LIB3115-015-P1-K1-C4
cggacgcgtggggtgaggaagcagaccacatggcggacgccgccggcgagcacaggaccagctcctctaattaaggtcgcagtcgcagcgtgtcctggccgtgggcggcgattagaagctagctagcgttggcatgtgtgttgggttctggtttgcttttaccaaaagtttgtttcaaggtggatcgcctggtcaaggtccgtgtgctctattaaggtggatcgcgtgactctggcagtgagtgttgctgcttgtgtaggacgtggtacgtacgggctttattttggtcccaagtcaaaagtcacggtcggtctggatgttgtgtacttgggtttgttgaattatgagcagctgcgtgttgtaattcggctgggctacctggatgcgttaataattgctttggtttctgcccagcgcgcgagcgtgtta

SEQ ID NO: 813 - DNA, 392 bp, Zea mays
  Clone ID: LIB3115-015-P1-K1-C5
aaataatcttatagagtaagggtgggcgggtaatacccttatttatgacaggtttaaattgggtaaagtatacccctaggataaagaagaagaaggggctgagaaaactcgcaggaaaagttccaaccgttcgtctacttaaattcgaacgggttttcaaagcacaaaaacgcatacatatgtctgttttcaaagcacaaagagttctagatgagattcgctggcgttactacgaggaaaccgttatgatactgaatctcatgccttatcgagcatcgtatcccatcttaaagttggtttattcggcagcagcaaatgctactcattatagggatttcgacaaaacgaatttattcatcactaaagccgaagtcagtaggagtactattatg

SEQ ID NO: 814 - DNA, 401 bp, Zea mays
  Clone ID: LIB3115-015-P1-K1-D1
agcaaaggcagcacactcagctatccagcaaatgagatcgagacgcaggagtcatggccaccgtcagcgccgccgtggtgaccaccatcgttgcccgcgccgcgatcgccaggcccaatgctctagggctgcctgcgttgagggcgaggagcgagagggtgcggtgcagctacgccaaggatgccaagaacgcggccccagtcagcaccaagggcgcaggcgcgtcgctgctcgccgcagcgggcgcggtgaccgcgtcggcggggcccgcgctggcgctcgtggacgagcgcatgtccacggagggcaccgggctgagcctcgggctcagcaacaacctgctggggtggatccttctgggggtcttcggcctcatctggtccctctacaccatctacacc

SEQ ID NO: 815 - DNA, 449 bp, Zea mays
  Clone ID: LIB3115-015-P1-K1-D10
cccacgcgtccggtccattattgccgtctcccttttgcgtgagcaaagaaagagagcgagaagagcagtcgccatgtctggcatcatccacaagatcgaggagaagctccacatggggggcgaccacaagaaggaggatgagcaccacaagaaggccgaggagcaccacaagaaggaggagggggagcaccacaagaaggacggcggggagcataaggaaggcatcgtggagaagatcaaggacaagatcaccggcgagcacggcgacaagtccggcgaccacaaggaaaagaaggacaagaaaaagaagaaggagaagaagaagcacggcgagggccacgaccacgacggcggccacagtagcagcagcagcgacagcgactgagatctggtgtcgcagcacaggtgcaacacatgtatgcttgctggatggaggattcataccagct

SEQ ID NO: 816 - DNA, 425 bp, Zea mays
  Clone ID: LIB3115-015-P1-K1-D11
cggacgcgtgggtcagcagcttctgcttgctctggggggaaggagagagagagagagcgagagagagatctagtagagaggctagtaggtggtcctcgaacgaagatgttggcggtgttcagcgggcaggtggtggaggtgccggcggagctggtggcggcgggcagccggacgccgtcgcccaagacgaaggcgtcgcagctggtggggcgcttcctggccgcgtccgagccggccgtgtccgtgcagctcggctaccacggtcacctcgcctactcccacaccaaccaggcgctccttcgccccaggtcgttcgcggtcaaggacgtggtgttctgtctgttctaaggggtgctggtcaacctgggtcgtttgagccagcatcacggtctgtcatgcatagggcgcctactaggtgcttcttg

SEQ ID NO: 817 - DNA, 350 bp, Zea mays
  Clone ID: LIB3115-015-P1-K1-D8
cggacgcgtgggcgggcggggagtgcgtgctcgtgaagacggccacgcaggcgctgccgcggggcggcgacgtggtgttcggcgtggcgcaccatcacgcgggcggcgccggcgcgtctctgcacggcgccgacggccgtctgctgtgcgagtcggcggccacgtacgggggctggctggaggccggggacgaggcgggctacatcgtcggcatgtccacgtgctacccgcgcccgggcgccgtcacggtgcgcgacggctagccgttcaccgtcgtgtccaggtacagtagcgaccggggccacacgggcgttatgggccttttgtacattctcgtggcctaccactcc

SEQ ID NO: 818 - DNA, 461 bp, Zea mays
  Clone ID: LIB3115-015-P1-K1-D9
ccccgaggaattccgatctcatttcctttggcttcaggataggcctaataagaaaacaaataattccaattcatatatgaacatttttgcctccttatttcttgaaaatgtggaattggaattcctttcctttggcttcaggataggcctaataagaaaacaaataattccaattcatatatgaacatttttgcctccttatttcttgaaaatgtggaattggaattccccgaggaattccgatctcatttcctttggcttcaggataggcctaataagaaaacaaataattccaattcatatatgaacatttttgcctccttatttcttgaaaatgtggaattggaattccccgaggaattccgatctcatttcctttggcttcaggataggcctaataagaaaacatataattccaattcatatatgaacatttatgcctccttatttcttgaaaatgt

SEQ ID NO: 819 - DNA, 436 bp, Zea mays
  Clone ID: LIB3115-015-P1-K1-E11
cggagcctctccttcccggtctcctccgcccgttgccttcgtcccctccatctccggctgcgtcgccggcgagcccgacaccgcgaatcggatccgccgacaaggcgagagggaagagatggggctcacgttcaccaagctgttcagccggctgttcgccaagaaggagatgcggatcctgatggtgggactcgacgccgccggaaagaccaccatcctctacaagctgaagctcggcgagatcgtcaccaccatccccaccatcggattcaatgttgaaactgtggagtacaagaacatcagcttcactgtctgggatgtcgggggccaggacaagatcaggccactgtggaggcattacttccagaacacccagggtcttatctttggtgtggacagcaatgatagggaccgtgttgtgaagcaagggatgagc

SEQ ID NO: 820 - DNA, 431 bp, Zea mays
  Clone ID: LIB3115-015-P1-K1-E12
cctattctgacaatgcctaatgatgatatcacacacccaactccggaccttactggatacattactgagggacagatatacattgataggcagctccataacagacagatttatccacctatcaatgtcctgccatctctatctcgattgatgaagagtgctattggtgagggcatgacacgtagagaccattcggatgtgtctaatcagctttatgccaactacgcaattggaaaggatgttcaggccatgaaggcagtcgttggagaggaggcactctcgtctgaggatctgctttacttagagttccttgacaagtttgagaggaagtttgtgacacaaggagcatacgacacacggaacatcttccagtcactagatcttgcatggacattgcttcggatcttccctcgcgaacttctccaccgtat

SEQ ID NO: 821 - DNA, 449 bp, Zea mays
  Clone ID: LIB3115-015-P1-K1-E4
cccacgcgtccgatcacaccagcccaggttcaacgactgcagctggccacagtaacaggcgatggcctacacaggacaggacacaccaccaaaacagcagggatcaacgcgagctcaagcgaccaaggctgcagcaaacgaaagtacctgtagcgctctgtcagaggccgtcctcacacacccgcacaggttcaggcatctcaggttcccgcactggctggagaggaacacgagcgccacgtcgctgaaactggagcacccgctgatgttgagcctggtaagctgagggcacccgtgcgccagggcgtacaaggaccggtcgctcagcctgaagcttctgctgagatccagctcgcgcaggtcgtggcagtggtttgccacggcctccacgccgctgtcctctagctgaggcctgatctggcgtagagatagaacttgcagcttcgtga

SEQ ID NO: 822 - DNA, 361 bp, Zea mays
  Clone ID: LIB3115-015-P1-K1-E5
attgaaggtggcaggtgctcgccattgaaggtgctcgcgtcccgaacttgcatacgcagctagagaggcggttttgaatcagttttggattttacggcaaggtccaagactttcaccgtcctcttcagcagcagtacaaaaagtgattttaccttttgtctctgaggccttgttttattctagaatttgttgcaaatgaaagatggaccaggacacccattcccttggttggtacaatggagtggttcaagtccaaaatgccaatcagaaggggctttaaatggtttattattcctcgaaaagaaagaacaccatggcacaaacttattttgccattttaatacaattccgtttaagcttt

SEQ ID NO: 823 - DNA, 392 bp, Zea mays
  Clone ID: LIB3115-015-P1-K1-E7
gactagttctagatggcgtgcgagacgccggtgctggtggagttctgggcgccgtggtgcgggccgtgccggatgatcgcgcgggtgatcgacgagctggccaaggactacgccggcaagatcacgtgctgcaaggtgaacacggacgacagccccaacgtggcgtctacctacggcatccgcagcatccccaccgtgctcatcttcaagggcggcgagaagaaggagagcgtcatcggcgccgtcccgaagtccacgctcaccaccctcatcgacaagtacatcggtagttcatgagcatgccatgccatgccatgcatacatgcattgacgactaaacacatatgtgtatctctagtagcctttgcatacgggatatgatcaattcaagc

SEQ ID NO: 824 - DNA, 406 bp, Zea mays
  Clone ID: LIB3115-015-P1-K1-E8
gaagaaggagccccagcccaagggacaaggtgagcccaccaccaaaggataatggtgcccacaatggctcggaccgtgaagacagccctgggggcagggagatgagcaagaggagtcggagcccgtctgatggctaccgtagccctgtgggcaatgggcgcagcccgagccgtagcccaagccccaaggtcaacaatggtgatgacccaagccccaagggcaacaatggtgacgacccaagccccaagggcaacaatggtgatgacgagcaccgcggttcaccaagaggaagtcagtccccctgaactgaaaaactccccgtgcaatttggggagcagtgtgcctgatttgagaaaacaaactgtattttgccatttctcagacttgtgatctttttgagcaagaa

SEQ ID NO: 825 - DNA, 186 bp, Zea mays
  Clone ID: LIB3115-015-P1-K1-E9
ctcatggcgggccgccgccatggctgttgtgcctagtgtaacctcaagcaagtctagtctgggtctgtctgtgtatacgactaaaaaaacaacagatggaagattcggacgaggcggccagtgctctctcctcgtagccagcttctcctgttccagctcagttcttgttcatccagcagagcaccc

SEQ ID NO: 826 - DNA, 321 bp, Zea mays
  Clone ID: LIB3115-015-P1-K1-F10
ctcctcgtcagctctggcggtggcgcctcatttcctgccgcccctcggccgccgcgcctcctgcttcgccgtcgtctgctccaagaagaagatcaagaccgacaagccctacgggattgggggtggcctgaccgtcgacgtctacgccaacgggagaaagggcaagggctagggcgtgtaccagttcgtcgacaagtacggcgcgaacgtcgactgattcagcccaatctacaacgaggatgactggtcttccaccggcgacgtctactgttgtggaaccactgggcttctgtattggttctttactcctgcttttgtttc

SEQ ID NO: 827 - DNA, 99 bp, Zea mays
  Clone ID: LIB3115-015-P1-K1-F11
aataatgcagtaagacgacacacattatcatttgtggtatgaccaataatatatgcatggtcataataaagctccggttttaatgaaaacaaaccaaaa

SEQ ID NO: 828 - DNA, 382 bp, Zea mays
  Clone ID: LIB3115-015-P1-K1-F12
gaacagcctggacgagcacacaagtactcatatttcttttcacgaatatttgatggtcggataggaactttgtgtgtatggcatcggcaatccaaagtatccaatcctgatttcactctctatgcgatagcacgggagcagggttcttgttacgtagacagatggaagtgcaagctctctcgagaaacatcaatggcgagtagaagcggcactaagaagtagaaacatgagtttgagcaatttcacacggacagacggcttgcacacagacaacaaggtggaactgactcaatatgagcatttacaatacaaatgtttaacgaaactctgatcttgaataactgatggtgcattcctgatcttcttagatagtctgcatgct

SEQ ID NO: 829 - DNA, 433 bp, Zea mays
  Clone ID: LIB3115-015-P1-K1-F5
attaccgcaagctgtcgccacggcgagaccttttctgacccaagaaaagtcgccctcgcgcgcgtctagatctccgagcgaagggagagcttgccgtgtgccgagacttccatggagctactccacgccgtcatccatggagctgcgacgacgacgacgaccaccaccaccaccaccacgagcagcagcgccaccgtcaccagcggcgacgagggcgcccacctgccccaggggtgggccaagaagaagcgctcgcggcgccagcgctcataggaggagaacctcgcgctgtgcctgctcatgctctcccgcggcgaccgccaccgcgtccaggcgccgccgtcgccggtcccgtccgcggagttcaggtgctccgtctgcgggaagtccttcggctcctaccaggcgctggggggccacatgaccagccacc

SEQ ID NO: 830 - DNA, 433 bp, Zea mays
  Clone ID: LIB3115-015-P1-K1-F7
cccacgcgtccgcattgattggtgctcatccagcgtatgagttggtacaggcagaccttgccattgcaaagtacagcgagctctgagtgatcaacctcagaaggctgtttgcgaacaagggaatcagcttcatggacttgcagaagcagataatcgagaagtcacctcccaagaggaggctgacagtagacactattttctgatagatacacttttatttggtgtctgcctgttgttcttgagtagccaacaaccttcggcattatggcggtggcgttgtatataagatagtgctgatgttaggtgatccgctgtgtacctccttgtgaatgcaatgcggtagttccatcaaggtaccatgaggaagactgctgcaacaatgttgttgctgatgtaagctgatattattcaaaattattcatatttcatgggc

SEQ ID NO: 831 - DNA, 125 bp, Zea mays
  Clone ID: LIB3115-015-P1-K1-F8
cccacgcgttcgcaacgaagtgcgagcgatctttcgtccacacgactcgaaccaccaccaccggggatcttccgcaccactcgcggggctcatagcgatggtttcgctcaccatgatgtcgtcct

SEQ ID NO: 832 - DNA, 325 bp, Zea mays
  Clone ID: LIB3115-015-P1-K1-F9
gacgaacagcccgacgactacggttgcccacagtgcaacgcgccgaagaagcggtttgcgaggtacgacgctgccaccgggaaggccatcggcggcgctctgccgcctatcgccgtgatcgtaagtttggtgatcggcatcgctggggtaggagctctgctcgtgtacggcctgcagtagcctgctcgttcttgttcagaaccttttttttttttttgctgtgctcaagaagctcagctgactgctgctgtactctgtctcacaagacattccgagtgatatacatacataaaagggaagaaggaaatacacagtatttgaggct

SEQ ID NO: 833 - DNA, 205 bp, Zea mays
  Clone ID: LIB3115-015-P1-K1-G1
cttatcctccccctcttaccaagtcctcctcgtgttagggttccttagggttttgtggaggggcgatggcggcggctgatgtggagtaccgttgcttcgccggctggcttgcctgggccaccagcaacgagtcgctggagaatgccttcgcctgctacggcgagatccttacctccaaggtgataaccgaccgggagacggggag

SEQ ID NO: 834 - DNA, 446 bp, Zea mays
  Clone ID: LIB3115-015-P1-K1-G10
cggacgcgtgggtcacacagcaatccacacaagcacttcgacgtcacacgggcgctgcgcacagacacaccaagcgtcggcaccaatggcttactaccaggaggtggactactgctcggaggaggtgaggtcggtggccccggccggcttcggccgccacggcggcggcgtccagcagcacgtcgtcaaggagaagttcgaggaggtcgacacggtctcacgcgccggcgccaaccaccaccaccaccatggtcaccacggcggccacggcttcgtggtgcgcgagaccagtgtcgaagaggacatcaacacctgcaccggcgaggtccacgagcgcatggagagctttctcgccagggctaactgagccgcccggcggtcgtcatccacgcccgttcgtgcttgcctgcggcccttatgtatgtctgtgggtgactggttgttca

SEQ ID NO: 835 - DNA, 443 bp, Zea mays
  Clone ID: LIB3115-015-P1-K1-G12
cggacgcgtgggcggacgcgtgggaactcatactttcttgagctgttgaatgaggaatctgagggacttttaaagctcccaactgacaagcactgttatcagatcctgaatttaggcgctatgtggagctctatgcaaaggatgaagatgcgttcttcaaagattatgctgaatcacacaagaaactctctgagcttggcttcacgcctcgcagcacagcaccatccaaatcagatcttccaaccgccgccgtgcttgcacagagtgcctttggggtagcagttgctgcagccgtagttatcgctggctacttgtacgaggcttccaagaaggccaagtagagggcgaagttcttctccacatggctttgctttagtaagtctgaagatcgaataacaggaccatatctgaagatcgaataacggatcatataaatgagttac

SEQ ID NO: 836 - DNA, 426 bp, Zea mays
  Clone ID: LIB3115-015-P1-K1-G4
ggatttcaggtgcactgtaatggttcctgtgcatgctgtccttgctggtggtttaattttccagacatgggttctggagcaagcgaagtacagaaaggatgctatttcgcagtactatcggttcatctggaatctcttctatgctgaatatatcttcttcccgttaatatagagagatcctgtagttcatcttgatcttgggctacagcctaattcatggtgaaaagagggagaagttggcaaagtgaggtctgttgtgcatattttcaacggaaacaatggagtagcaatattgctatgctagggttctgaagttgtaggagcttttctaagcttttacgatgttgaaggcgttgttggagctgtggaagctgttttcctttttttccttttgtatcaacagtgtcgcgttctgtacggtcttac

SEQ ID NO: 837 - DNA, 446 bp, Zea mays
  Clone ID: LIB3115-015-P1-K1-G6
aacctgctccagtcactaattgggctctctctttccttcgtttgccatttttatttgtcaccaccagtgcccgctcttcagcaagtgctcactcaccattgacactgtcaccaggcccgacaacggttgctctgaaaatgtcagttctctttgaccatcaattttttcttcttcttcagaatccactgtcaggaaagaaagaaataaaaaaaatgagaaggtcatcaataagagcgtgctagctaatgtgcgtgcatacaggcgcacggtttgagcggcgagcagttagccgcgagagaagtcgagatcatcgacatcgcatccgtgtcgcgggactactggagcaaggcgatcggtgctccgagcgtcgacctgactgccttcaagtcacagcggacagatcgaggcccccttctcaagggatggatggactcgtgccatccggt

SEQ ID NO: 838 - DNA, 376 bp, Zea mays
  Clone ID: LIB3115-015-P1-K1-G8
cggacgcgtgggcggacgcgtgggcggactcttgggcgggttcgtgaggttctccggggttcgggttcgtgggtgagcggatggagatggcggcgtctgatgttgagtaccgctgcttcgtcggcggcctcgcctgggccacggacgaccactccctccacaacgccttcagcacctacggcgaggtcctcgagtccaagatcatcctcgatcgggagacgcagaggtcccgcggcttcggcttcgtcaccttctccacggaggaggcgatgcggaacgccatcgagggcatgaacggcaaggagctggacggccgcaacatcaccgtcaacgaggcccattcccgcggcggccgttgaggcggctgcggtgggta

SEQ ID NO: 839 - DNA, 438 bp, Zea mays
  Clone ID: LIB3115-015-P1-K1-H1
cggacgcgtgggctgcaagctaaggagagtgtgatcaccaacagctagtgctagtcccccttccttccatccatccatggcatgcgtcagcaccttccagagctgccccattgccagaagagcaaagatcaacaccaggtccaggggcagcagcagtagcgtggcgaaggggtcaccaccaccagccttccagttccagtgcagggcgtcgactttcgcggcggacaccagcctccggctcgagctggacgagaaccccgaggcgatcatctcgggggcgtggcccgggaactgctccctcctcagctacgacgacctccgcgcctacctcgagtcgcaggagacggcggcccaggcagacgatcagcgcggcgtggcgctcctgagcgagaccatgtccacacccgtgctggtggccacagcagaccagaccctgga

SEQ ID NO: 840 - DNA, 299 bp, Zea mays
  Clone ID: LIB3115-015-P1-K1-H2
cccacgcgtccgcaacgaagtgcgagcgaccctcgtccacacgacacgaaccaccaccaccaaccagcagccgcaccacgcacccagcgcaaagcgatggcgtcgctcaccatgatggcgtccttcgccgccgtggcggtggccgcgccctcgcgccgcggcaccttcgccgtggtcaggtccgccaaggtcgaccgctgccaggagcccgtcacgctagcagcaaccgaggccaggcccgccgccgacggacgccgcgccgtcatgctcgcggctgctgcggcggccgtggcagccat

SEQ ID NO: 841 - DNA, 448 bp, Zea mays
  Clone ID: LIB3115-015-P1-K1-H4
cggacgcgtgggttccattctggagcctttgcagaaaaaaatagaggtaccgtcctatgtgatgcttggaattgcaaagccagtggaagaaccacaggcacctcctactccacagcgccctctttctcccatgggagaagcttgttccagaatggaccttactgccatctatcagatcctattcacaacgcattaccgagatgatgaagggagcaatgagctgtcttttcaagaatggacacagcagatgagggatatgctggatgcaaggaaacgtggcgactctgccttcaaagacaaagattttaaggcagcaatcgattgctatactcagtttgtcgatgtggggataatggtgtcaccgactgtattcgccagacgaagcttgtgctaccttatgtgtgaccaacctgatgcggcccttcgtgatgcaatgcaagcgcatatc

SEQ ID NO: 842 - DNA, 401 bp, Zea mays
  Clone ID: LIB3115-016-P1-K1-A1
gaaggtgtgggaattgttgccgctgttggagattcagtcagtcatatcaaagttggcactcctgtggcccttatgacttttgggagctatgctgaattcacggaggttccagccaaacatcttcttccagtgccaagaccagaccctgaggttgttgcaatgttgacatcaggactgactgcatcaattagtcttgaaaaggcaggacaaatgacatctgggcaagttgttttagttacagcagctgctggtggaacaggacagttcgcagttcagctggcgaaattagcaggcaacaaggttgttgccacatgtggaggtgaaagtaaagctgaacttctggcttccttaggagtagatcgtgttatcaattacagaaatgaacgagtcaaagatgttct

SEQ ID NO: 843 - DNA, 469 bp, Zea mays
  Clone ID: LIB3115-016-P1-K1-A10
cttcactcattctcttcctgtttagagcaagtaaatgacaaagcaatagcaagcgcaactgagtggatgaatgcaaactttgttgctgagggtggtacagatattatgcatcctttgagtgaggcaatggcattactatcaagtgttcatgacacacttccacaaatatatcttatcacggatggttctgttgatgatgagcataacatctgccgaactacaaaaactgatctctccaacagagggtctaggtctcctcgaatttctacttttggactaggatcgtattgcaaccactatttcctgcgcatgttagcttcaattggcaagggacattatgatgctgcacttgagacagcatcaatcgagaatcagattcttaaatggttcaagagagcggcgagtacaattgtggcaaatttctccattgatgctttgacacatcttgatgaattcgaagtggattctg

SEQ ID NO: 844 - DNA, 227 bp, Zea mays
  Clone ID: LIB3115-016-P1-K1-A11
gtgagtactcctgccgcctcgcaacaccggtctcgatctcggccgttacctgatggttggtaggtgagtgtgcttggcatcgcctgtgttctgtctttgccgctgtaccattttggagacgcttaccataatatgaacagctgtgatatgatatcgctacagatatatgcattaaaaaaataaaaaaataataaataaaaaaataaaaaataatattaaattataaa

SEQ ID NO: 845 - DNA, 416 bp, Zea mays
  Clone ID: LIB3115-016-P1-K1-A4
caagagttgaaatggcctgatgtagatgaatcctgggaatccctcacttctgggatcacccagctactgacagggatcagtgtgcacatcgttggtgattccacgcacattaatgaggcagttgctaaagagatagccgagggcatcgggtaccttccggtttgcactagtgagctgctagagagcgccactgagaagtcgattgatacatgggtggcttctgaaggagtggactcggtagctgaagcagaatctgttgtcctggaaagccttagcagccatgtccgcactgtagttgcaactctggggggcaagcaaggagcagctagcagattcgacaagtggcagtaccttcactctgggttcacggtttggctatcggtgtccgacgcaagtgacgaggctagtgccgagag

SEQ ID NO: 846 - DNA, 73 bp, Zea mays
  Clone ID: LIB3115-016-P1-K1-A6
aataatgtaaaactccagtatcatcatgagaatgatgctgattcatctagtggccgggttgcgtggggtctgt

SEQ ID NO: 847 - DNA, 442 bp, Zea mays
  unsure at all n locations
  Clone ID: LIB3115-016-P1-K1-A9
attggctattcaatgtacttaaatggcaaggaaactcctacgggggtacgagataagccacgtgcccatctgcctgtttgtgctggagtcgagctccaaaaccacgtcaatataaaccagggcatgcaggagatgatttcttaacgaaatttcagaggaatgcaggtcttgtggccagtggtgtggctaagaacctgaatagagttgggacctacatcaaagacactgtcagtgatatgatgcagcctcaccgcaagcgtcccaaataaaacataggcctgtctctcctaaatcctgtatggaagttaacattagaaattagatgatcggngaacatcggatcaatcactttcttccatacacacccagcgcagcagtagcttagctttctgttggtgtcagaaactctagagaattgagagaagatctatggttaggaaaa

SEQ ID NO: 848 - DNA, 455 bp, Zea mays
  unsure at all n locations
  Clone ID: LIB3115-016-P1-K1-B1
caagcctgacatccagatctccaagaaccagatcctgtactgcacaagcttgagctggagcgccgatggaagcaccctctacactggctacaccgatgggtctatcagggtctggaagatctctggatatggctacgcaggctagatgtcgaaatccagtcgagggtctaggaggtcttgttctgcgaaacattgcaatgcggaacatagttttttttatgtgagttacatcgtctgcttggtactttatggtcgcccaactatctaagcttagctttggtaatgaagtttattaaatttgcttgtttggttttaccttgtgaaagggggtgtttgcctgagtttataatctgtttacttatagngttttttggcgaagttaactgcggaaatggtgacttcctcagctggcaaaaaaaattaatcatttctttcgtttactccatctatttatt

SEQ ID NO: 849 - DNA, 436 bp, Zea mays
  Clone ID: LIB3115-016-P1-K1-B12
tggggagcaaatttggggagaacacatcgagatgggggtccatgctctctgacgggcaggttggtaagctaagtgacatccttcctggaccagcagctgggtttttctcttctttcacatctggagctcgatatgattcatagtaattgcaccatgacccttgatctttaacccttactatgcgtcgtatggaaacccacatgtgtcatcaagagaacagaagaactgttggcaggtgtagtatgcctttggaaatctgttgctcacagaatgattccacaatgctggtcccgtgttgcttggcatatcctgccgcgcttcttcacatcttattgtgacttgacagtgtcatggagaaattcaggaaattatgatggaaaagatgaagattattctgtatcggctgcccacaggtgaatgagtgggtagggaaatc

SEQ ID NO: 850 - DNA, 431 bp, Zea mays
  Clone ID: LIB3115-016-P1-K1-B2
cggacgcgtggggccacggcggcgacgagaagtggcgagccccgagagcgggtttagttagaggctacgggcggtcgggcgcggcggcggcggcggccatgagcagcgggagcgagagcactaccgccagcaggtggcccgagctggccacgctgcgcgcgctggcgcgcgacgccgcggagcagcttcggctgccgcgggccggcacgtcggcgtcggcgtcgtcgccgtggcgcgggcgcgaggaccacctccacggccacggcaagacggtcaaagtgatgcacctgctgctctggggacccaagtgaagcggcgagaggccaccgtaccgtcgggctcttccgctgggcgtggtcgttttgctctgtctgaaatccgctccgtacggactgtactggacctatttatacaccttacatactacgacg

SEQ ID NO: 851 - DNA, 366 bp, Zea mays
  Clone ID: LIB3115-016-P1-K1-B4
tgcacgtacacgtaccgaatcggaatttcgggctaggcgcacgccttcacggtaaagccgctgataagtgatggactccttcggcaagcgcggagcccccgtcgagacctactactactaccccgaggaggaccggtccaacttctggtacatggtggactacggcatggtccgcttctgcgtgggcgactcggagcacgactggcgcgtcctgacgcacgacctcgacttcatcgagcactgcctattcacggtggaccgcatgcaccagtcgttgctcatcttcgcgcacgctccgggagctaggctactccttcaacagctggcacagctgggaagggttcttttgaggaagccaagggcctt

SEQ ID NO: 852 - DNA, 373 bp, Zea mays
  Clone ID: LIB3115-016-P1-K1-B6
ctcggaaagtgcacgaggacacgaacacagaacttgtaaacccagataccattgaggagtacgatgttgttctttaccttggtatcatagacatattacaggaatacaatatgtcaaaaagggtcgagcacgcagtcaaatctctcaagtttgatcccctttcaatatcagctgttgatcctgatttgtattcgaaacgatttgtaaaattcctggagagtgttttccctgaacaggactgagtaggcacaataaagtacatatatagtagtgctgctggcctcatttttcccccttgtataaaatgttaacatgttctcagttattcagcacggcttctgtgcattaaaaaaaataaataaaatatttttat

SEQ ID NO: 853 - DNA, 465 bp, Zea mays
  Clone ID: LIB3115-016-P1-K1-B8
gtggaatccagtagcaacaatagagcaacaatggcgaccaagatattttccctccttatgctccttgctctttctgcatgtgttgctaacgcgacaattttccctcaatgctcacaagctcctatagcttcccttcttcccccataccttccatcaatgatagcttcagtatgtgaaaacccagctcttcaaccctataggctccaacaagcaatcgcagcaagcaacatacctttatcacccttgtttcaacaatcgccagccctatctttggtgcagtcattggtacaaaccatcagggcacagcagctgcagcaactcgtgctacctgtgatcaaccaagtagctctggcaaacctttctccctactctcagcaacaacaatttcttccattcaaccaactgtctacattgaaccgtgctgcttatttgcagcacaactattaccattcagccagctagcta

SEQ ID NO: 854 - DNA, 404 bp, Zea mays
  Clone ID: LIB3115-016-P1-K1-C3
ggcgttcttcacccaacgcttctcgcacgggggtgttctattggtagtcattatttgttcaggtgaactaggtctgaaaatctgggcaattccagattctcatgtgagatgataaaaatgtcataatcatttgctaagtttaatgacctacgtcagttcttacgtactaaaaaatattcgctagttgagtcgttccggcatattcctgatgtcctacggtgaacttgtatgtcattatcatttcaacgtatctagatgcattatggaagatttttagttttctttgttatatttgagaagttatatattgtatatacagagagatgcagctgtgtattatttgctgcagcttcgcgatgttgcagtcattttattgtagttagtttatatgatacgtcgttgca

SEQ ID NO: 855 - DNA, 460 bp, Zea mays
  Clone ID: LIB3115-016-P1-K1-C5
cccacgcgtccgggcgaggaacttgaagagtggctaaagtcagttgttgcatcaaaagagttgacctcttttatcagaggacagcaagagcaagttcttcagctggaagcaggctcctagcgtcaggactcttaaaattaattacttacagaagtcttccagcaattagaacatacaatgcgagttccaaggtatgcaatggaaaccttgatactggggacagatctgtggccatgtggtggattgtatgacctctcccacccactcatgctaagacaaacttgggttgggcgcccacccttcgttcgttgaatcatgagctcgagccttagaggagaattttcagaaaaggaaatctacatgcccgagtgaccatgtaaatatttaccattgcagttcgcggacccatgagtaccaaaaaaaagagatgtatcatattgacctgtaacattgtaagatc

SEQ ID NO: 856 - DNA, 402 bp, Zea mays
  Clone ID: LIB3115-016-P1-K1-C6
cggacgcgtgggcaagatcaagcgcctcccgcctccagcactcttaactcaggggacacgatcgccatggccgccacatcgaccgccgccgccgtgctgtgcccgccgtccgtggccgggctccgcctggcgccgtctcccggccgggcgcgcgtgtcgttccgcgcggcgccggcgccggcgcggcggtccgtggcggcgcgcgcggagctgagctcggcgctggtgatcagcctgagcacgggcgtgtcgctcttcctgggccgcttcgtcttcttcaacttccagcgggagaacgtggcgaagcatgtgcccgcgcagaacggcaagacgcacttcgacgccggcgacgatgcgcgccaaggagttcgcggtcctgcttaagtccaacgaccccggggg

SEQ ID NO: 857 - DNA, 436 bp, Zea mays
  Clone ID: LIB3115-016-P1-K1-C8
cccacgcgtccggagcgatctcctctccctctccctctccgatccattctccagcgcagcgaagtaaacatgtctgaccgggcaaagatgtcgtggcaggcgtacgtggacgagcacctgatgtgcgagatcgagggccaccacctcgcggcggcggccatcgtcggccacgacggtgccgcctgggcgcagagcacggcgttccccgagttcaagaccgaggacatggccaacatcatgaaggacttcgacgagccagggcacctcgcgccgacaggcctgttcctcggacctaccaagtacatggtcatccaaggcgagcctggtgccgtcatccgtggcaagaagggatcaggaggcatcaccgtgaagaagacagggcaggcactcgtggttggcatttacgacgagccgatgacgcctgggcagtgcaaca

SEQ ID NO: 858 - DNA, 76 bp, Zea mays
  Clone ID: LIB3115-016-P1-K1-C9
acgaatcatgttttcatggctgaaacaaatttcagaataaaatccattcaacaaaagaataggtacaaataaataa

SEQ ID NO: 859 - DNA, 432 bp, Zea mays
  Clone ID: LIB3115-016-P1-K1-D10
tgaagaaccagtagcagatcttcttcccaaagaattgaatgatatgacaattagtgacgataaagctgatgaccataatgataaggaaggtgaaggtgttactcttgatgggaatggagccgagacaggacagataattgtgacaacaataggaggtcataatgggaagccaaagcagaaggtctcatacatggcggaacgggttgttggtactggttcgtttggtatagttttccaggcaaaatgcttggaaactggtgagacggtggcgataaaaaaggtgttacaagataagcgctacaagaatagagagctccagactatgcagttgcttgaccacccaaatgtagttcagctgaagcatcacttcttttcaacaactcataggggagaagtgtacctcaacctagtacttgaattcgtttctgagac

SEQ ID NO: 860 - DNA, 319 bp, Zea mays
  Clone ID: LIB3115-016-P1-K1-D2
cccgcctccagatcgtccggcggggatggcggcgtctgtctttccagcgctgctgctggccgtagcggcggtgcttctcctaccggtggcagaggccgtgtggctcgagctcccgccgtcggggaccaagtgcgtctccgaggagatccagcccaacgtcgtagtgctcgccgactacgctatcatgtacgagtcccaccccagctcgcattccaccgtcgccgtcaaggttacatcaccctatggcaatactgtgcatcataatgaaaatgctacaacgggccagtttgcattcaccactttataaagctggaaacta

SEQ ID NO: 861 - DNA, 466 bp, Zea mays
  Clone ID: LIB3115-016-P1-K1-D7
cccacgcgtccgcatgacttgagcatgctttctaaattgacatttttggtgtttacttgggctaaaaactaggattcttgcatttttctgccatgtgctgtttacaggtgaaattgtgttgttcagaaacaaactttggcatccgtttctcattctcctaactgcatttacatgtattcattttccttttggattgtagctgaaagcagtcctttcccacctagatgaataccttaatagattttacaatgttttgggagctaggaattgatgatacatccagaccttggtagttttaacaaggtcttccacacatgttctgatcaacaatcaagatggtagcactgtgtcttctatgaccacaaaccaattcttgtgttcccttgacatcgataacataaacatagttgaattttgtcactttgtgaaagacatcaatataatccacatgggaaatttcttaatc

SEQ ID NO: 862 - DNA, 434 bp, Zea mays
  unsure at all n locations
  Clone ID: LIB3115-016-P1-K1-D8
ggacaggttgtgaagagtttctcatcaggtttgcgagaagggggagattttgttgcagctggagtttcaccaaaaggagaatggatatattgtgttggtgaagacatgaacatgtattgctttagctaccaatctggtaaactggagcatctgatgaaggtgcatgagaaggatgtcataggcattacgcaccatcctcacaggaacttagtagccaccattgctgaggattgtatgatgaagatatggaagccttgactttttttctttttaaaaaaaccttgaaccgatgattaaataggatgtattttgttttgtaatttagataactggtaggcgctacagctatggactcgttggtgcttatgttgccccatggtctactaccattgtttnctgtactagatttaaggacctttcaatggtgttaacac

SEQ ID NO: 863 - DNA, 403 bp, Zea mays
  Clone ID: LIB3115-016-P1-K1-E1
aacattcccaccatcgccttctgtgatactgattcttttatgcgctatgttgatatcggcattcccgccaataacaaggggaaacagagcattggttgtctgttctggctgctcgcccgaatggtcctccagatgcgcggtacaattcttccaggacacaagtgggacatcatggtagatcttttcttctacagagacccagaggaagcgaagcagctggaggaagaagaggctctggttgcacctgactatggcgcggttgcagaatacactgcaccaggcgctgacaactggggcggtgaatggggtgctggcgaagctgcagctccagctgctagcattccatctgctggcgcagactgggctgctgctccagctcctcctgctgacggtgtctgggacg

SEQ ID NO: 864 - DNA, 432 bp, Zea mays
  Clone ID: LIB3115-016-P1-K1-E10
cggacgcgtgggcggacgcgtgggtgcgcttatgttaacgacctgcattagctatctttcacactctcagatatgggcattgcaagatggaagtacagtggtcgttggaggaaagacaaatcgagccaaacttgaattttctgaagagatgaaccggctacttgataaagtaccagagctgatcagcgccgatgagaatctattagataccaaatcgacagccacatgaaacatttttttgtgtgtttttgtttgggattgctgaagatgcagtagctctgttcaggtgaacacacgttcgaattcacaaaacatggcctttaagaatagaaaaactgtttcaatctttcagtagaacttcttagatcacactttaattgagctctttggacatctttgaatgaggaaactaaactgatagcttgttatttt

SEQ ID NO: 865 - DNA, 391 bp, Zea mays
  unsure at all n locations
  Clone ID: LIB3115-016-P1-K1-E11
cccacgcgtccgggcaagtgccccgtggacacgctgaagctgctggcgtgcgtggacgcgctcaacggcctcgcgcacgccgttgtcgggaccaacgccagcgacacctgctgcccgctgctgtccggcgtggccgacctcgacgccgcgctctgcctctgcaccaccatcaaggccaaggcgctcagcgtcagcctcgtgctccccgtcgccatctccgtgctcgtcaacgagtgcggcaagcacgtgccctccagcttccagtgcccgtaataactatattagggcgcgtacttactgatcgatcatcatctgcatatgtactgctactctactgtatatatatgatgtatcgncactaaactatatacatcatatatgtacacgtacg

SEQ ID NO: 866 - DNA, 293 bp, Zea mays
  Clone ID: LIB3115-016-P1-K1-E12
agctcagcgccacggccagccacgcccgcgacagcctcaaggagaccaacgccaacgacccgctcgagaagtactgcaaggagaacccggactccgaggagtgccgcatctacgacaactagctatagtcgtagctatatagggcgtggaatgatactctcgatcggcgcgtcatacgtggaatgaacttgtatgaagctatacctcaatgcttctctacctgccgccgccgccgcagcagcaccccgtatgatatgatacacagctgggatggtatactgatattttgggtt

SEQ ID NO: 867 - DNA, 353 bp, Zea mays
  Clone ID: LIB3115-016-P1-K1-E2
cggacgcgtgggcgtgcgtgaccggaggaaacgggtatatcgcctcggcgctcatcaaggtgctgctggagaagggctacgccgtcaagacgacggtcaggaaccctgatgacatggagaagaactcccacctcaaggacctgcaggcgctcgggtccttggaggtcttccgcgccgacctggacgaagacggcagcttcgacgacgccgtcgccggctgcgactacgccttcctggtcgccgctccggtgaacctccacacgaagaaccccgaggaagaaatgatcgagccggccgtcaggagaactctgaacgtgatggtgtcgtgcgtgaaggcggacacggtgaggcgc

SEQ ID NO: 868 - DNA, 302 bp, Zea mays
  Clone ID: LIB3115-016-P1-K1-E7
gcggcgcggggcagtcgatgaacgtgccgtttctccgccgcagcagtacacctgctccaaggagatcctcttccacccttcaagaagtggatgctcaagcagcagctcaaccaggacgacgaccctttccagctgcctggcgtcgccatggacaactgatacaccgtaccgtcgtctctgtttgcgtttctgtcaagtgtgcatggaataatactgtaactgtgtttcctgccgggcaatgcactgtgatatgatgcccaacgaataaatgtcgcttttatttttaaaatatataataattt

SEQ ID NO: 869 - DNA, 303 bp, Zea mays
  Clone ID: LIB3115-016-P1-K1-F1
cccacgcgtccgaagaaagcaaaagagagtcatcgactctcaattttattctctctacgctggcttttgcctgtggcaatgaatagcgcattagcatcatagaagtattagcttggtcaatggaagttgttcatgcgcttcttcattgctgaaagtgttgtcatcttgtcgaactcacaataagcttagataagtgctgggtttgtgggaaaaaaaaataattacattataatattaatacatttaaatttaaatataaactattagttatttcattctctgtgttgttttgtgtggttaagt

SEQ ID NO: 870 - DNA, 387 bp, Zea mays
  Clone ID: LIB3115-016-P1-K1-F10
cccacgcgtccgcccacgcgtccgacagaagcggcggcggcggagcaaacgcaggcgaaggcgagggtgtgagggaaggagcaccagccatggtgcacgtcaacttctaccgcaactatggtaagacgttcaagaaaccaaggcgtccttatgagaaggagcgtcttgatgctgaactgaagctggtcggtgagtatgggctgaggtgcaagcgtgagctttggagggtccagtatgcactgagcaggatccgtaatgctgcaaggcacttgctcacccttgacgagaagaacccccgtcgtatctttgagggtgaggcgcttcttcgccgcatgaaccgctatgggctgcttgctgagggtcagaacaagcttgattatgttcttg

SEQ ID NO: 871 - DNA, 442 bp, Zea mays
  Clone ID: LIB3115-016-P1-K1-F2
agagatgaagcaactgagaatgccctcgccgtgaaagggaatacccctgggaacaacggcgatgaccccggggcagcttagcgcacgccaaaataggcagaacaggatcatgcaaaccctcgctctgatccctccatcaggatctccgtttggcaggaatgaagaggttgctgccagccgtcaaaaactctaattcacttatgagcgccctaagaaacagtccgtgagcccccctagcgttttgcagtcctgtcctcctctgcgcaccatgcctagtatcgctgctgccattcagcttgcttttgggagacgcctatatatagcgcctgatctgctgaattacctagcagttgctattaatctatccagaagacttggactgagtttgattgctatgtaaccacgcacctgtgcgacattggccaatgtggtgccgttgaac

SEQ ID NO: 872 - DNA, 413 bp, Zea mays
  Clone ID: LIB3115-016-P1-K1-F3
tataaatcagcatgtcaataatgttaaatacattgcgtggattcttgagagtgcacccatctctattcttgagaatcatgagctggcgagcattgtgctggattacaaaagggagtgtggccgggatagtgtgctgcaatcacacacctctgtgcacacggattgcaacagtgagtctggagaaacaaccttgcactgtgagcatgtgctgagccttgaatcaggtccgaccatggtgaaggcccggaccatgtggaggcctaagagaaccaaggcccaagaaacagttgttccatcttcaatttgaattgtgtgagacgttcgggatggtgattttggcaacaaactactactatttggcaaaaagatcagaatggttactagcgtcctctattggaagcaagtcacacagg

SEQ ID NO: 873 - DNA, 435 bp, Zea mays
  Clone ID: LIB3115-016-P1-K1-F4
cggacgcgtgggggaactgaggctgtggcatagaagttggcagaacttagccgcaagggtgtgacaactatcatcggaggtggagactctgtcgccgccgttgagaaggtcggagttgctgacgttatgagccacatttccaccggaggtggtgccagcttggaattgttggaaggaaaggagcttccaggagttactgcattggatgaagcagccactgtgactgtatgaagcaagttttcattttggttcatcttcttttttggaagttaccgggggagggactcccacctgatatatgtgcgcaaggccaggattgttggctcaaccacagggagcgctcgccaccgcattatcttcatgtaccattgtatacttgctacattcttggcttgcttctccttagccgctcgaaatgttggagatcaatgtttt

SEQ ID NO: 874 - DNA, 362 bp, Zea mays
  Clone ID: LIB3115-016-P1-K1-F5
gggaaaggttcacggatcgctcgcgcgtgccgtttatgtcaagtcgcaaacccccaaggttgaaccccaagagaagaagaagagggtgactggtcgtgccaagaaacgtctcatcttcaactctcgtttcgttaacgttacctccgctcccggaggcaaggttcaacgcaacaagcaacctcaaggaaagtccggttaaacgaaccaacaaggagagataagaagaatcaatccagtgaaaacacgaatattccagcagaaacagacttttattcagaattacattactcttatcactctcgccctttcctgccttcccctatcttcgcctttactcgttctactccctatcaatcctactt

SEQ ID NO: 875 - DNA, 112 bp, Zea mays
  Clone ID: LIB3115-016-P1-K1-F7
gtaagttttgctgccgcacaatggaattgttttgatgaaggctggagtgcctactatgctataagcccttaaggccatgttcgtttgatcccatagggattgagggggattg

SEQ ID NO: 876 - DNA, 457 bp, Zea mays
  Clone ID: LIB3115-016-P1-K1-F8
cacacccacaccaaaggttgtggccttcagcccgcaagaagcagctatagctgaatccagaagtagtcccctgacaattgagagttggaaagtaaggcggtcagagatagcaaccaaagtcaccttctacatgatcccagctctgcttctcgtctccaagaacagcatgagtacctctcttctggtcggggccgtgttccatcaagtgtacatgttccagaaggagattctcctggactacgtgcaccatgatatcaccagaaagtgggctttgatatacctgaagctgcttctgctggtgatggcgaaggacacaatcatgtactttcatccgttctaagctcacccaccgtgtcagttcctcaaatatcccagcaacgcatccggctgcgcactcagagaataatggtagtggacgaattctggagccctcgttcgtgtattccccctcatgagc

SEQ ID NO: 877 - DNA, 392 bp, Zea mays
  Clone ID: LIB3115-016-P1-K1-G1
ggagatggttttcgccaagggagaccccggcattgccggcttgtatgacgagctgcttgtggcggaagaactcaagccctttgggaagcagctcatggacaaatacgtggagacacagcagcttctcctccagatcgctgggcacaaggatattcttgaaggcgatccattcctgaagcaggggctggtgctgcgcaacccctacatcaccaccctgaacgtgtttcaggcctacacgctgtagcggataagggaccccaacttcaaggtgacgccccagccgccgctgtccaaggagttcgccgacgagaacaagcccgccggactggtcaagctgaacccggcgagcgagtacccgcccggcctggaagacacgctcatcctcaccatga

SEQ ID NO: 878 - DNA, 433 bp, Zea mays
  Clone ID: LIB3115-016-P1-K1-G4
cccacgcgtccgaaagcaaacggtgaggagcctgtcacctggaagagggccgccaccatggaggatgtcctcagggaggctgacgtgataagtctgcatccggtgctggacaagaccacctaccatctgataaaccccgagaggctggccatcatgaagaaggaggctgttcttgtgaacgcaagccgagggcccgtgatcgatgaggccgcgctggtggagcacctcaaggctaaccccatgttccgcgttggcctcgatgtctttgaggatgagccttacatgaaacctggactcgctgacatgaagaacgccgtcgtggtaccgcacatcgcatcagcctccaagtggacacgcgagggaatggcaaccctgtctgctctcaacgttcttggtaagatcaaggagtaccctgtgtgggggaaccccaatc

SEQ ID NO: 879 - DNA, 265 bp, Zea mays
  Clone ID: LIB3115-016-P1-K1-G5
cccacgcgtccggtcagcctttgggatttggcatttcttcatctatttttttgctgcgaagaattttggggaataagagcacctcaaagtatcagcaggggagatacggcgttaacatttcatcatttccccatcttgctcctgatttcccccccttggtgaatgtactgtcgacttaacgtctttcatagttatttctttgttacaataaatagactttttgaaccatgtataaaatataaagcaagagattttatctttccac

SEQ ID NO: 880 - DNA, 358 bp, Zea mays
  Clone ID: LIB3115-016-P1-K1-G7
acaacatctacctcaacttcgatgccctccacggcgacaagtggcacggcggcgtccgtgacggcaccaacgtcgtgctctggaagtggtgcgagggcgacaaccagcgctggaagatccagccctactactgaaccaacggatgatatgaccatcgcgcccatcgatcgtgcacatgcatgcatacgtactagcagaataacaggggtcttatctcccgaggcgtcttttgcatgcatgccagcagttgcatagataaacaggagcgagacaaagggtgttcatgtatacgttattgcagctgtatgtatgtgccttgtaataatacatataataaagttgctcggggtgtattaat

SEQ ID NO: 881 - DNA, 283 bp, Zea mays
  Clone ID: LIB3115-016-P1-K1-G9
ctcagacttgcgaagagagttggagctaggattttgttgacatcaacctctagaagattatggggatccacttgagcatgctggaactgaggcctactggggcaatgttaacccgattggtgttaggagttgttatgatgagggtaagcgtgtagcatagacgctgatgttcgactatcacaggcagcatggcattgaaatccggattgccaggattttcaacacctatgggcctaggatgaacatttttgatggccgagttggagcatcttcattgttaagc

SEQ ID NO: 882 - DNA, 417 bp, Zea mays
  Clone ID: LIB3115-016-P1-K1-H10
aactcctaccactaccacagcaccagcgactgtccgggctggcagagaaaaagcagaccagacgagacctctcgcgttccgtcctcctccctgcccctgctgccgttccccttcttcctcagttctcccgcccgctgctgccctccgtccgcgtccagatcccgccaccaaccgatccggcgccctccagcatggcgggggcggtggcgaaggcggcgggagccctggctctggcgctcgtgctcgcgctcgcgggggccaactcggagggcgacgcgctctctgcgctgcgccggagcctcagggaccccggcggcgttctgcagagctgggaccccacgctcgtcaacccctgcacctgggttcacgtcacctgtgaccgggacaaccgcgtcacccgcctagatcttgggaatt

SEQ ID NO: 883 - DNA, 419 bp, Zea mays
  Clone ID: LIB3115-016-P1-K1-H11
ctttttcgtcgacaagcaggggagttaggtctcacatgcatgcttcatcacattgttgactgcataacgaaacacatggtcggcggatcggagatgatgagttccgtcgtcgtggatgctgctgctaccagcagcagcgagaagaagacgtcgtggccggaggtggtgggcatgtccatcaaggaggcgacggagactattctcaaggacatgcccaacgcgtacatccaggtgctgtctgttgtgtcgcccgtgacgctggacctttcgccccgaccgcgttcggttcttcgttgacaccgttcgcatgacttcgacagttgggtgatacattccatatgcattaaacaatccctactttttatttaatggtgccaggtaataattaaccatgccttaacttgttggttggtcttcct

SEQ ID NO: 884 - DNA, 419 bp, Zea mays
  Clone ID: LIB3115-016-P1-K1-H12
ggcacagcttgcttgcgtgcatgggtcaaatcgaaacaggatcccttctacgacagcgagacgtacaggagccagggtggcgacgggaccgtgcactggtactacgacaggcaagaggacctggaggcgtctgcgagggaggagctgctgcgggaggagctgctcgaggagattgagcagagggttgggggcctcagggagctggaggaagcgagcaaggaggagcagctcacaaagtgatcacgcgggcgaatgggctactcatcagctctctatctgagcttcgttagcaaataagttcagacttctctttactgccatgctcaagtctgtatatggccaaaacccaaaacgattgatcaactgcgctactgcagtgcaatagcaggatacgtatagtttttttttaagggaaacag

SEQ ID NO: 885 - DNA, 448 bp, Zea mays
  Clone ID: LIB3115-016-P1-K1-H2
cccacgcgtccggagacgtccgcccgtcgcccgtcgtccgtcgtcatggccgccgtggaggtgtgcgtgaaggccgccacggggaagcccgacacgctcggcgactgcccgttctcgcagagggtgctgctcacgctggaggagaagaaggtcccctacgaggtgaagctcgtcgacctcgacaacaagcccgaatggtttctgaagatcagcccagagggtaaggtgcctgtgttcaacggtggtgatggcgaatgcattgctgattctgatgtaatcacccaaaccattgaggagaagttcccaactccatctctggtcactcctgtagaatatgcatcagtgggatcaaagattttcccagccttcatcacattcttgaagagcaaggatgctagtgatggttccgagaaggcgctctggatgagctgcaggcactggatgagca

SEQ ID NO: 886 - DNA, 451 bp, Zea mays
  Clone ID: LIB3115-016-P1-K1-H3
cccacgcgtccgcccacgcgttcgcggacgcgtgggctgccgcctcaccgcctctctcaatctgataccgcagatccgtcgtccggtgagtggaagccgcacgaacccatggcctccggcgagcttgcctgcacctacgccgctctcatcctcagcgacgatggcatcgccatcaccgccgagaagatcgccacgatcgtgaaggcggccaacatcaaggtcgagtcctactggccggccctcttcgccaagctcctggagaagcgcaacgtcgaggacctcatcctctccgttggatctggtggcggagctgctccagttgctgctgccgcacctgctggtggtgctgcggctgctgctgccccggctgtcgaggagaagaaggaagaggccaaggaggattctgatgacgacatgggcttcagcctgttcgactgaggagaccccctta

SEQ ID NO: 887 - DNA, 448 bp, Zea mays
  Clone ID: LIB3115-016-P1-K1-H6
cacacatacatagtttcttctactacacgacgacaaacatggggaagcctgcgaagatcggagagtggggtggatacgccggcgatcgtcgggatctgagggctactccggaccggctgatcgaggtgaaggtcacggcggacaacagcagctgcatccgctccatctccttcatctacatcggagccgatggcaaaccgtacgaggaggggccatggggtttcggccatgctggcacggagtacaagattgatctgtgcaggttcgacgagagcttgacggagatctccgggaccacgggcccagcctacaacattgacaatctggtcaagtctctcaaattcgtcaccaacaaacgcgcttactgaccgtacggcagggacgagggcaccccgttccgtgtcaaggtgatgaacaacgggcacgtcgctggttttttggccgctct

SEQ ID NO: 888 - DNA, 431 bp, Zea mays
  Clone ID: LIB3115-016-P1-K1-H7
gcgacagctgcggcggctgcaccaggtcggagccacggctgtgccggtgcctggacgcggcgccccgcgggtgccacccgggctgcaaggactgcgtcaagtccagcctcagcgccgacccgccggtgtaccagtgcatggaccgcgtccccgacttctgcctgcgccgctgcaccgcgcccgccgccgccgtgcggtgaccaggcgactggtttctgcttgctcttgagtcttgacccacccacccaccaccaaccgctccagcctttcgcccaccccaccgccggcgaatcgtgtcgtctgaactctgagccagctgtggattaggtttttttttggtgttgttgcgtggaaagagaggctgtgagagacgagggatgtgtaatcttgttgagcgtacaaccgaccaaaccaaccttggacgcttgtct

SEQ ID NO: 889 - DNA, 198 bp, Zea mays
  Clone ID: LIB3115-017-P1-K1-A10
cggacgcgtgggcggacgcgtgggttttgtttcctgctggttaaaaaaaccaccactattgcacaaacatggttcatcttagggtgcaacgccaactcatcatctcaacggctatgctatgcaacttcattgtctttcggatcggatagggtgtacagtcgtggtttgactgatgctgcgagatgcatgtgtgctttt

SEQ ID NO: 890 - DNA, 437 bp, Zea mays
  unsure at all n locations
  Clone ID: LIB3115-017-P1-K1-A11
gcagctgggcgtggccttctccatcatcggcgagatcatcacggggaagggcgcgctggcgcagctcaacatcgagacgggggtgcccatcaacgagatagagccgctcgtcatcttcaacgtcctcttcttcttcatcgccgccatcaaccccggcaatggcaggttcatcatcggcgaggaagaggaataggctgctggcctcggacatgagtcgtgtgcgtttacttttacctgtgactgtgagtgatcgatcgattgctgtgtatcaattactcgtgatgagacctcgaaggtagggtgtcgcgttgggttgtctgcttgtagaaacaagagcttatatataaattactactagctnataaaattaaataataatattaattaatacttcactttgttttataaaaaatgttttattataatttggggcggcc

SEQ ID NO: 891 - DNA, 298 bp, Zea mays
  unsure at all n locations
  Clone ID: LIB3115-017-P1-K1-A2
cccgcggcggccgtggaggcgtcggcggtgggtacggtggtggccgtggaggcggcggctacggtggtggtggcggcggctantgcggtggcaaccgtggcggcggctacggcaactccgacgggaactggaggaactgagcggtggggcccgcgcggccaagttatcctgttcgctgccgtgatgtttaccctagtccagagggtttatcttcgttcgtctcgtgtttgttgttgcccatctgtgtttttgattgcaaggtcgctctgtgtcagttgttagtgctgtgttcatcctc

SEQ ID NO: 892 - DNA, 467 bp, Zea mays
  Clone ID: LIB3115-017-P1-K1-A4
atttgcttgaaaaacttgaggagtatggtgactccattcagatggatggtttcgacatagagtacgggaatcaggttttgacatgaaggcttggggatttggggacatatgttataaacaagcaaactccaaacaaacaaatttggctatcttctcctgtgagtgggccttctaggtttgattgggatgcaacagctaatggttggatatacaagaggactggagtgaaccttgtgcggcttctggagaaggagattggtgagctctgtggtactccagtagaactttagtaacagtactggaaatgccacacagctaggttgtatggagagcagtgctctgaatgtcgaagtgtagtacacaaaaactttttttttgttctacacatttgcacatggtttggaataaataacttcccctctctggtagcggggaacagtattattcggaaatggtgggagtaaaaa

SEQ ID NO: 893 - DNA, 454 bp, Zea mays
  Clone ID: LIB3115-017-P1-K1-A6
cccgaaattgacgccttgtttgacgagctgattgtggcggaagaactcaagccctctgcgaagcagttcactgacaaatacttggagacacatcatcttctcctccagatcgctgggcacaaggatattattgaaggcgacccattcctgaagcaagtgctggtgctgcgcatcccctacattaccaccctgatcttgttccaggcctacacgctgaagcggataagggaccccaacttcaaggtgacgccccagccgccgctgtccaaggagttcgccgactagaacaagcccgccgtactgttcaagctgaacccgtcgagcgagtacccgccctgcctggaagacacgctcatccttaccatgaagggcatcgacggccgcatgcataacactggctaggcggattctgttcactcacctgcagagtgcaccgcaattatcagctttcgga

SEQ ID NO: 894 - DNA, 381 bp, Zea mays
  Clone ID: LIB3115-017-P1-K1-A7
aaaaaaaagaaaaaaaaaagaagaaaaaaaagaaaacaaaaaaaaaaaaaaaaaaattaaaaaaaaaaaaaaaagggggcaaaaaaaaaggggaaaaaaaaaaaaaaaaaaaaaaaaaaaaaaaaaaaaaaaaacaaaaaaaaaaaaaacaaaaaaaaaaaaaaaaaaaaaaaaaaaaaaaagaaaaaaaacaaaaaaaagaaacaaaaaaagaaaaaaaaaaaaaaaaaaaaaaaaacaaaaaaaaaaaaaaaaaaaaacaaaaaaaaacaaaaaaaaaaaaaaaaaaaaaaagaagaaaaaaaaaagaaacaaaaaaaaaaaaaaaaaaacaaaaaaaaagaaaaacaagaaaaaaaaaaaaaaaaaaaaaaaaaaaaa

SEQ ID NO: 895 - DNA, 238 bp, Zea mays
  Clone ID: LIB3115-017-P1-K1-A8
cccacgcgtccggaccctttccatccaagctatgccaaaccctagccaccgtcggttccaatctgccaacatctcgtccgctggtgggtggctcggcctcggcggcatggcctcgtccgcctacgccgcttgggacgccgcggaggaggcggacatcgacgcctccgcatcgcaggaggagctcatcgtccgcgcccgcttcatctcccgtgacaatgaggaggatggggagggggag

SEQ ID NO: 896 - DNA, 398 bp, Zea mays
  Clone ID: LIB3115-017-P1-K1-A9
cccacgcgtccgcccacgcgtccgcaaaactattttggttgaacagaagattgactacagcatcatgggaggattagtgattgaattcgggcagaaggtgcttgatatctcaatcaggaacagggcgaagcaaatggaggcgttcttgaggcaaccacttgacttctaacagccttttggataaaagaagcatcatcggaatgcagaggctgtcctgttgaaggttttcctgtgtctgcaattttaatctggccttttgaataaaatgtttcctctaacaagtgaagggcactgtttttattgtctcgtgggccacagatgcctgctgaacaatttatgttcatttcttcttttcttaaagaagcatgcactaagaacatgaatgatgcatgccatgg

SEQ ID NO: 897 - DNA, 333 bp, Zea mays
  Clone ID: LIB3115-017-P1-K1-B1
cccacgcgtccgcggacgcgtgggcaccttcctcgccgcctcactccctctgaggtcgcagatgcgtccggttagacgaagccggccgcacccatggcctccggtgagctcgcctgcacctacgccgccctcatcctcagcgacgacggcatcgccatcaccgccgagaagatcgccaccatcgtgaaggcggccaacatcaaggtcgagtcctactggccggcgctcttcgctaagctcctggagaagcgcagcgttgaggatctaatcctctccgtgggatctggtggtggcgctgctccagttgctgcttccgccccagctgggggtgct

SEQ ID NO: 898 - DNA, 450 bp, Zea mays
  Clone ID: LIB3115-017-P1-K1-B12
gtggtaaaggatggagaccatgtcggctctcgcgaggacggcgccgccccttgctgggaccattcgccggccgtcctgcgcgctgcggccgacggcgtccctctccttcgccgccgcttcaacgacgccccgcggccggctcgggctggggctgagcacggcgccggcggggagcgggagggcggccagggctcgcgccgtcccgcagcgcatcgtcgcctcctcggaggttgagcgaagctacattatgatcaaaccagatggtgttcagcgtggtctggttggagagattatttctcgctttgagaagaaagggtttttgttgaaaggcttaaaacttttccagtgccccaaggacttggcgcatgagcattacaaggatctgaaggataaaccttactctcctaagctgatcgagttcataactttctggtcctgcttgtctgcatt

SEQ ID NO: 899 - DNA, 432 bp, Zea mays
  Clone ID: LIB3115-017-P1-K1-B2
aggatgaaagcgttgatgacacagccgtgaaggtggttgatattgttgacacattccgtctacaggagcaacctccttttgacaagaagtcatttgtctcttacataaaaaaatacatcaagaatctcactgctgtgttggagccagagaaagcggatgagttcaaaaagggtgtcgagggtgcaaccaagtttctccttagcaagctgaaggaccttcaattttttgttggtgagagcatgaaggacgaagcgtccgtggtattcgcctattacaaggatggtgccactaatccgacattcctctatttctctcatggtcttaaggagatcaagtgctagattagttacccatgttgggtactatatatgttctattggtatagccacaactattgctggcctgcctgaactgaacctaagtttttttaag

SEQ ID NO: 900 - DNA, 379 bp, Zea mays
  Clone ID: LIB3115-017-P1-K1-B3
gcaaaagccaaaaggcatcaccgccgcgacgacgatggcagcctcgctccaagccgcggccaccctgatgcagccggccaagatcggcggccgggcgccctttgcctcgctgccgtcccgcccgtcgtcgcaactcgcctgcagggcgttcggcgtcgacgccggcgccgccaggatcacgtgctccctgcaggacgtcgccagcaggtgcgtcgacgccgcgaagctcgccggcttcgcgctcgccaccttggcgctcctcgtctcgggcgcgagcgcggagggcacgcccaagaggctgacctacgacgagatccagagcaaaacgtacatggaggtgaagggcacgggcacggcgaaccagtgcccgaccattgac

SEQ ID NO: 901 - DNA, 412 bp, Zea mays
  Clone ID: LIB3115-017-P1-K1-B4
cccacgcgtccgagccggtggcggagaacgaggaggaggaggaggaacaggaggagttcagggacatccacgcgctgagccaggcgtcgtcgtaccgccgggcgcgcggcggcgagccgtgggggtccgccgcgggcggcagcaggcacacgtccgtccgctccgtcgggagcgacaccgcgcccagcgagcccttcccgactatgaccagggagttctcggccatggtcgccgcagcagccagcgccgcagcagccagccgtgacgccgacagcgacgtcgtgggcagggccgaggaggaggaggaggaggagctggaggagaccaacccgctggccatcgtgccggacaagaaccccatcccgtcgccgtgccggggcccgtcgtccggcgtcccgggcgccgacgcggt

SEQ ID NO: 902 - DNA, 457 bp, Zea mays
  Clone ID: LIB3115-017-P1-K1-B5
gaagagcggcggcgcgggcggacaaggagcaggcggaggaggagttgtgccaagccacaatgggtatctcgcgtgactcgatgcacaagcgccgagccaccggtggaaagcagaaggcctggaggaagaagcgaaagtatgagcttggtcgccagccagccaacaccaagttgtcaagcaataagacagtgaggagggtccgtgttcgtggaggtaatgtgaaatggagggctcttcgccttgatactggtaactactcatggggaagtgaagctgttacccgcaagacccgtatcctcgacgtggtctacaatgcatcaaacaatgagcttgtgaggacacaaacccttgtgaagagtgccattgtgcaagttgatgcttgcccattcaagcagtggtacctcactcactatggagttgacattggtaggaagaagaaaacccctgctgcaaagaa

SEQ ID NO: 903 - DNA, 407 bp, Zea mays
  unsure at all n locations
  Clone ID: LIB3115-017-P1-K1-B7
cagcttactaggatgaagcctgcaacggtggcactgctcattttgttgaacatgatgtgcatagttgcatactttgatcatggaacgatggctgaagaaaccaccttgctggcaaattcgtatggaagaaatgaaggaaccaagggcatacatcatggaagaaagctgatggacaatagtattggttcaaaccgtgagtattcaatcgatgatatgtctcatccaaaggcaccacatactgagctcaagcaaccctcatacttagctcctggttgctcaagcaaccctctcaagcaaccctcaaacttagctcctggttgcattccctaaagttcatgcatacatatatagccttccactcatcatatgctggtttncgatctatatattgacacatatgatatgtt

SEQ ID NO: 904 - DNA, 262 bp, Zea mays
  Clone ID: LIB3115-017-P1-K1-B8
cggacgcgtgggaaaaaaaaaaaaaaataaattattaaaaaaaaaaaaaaaaaaaaaaaaaaataagaaaataaaaaaaaaagggggggaaaaaataaataaaaaaaaaatatctttaaaataaataaaaaataaaataaattatattaatctcttatataattataatttatctttatataatcggttagtgatttataatatatataatatttttattacttttttttttttatacaatttttttttttttattatctta

SEQ ID NO: 905 - DNA, 439 bp, Zea mays
  unsure at all n locations
  Clone ID: LIB3115-017-P1-K1-B9
cccttctggtcggcgccgtgttccatcaagtatacatgttccacaaggagattcttctggactacgtgcaccatgatatcaccagaaagtgggctttgatttacttcaagctgcttttgctggtgatggcgaaggacaccatcatgtacttcaatctgttctaagctcaccttctcagtttctcaaatatccagcaatgcatccgtctctgcactcgtagaataatgatgatggatgaattatgcagccttcgttcttgtattctccctaatgagcttgcttttttccagctgccagtttcactcttattaagtatatcagtctggatgggattgatagtgaccagtcagatgatatccctgattctgcacctcattaataatatgattaatgtcaattgtgcaaaanaaataaaatatattatatataataaattata

SEQ ID NO: 906 - DNA, 390 bp, Zea mays
  Clone ID: LIB3115-017-P1-K1-C1
cccacgcgtccgttcaagatcgactcaacatgcctcccaagaccaaggctcaaatcgcggctggcggtcaggccggttctcgtgccgggaagaagaagaagtggtccaagggtaaggtcaaggacaaggccaacaacgccgtcatggtcgacaagcccacctacgacaagatcctcaaggaggtccctacctacaagatgatctcccagtcggtcctcatcgagcgaatgaagatcaacggttctttggcccgaaaggccatgaggactttggaggacatgggtttgatcaagaaggtcgtgcaccaccacggacaatgggtttacacccgtgccaccggctcggactaaagcgcttagcccgatgactggccttcgactttcgtcaaca

SEQ ID NO: 907 - DNA, 454 bp, Zea mays
  Clone ID: LIB3115-017-P1-K1-C12
ggttgccactgttgttgggcatgaggttgggcatgctattgcgaggcactccgctgagcagatcactaagaacctctgggtggcgaatcctgcagattgtcatcctgcagtttatttacatgccggacttgataaatacggtgtcaacactactcctcaggctacccttctcacgaaggtaaggcttctgtatttcaagttgctcattgtgatgcatcctagatgtgataagcttcatgttttactaaaggtggctcacctaatattctgaaacaagtaaaatgcaaaattgaactgtataagtagacctcaatgttgctgtgtcatgcgtcaggtactcaggtcagattccttcaagtagacacacaacaaactagcaggggcatctaaatatgtcagctcattgtatggttgtatcataggtcgatgaacatacagacaaagatatcaaaac

SEQ ID NO: 908 - DNA, 452 bp, Zea mays
  Clone ID: LIB3115-017-P1-K1-C4
cccacgcgtccggagaaggaaaaatatccccaaaccctagctcccgatctcgatggcgaaccgtggggtttttttcgacatgaccggcggcggcgccccggcgggccggatcgtgatggagctgtacgccaacgaggtgcccaagaccgcggagaacttccgcgcgctgtgcacgggcgagaagggcgtgggcaagtccgggaagccgctccactacaagggcttcaccttccaccgcgtcatccccgagttcatgtgccagggcggcgacttcacccgcggcaacggcaccggcggcgagtccatctacggcgagaagttccccgacgagaagttcgtgcgcaagcacaccgtccccggtgtgctctccatggccaacgccgggcccaacaccaacggctcccagttcttcatctgcaccgtcgcgaccccttggctcgacggcaagcacg

SEQ ID NO: 909 - DNA, 398 bp, Zea mays
  Clone ID: LIB3115-017-P1-K1-C6
cccacgcgtccgatcactcgtcatggcgtcggtgaagcggtttcgagtgacagggaaggacaagatcgtgcggcggtgcgccgggaagcaacacttgctcgccaagaagaacaccaagggcaagaagagactctccaagatggtctatcgttggaaatgaagggacatgtcatttttctgtccaacgagaatagcacttgtcttctgctaatattgccgctggacaaacgaactctgtgcttttgtgtgcaagcaatactcgctaatagtctgttcggatttctaatgaaccatgtgtgtatgctgcttttggatcagttatattttgaactagcaacgataatgttttggcaggcataaatcacagacgcttaatgtaacgtgtggctaaacagaac

SEQ ID NO: 910 - DNA, 448 bp, Zea mays
  Clone ID: LIB3115-017-P1-K1-C9
cgaacgccggagctcgacaaggacgaccgacgactcacgcggagatccggcgtactgcaaattttgaaaactgaactgtaagatggcatcagcagagctttcccgtgaggaaaatgtgtacatggcgaagctcgctgagcaggcggagaggtacgaggagatggttgagttcatggagaaggtagccaagactgttgactcggaggagctcactgtggaggagcgaaacctcttgtctgttgcatacaagaacgtcattggagcccgccgcgcctcatggcgcatcatctcctccatcgagcagaaggaggagggccgaggcaatgaggaccgagtaacactcatcaaggattatcgtggcaagattgagactgagctgaccaagatctgtgatggcatcctcaagctgcttgagacccatcttgtgccgtcttccactgcccccgag

SEQ ID NO: 911 - DNA, 456 bp, Zea mays
  Clone ID: LIB3115-017-P1-K1-D10
ggttcacggctgcctgcatgcaagttcttttttcccctgttgaacaagtttatttatctcattacccgctgaagaactcaacggacagcaagctaagccgtttggttaatcatcgaaacaatggatacctctaatcttcttcaaagtaagccatgtacaaaagggacttaggtccttccctgggagatgtctgtaccgatggactagcttgactttagtgatgtagctgttacctggtcttaatttgttcttgtccttccgttcttggttccatgttgatttctgttccccactcgctcctcgcagcccatttgaagttcgtcagacttacgcacagcagagagctgacacaaacttggacgagaatcggccactgcttgccatgggaccttgagcgcatcatgcccaattcggtgattctaaccgaggtcgagctagttaacaccacctggatgc

SEQ ID NO: 912 - DNA, 447 bp, Zea mays
  Clone ID: LIB3115-017-P1-K1-D12
cggacgcgtggggaaatgttgaaggatgggacatcaagccgacagtgtccccgaatggacgggcaacatttgcttctgcccgtcaacttggtccattcaatcccatcaggtacttccgacgttcaagactatagttttctgtaggagttgagattattattttttgtatatataacggaggcaaggtgtctaatgggcactctgagcaagattttacctatgtaagctccctgtaattgtttctgttttttacttttgcgctgcttggcgagagaatgtacatatgctttgtataccatattagggcttgttcggttagctctcaatccatgtggattgagtgagattggatgagtttgaatcccaaacaagtcaaacttcttctcaattttttccaatctcatccaatccatatgtattgggaataaccgaacaagcccttagtgt

SEQ ID NO: 913 - DNA, 326 bp, Zea mays
  Clone ID: LIB3115-017-P1-K1-D3
cccacgcgtccggttctattgagacagggtgtgcttggtatcaaggttaagattatgctggactgggatccaaagggcaagcaagggccaaccatgcctttacctgatttggttacaattcacgtgcctaaggaagaggatgagttattgaggcctcttgcagctgaaatccaagttgcctgaagtaaaaaagttccagtgaggcctacgcctatggttgtggtcctcatttttttgtgtaatgttcattattaacatgttgaaagtaaaaagagctttactttctatagttgcaagcagtgataatcaatgaattctttctgctt

SEQ ID NO: 914 - DNA, 453 bp, Zea mays
  Clone ID: LIB3115-017-P1-K1-D5
aaaatcaaaaacaaaagaagcaaacctcgtcgtcacgccatccctctccacctctcgtcttccagacgcctccaatctgggctcccagcggccagcgtctcggaaaagaggagcagcacggcacggcggcgatggcgaggaacgctccaataatatgctaacccgttctacccagtccaattagcagcctcccaaggagaaggagatccaatcctgcgggcgggcgtcccccgtatcccatccatcgatccgaatctcggaatctgcaggaccctgcggcgcggcttcttcgtggagaagaggttgctgccgaagccaccgccaggtagccatgtcgtcctccgtgctgagggctgcggccgacagggccattcgcaggcaggccctcacgctgacgaacgccgcggcgttcaggatccggcagctactcagcctaaagcaacggccatacct

SEQ ID NO: 915 - DNA, 433 bp, Zea mays
  Clone ID: LIB3115-017-P1-K1-D6
agcgagagtgcatcgtgtgagtgttgtggttcatgttcacgtcggtgtttactctccccggccatcagtgtctcattgggaacgccgcggtgccgccggtgaacgccgctgggaatgatctcgccgtggcagaccttgtttggggccggttgcgtgcgtgatctatggttggtctgctctatgagctcccaaaataaagagtgaagatttaagataaagtggttgctgaagaggagtctactccagtgcttgttcatcaagtggatggagccatctaactgatcatcgtgttagaagtatctagaacctcttctctgcaacaaaggagaagttttattcctttatcttttggttagttacttcatgtggaggccttgaagcttagaatgtttatgtatacatcttatggaaaggcttcacccttccaattatt

SEQ ID NO: 916 - DNA, 460 bp, Zea mays
  Clone ID: LIB3115-017-P1-K1-D7
cccacgcgtccggacgcatcgaggttagcactctaagaagcgaccatgagggccaagtggaagaagaagcgcatgaggaggctcaagaggaagcgcataaagatgaggcagagatccaagtaggcagatcgagatggattgtggacctgatgacatgcgtgggtacatacatttcttcggatgcgttggtgtgcctgtggagagatgtcaacctgccatggtgtcacggtccgccatcagttgaacgtcttgcctgcacttcagtaggccacttttcatggttctagttgtatttgaatccagcgtttgccactaagataaatcagacagtcgttttgtgaacctattatgatggagctttatttgctgataatatctagctaccttaaattaataataacttattatatttagataattatattatatattatttttaattaataataaaaagggcggc

SEQ ID NO: 917 - DNA, 466 bp, Zea mays
  Clone ID: LIB3115-017-P1-K1-D8
gcgagagatgtataaacaggggggagcggggggaggggctgggctggaccggaagcggatcaacgacgcgctggataagcatgtcgagaaggcggtcgcgtcgccgtccacgtcgagggggtcggcgggcggcgggcgcgaccaccaccgcctcgtcgtgccgtcctccgtgtcgtccatccccaagggccgctgctccgaaggggagtctgattctgatagtgaagcatcggatgttagcggctctgatggagaagacacctcatggatttcatggtattgcaacttaagagggaatgagttcttctgtgaagtcgacgatgattatattcaagacgacttcaacctttgtggtctcagcagccaagttccttattatgattatgctctcgatctcattttagatatcgagtcatctcatggtgatatgttcactgaggaacaaaatgagctcgtagaatcagct

SEQ ID NO: 918 - DNA, 424 bp, Zea mays
  Clone ID: LIB3115-017-P1-K1-D9
gaaagcagctggtccaaaaggtcatatacttaatctgggccatggtgtacttcagaaaacacccgaagaagctgtagcacattgctttgatgtcacaaggcgcttgagatatgacacccttttccaaggttctgttgctgaagaattgcatcacgttgcttgacaacggcaatgacattcccatttttcatcaagtggtgtatttgatctgtcatatcatcttagagtcgtagtagattcctagtgttgcctgcattctacctttcaagagagactcattttcttaagcctgtatatgtattgcagagataccggcggcaaatctagtgcaattttattcattgtttgttcgttccaaattaaaaattttaattattttgaatatactttcaaacttattttttgttatatatttttattatga

SEQ ID NO: 919 - DNA, 428 bp, Zea mays
  Clone ID: LIB3115-017-P1-K1-E1
atgaccccttcgaggttctcgaccagagaggagtgggcgagctggttaagcttgctacagagaggggccgcaaagctaggcctaacttgaaggtgggcatttgtggagaacatggtggagagccttcatcggttgctttcttcgccaagactgggctggattacgtttcttgctcccctttcaggagatgcaagtggacacataaccatttcctatcaatacaatagaacccacaagcaaaaaagttttggttcgaccggaaatggtcgataaaggcaagggcgaaagcatcgtcattggtgatcctcgcacatcaaacatattgcaaggagggattgctcagaaagctttggacaagaagactaacaaatccggaggcaccgagggcaggctcaattgagtagctgagcacgacaacctgactcgag

SEQ ID NO: 920 - DNA, 331 bp, Zea mays
  Clone ID: LIB3115-017-P1-K1-E10
aggtgtagggagactcacctgaaccttaaaagaacacaaaggcgcaccaattgaagcgccaccgcggcggtacccccgaagataggaggactacatggaagcttgcgaagtgagcctccccgttgttgcttggagtcaccgcaagcatttggtttctgtcctgaagacgtcggcggtttaattaggttgattgagtagcgagaacaggcgctgtgaagctcaagtgtacatacgttgaggggacaaggccttttttttacagctgcgaggaagcaaaatgtagcctcacacatttctgctgcaaataaaagaacaatcgcccgtcagcgcc

SEQ ID NO: 921 - DNA, 466 bp, Zea mays
  unsure at all n locations
  Clone ID: LIB3115-017-P1-K1-E2
cggacgcgtgggttttcaaggagtattggaaaagaccagaggtcaccgcagaatctttcattgatggaggattcttcaagacaggtgatacagtaactgtagatgaggaaggatacttcataattttgggacgcacaaatgccgacattatgaaatttggcggttacaagctgtcagcattagaaattgaggcagtactgttagagcatgatgctgtactggaatgtgctgtccttggcttgcctgatgaagcctatggggaggttatatgtgcaataattgtgcctaaggaggatgcaaagaaaaaggctggacaggactcaaagccagcgctaaccttggaagcattaacaagttggtcgaaagataagcttgctccatacaagattccaacaagactatacttgtgggattctcttnctcggaatgccatgggaaaggttaacaagaaggagctgaagaaatt

SEQ ID NO: 922 - DNA, 438 bp, Zea mays
  Clone ID: LIB3115-017-P1-K1-E3
cccacgcgtccgtaggttcttacttcaatagtagttcaaacagattaggcagtccaattggtgatggtggccttaatgatgattgaggatcaatactgagttcaatgtctagaaatgtttggggcaatggaaatcttaactacacaggcaaccctacaaacacgaattcttttgctccacctgtaggtggtgggggtattcctggtgatgaaattagttggggaaaccttacttctgttcatgggatgggcaacatttcaagccttggaccgggaaaccttggccgtggaaccggagataacaactttggattgccttctggaacctatgtgaggagcaactcaactggtacaattggcgagccattttctgcatcagccaatccatatgaatcggacaatctatgtgcatatggcagcagttctatttatggggact

SEQ ID NO: 923 - DNA, 406 bp, Zea mays
  Clone ID: LIB3115-017-P1-K1-E5
ctcactgggaacgtcattggcagtcgcgtcctgggaacgaagtggtgttagtgttttgtaaaagggggtggtgggtgcatagtgaccaagactcgtggggaagaaacagaccatcttagcaatcacgacttcctcgtcgctctggagagtggtggctgcctcgtccaagatgggcgccagcttcttgcagtgtccgcaccagggggcatagaattcaataaggactgcaacagagttatacatatcaagactatttcaatctattaaagggaaaaaaagacttccatccctgagacgaagacaagaactacatgctaaacacaattcttgtgaaattttgcctgccataaataattcttattgtttgatgaaaaataacagaattatcaggccacattccattttt

SEQ ID NO: 924 - DNA, 354 bp, Zea mays
  Clone ID: LIB3115-017-P1-K1-E7
acactacaccacaccacacacacccgacgacgatcacacacacgtagaatatcgagttcgttcgatcgtgaccgtgacggaggaagctataagctagccaagacaggaataataatggcggcgtcgacggtggcgagcctctctgtcccggtgacgacggcgaccttcgcggcggcggcggcggcgggcggcgccgacgtgctgatcgtcgtcccgaggagggcgggcgccgggcgcgtcgtctggttccccgcggcggcgcgccgcggcggctggcggttggtcgccgtgcggtccatcgggccggccactccgatggtgatctccgacatggtgttggagagcattaagcat

SEQ ID NO: 925 - DNA, 321 bp, Zea mays
  Clone ID: LIB3115-017-P1-K1-E9
aaccacatatacatatatacaatacatatcccttgtgattacaagcaatatgattaatcataacatgtccgcctgcgaaggctgatgaattatcctatctaacctgaccttcatgccagtggcttgattcattatgaaaacaacctctaaccaagggcacaggatgtgatacagcctacactgactgggctgaacattactggacttcagaagccagagacatagattatacagagtctgcgcagctgggaaatcttacacactgtacagctttactgtgaggaacataagagcatggtcaacgacacagtccagcatata

SEQ ID NO: 926 - DNA, 335 bp, Zea mays
  Clone ID: LIB3115-017-P1-K1-F1
attaataaatctgcagtcaccatccatattccatccggactcccgcccgtctcggatccaggtccagggacgccgtcctgcacccgcgccatgccgacgctcggcatcgcgcggctgctggacgcctccttccggcgccgcttcgccgcggcgggcctcgtcgaggcctccgtcccgctggacggcggcgcgaccacggtgcactgctggcgctttccgccgagcgccgacgacggcggcggcgaggacgcccgccccgtcctggtgctcctgcacggctttgggcccccggcgacgtggcattggcggcgccaggtgggcccgctctcgcgccg

SEQ ID NO: 927 - DNA, 449 bp, Zea mays
  Clone ID: LIB3115-017-P1-K1-F10
cccgagctggccgctggatgccgatgtcggatgggggatccgggcctcagagtacttcgacaagcactcgatcagaaatgtcacagtggacggggtggagatcgattgggaaggggacgtcgacgaggggtgggtcaaggaaatcaattgcttggagtgggagagcttcgcattccaccccagccccttagtcgtcctagtcttcgagcggtacaacagggctgctgacaattggaagtttcttcaagaattggaaaaggctgctaaggtgtactggaatgctaaagatcgcttacctcctcggacagtcaaagttgatataaatattgagagggatttggcatatgcactttaagcaagagaatgtccacaattattgttccttaggggaaacaagatcttattagagaaaaagagatatggactgcatatgagctggttcaaatgat

SEQ ID NO: 928 - DNA, 412 bp, Zea mays
  Clone ID: LIB3115-017-P1-K1-F11
cggcgagaacgtggagagtgctcctcctcctatgaagaaggactacaagctggctaatcttctctgctgggaggaggaagcgggtgccatggaggagaaggcgggagtgcttgatgagtaagacgggcttctggggtcgatttgcttctgagttgtttattttatatcgtcgcaatttcgtggttgtcgtttggttattctgtgaagcagccaagccaggctattgttatgaaaatttgtcgtctgtaagcatgtgaacttccgatgttgccacatgctggatcagtctgaataagtaagtatgcagctctaggtggtcagctgcgtctaccacaatgagcatgaacgtatggagaaatatctgtgaacccattttgtttatgaataagatttgtttttttcgagttaaata

SEQ ID NO: 929 - DNA, 401 bp, Zea mays
  Clone ID: LIB3115-017-P1-K1-F12
gagcggcagagggtcactgccaaacttgggtctctcaagataagctccaaggcagtggaggctgaccgtaagactagcacagctggtatggagaagcagctaaatggagtcagtggctctgggagcgcagttcctgagggtggcgaggagcagaaggtcaaaatcagttccaaggtagtggaggctgaccggaagacgagcaaagctggtgtggtgacaatcggctcgatgccggtccgggttgacagttatgccgtctagtggccagcgggggggagcttttgtttttatcttttttgcccttctggggtaatctttggtgccccggcttttcatcttcctttctggtagaagaatgcttgtcctggttggtggttctttcctagcttctatatggtatc

SEQ ID NO: 930 - DNA, 460 bp, Zea mays
  Clone ID: LIB3115-017-P1-K1-F3
agaagatccaccgcgtccaccacgagttcacggctcctacaggcttcgccatgtcgtacagccactgggccgagaacgtcgtcctttcgatcccggccttggccggcccagtgctcgtgccatgccatgtcaccacgcagtggctatggttctccatccgcctaattgagggcattaacacgcacagcggttaccatttcccgttcagcccttgcaggctgattccattctacggaggggctgcataccatgactaccatcactatgcaggaggccgtagccaaagcaactttgcacccctgttcacctactgtgattatttatataggacagacaaaggcttcagataccacaagctaaagcaagagaagctgaagagtctagcagaaaatagtgcgggtaaaggaggcaactactcattcgacgaagggaaaaagaacagatatttttgtgcctgagc

SEQ ID NO: 931 - DNA, 457 bp, Zea mays
  Clone ID: LIB3115-017-P1-K1-F4
catggcacaccgtatactagacaaaccgtacatgcatataaatgggactgtcttcttagagccaggctgtgaagcttagccatcgcgtcatgtggagagaccaatctgaaatcctgaagagtaaagcttttgaagactttcgacttgttatgatcacagccatttttacacaccatcatggggtgaataccgtttgtacattcatagaggagacggccgaagaattctttggagcacgtacagcattttacacgtgaaatttgttcagaaaacattactggagattgtcacatggcaaaaaggatcaggatcgttgcttgtgaattgtgatgcaccttgtatgcaatgcacttgaatccagagtgcacgtgtgattttattgtctgaacgaaccgtgcgacggcctgatgtttcctgtggtattgcttgggtgtgatcaaactagttcctatgtttc

SEQ ID NO: 932 - DNA, 292 bp, Zea mays
  Clone ID: LIB3115-017-P1-K1-F5
cccacgcgtccgcgactgatatcgcaattgagtcacttcataagatcgagagtttcgtcatcgagcacgctgctgataatccagctagcgactcgcaagctgagtcacagatccaaaggatacagaccttgtaatatcttaatccttctgttttgtaccgaagcgtaccccctagagcatcgttggtttatttgttcgttgaagtgtcacgagggagagaaaaaaaaccctgaagtatttcttcttgtaagttgtaaaggaatggaataaaggagctaataatccgaagtgt

SEQ ID NO: 933 - DNA, 411 bp, Zea mays
  Clone ID: LIB3115-017-P1-K1-F7
aatcatcacctacaccgaaatacttatgcccgatccaatcgcagcacgaatgaatgcgtcgacaatttctcatgcgaccacgaaggcacgaactacacacttttttttgttgccggtctcacagcaatcgtctcctactcccggcattgctgtaggggagctcaaagatcccgagcttgctgtgagcgcgacgacggccgtggccgcttcactcacttggcgccgacgccgagcgtgagctcgagctcctcggcggcgacctcgtggatgcgctcgccttcccacggcgtgacgcggcccttgtcgaactcgaactccgcgcccgccaccccgttcagctccatggagtcggaagcggacgcgccgtcgtcgtcaccgggcggtttgacgaggttgtacgcgggcgacgcg

SEQ ID NO: 934 - DNA, 368 bp, Zea mays
  Clone ID: LIB3115-017-P1-K1-F8
aaggcagactgcgtcatccacacccacttggtggaggacctgtactagagatcgggttgctttatgcatcagtggttgctccaagggtggtggtgcgttcgttgctgttccgtgccaccagcggaagggggatttcgttgttgagatgggctagttcttgtcatcaatttcggtcattcgatgagatcatggcatatgagttgtggcaataatgctggcaatatggttttgcaattcaaactgcaaatgtgaccagcaatgtcaaaaactgcacactgtgtctctgtgcgaactcgtgaaattggcattgagttcaattggctagttggctcgagaatttagttttcatctccatttataggtcattt

SEQ ID NO: 935 - DNA, 462 bp, Zea mays
  Clone ID: LIB3115-017-P1-K1-F9
tgctaaacctattgaacttattgttacaacatatcaggctgcattgctactactgtttaatggatctgacaggcttagttattctgagattgtaacacaattaaacctgtcagatgatgatgtagtgcgtttgctccattctctttcttgtgcgaagtacaagatccttaacaaggaaccggctagtagatccatctctcccaatgatgtttttgagttcaattcaaagtttactgacagaatgagaagaatcaaggttccactccctcctgttgatgagaagaaaaaggttgttgaagatgttgacaaagacaggaggtatgcaattgatgcatcaattgtgcgcattatgaagagccgcaaagttatgggtcatcaacagctggttgctgaatgtgttgagcagctgagccgcatgttcaagcctgacttcaaagccataaagaagaggattgaggatct

SEQ ID NO: 936 - DNA, 58 bp, Zea mays
  Clone ID: LIB3115-017-P1-K1-G10
cggacgcgtgggtactgctccccctacttttttttttcgccatatcgaggttctcctg

SEQ ID NO: 937 - DNA, 61 bp, Zea mays
  Clone ID: LIB3115-017-P1-K1-G12
ggggcgccaagaaggtgcgccggatcaagaagtgaaggggggaacaaggatcggatggtta

SEQ ID NO: 938 - DNA, 420 bp, Zea mays
  Clone ID: LIB3115-017-P1-K1-G2
cggacgcgtgggctttgcccatcttgatgctacaactgtgttgtcacgacagatctctgagcttggtatttatcctgctgttgatccatggattccacatcaagaatgctttctccccacgtgctgggtgaggatcactacaacactgctcgtggtgtgcagaaggttcttcagaactacaaaaatcttcaggatattattgctatcttgggtatggatgagctcagtgaggatgacaagctgacagtcgcccgtgcaagaaagattcagcgtttcctgagccagcctttccatgtcgctgaagttttcacgggtgctccaggaaagtatgtggagctgaaggaaagcgtgaagagtttccagggtgttttggatgggaagtatgatgacctccctgagcagtcattctacatggttggt

SEQ ID NO: 939 - DNA, 372 bp, Zea mays
  Clone ID: LIB3115-017-P1-K1-G3
cccacgcgtccgctcgcggtggcgagggagaaggcgttgggggctactaaggaaggcgggtcttctgaagtggcattcgcggaggtcgtgtggagatttggacaagagcagctctccgtcggtaaacggagaatgcgattgaattgatcactggtgtgctggtgtggcagatggactgcgaacgtatatatactttaggattcaatatcacttagtattttgacagtacgagactaaaatattgcatctgtggtatgggaataaaattggattcaagcagagcgccacttgcgttgcgtgttacaatgtgattgtcagttctaccttattttatgaatcaatccactgatgattgtgaaaaaaaataattta

SEQ ID NO: 940 - DNA, 395 bp, Zea mays
  Clone ID: LIB3115-017-P1-K1-G6
gttgaagtttaaaagattataccattccacatgttcaaatcgtctcatcctgtattagataagcttttcctttgtatcatttgacatgtttaaaccatctcaatcgatattagataagtttttttttcaatttatactacatctagcctatcatattattcatatacatcaccattccaaactcgatcatttcttatattgcaaaatccaatacaacatatatatatatatatatatatatatatatatatatatatatatatatggggggggggggggggggccaccactattttcctaacctggattcctttttaacctatttttttcattagcccacatgggggggttttaatcttatttaaatatacttttttttgaaaataaaattcttt

SEQ ID NO: 941 - DNA, 432 bp, Zea mays
  Clone ID: LIB3115-017-P1-K1-G7
cccacgcgtccgcaccgccgctagaagaagagctcggcgattcccaggtcccgcgagaatatgccgaagcagatccatgagatgaaggacttcctcctcaccgcgaggaggaaggatgcccgctcagtgaagatcaagaggagtaaggatgttgtcaagttcaaggtgcgctgctccaagtacttgtacacgctctgcgtcttcgatgctgagaaggcaaacaagttgaagcaatctcttcccccaggtttgaccgtcgaggaggtctgattggatacatggcaacgccgagttgaactacccaagcttctttatcagtagcagagcatgctactctatgtacttttggaacctaagctattagacctgtcagtgttggatgtctggatcttgcatttttggagaaataccaatttacctcgttcaaggatg

SEQ ID NO: 942 - DNA, 296 bp, Zea mays
  Clone ID: LIB3115-017-P1-K1-H11
ggtatccgcagagagtttgttccgtccaggcaaccagaaagcaagttgccccgccgcgcagaggaagaagagagcagaggaggatggctcgtacgaagcagaccgcccggaagtccacgggaggcaaggccccccgcaagcagctcgccaccaaggcggcgaggaagtcggcgccgacgaccggcggcgtgaagaagccccacaggtacaggcccggaacagtggcgctgcgcgagatccgcaagtaccagaagagcacggagctcctgatccgcaagctgcccttccagcgcctg

SEQ ID NO: 943 - DNA, 389 bp, Zea mays
  Clone ID: LIB3115-017-P1-K1-H2
cgtccggatgctctttcatcgtaaggaacatacacatttctttggatggaaatacttaacttgagacggggggtatgaacaggtgatatggtacgcaggttggttaaggattaatgcgtatgtaggcgtgctgaccgaggaccctttaactggtcacatgccttgtcatgggtaagccttgccttgggcagactaaggccagaataagataacacgaaatgggcgtggagcggttgctagagtagcgtgtacccttcgtggcaagaggctggacggtggtgtatctgtgctttcggtttgcgtgaacctgatctagtcttaagaaccccggtggcggtttgacatatgcaagggttaagtgctacatatgttatgtgattggagatcct

SEQ ID NO: 944 - DNA, 366 bp, Zea mays
  unsure at all n locations
  Clone ID: LIB3115-017-P1-K1-H4
cgtttggtcggttcaacgatcatcagtacatgttgcacagcacacacgcacagacgatagttggatgtacatgttgatccgtcataatgtgatatcgtgtatatatatgtnaaaaaaaaaaaaaaaaaaaaaaaaaaaaaaaaaacaaaaaaaaactaaataaaaaaaaaaaaaaaaaaaaaaaaaaaaaaaaaaaaataaaaatataaaaaaaaaataaaaaaaaaaaaaaatggggggggccgttttaaaggaacaaagcttaataccccgggaatgcaagataaaagcttttttatgggggccccaaaattaaatacacgggccgcggtttaaaaacgtggaaccgggaaaaaccatggggat

SEQ ID NO: 945 - DNA, 460 bp, Zea mays
  Clone ID: LIB3115-017-P1-K1-H8
cacagcaatccacacaagcacttcgacgtcacacgggcgctgcgcacagacacaccaagcgtcggcaccaatggcttactaccaggaggtggactactgctcggaggaggtgaggtcggtggccccggccggcttcggccgccacggcggcggcgtccagcagcacgtcgtcaaggagaagttcgaggaggtcgacacggtctcacgcgccggcgccaaccaccaccaccaccatggtcaccacggcggccacggcttcgtggtgcgcgagaccagggtcgaagaggacatcaacacctgcaccggcgaggtccacgagcgcagggagagcttcctcgccagggctaactgagccgcccggcggccggcatccacgcccgttcgtgcttgcctgcgtgccttatgtatggcttgggttgactggtttgcagggtcatcgtacttggctatcgtacgtgca

SEQ ID NO: 946 - DNA, 436 bp, Zea mays
  Clone ID: LIB3115-018-P1-K1-A11
cgcctctacatttcttctctctctgctcctccgcctccgcctgatccatccaagacagggatcgccatgtcggactcggaggagcaccacttcgaatcgaaggccgacgctggggcgtccaagacctacccgcagcaggctggcaccgtccgtaagaacggcttcatcgtcatcaagaaccgtccctgcaaggttgtggaggtttctacctccaagactggtaagcatggccacgccaaatgccactttgtcgccatagacatattcaatgggaaaaagcttgaagatattgttccttcatcacacaactgtgacattccgcatgtgaaccgtactgagtatcagctgattgatatttctgaggatggatttgtgagccttcttacttcagatggcaacactaaggatgatcttagactcccaactgatgagactc

SEQ ID NO: 947 - DNA, 420 bp, Zea mays
  unsure at all n locations
  Clone ID: LIB3115-018-P1-K1-A12
tcgaggcttagcctatattcacacagtacctgtagtttgccacagggatgtgaaaccacaaaatcttttggttgatccactgactcaccaagtgaagatatgtgattttgggagtgccaaaatgttggtcaaaggtgaagcaaacatatcatatatatgttcacgttattaccgtgctccagagctcatatttggggcaactgagtacacaacatcaattgatatttggtcagctggatgtgttcttgctgagctgcttcttggccagcctctcttccctggtgaaagtgctgtggatcagcttgttgagataataaaggttcttggtaccccaacgcgcgaggaaatccgatgtatgaattcaaacctacaccgagtttagatntcctcagatcatagctcacccatggcacaagattt

SEQ ID NO: 948 - DNA, 209 bp, Zea mays
  Clone ID: LIB3115-018-P1-K1-A3
tgcagataatgatttgttttgagaccagagtagtctagagtagagattaggctctgtaaaattagatagctaggattagaataactgggcaaacgaatatatggtatatgtccatatgtaaagatgcaatatatagcaacatatatggtaccgtcgttattatctttttttcaaaaaatgtaataatattcaaatatgcagtgcaatgt

SEQ ID NO: 949 - DNA, 331 bp, Zea mays
  Clone ID: LIB3115-018-P1-K1-A6
tcgacgctttcgaacacgcgtacggccacgcgtacgagtatgttcaatacatatggacctagcatgtgcattgacaatggccgggttgtcagtaactttattgctcaagcactgaagaaggagcccttgacggtttatggtgatggaaagcaaaccaggagtttacaatatgtctctgatgttgttgagggccttactaatctgatggaaggcgagcatgtggggccattcaacctgggtaaccctggcgagttcaccatgcttgagcttgacaaggttgttcacgacaccatagaccccaactcacggatcgagttccgcaagaacaccc

SEQ ID NO: 950 - DNA, 337 bp, Zea mays
  Clone ID: LIB3115-018-P1-K1-A7
atccacgctttcgaacacgcgtacggtcacgctttcttgtatcctcaatacatataagacctaggatgtacattgacgatgggcagcgtgtcattaactttattgcacaagcactaaaaaaggaacccttgacggtttatggtcattgaaagcaaaccaagattttacaatatgtctctgatcttgttaaaggccttacttaatcttattgaaagcgagcatgagtggccattcaacctgtaattaccctggctagttcaccattcttaatctagacaacgtttgttcactacaccataaacactcaactcacggatcgagtttctcaaataacacc

SEQ ID NO: 951 - DNA, 429 bp, Zea mays
  Clone ID: LIB3115-018-P1-K1-A8
cccacgcgtccgcccacgcgtccgctaccgatggccgccgcgttgtagttgtagtgtaacctagccacacgacgcatccgcgggtcatcggcctcgcaggaaacgagcgtcgagcaaaaggtcgaattctcaactctcaagcaccagcaggaatcgagcgagcgagcgagcagtgtccgccccccatggccatggtcgcgtccacctccttcgcgtaccacaagccgcgtttcgcggtggtgtgcaggaagaacagggacggccgggacagggagcgggacggcaaggagcacaagcaccccttcaaggtcgtcgagatcacgccgcctccgcggtgcctcggcgtccgctgcttccccaccaacatccactgcggcgagagcgtgacgatcgaggggcaagcgtacacggtgtcggcggtgacgcacc

SEQ ID NO: 952 - DNA, 422 bp, Zea mays
  Clone ID: LIB3115-018-P1-K1-B1
gcagcgacacgatcgcgagcgcacgcacgtaagcacgttgtcggaagctcaagttagaagaagcaccagtgactgatcgatggcggcccaggctctcctctccggccggcagctgctgggccgccccgtgcagtcggccgtctctaggtcgtcggcgaggaaggcgcccttcgtcgtcagggccagctccagccctccagccaagcaaggtgccgacaggcagctgtggttcgcgtccaagcagtccctctcctacctcgatggcacgctgcccggcgactatggcttcgacccgctgggcctctcggacccggagggcaccgggggcttcatcgagcccaagtggctggcctacggcgaggtgatcaacggccgctacgccatgctaggcgcggtgggcgccatcgccccggagatcttcg

SEQ ID NO: 953 - DNA, 342 bp, Zea mays
  Clone ID: LIB3115-018-P1-K1-B11
cgacaagtccaccaactccctgctagtcgcatccgaccccgagggcagggtgccgctcttctgggggatcaccgccgacggctgcgtcgccttctccgacgacatcgacatgctcaaaggctcatgcggcaagtcgctcgcgccgttcccgcaaggctgcttctactccaacgccctcggagggctcaagtgctacgagaaccccaagcacaaggtcaccgctgtccccgccgacgaagaagagatctgcggtgccactttcaaggtggtggaagggtctactgtcctgacggcgctgcactgatctatcatcatcaggcggaggcgatgcgatgatgatgc

SEQ ID NO: 954 - DNA, 337 bp, Zea mays
  Clone ID: LIB3115-018-P1-K1-B12
agaacctgaactcagcttacctgctgcaccaactggccatgcagcagtcccggcaaaccagcagcaggaggatgagctaggattgcctacagtgccacaagcatccattcgtacataatcaagcagaatcacgtttcttgcagtcaacgatataaaggaagtcgtattatatatctacagctgggtgtaaaaatgctgttatgtaccgcaccacttcgattttttttgtcactccacttgtggatggtgtaaatctgattgaattgaattagttgggagttgggacattttaaaaaaaaaaaaaaaaaaaaaaaaaaaaaaaaaaaaaaaaaaaaaa

SEQ ID NO: 955 - DNA, 448 bp, Zea mays
  unsure at all n locations
  Clone ID: LIB3115-018-P1-K1-B3
gtaccagagccacttcagtgcgtacattaagaagggagttgaggctgatgaaatagaancgctgtacaagaaggtccatgctggcatccgtgccgatccttccattgttaagtcaaccaagcagccaccaaaggagcataagaggtacaaccccaagaagctgacatatgagcagaggaaggccagcctcattgaaaggctcaaccaactcaactcctccggtggtgctgatgacgacgatgaggacgacgagtaaagttaattgccatcgaagtagtgctatctcaatccagcgatcagcaattgtgtactgtcttatgcggggacctgtagtactgcaataggcatttttgttttaaagttttgcgaggtgaacaaaactgtttctgttagtttcgagcttgagctctcaatgtttactctttacattgaaatgctgtcgtttgga

SEQ ID NO: 956 - DNA, 414 bp, Zea mays
  Clone ID: LIB3115-018-P1-K1-B6
gcgaaccaagcagaccccagcagaagaagcgaagtcttcgccggagcaggaggaagagcgagcagcaagatgtcgtggcaggcgtacggcgatgaccacctgctgtgcgacatcgaaggccagcacctcagcgccgccgccatcgtcggccacgacggcagcgtctgggcacagtccgagaacttccccgagttaaagcctgaggaggttgctgggatgataaaggactttgatgaacctggaactcttgcaccaactggtctttttgttggaggtacgaagtacatggtgatccaaggtgaacctggagttgtcatccgaggaaagaagggcactggaggcattactatcaagaaaactggcatgtccttgattatcggtatctatgatgagccaatgactccagggcaatgc

SEQ ID NO: 957 - DNA, 436 bp, Zea mays
  Clone ID: LIB3115-018-P1-K1-B7
cccacgcgtccggctgaagcgaacacagagctgctcgccgtgtaacgcatcaggcagcagcacccataggcggcaggccacacacacagcacacgcagatcttcgatcaccaccatgggttctctcggcgtcccggtcatcagctggcccttcttcgccgaccagcagaccaactgccgctaccagtgcaacgagtggggcgtcgggatggagatcgacagcaacgtccggcgcgacgccgtggcgagcctcatcgctgagctcatggagggggagcaggggaaggagatgaggagaagggcactggaatggagggacaaggccatcgaggtggccaagcccggaggcacgtcttaccggaatttcgatgaactggttcgcaatgtgctcctgccaaagaactaggcaacttagctctatatttgcagtttgcacg

SEQ ID NO: 958 - DNA, 436 bp, Zea mays
  Clone ID: LIB3115-018-P1-K1-B9
ggcagctctcggcctttggcgcagtcggatctagcatcgatggctatggaagcggagacgacggtgctacgacggccgctgtcggcgtacttggcagcgggcggcggcggcggcatcggggaggaggtgtcgtcgggcaggcagcaggccccgccggtgttccttgcccggccgccggtggacccagtgatctgggccgacgagaagcggatgaagcgggagctgctggtgtgggccaaggccgtcgcgtccatggtggccagcaacaacacctcctgctcctctccggcgtcgtcgtggtcgtccacgagacacagtggatagctagtatacgtacgtccggttgggtttcttgatggttcagcttgtatgtttttgtcttcccttggtgacgtgagccttccgttggtgtgtttttgtctggcttatttttttt

SEQ ID NO: 959 - DNA, 371 bp, Zea mays
  Clone ID: LIB3115-018-P1-K1-C10
aattctaaattcaacaataaaggaaaaaaaaaaataaaaaaaaaaaaaaaagaagagaataaaaaaataaaaaaaaataaaaaagaaaaaataagaaaacaaaaaataaaataaaaaaaaaaaaaaaatatagaaaaaaaaaaaaaaaaaaagggaaaaaaaaaaaaaaaaaaaaaaagtaaaaaaaaaaaaaaaattaaaaaaaaaagaaataaaaaaaaaagggaaaggaataataaaaaaaaatataaaaaaagaaaatgagaaagaaaaaaaaaaaagaataaaaaaaagaaaaaagtagtaaaaaaataaaaaaaaaaaaataaaaaaaaaagtaaaaagaaaaaaataaaaataaggaaataaaa

SEQ ID NO: 960 - DNA, 321 bp, Zea mays
  Clone ID: LIB3115-018-P1-K1-C12
agaaccttaactcaacttacctgctgtttctatcttccatgcagcattcccaccaaagcagcatctttaggatgagctagaatggcctacatttccacacgcattcattcttacataatcatgcagaatcacgtttcttgcattcatcgatataaacgaattcttattatatatctacatcttgctgtaaaaattctgttatctaccacaccacttcaatattttctctctctacacttttggttttgtgttaattctatttactatttttttatttattttatttttttatcatttctttttaatcatatatattttatt

SEQ ID NO: 961 - DNA, 418 bp, Zea mays
  Clone ID: LIB3115-018-P1-K1-C3
gcgatccaaattttacgtttccatacgtcacattacacctacacctgatgttatttgaattggtgaagaactctctccgcgcggtgcaggaacggtatatgaactctgataaagatgttcccccagttagaattatagttgctgatggagaagaggacgttactatcaaggttagcgatgaaggtggcgggataccaagaagcggcctcccgagaattttcacgtatctgtacagcactgcaaagaatcctcctgagctagatagacctaatactgaaggggtaactatggctgggtatggtttcgggctcccgatcagccgactctacgctcggtattttggcggcgacctgcaaatcatctcgatggaaggatacggtaccgatgcttacctccacttgtcgcggctgggagattc

SEQ ID NO: 962 - DNA, 368 bp, Zea mays
  Clone ID: LIB3115-018-P1-K1-C4
tgtttttttcctgagtagtcttgtcatctgtgcatgtaccttggctatgatctctacagattatatgccactgcaacctcttgaagatgaagaaaacacaactatcaatttcttatatcctctggaacccccgatagtagatgagttcgactgggaaatggatgattacgaggattttgcagatcagaaagtccaagaaggtagcctgcccgagggcgagaaagaaaaattcaaggagttcctgaaggagaaggttagagaaaggaagagagagctgtgacaggcttaaaaaacccaggaagaaagctattgatgatatggatcctgcgatgaaagaggcattcgagaatatcaaattttacaaattt

SEQ ID NO: 963 - DNA, 440 bp, Zea mays
  Clone ID: LIB3115-018-P1-K1-C6
cccacgcgtccggttgaataacttgaaggtgcaagaacgacagaaccgggtctgtacaactggagctattgctatagttgctgaaacttgctcacctttcacagttttacctgcccttatgaatgagtaccgggtcccagagctcaatgtccaaaatggtgttctgaagtcactctctttcctctttgagtatattggtgagatgggcaaagattacatatatgccgtcacccccttacttgaagatgctttaatggatagagatctggttcaccggcagactgctgcatctgctgttaagcacatggctctaggtgttgctggcttgggttgtgaggatgctcttgttcatctgcttaactatgtttggcccaacatatttgagacatctccccacgttataaatgctgtcatggaggcaattgaggggatgagggtcg

SEQ ID NO: 964 - DNA, 439 bp, Zea mays
  Clone ID: LIB3115-018-P1-K1-C7
cggacgcgtgggccatatcctctccagctttccgctccgcccttgtcgctcgtccagccaccgtgcccgtgcccgtgccgccgagaattctatccagaagcaagcaacaagagcccacccccgcttcgcgcgctctttcgtgccaggcaaacacagagcacagctatctgctcgtgtcccggtccgtccaactcgctcgctcgctcaatccactgatgatggggatcccgctggtgtgctactgcctcgccgtgcccaagccggtcatcgccttctgcaggctgctcagcgccgtcagggacgccgccctgctgatgctggccgtggtggggctgtgccgcttcccgcccgacggcgcggtggacgccggccaccagcccggcgaggtgaaggcccggctccccgccgtggagtacggccagctcctggccgagcacga

SEQ ID NO: 965 - DNA, 437 bp, Zea mays
  Clone ID: LIB3115-018-P1-K1-C8
aagcacttcgacgtcacacgggcgctgcgcacagacacaccaagcgtcggcaccaatggctgactaccaggaggtggactactgctcggaggaggtgaggtcggtggccccggccggcttcggccgccacggcggcggcgtccagcagcacgtcgtcaaggagaagttcgaggaggtcgacacggtctcacgcgccggcgccaaccaccaccaccaccatggtcaccacggcggccacggcttcgtggtgcgcgagaccagggtcgaagaggacatcaacacctgcaccggcgaggtccacgagcgcagggagagcttcctcgccagggctaactgagccgcccggcggccggcatccacgcccgttcgtgcttgcctgcgtgccttatgtatgtctgtggttgactggttgtgcagggtcatcgtacttggctatc

SEQ ID NO: 966 - DNA, 414 bp, Zea mays
  Clone ID: LIB3115-018-P1-K1-D10
cacgatctctaatatagaattactttcatgatgacacagatcaaaccagattttctcaagttgttattttgaaatgattaatgagctctatgtatttaccatttgtcttacagagtagccattacaattcttttttgttcacaatataataaaagcatataagaactcttttaacttcaaattttattggctggagaaagttttcacaacaataagcatctcatttgtttttaatattctgatgctacaatattgagacgcttagctctctgctaaatgaaccatttctcttcattctttgttggttcattggatatggtcaggtatgaagtcattttggttcctggcgtgcaatctttgtcaaccatggtaccattgtcatagtccacactcctttgtgtccgtacaggtttg

SEQ ID NO: 967 - DNA, 344 bp, Zea mays
  Clone ID: LIB3115-018-P1-K1-D11
agcagaggaccggtattggacattatttgctctcgactagaacacaactaaatctgagggaggtgctatatgtgcaacgacagggtgttctaatccagctagcattggtgcgctttggtaatagggatcattattgatttcatgactttttgtaactgaagaccaactggttctaccggctgccgggcagagaaaattcagtaccttaacatactagcacacacgtgacacagggaggataatatagtttacgtcatgattatggatattacatgcatattacacatgtattcaaaccacacatttcacgagtttattgcaagacttgtattcatacgacacat

SEQ ID NO: 968 - DNA, 392 bp, Zea mays
  Clone ID: LIB3115-018-P1-K1-D2
gacaggcaaaagataacattactgcgcgtacgctgtgcacatatcgatcggatttctccaaatactgaagctgctgccgctcgtggggacctcacactcacagcacgctcctggggacgaagctgctgccgccagagatggtggtggtggtctcggcggccagcccaagctcgccgtccttgtcgtccttggtgaagcagtactccggggcctgccacgccgcgttctccagcaccgctcccacctcaaagctcataacgtaggcggtcctacctgtgtagaagacccacttgacgggtcgcttggtgttgacgtcctcgtagtaggtgatgaagtcggccttggcccagacgtggcagtcgaatccgccggcgtcgcggcggccgaggtag

SEQ ID NO: 969 - DNA, 442 bp, Zea mays
  unsure at all n locations
  Clone ID: LIB3115-018-P1-K1-D3
gtgctcagcctcttctcctggcacaacgagaccatctacgtctggacgcacctgctcgggtgcatgctcttcttcggcctcacgctggtgcacctcggccagtacttcccccaggtggctgatctgattgggcatctctcctggccaatctcgaaggtcgctgaaaatgtctccagcaatattggagatgtcctatcaggcgcggccatgttcatccagacgaacccgagcctggcctcgcacggcacggcggtggcgtcgcagacgacgcggtggcccttcttcgtgttcctggcgggggccatgttctgcctgctgagcagcagcgcgtgccacctgctgtcgtgccactcgcaccggctgaacctgctgctgatccgcctcgactacacgggcaatgcggtcatgatcgtggtctncttctttccgcccatctactaca

SEQ ID NO: 970 - DNA, 415 bp, Zea mays
  Clone ID: LIB3115-018-P1-K1-D4
gctggcttctcctccccctcttaccaagtcctcctcgggttagggttccttagggttttgtggaggggcgatggcggcggctgatgtggagtaccgttgcttcgtcggcgggcttgcctgggccaccagcaacgagtcgctggagaatgccttcgcctcctacggcgagatcctcgactccaaggtcatcaccgaccgggagacggggaggtcccgcggcttcggcttcgttaccttctcctccgagaactccatgctcgacgctatcgagaacatgaacggcaaggagctcgacggccgtaacatcaccgttaaccaaggcccagtcccgtggcggtggcggtggcggcggtggctactgcggcggtcgcggcggcggcggcggttatggtggcgggcgccgtgacggcggtta

SEQ ID NO: 971 - DNA, 418 bp, Zea mays
  Clone ID: LIB3115-018-P1-K1-D6
cccacgcgtccgcgttatgattccagcaaaggtcgtataatttatagacttccccataaggattcgaagcgtaccgaagactcgaaggatactgaagatttgaaggataccaaagattcaaaggattaggtttttctggggtaataacttccaagtttcaaaatttaagtgaagagacttattttttccaaaagaatagattcatagtttaagaaaggaatacccatatatgaaaataagagcttccgttcgtaaaatttgtacaaaatgtcgactgattcgcaggcgtgggcgaattagagtcatttgttccaatccgaagcataaacaaagacaggggtaatctttcgaaaaagaagcttttctttctaatagcttttctttctaattaaaaggaaaaaggcccacgggaatggcc

SEQ ID NO: 972 - DNA, 440 bp, Zea mays
  unsure at all n locations
  Clone ID: LIB3115-018-P1-K1-E1
tgtttggttcccctgcttccagaatttatatgacttgtgaattttaaatgaaagaaaagaaaggaaaattatgaatcatggattattgattcatgccataacattgacttttgtgcagggttgttatctatctttgtagccgaagaaacaatcctgagaaagaatggaaagctccttggctaggaataatgtttctaagtggaatcacctgggttatgcgagaagcacatcaatggattccactggtcctctgttagctggtaggagaagtagcagacatggctcaagtgagatgggggactgcatattcagctcaatgagacattttcttcagttggcgaatcaattactaggagaatttgttagatattaagattaatagtaacatgtattaattcaattttatataatcgntgtgcaccaacattttatttgaaagg

SEQ ID NO: 973 - DNA, 306 bp, Zea mays
  Clone ID: LIB3115-018-P1-K1-E10
caaggagacgctcctgaggcttgccgggctcttcaagaagaacttcgaggtgttcgccagctacaagatcggggacgacagcaacctgaccgacgagatcctcgccgcaggccccaacttctgaactaaagcagtgggtccggatgaataaaacggtggtatgcgtgtgaagaagatgatgatgacgacgaaaatagtgtgttggatcgatgggccagcacagtgtagactagcttttgtatattatctcgggttggaaatctggtgttgttacctaaaatgttggtctgttctatcggcttgttg

SEQ ID NO: 974 - DNA, 277 bp, Zea mays
  Clone ID: LIB3115-018-P1-K1-E11
ttaataaccggttcgacccacacttccgcaaagagactctcctgatgcttgccttttctcttttataagaactaccatcttttctggggctgctttatttgatacgggaggaggccttcctactatatcctcttctcataccccaacttctgaacttaaacaatattttcccgattaataaaacttttttttacttttaaataatattattttaactacctaaataatatgtattatctatattccatatacatattcttactaactattatttatt

SEQ ID NO: 975 - DNA, 413 bp, Zea mays
  Clone ID: LIB3115-018-P1-K1-E12
agcagcgccagcggcggtcagcgtcagcgtcagcgcccgaccaaatttcccccctcacctccccctctcccgtcgtcggcatggccaccgacgtgctgcgcgcgcgcaacgtcctcttgccggcgccgccgcagaggatccgggcggcggcgccggcgcgcggtagtggatctcgccccgccagtcaccagccttgctccacccgcacgaggaggaggtcgccgccggccgggacatcgtcccccgcggcggggcgaagacaccccggcggcaggagggcgaggcctgcggcggaggtgtacgccggcccatcgttctcgacgtcccccgacccgagcttgctgccggtaccgcagttccctgccaggaaggccgtggccgtggccatgacgaccggcgtcgacgccgtcgtc

SEQ ID NO: 976 - DNA, 282 bp, Zea mays
  Clone ID: LIB3115-018-P1-K1-E4
cccacgcgtccgcccacgcgtccgcggacgcttgggtctggaagctgtctgtcttttgagatgctgtagactagtagtgcctggtctgagttagtaattgaaagtgttgtccctgaagtgatgctgtttagttggtagtgtgttcgcttcttcggcacttatacttacccccaagcatcaacgctgcctgttttaaatctcaataggtgctgttttaaatctcagatctcaatatatgactactgatcgctgaatagatttcatgctctcttgattgactgc

SEQ ID NO: 977 - DNA, 443 bp, Zea mays
  Clone ID: LIB3115-018-P1-K1-E6
aaaccaaatcgcttaccgcccccgaagcgtctcggttcgcatagcaaagctgctcttgcaacaagccaaacaacccagtggctgctagccgagacaggggatagattgagagagaggcgcgcagatggcgacgccgtcgtcgtcgctttgctccagcttcgcctccctgcggaccgcctccatcggccacccccgtggcatcgcctcctccacgctcaggaaggcattccatgtgagggcatcagctcgggttgacaagttctcaaagagtgacatcatcgtgtccccttcgattctgtctgcaaactttgcgaagcttggtgatcaggtaaaagctgtggaggtggcaagatgcgactggattcatgtcgatgtcatggacgggcgctttgtgccaaacatcacaattggacccttggttgttgatgctctgcgtccagtga

SEQ ID NO: 978 - DNA, 437 bp, Zea mays
  Clone ID: LIB3115-018-P1-K1-E7
aatccacacaagcacttcgacgtcacacgggcgctgcgcacagacacaccaagcgtcggcaccaatggcttactaccaggaggtggactactgctcggaggaggtgaggtcggtggccccggccggcttcggccgccacggcggcggcgtccagcagcacgtcgtcaaggagaagttcgaggaggtcgacacggtctcacgcgccggcgccaaccaccaccaccaccatggtcaccacggcggccacggcttcgtggtgcgcgagaccagggtcgaagaggacatcaacacctgcaccggcgaggtccacgagcgcagggagagcttcctcgccagggctaactgatgccgccggcggccggcatccacgcccgttcgtgcttgcctgcgtgccttatgtatgtctgtggttgactggttgtgcagggtcatcgtac

SEQ ID NO: 979 - DNA, 431 bp, Zea mays
  Clone ID: LIB3115-018-P1-K1-E8
cccacgcgtccggacgggcttctgggtgcctaggtatccaccgcaagccttgacgacgcgccgccgcccgtggaccacgccgcggccgcgaggaggcgccggaggaggagggccaacagggccgcccagctgctgggggctgctgcgggtgcgccgcagcagtggcgcccctcgctcggcgacatctgcgaggagtacagcagcagcaccgacgccgtcaaggtcaggaaggcggcgtcctgggacctcgcccgggcgctgccccgcgcgcacggcggcaagcagtaccggcaccttgagggcgcgtcgtccctgccagcgttcgcgccgacggcgttcctgttctgatcatggcgtcggggacggcggcgactcgtcgtcatccaccacgacgacgacggcggtgaagacaataagaaccaaccaaaacc

SEQ ID NO: 980 - DNA, 330 bp, Zea mays
  Clone ID: LIB3115-018-P1-K1-F10
cccacgcgtccgcccacgcgtccgcccactcgtccgcccacgcgtccggtgcagtgttgttcgcaagatgggctacggtgatggtttcaagtgggtctcccagtacatcaagtagggccctcgccgaggcgcatgctcagcccggcgaatttttttgccttgttcgttccggttggttcgtgacgagaacgaacgatggtcgctaggaaagtatcatggagggtatgaagaggaaaaacagtgcttaacattgttgaacatgttgagtctttagcgtcaaaacaatttatgtcgaactctattctttcgcttttccatacaacgtttact

SEQ ID NO: 981 - DNA, 442 bp, Zea mays
  Clone ID: LIB3115-018-P1-K1-F11
cccacgcgtccgcggacgcgtggggccttgccatttgattctatcaaagctagcagacaagtgcccttccgccgtccttgctggcctggactccatagttgaaccaatcgagaaaactataagccacaaacccaagggggatgcagtgaagcaggaggttgatcggaacgaggacatgatccgcagcgctctcagggcaatatcttctctaagccgcataagcggcagcgactacagcatacggttcaagaatctgatgaacaagataacgaccacccccgcgctcgccgagaagtacaactcggtgcgcggcgaatgagacctgggttcttgtacatggtagaggaataggttaaacacccagagttgtcgcgcgctcgtcaatcctgttgccgcttccccgcatgggtgctgaggcaaaagtctgtactctgatgatgac

SEQ ID NO: 982 - DNA, 296 bp, Zea mays
  Clone ID: LIB3115-018-P1-K1-F3
acccacgcacactcttctccccccagtccggtccccgtaggagccaagccatggcgtccacctcctggtgcctcctccaccagtgaaccgcccgcctcggcgcgtcgccgcgcctggccgtcgtcccgtcgcgcagcgcccagctgctcgtctgcaaggcccggaagcaggacgccgccgcggaccagagcgacgtctcgcgccgcgccgggctcgcgctcctcgccggcgtcacgggcgccgccggcgccaaggtgggtcccgccgccgcggcatacggagaagcaggcaacgtg

SEQ ID NO: 983 - DNA, 333 bp, Zea mays
  Clone ID: LIB3115-018-P1-K1-F5
cggacgcgtgggcggacgcgtgggcgcgacccggcgcacccgtggagggtggaccccaggttcgggctcaagggcgtgccaacgctgatccgctgggaggatggcgccgccgccgcccgcctcggggacgacgaggcgcacctcaaggacaagggtgacgccctcctctgcgctggcggcaactgagtactgactactgacagatccggtttcccgttcgggttccatctgcgtagagtggccataataaataacatgtactggaattcagttcatctacatgccggaccagaagctggggaatcgtgtgaagcttaatagttcagtttatct

SEQ ID NO: 984 - DNA, 423 bp, Zea mays
  Clone ID: LIB3115-018-P1-K1-F7
cgacgcgccgccgcccgtggaccacgctgccgccgccgccgcgaggaggcgccggaggaggagggccaacagagccgcccaggtgctgggggctgctgcgggtgcgccgcatcagtggcgcccctcgctcggcgacatctgcgaggagtacagcagcagcaccgacgccgtcaaggtcaggaaggcggcgtcctgggacctcgcccgggcgctgccccgcgcgcacggtggcaagcagtaccggcaccttgagagcgcgtcgtccctgccagcgttcgcgccgacggcgttcctgttctgatcatgggggtcggcgacggcggcgactcgtcgtcatccacgaggacgacgacggcggtgaagacaataagaaccaaccaaaaccactacgcgaagcatatatacagattactgtcaacgtat

SEQ ID NO: 985 - DNA, 437 bp, Zea mays
  Clone ID: LIB3115-018-P1-K1-F9
gaatggcaggatcacctgcatgacgtttccccgggactggctgcggagggacctgagcgtcatcggcttcgggctcatcggctggatggggccgtccagcgtcccggccatcaacggcaacagcctcacggggctcttcttctccagcatcggccaggagctggcccacttccccacgcccccgcccgtcacctcccagttctggctgtggctagtgacgtggcacctgggcctgttcatcgtgctcaccttcggccagatcggattcaagggcaggaccgaggactacttcgagaagtgaagcggttaagatcctatccatcatccctggtgctgcgctgcgttgcgttgcgtgcgtgctcgccgctatcgaacctttgctgtatagggttccgatttcgtcgaatgtaatgtatgatgctacctttgagcttaaa

SEQ ID NO: 986 - DNA, 445 bp, Zea mays
  Clone ID: LIB3115-018-P1-K1-G10
gagcacaagaagaaggtggaggccaagaactcgctggagaactactcctacaacatgcgcaacacgatcaaggacgagaagattgcgtccaagctgccggccgatgacaagaagaagatcgaggacgccatcgacgcggccatcagctggctggacgccaaccagctcgccgaggcggacgagttcgaggacaagatgaaggagctggagagcctctgcaaccccatcatcgccaagatgtaccagggcgcgggtgaagacatgggcggcgctggcggcatggacgaggacgcccctgccggcagcggcggccctggccccaagatcgaggaggtggactaagcggtttgttgtcagtcttgagtgtgctgcagttgctggctggcccagttgctgccgagagttatcgtcagttggtgcggtgtgtccgcttaaactttatttg

SEQ ID NO: 987 - DNA, 348 bp, Zea mays
  Clone ID: LIB3115-018-P1-K1-G11
cggacgcgtgggttctcctccccctccggttcgggttcgggttcgtgaggttctccggggttcggtttcgtgggtgagcggatcgagatggcggcgtcggatgttgagtaccgctgcttcgtcggcggcctcgcctgggccacggacgaccactcccttcacaacgccttcagcacctacggcgaggtcctcgagtccaagatcatcctcgatcgggagacgcagaggtcccgcggcttcggcttcgtcaccttctccacggaggaggcgatgcggaacgccatcgagggcatgaacggcaaggagctggacggccgcaacattaccgtcaacgaggcccattcccgc

SEQ ID NO: 988 - DNA, 426 bp, Zea mays
  Clone ID: LIB3115-018-P1-K1-G3
ggcacggcaactacagccttggcctccgtgaccagggcgtgttcccggagatcccgtacgaggtgggcgggaagaagaacgggatggacgtgtccatcgtcaccagcgccaagacggacaacgaggcgttcaggttgctggtcctcctcggcatgccgttctcggagaacatcaagaccgacgtggtgatccggaagaagaggttgaagcgccaccacttcctgagcaagggcaaggggaagggaggacgacggtgaggagaggaaccagccagccagcccatggttgcacacgctctgctcagcttgttttaattccgatctttttgcagaatttggcttacaaattcgatgctgttgttgtctgtcaattatgtaacttgtgcacctatgaaaaaggtttgcaatgatcatgtccgttttgctg

SEQ ID NO: 989 - DNA, 445 bp, Zea mays
  Clone ID: LIB3115-018-P1-K1-G4
gcggcggcggcggcgtcctccgccgtgggcttcgaggactacctgccggtgatggcggagcggctgggcgaggacgggctgatgcgggagctggcgagcgggttccggctgctgatggacccggcgcgcgggctcatcaccttcgacagcctccgccgcaacgcgccgctgctgggcctgggcggcatgtcggacgccgacctccgcgggatgctcgccgagggcgacttcgacggcgacggcgcgctcagcgagacggagttctgcgtcctcatggtgcgcctcagccccgagctcatggacgagcccaggcggtggctcgacgacgccgtcgaccaggcggcccgcttcctcttcaccagctgatgatgacgacgacgatgattgataactaataattaaggctactagatgatcgttgagatgtttcttcttcttcttcttc

SEQ ID NO: 990 - DNA, 376 bp, Zea mays
  Clone ID: LIB3115-018-P1-K1-G8
cgccacggtcctggacccccctaccagtgccgcatgtccaggaacgggttctggcagtgggaggacgagagcccgccgtcgggcgcctggaagggcaccagcggaggccacgccgtgctcatcagcggatacagcgagggcaaaggcaacttcgccatgccgcgcggggtcacctacggccacctgctcagctccatgagggccatcatgaagaaccgcggcgggggctgcgatctgcagggggccatcggcgcacccatccgcaccgtcgccaacttcagcggcgtgcaggagcctaacctgtcctcttcggagacgtttgacatttaccgcaagcagttcgtcctgtagacaccaccacaccaagggtttgccc

SEQ ID NO: 991 - DNA, 426 bp, Zea mays
  Clone ID: LIB3115-018-P1-K1-H11
cggacgcgtgggcggacgcgtgggcggtcgctgcgcacagacacaccaagcgtcggcaccaatggcttactaccaggaggtggactactgctcggaggaggtgaggtcggtggccccggccggcttcggccgccacggcggcggcgtccagcagcacgtcgtcaaggagaagttcgaggaggtcgacacggtctcacgcgccggcgccaaccaccaccaccaccatggtcaccacggcggccacggcttcgtggtgcgcgagaccagtgtcgaagaggacatcaacacctgcaccggcgaggtccacgagcgcagggagagcttcctcgccagggctaactgagccgcccggcggccggcatccacgcccgttcgtgcttgcctgcgtgccttatgtatgtctgtggttgactggttgggcagggt

SEQ ID NO: 992 - DNA, 388 bp, Zea mays
  Clone ID: LIB3115-018-P1-K1-H3
cacggttggagatgtgaataccgatcgtccgggcatattctaccaaaaggacagggccaagtgggatgcctggaaggctgttgaaggcaaatcgaaggatgaggcgatgaatgactacatcaccaaggtgaagcagctccaggaggaggctgccgcctcttaaaagtctcttaatagtgttgccaaacagctatttgtcagatgagctttgtgccatttcctcattagaagtatatcattcgatccattggggatctgtgaaccatgtacctgtttatgtaacttttttttttttcgaaagagcgcaggaggactgcgcacccatatattaaagtagagggaaaataaagggccataatgatgatatccatctatctatctatgtaac

SEQ ID NO: 993 - DNA, 394 bp, Zea mays
  unsure at all n locations
  Clone ID: LIB3115-018-P1-K1-H4
accaaaaggacaggnccaagggggatgcgcttcattgctgttgagggcgaatctaatgattaggctattaatgactacatcaccaaggtgaagcagctccaggaggaggctgccgcctcttaaaagtctcttaatagtgttgccaaacagctatttgtcatatgagctttgtgccatttcctcattagaagtatatcattcgatccattggggatctgtgaaccatgtacctgtttatgtaacttttttttttttcgaaagagcgcatgatgactgcgcacccatatattaaagtagagggaaaataaagggccataatgatgatatccatctatctatctatgttactggtttatgtaccatgtacctgtttatgtaactggttaccagtgtt

SEQ ID NO: 994 - DNA, 360 bp, Zea mays
  Clone ID: LIB3115-018-P1-K1-H8
cgccggcagccccaagagcagcgctcctcgcgtgatccaccagcctcgctaggttcgctggccggcccctgatggggactcggtgactcacatggaaggctgctgcctctctagcagcatctgctactggctgcagctgccgtcggcgtcgtggtctgtctgtcaaagtcgaaagaaaaaaacgtgagtagttgtactactgtagaagtttcttttgtatagcatgcacgtaagaaatgaccaaaaaatataacaagaatgcagctgttagtttactgctgctctcctcgtgtgtctagggtgcacttctgtaagcaaacgtatatgatgtgtaatggcagacagcttaatgttacaact

SEQ ID NO: 995 - DNA, 187 bp, Zea mays
  Clone ID: LIB3115-018-P1-K1-H9
cccacgcgtccgcccacgcgtccgcgttgctgcattgcataaagagggagctcaattaggcattgagccctagagcaactccatatttttctttgttttgcgtgaggggaataacaatactatatgcatctgataagttatcggttgcttgtacatatactttcaagctataaattattgtgtccgc

SEQ ID NO: 996 - DNA, 350 bp, Zea mays
  Clone ID: LIB3115-019-P1-K1-A1
ggcaatgcaaactcgtcccactcttaagctcatgctgggggatgcagctgttagttgcaggctctgacacttgcttgctcatgatctttgggactctgagcatcaaaaggcgttatcactgatgcttctctcgggaagaagagatgattgcctctcgccagtgaacacaccatagtctttacccggtgaatggaccgtttgcattggaacgatacgttttatgagttttctgttatttcctcagtggcctaagctagcaacagtgtatagttgggttgacactcaaacttctaccattcgagttgggtattagaactagttattattggttcatgttgaacttatatata

SEQ ID NO: 997 - DNA, 421 bp, Zea mays
  Clone ID: LIB3115-019-P1-K1-A10
cccacgcgtccgaaactggcgaggtgcgaggtgttggcgaagcacttatgggacttcagcgaggagctgatcaagtctgctaaatgagagccgaaaatgttgtggtcctgcttggcatctagtggcacacgtgatgactgattagtatatagcacggtggaacctgggcgatggctggacctcatggtgttcatgaataaaatctgcttgctttcggacattcattactccggcgtggcaaacatgaattggtagagctggcactatctgctaatatacacacagctcagatgtgtcttgcatgaagcattgtctttatatataagaaggcatttggtcatatttgagcaacctcagtcgtagaatgataaatgattttcatcagcgaaaagtcgatcaatatattttgaccattaatttt

SEQ ID NO: 998 - DNA, 316 bp, Zea mays
  Clone ID: LIB3115-019-P1-K1-A3
ctccagtgtggccgttcgttcccctctgttccgcgccgacggtgctgagcatggtggtgaacgccacggcggaggagagggcgccgctgggcgcggtgaggaagaggccggtgactgtgatgacgggcggcgcgccgccggcgccgcaggtgctgttccggatggaggagctcgggttcctggtgatccactcgtacgggctgacggagacgtacgggccagcgacggtgtgcacgtggcggcccgagtgggacgcgctgccggcggcggaacgcgcggtcatcaatgcccggcaggggctccaccacctggggct

SEQ ID NO: 999 - DNA, 218 bp, Zea mays
  Clone ID: LIB3115-019-P1-K1-A6
cttgaagtatacacacagtagaaactaattaaggcacgtttgctttgctccaggagaccaggagcgctctgatgttgtcgtgttcctcgcggcatggccttctcggcctgttgtactcagtagcgccgcagagtctctctagcatgagacgacctcgaggagtctatgttgtcgtctatggatggaacagtcagcatagaccaaggccgtgacctttc

SEQ ID NO: 1000 - DNA, 51 bp, Zea mays
  Clone ID: LIB3115-019-P1-K1-A8
cccgcgctctgctcctcccagatctagactttctgtgctgaacatggtata

SEQ ID NO: 1001 - DNA, 413 bp, Zea mays
  Clone ID: LIB3115-019-P1-K1-B10
ccctcttccatctcatttccgctgctgctgctataataaaataataagtctcgtgcaggcgagggacgtacgacgacgcggacgcaccgtcgaagtctacaggctgcgcaatccctttctccctcttatccccaaggcgaggagctgagggggggcccttctgctgctgttcttgtttccccgctctccaagatgtcgtccccgagcaagcgccgcgagatggaccttatgaagctgatgatgtgcgactacaaggtggagatggtgtacgatgggatgcatgaattcttcgtcgaattcaaggggccggccgaaagtatctaccaaggcggtgtctggaagggtagggttgaactgcctgatgcatatccttacaaatccgcgttcatcggcttcatcaacaggatttatca

SEQ ID NO: 1002 - DNA, 377 bp, Zea mays
  Clone ID: LIB3115-019-P1-K1-B12
aaaaaaaaaaaaaaaaaaaaaaaaaaaaaaatttttaataaaaaaaaaataaaataaaaaaaaggggaaatattatatagagaaaagtgaaattaaataaaataaacaaaaaatttaaaaaataaaaacataaaaaaaaaataaaaattaaaaaaatgggggggcttttttaaagattcaaatttttcttgcttgtttttgtaacttataattttttttttttggccctttaaatcaatttcatggccctggtttttaaaagggacgctttgtaaaacccttggtttacccaaatttatttgctttttaaaaatatctttttttctacatttgctaataacctaaagggccctcatttatctcttttccaaaaattt

SEQ ID NO: 1003 - DNA, 348 bp, Zea mays
  Clone ID: LIB3115-019-P1-K1-B2
agcggcgcgacatcgccgtcgatgactgctcggcgatctgcctcttcttccacccgccgccgccgtcgtagacacgaaaacctgtaacgtgccgaagtccacgccaaggaggagggggcaacgaaatgcacatctcaagacagactacgattattgtgcccgtggcgttcgtagagtgcactgccgccgtccaccgttcagaaacgtgcagtttgtcacgtgagagcgacactccacgattaggaactgcagccggtgcacggccaaacaaaaagatctccggctttcacacgttaccagtcaagatgtacgagaacatcagagaaaaagggtaggaaagacgcattt

SEQ ID NO: 1004 - DNA, 406 bp, Zea mays
  Clone ID: LIB3115-019-P1-K1-B3
cggacgcgtggggtaatgaagcttttggtctgccaaacagtccatatagatctcattcagctatactcgcagatgatattgtttcaccttcagctggacgtgaacatatatccctcgatgttcctagaggaaggtataagacaactagtttgcctgttcctggtcttggttcaagcagaggttctcaggtgttgggtggcccatataatggaaaccatgatatgatctcaaccaataccctacaaaacatggctggaattcagacaggagcagcttggcttgaaactgatgctgcggcaaacacatatttggaatcaaaggatgaagttcatgattttgcaagcctgcgacatgcagttcttgaacaggatagacaggcttttctgatgggaaacaaccctttagc

SEQ ID NO: 1005 - DNA, 448 bp, Zea mays
  Clone ID: LIB3115-019-P1-K1-B4
cggacgcgtggggtaatgaagcttttggtctttcaatttgtccatatagatctcattcagcggtactcgcagatgatattggtggaccgtcagctggacttgaacatatatccctcgatgttcctagaggaaggtataagacaactagtttgcctgttcctggtcttggttcaagcagaggttctcaggtgttgggtggcccatataatggaaaccatgatatgatctcaaccaataccctacaaaacatggctggaattcagacaggagcagcttggcttgaaactgatgctgcggcaaacacatatttggaatcaaaggatgaagttcatgattttggcagcctgctacatgcaattttttgaacaaggatagacaggcttttctgatgggaaacaactctttagcaaaggatctaacattgaaggagctatacagttacaaagca

SEQ ID NO: 1006 - DNA, 428 bp, Zea mays
  Clone ID: LIB3115-019-P1-K1-B6
cccacgcgtccgcccacgcgtccgcggacgcgtggggaaaacctctccttcttcggtaccatactggcagtgcctagcggtggctcaaaaaacagcgtgaaatgtgcaagttgtggcactgagttggagtacgactcttcaacccgattgatcacactcccagaaccggctgaggctaaataagtgatggcgtggtttcgatttcgctagcaggaaagacggcccggccggcccgcagattcttgatcgacgacagtacgaagcaagactgttcttggatcgggtggcaatcgtggagtgatgtatgtttgctgtgctagtctgtgtgtatatatatttgaacaagtttagacacctgtattatatagatctaatgaaatgggtatatgtatgtgcatagagtgtacaaagaaaaatttaataagccg

SEQ ID NO: 1007 - DNA, 380 bp, Zea mays
  Clone ID: LIB3115-019-P1-K1-B8
cccacgcgtccgcccatggtgaaggcggcgttcgagaagttcggcggcaggatgaaggagatcgaggggttcatcgacgagtgcaacaacaacctggacctcaagaaccgctgcggcgccgggatcgtgccgtacgagctgctcaagcccttctccaagccgggagtcaccgggaggggcatccccagcagcatctccatctgatccatcctcagcatgcattagtccaattaattaaatcgggggttgtactattattgcatgcagaggctgcttgtcgaataaaacgtactatatgtacgattgtattgtacatgtgtgtcaatgcaacaagaggcacgtttgagactttgagttaataccaattaaactagtaagat

SEQ ID NO: 1008 - DNA, 358 bp, Zea mays
  Clone ID: LIB3115-019-P1-K1-B9
ccctcttccatctcatttccgctgcggctgcatacaataaaataataagtctcgtgcaggcgaaggacgtacgacgacgcggacgcaccgtcgaagtctacaggctgcgcaatccctttctccctcttatccccaaggcgaggagctgagggggggcccttctgctgctgttcttgtttccccgctctccaagatgtcgtccccgagcaagcgccgcgagatggaccttatgaagctgatgatgagcgactacaaggtggagatggtgaacgatgggatgcaggaattcttcgtcggatatcaaggggccggccgaaagtatctaccaaggcggtgtctggaaggttagggtagaact

SEQ ID NO: 1009 - DNA, 343 bp, Zea mays
  Clone ID: LIB3115-019-P1-K1-C10
cccacgcgtccgggtgggttggcttctccttcccctccggttcgggttcgggttcgtgaggttctccggggttcgggttcgtgggtgagcggatcgagatggcggcgtcggatgttgagtaccgctgcttcgtcggcggcctcgcctgggccacggacgaccactccctccacaacgccttcagcacctacggcgaggtcctcgagtccaagatcatcctcgatcgggagacgcacaggtcccgcggcttcggcttcgtcaccttctccacggaggaggcgatgcggaacgccatcgagggcatgaacggcaaggagctggactggcgcaacatcacccacaa

SEQ ID NO: 1010 - DNA, 176 bp, Zea mays
  Clone ID: LIB3115-019-P1-K1-C11
cccacgcgtccgggtgggttggcttttttcttctctccgcatcgacttcaacttcgggaggttcttctggaatcgggggcggggtttattcttatctatatgacttcatctaattttaattacccctacttcttttgctgcctcgcctgcgccacagactatcacttcctacacaa

SEQ ID NO: 1011 - DNA, 400 bp, Zea mays
  Clone ID: LIB3115-019-P1-K1-C3
cggacgcgtgggcggacgcgtgggcagagggccagaggcgcagaaggcagtcgcggacaggaggaagaggaagaagaagcggcagcgagcgaggatgccgtgcctgaacgtgtcgaccaacgtgaacctggagggggtggacaccttcgccatcctcgccgaagcctccaagtccgtcgccaacatcatcggcaagcccgaggcctacgtgatggttgttctcaagggttcggtgcctatggcatttggaggtacccaggagccagcagcttacggtgagctggtttccatcggaggcctgaaccctgatgtgaacaagaagcttagtgctggcatcgcttctatcctggagtcaaagctgtctgttcccaagtcacgcttctacctcaagttctatgac

SEQ ID NO: 1012 - DNA, 423 bp, Zea mays
  unsure at all n locations
  Clone ID: LIB3115-019-P1-K1-C5
cacaaggagaggccgagaagcgctttagccgtagccgtagcgataagagtgagctagctggtgcacaccggcatggcggccacggcgtactccgtggcgctcctcggcggcgcgcgcctncccgccgctccgcgctccgccctcctccctcggcgcagcgtctgccagcttcgcttccaagatgcaccgaggctctccctgctccgtgcgaaggccgcttccgaggacacatcggcctccggcgacgagttgatcgaggacctcaaagcgaagtgggacgccgttgaggacaagcccaccgtcctcttgtacggcggcggcgccgtcgtcgccctatggctgacgtccgtggtcgtgggcgccatcaacgccgtgccgctgctccccaagatcctggagctcgttgggctcggctacaccggc

SEQ ID NO: 1013 - DNA, 395 bp, Zea mays
  Clone ID: LIB3115-019-P1-K1-C7
ctattcctcacgagcgattgcggcggcggaagtaagaggcgatggggcactccaacgtgtggaactcgcaccccaagaactacgggcccggatcccgcgtctgccgggtctgtgcgaaccctcatggactgatcaggaagtacgggctgatgtgctgcaggcagtgcttccgcagcaacgccaaggacattggcttcatcaagtaccgctgaagtcagctgggcgggctatctgaatgccatctcttggacagtgtagtagaggcgatgccacaattttaattactgtcatttagatgttcccttcagaactctgctatttaagtccgccatgtttgtgatggagaacttaagctttgtttgttatactgattatgagttacctgtgctttgctt

SEQ ID NO: 1014 - DNA, 378 bp, Zea mays
  Clone ID: LIB3115-019-P1-K1-C8
ctattcctcacgagcgattgcggttttggttgttagaggcgatggggcactccagcgtgtgggactcgcaccccaagaactacggacccttatcccttgtttgcctggtctgtgcgaacccttatggactgatcaggaagtacgggctgatgtgctgcatgcagtgctttcgcagcaactccaaggacattgtctttatcaagtaccgctgaaggtagcttggctggctatctgtatgccatcacttgctcaaggttttatatgccatgccacaattttatatacctgtctttaaatgtttcctttaaaaccttcagtatttaagttccctcaattttttttactggtgaaacttaaatcttttgcttttctcattta

SEQ ID NO: 1015 - DNA, 388 bp, Zea mays
  Clone ID: LIB3115-019-P1-K1-C9
cccacgcgtccgccacaccgcgcaggggctcagccccgccacccaccttaaccccgccgtcgggaggcgtcgtccccggcccggcccggcccggccctcgccctctactgcaactggactggcgcgtagacctgtccccgccacgagatcgttccgccctatgtcggtgaagatgctctttgcatagctcaagctgcaatctgatggaccctgatgacaagaagtttggaaatggaccaagggagctcactggtgctgttgatttgatcagccactacaaactgctgccacaccatgatttcttttgcaagaaacctttgccgctggcaatatcagatacacattatcttcacaatgttgtgggagacactgaaattcgcaaaggaga

SEQ ID NO: 1016 - DNA, 208 bp, Zea mays
  unsure at all n locations
  Clone ID: LIB3115-019-P1-K1-D1
tggatccacaactatttgcttgcttggctctgagtcacacctgaccgatcaatgcaggtgtcactttgcttttaactgtttacatataaagagtcgagtttcgcacgtggccacctgggtcctgattaatctacccatatagctacgttgggtttagatgcttaggcattcttgtaaattgttttcttnannaaaaaaannnnnnnna

SEQ ID NO: 1017 - DNA, 426 bp, Zea mays
  Clone ID: LIB3115-019-P1-K1-D11
cccacgcgtccgccaggaaatgcccaatggctactcgaaggtgacctgggtggagcacgtcgaggtggacgacaggtcggtgcacagcatctacaagctgctggtgagctcggggctggccttcggtgcacgccgatgggttgggacgctggaccgccagtgcgagcgccttgccagtgtcatggccagcaacatcccgaccagtgacatcggtgtgatcactagcgcggaggggaggaagagcatgctgaagctggcggagaggatggtgatgagcttctgcggcggcgtgacggcctctgcggcgcaccagtggacaacgctgtccggcagcggcgctgaagacgtccgcgtcatgaccaggaagagcgtcgacgaccctggcaggccgcccggcatagtcctcaacgctgccaactcgttctg

SEQ ID NO: 1018 - DNA, 438 bp, Zea mays
  Clone ID: LIB3115-019-P1-K1-D12
tggggccaccaggccttgggaggcagcccccggtaccattcgtggggactacgccgtggaagtcggcaggaatgtcatccatggaagcgactccgtggagaacgggaagaaggagatcgctctctggttccctgaaggtgtggcacagtggaagagcaaccttcatccctggatctacgaggcttaagcagttgagcttggatgccttgcctgcttccatggaaaccagagttttgtttgagtattatctgttggctctggctgaagagtcataatttagcgctctgtgtgttacaccagagttaagtctgcctgaacttatgtggcatttgtttgagtttctgccttcgtgccctgttttctaatgtaccgtggttgtgaaccggtcaatgtgatctgaaataatgtggtataggggcaaataatgctctgtttggc

SEQ ID NO: 1019 - DNA, 327 bp, Zea mays
  unsure at all n locations
  Clone ID: LIB3115-019-P1-K1-D2
cccacgcgtncggctaagggaatagatgcacttggtgtagccacattaagttctgcaacgtctgcagcagcctccagattgccattcggtggtggaccatccccattgacctcactagatgacgaagatgccacaaacttaagaaatctgtatcgcctgctcctacttttatctaaggtttctcagaaggaaaatccatctccaattcctgaatataacagtgccatagagaaggaaggtggtagcacggatgaacttgctcttgcgctgtatggaatgacctctctgccagaatttcttccaggtcttttctgtcattcctgagct

SEQ ID NO: 1020 - DNA, 418 bp, Zea mays
  Clone ID: LIB3115-019-P1-K1-D4
gagaattcctcacgtcacctgcaactccaactgttgctcggcttcaccacgttcaactcccaggaaaacccccagccatcacctgccccagcgttcgctctccatgtttcctagccccagcggccagcctgtccttgctcgtttccaagctgtgctctagcaagcttctctgtagttcttccccaactgctcgctctcagcctgtccggtcctgcgtacttcaacactgttctacagccgtctgagctccacctcgtcgtcgacctgttgtttcagcgtcgtatccctcgacttcatcacagcatcaccggtgctctcgtcgtcgttgagctcttggcgcgacgtgacgtcatcgtcgttttctcgccagtcatgctcgacccacagctccttcgcgtcatcgtcttcgacaacccac

SEQ ID NO: 1021 - DNA, 444 bp, Zea mays
  Clone ID: LIB3115-019-P1-K1-D7
cccacgcgtccgatagaaagcacaatagtgtaccaacaatggcagccaaaatattttgcttccttatgctccttggtctttctgcaagtgttgctaccgcaaccattttcccacaatgctcacaagctcctatagcttcccttcttcccccatacctctcaccagcggtgtcttcaatgtgtgaaaacccaattgttcaaccctacaggatccaacaggcaatcgcaacaggcatcttaccattatcacccttgttcctccaacaaccgtcagccctattacagcagttacctttggtccatttggtggcacaaaacatcagggcacaacaactacaacaacttgtgctagcaaaccttgctgcatactctcagcaacatcagtttcttccattcaaccaactggctgcattgaactctgctgcttatttgcaacaacaattac

SEQ ID NO: 1022 - DNA, 429 bp, Zea mays
  Clone ID: LIB3115-019-P1-K1-D8
gctccaggacgtacgtacgtacgtagatcgatccatcgatcgctagctagctgacgaccatggcgtccctctcctctgccgccatcaccgccccttccttcacggccgcgcccgctcgcgcagtggtcagcaggaggtccttcaccgtgcgtgcctctctccgcaaggccactgccaccgccgccgtggccgttgccgccagcgtcctgcttgccggcggcggcgccatggcccaggaggtgctgctgggcgcaggcgacggcgggctcgtcttcgagcccagccagttcaccgtcaaggccggcgacaccatcaccttcaagaacaacgccggcttcccgcacaacgtcgtgttcgacgaagacgaggtgccgagcggcgtctacgcctccaagatctcgcaggaggagtacctcaacgcgccaggcg

SEQ ID NO: 1023 - DNA, 173 bp, Zea mays
  unsure at all n locations
  Clone ID: LIB3115-019-P1-K1-E1
actgcttttgccgggagtcagatttgttagctgtagtcgaatgaattttaccatgaaaattacagacttacctgcccatcctccaactgcatggacttatcttgcccctactttgttgtccttgaactcggcttctagatgagtgttagttatcattgtattttggccgcant

SEQ ID NO: 1024 - DNA, 454 bp, Zea mays
  Clone ID: LIB3115-019-P1-K1-E11
caaggccatctcacagaccgacaacgccctaggcaagcagcaagcgcacacgtaaacgtacacctacctcggcgagcaaaagggaaaacgctgatcggagcaacgaagcccgcagccatgccgacggcgacggccacggccacggcagctcctcgccacgcggcgctcttcctgcccctgctgctgctcctgctcggcctccacgccacgtccgccgccgccgcgcgcgcgggcgtcgccgtggacgccgagctcacgtccaccaagccgtccccggtcccgaagaagcccagcgtgaaagccgccggccccggcgccgcgagcccgaccttcccgggcttcggcatccccgggatgggcgggttcggcatcctcgggatgggcgccggcgggtggggcgggggctacggcgggcccgccggccggtacgcccgcggcggcgtggtggcgccca

SEQ ID NO: 1025 - DNA, 416 bp, Zea mays
  Clone ID: LIB3115-019-P1-K1-E12
gttaactgcatggcgtgctttggtatcacaactgttttccaaccagcaaaagcagcaggatgatgtctaccggcgtggaagtccttttgagctttttgagctactcacatcgctggtgcggaggtggtgacatctgaaggctgaagcctatagaaggtaagaagggcattgttccgctctggtatccgcaatcatcaggttcagccatctgtgtctattgtgtaagtacaattttgaaggtgaagaagagcaggctaaaacctagtttggagcatttgccgaacccaaaaaaaatgtttggcaataacacgcccgcgatgttggtttagtatattatattatattcataagatgtactcatattcctgatcttccacttgtaaaattgtatccagcttaacaaatcctaatcgata

SEQ ID NO: 1026 - DNA, 309 bp, Zea mays
  unsure at all n locations
  Clone ID: LIB3115-019-P1-K1-E2
gttgttgctgcacaaacanaagcaattgctgtgaagatcaaggactggagcaacgtagttgttgcctatgaaccagtttgggctattggaactggtaaagttgccaccccagctcaagctcaagaagtgcacgccttccttgaggattggcttaagaccaatgcccagccttgaggtggttgatctactaagatcatctaccgaggctctgtaactgctgcgaactgcaaagagctagcagcacaacctgatgtcgatggttttcttgtcggtggagcttctttgaagcctgagttcattgacattatt

SEQ ID NO: 1027 - DNA, 343 bp, Zea mays
  Clone ID: LIB3115-019-P1-K1-E5
cccacgcgtccgggctgtttgcgaacaagggaatcagcttcatggacttgcagaagcagataatcgagaagtcacctcccaagaggaggctgacagtagacaccattttctgatagatacacttttatttggtgtctgcctgttgttcttgagtagccaacaaccttcggcattatggcggtggcgttgtatataagatagtgctgatgttaggtgatccgctgtgtacctccttgtgaatgcaatgcggtagttccatcaaggtaccatgaggaagactgctgcaacaatgttgttgctgatgtaagctgatattattcaaatttattcatatttcatggtc

SEQ ID NO: 1028 - DNA, 439 bp, Zea mays
  Clone ID: LIB3115-019-P1-K1-E7
cacacgggcgctgcgcacagacacaccaagcgtcggcaccaatggcttactaccaggaggtggactactgctcggaggaggtgaggtcggtggccccggccggcttcggccgccacggcggcggcgtccagcagcacgtcgtcaaggagaagttcgaggaggtcgacacggtctcacgcgccggcgccaaccaccaccaccaccatggtcaccacggcggccacggcttcgtggtgcgcgagaccagggtcgaagaggacatcaacacctgcaccggcgaggtccacgagcgcagggagagcttcctcgccagggctaactgagccgcccggcggccggcatccacgcccgttcgtgcttgcctgcgtgccttatgtatgtctgtggttgactgggtgtgcagggtcatcgtacttggctatcgtacgtgcacgcactc

SEQ ID NO: 1029 - DNA, 270 bp, Zea mays
  Clone ID: LIB3115-019-P1-K1-E8
cacacgggcgctgcgcacagacacttcaatctgttgcaccaatggcttactaccaggaggtggactactgctcggaggaggtgaggtcgttgtcccctgccggcttctgtcgtcacagtttcggctttcagcactacgttttcaatgagaagttcgaggaggtcgacacggtcttacgcgccggtgccaaccaccacctccaccatggtcaccacggctgtcacggttttctggtgcgccgagaccaggttctaataggacattaacacc

SEQ ID NO: 1030 - DNA, 330 bp, Zea mays
  Clone ID: LIB3115-019-P1-K1-F12
cccaatcacaggagttccctgaggagtcagaatcatcaagcgctgatgtgtttgaaggcaatccgactgaggtagcaccagctctcgagtaggactatcaaggaggcacgggagaaaagttgtctctcgattcaagctatagcctatagggcttcgccttcgcaatatagatgcaaaggtttggttgatgatgctaagaaaattggctggtaattattttgtactgaattttcccttagaattaaatatagatggctagtgtctagtggtgatatgatgggattcgtctgtattattcttccaaacagtggggggcaaaagaaagagagc

SEQ ID NO: 1031 - DNA, 247 bp, Zea mays
  Clone ID: LIB3115-019-P1-K1-F2
aacggattggaaagcctgcatcctaggagtctactcttgattttttttttctgggcaagcaaagaataacggatgggtcatgtttgttgtcctgttattctgaaatcgtgagcaggctaatgtgaaaatcttccgccaaaaaagaaaaccaatgaagtgatgttttgagcattttttttgtgggaacaagtcatgaaagtacatggtttatctgtaaaacaaaaaaaaaatccttttataatatatt

SEQ ID NO: 1032 - DNA, 467 bp, Zea mays
  Clone ID: LIB3115-019-P1-K1-F6
cggacgcgtgggaaagcttgaaaaggaggttgctgctcagacactactcaatgaacaggaaaatatgatgaattctattgttgaagaatcgagaaaactgcagaaagaagctgaggagaacctgaagttgaaggaattcctggttgagcggagccaaattgttgatatgctgcaaggcgagatgactgggatctgtgaggatgtttcgttgctcaagcgagtggtggatgagcgcctatcattgagcaagttgcagccctcagctatgtcaagcctctcttcttcactgcattcttctcatcacaagagctggacttcctctgataggaccaccgaagccaatgggtctctagataagcacacccttgctgaacctgcaagcccagcgcgcaaagatctgaatggcgacgagtgcactgtgcaggtgtcagatggcaacgacactggtaaagggcgtttgagcgtgt

SEQ ID NO: 1033 - DNA, 447 bp, Zea mays
  Clone ID: LIB3115-019-P1-K1-F7
gcggacccgggcaactcgctgctcctggtcaactacgccaggttcctcaaggaggtggccggggacgcggcaagggcgcaggagtactgcgagcgcgccatcctcgccagccccggcgacgccgaggcgctgtcgctctacgcgggcctcgtttgggagaccagccgcgacgctggccgcgccgaggactactacagccgcgccgtccaggccgcgcccgacgactgctacgtcctgggctcttacgccgggttcctgtgggacgccgaggaagacgaggaagagaactccgagcccttgccaccgccttcgctgttccagggggcagctcagcgtccttccatcacagcggcctcttagatgatcgtgaactcgatctagatctcaccaccgcctgtgaacgaagctgaatctggaacccttgagagtggagagtgactgggtgat

SEQ ID NO: 1034 - DNA, 448 bp, Zea mays
  Clone ID: LIB3115-019-P1-K1-F8
gaaacacaccaagcgaagcgcactagcaacgacctaacaacaatggctaccaagatattagccctccttgcgcttcttgccctttttgtgagcgcaacaaatgcgttcattattccacaatgctcacttgctcctagtgccattattccacagttcctcccaccagttacttcaatgggcttcgaacacctagctgtgcaagccaacatgcaacaacaagcgcttgcggcgagcgtcttacaacaaccaattgcccaattgcaacaacaatccttgccacatctaacaatacaagccatcacaacgcaacagcaacaacagttcctaccagcactgagccacctagccatggtgaaccctgccgcctacttgcaagagcagctgcttgcatccaacccacttgctctggcgaacgtagttgaaaccagcaacaacaacagctacaaca

SEQ ID NO: 1035 - DNA, 96 bp, Zea mays
  Clone ID: LIB3115-019-P1-K1-G1
cccacgcgtccgcggacccgtgggaaaaaaattaaaattaaaaaaaaaaaaaaaaaaaaaaaggaaaaaaaaaaaagggggcggccgttttaaagg

SEQ ID NO: 1036 - DNA, 459 bp, Zea mays
  Clone ID: LIB3115-019-P1-K1-G11
cgtgacgtggctgtcagcaagtagcagcttctgtcgcgtctccccctccctgaccgagcgatccagcgagagggagcgagtagcagccgcagccggaggagctcgccgaggccgccgaagacgaccatggggttctgggcgacgacgctcatcttcgtcctcgccggcgtcgccgcatccctcttcacgctcctctgctgcaaccgcgggccctccacaaacctgttccatttgaccttggtgactacagctgtaatttgttgctggatgatgtatgcaatcgtctaccttgctcagatgaagccattgatcaaccccattctgagcggagagtgagcgctgcatctgtattgaacagaacgaaagcgagacctgctgtaccattgttcagtccgtgaactttatattcattttggccccacctgatgaaataaataaataaactgccatgattttttg

SEQ ID NO: 1037 - DNA, 100 bp, Zea mays
  Clone ID: LIB3115-019-P1-K1-G12
ataagaatgaccgatcttatataccagcttctgctaaacaagcacaagattccagatggaaacgaatactggccaactaatccagaagtaagaagctact

SEQ ID NO: 1038 - DNA, 417 bp, Zea mays
  unsure at all n locations
  Clone ID: LIB3115-019-P1-K1-G2
gaatcttgcaggcgaccacttggggttcttcatactgaacatcttcacgttcatcggtttcgtcttcaccttcagaccgtttttcgttcgaggcagtgccaagcactgaaacatggatgaagcggacgacgacccatgggtatcctatccaggggcaatcgaatatagattttcttgtggcgtggccaagggcggtgccgagcctgtaccagtacgacgactcangccagaacacacggcgtatggtatggtacacagcaaggccgtgttgttgctgtaagttttgtaatttctgtttccttcttctcggcttcgcagcatgcagttgctgtatatgatggaagaacactctgttactgggcatgttgcgcggtttccacgcgtgtaagtaatgtagaagtcgctatggtaggtatt

SEQ ID NO: 1039 - DNA, 263 bp, Zea mays
  unsure at all n locations
  Clone ID: LIB3115-019-P1-K1-G6
aaaaaaaangaaaaaaaaaaaaaaaaaaatttaactttttaaaaaagaaaaaaaaaaaaggaaaacggggaaaaaaaaaggggggaggggaaaatcgggccccccttaaaaaaaaccaaaagctacgaacgcgggcaggcaacgaaaaacctctataaaagggccaccaaaataaaatcaacgggccgcggtataaaaacgcgggaacgggaaaaacccaggcgggaccaaacaaaaacgcctggcaggaaaaccccctttcg

SEQ ID NO: 1040 - DNA, 439 bp, Zea mays
  Clone ID: LIB3115-019-P1-K1-G8
gaatggtcagctttcatgaagatcctgaacaatataaaagtgttgagatggtggagcatattgacacctctatccatagattgacggcattgtccaagaagttggcttcaattgatcagaacatgtcatgtgatactgcatatttgatgacgggaagggatcgtggaagattcgactacgacgacttcgactctgttccacacaagtatttttgagttgatctgagccttatgtgattctgaagtacgatcgtcaacgtagcagccattccctaaagttataattagtttgatcggccaatggcttttgaaaattgaaatgctgtaaattctggtttaaagaatgggtctgtgaaggcagagacttagtctggaattgctcgtggctttaatctgcatctgcttgctgttctagcatatttctcccccaactctgagac

SEQ ID NO: 1041 - DNA, 180 bp, Zea mays
  Clone ID: LIB3115-019-P1-K1-H10
cgacatagacgaaaataggaaccctatctgtggtggatcatgggacatctcatgtttgtgaaactacttttatgatgggccgtcaaacaccactggcctcttgttgccctacactctggtagtgtaaatctgtgaattccatgtaaatatgaatttcgcttcttaaggcactttttaatc

SEQ ID NO: 1042 - DNA, 180 bp, Zea mays
  Clone ID: LIB3115-019-P1-K1-H11
cgacatagacgaaaataggaaccttatctgttgtggatcatgggacatctcatgggggtgaagctacttttatgatgggccgtcaaacaccactggcctcttgttgccctacactctggtagtgtaaatctgtgaattccatgtaaatatgaatttcgcttcttaaggcactttttaatc

SEQ ID NO: 1043 - DNA, 171 bp, Zea mays
  Clone ID: LIB3115-019-P1-K1-H12
ctgtcatactggttgagtggtactctaccgtacctgcgcgtgggaatcggtcgtctaggtcgttagcgacgcgagcggcggtgacgagcgtgccttctaagagggagagcgggagcactaaggcgaggatgagcgcgttggtgctgggcgggccgcccgtgcgcaccacca

SEQ ID NO: 1044 - DNA, 352 bp, Zea mays
  unsure at all n locations
  Clone ID: LIB3115-019-P1-K1-H2
gatccttgaactcgtcaaggatctgaagaagcttctcaaggagaacagccttccagaggatatatatccaactcttcctccagatgatgcagccaaacccttgagccagataagcatcaatgaaattgtggcgggcttgagcgatttatcaatacagcaagcccatgagtgactattatttctcaaatagctgtggcacaccttggtcgtccaggcgatattttgttttgtgcaaatcacttgggtggtttaaacagcaggtttaggctaactgttgngctgtctggtttttctgtatactcgccgctttgatttctgcttaacttgaaatcagcttaaaatgaagatgctt

SEQ ID NO: 1045 - DNA, 254 bp, Zea mays
  Clone ID: LIB3115-019-P1-K1-H3
gtctggggctctgaccgccggcaaaccggcaacaaagttggagatgacaaaaatgcttgatcaaaaaatcattttcgcaggcaatatataaaaagatattacctcatagggaaaagaaagtaatataaataactccgttcttttttatttattgtgttttagtataaaaattaaccattagatgataaatatttgagaacagatgtagtattatatttagtattatattgtgaaagtattaactatttaggttt

SEQ ID NO: 1046 - DNA, 456 bp, Zea mays
  Clone ID: LIB3115-019-P1-K1-H4
cttaagtgcccacctgccgtggttgctgcccgcgcagtactatcccgcacagcctttgctaaggggcttcgccctcagcccctgccaacaaaaatactggtgattgcattgcttggtatggcagcaaatgttcctctgggcatctggagggagcacacacagaagttttcattgcagtggtttgccgcagtacatgctgcagtgccgttcatagggatgctcaggaaatctgtgctgatgcctaagacagccatggcccttactatagccgcctcgatattgggtcagacaatcgggtcaagagctgaacgtatcatactgaagagggccgcggcagcaaaattagcaagagagagccatggtgacgctgctgactacatcaaagcaccaatgagtctgaaaacagggaaccacactgttcagttttgggatccgctttccctcagagctgaaagc

SEQ ID NO: 1047 - DNA, 254 bp, Zea mays
  Clone ID: LIB3115-019-P1-K1-H5
ctcacgcgtccgcgttccttttcaacggactttgcatttttatcatacacagacttttcttatgtggttcctagttttcgtcaggcgacggcaatactttgttgggcaaagctcgttgccacattctaggcattcttttcttagtggaggcactgctcatctgagttctgatatttttcaattgacaggccacatgcgcaaaggcctaataggagatagaaatatgttactactgtgctatctatcgcactcca

SEQ ID NO: 1048 - DNA, 377 bp, Zea mays
  unsure at all n locations
  Clone ID: LIB3115-019-P1-K1-H8
gaagagccgagccgaaccaaagtcgcctcgtcgtctccaacctcccctcgcctcttgactaggccagggttccatcccacccccgccgccatccgatccgatggagggcggcgactcgtccggcgccggcgccggctccggtggcgccgtggcggcggcggccaagtggcggagcgacgcgtcgcggtcgttccagtactacctggaccgctccacgcctcacgccacggggcggtggctcggcacgctcgccgccgcggcaatctacgcgctgcgggtctacatggcgcaaggcttctacatcgtcacctacgggcttgggatctacctnctcaacctcctcatcggtttcctctcccccatggtcgaccccgagc

SEQ ID NO: 1049 - DNA, 386 bp, Zea mays
  unsure at all n locations
  Clone ID: LIB3115-020-P1-K1-A10
gtccgttctagaatctagacacggctttttttcccaggcctctcggttgcggttgcggttgcgtcccggcggcggtagggtgcttctnggggcatggaggccgactccgaggccgcgcgggggagggagggcagcaggggtgtcgcccaagtgctcgcactcggcggcggtggtgggagcggtacagtcggaggaccgccgccgcgaggtgctgtaccgcccggtggagctgcctgggacggtgtacgggtctgagctggtggcgcggatcgagaaggtcatatacgtctgccgcttcatgaccttcttcggcatttgtggcttgctcctaagctctgtctcatgcttccttaagggatgcattttcttgatggatgccttagttc

SEQ ID NO: 1050 - DNA, 441 bp, Zea mays
  unsure at all n locations
  Clone ID: LIB3115-020-P1-K1-A11
cccacgcgtccggggctggcttctccttcttctcttaccaagtcctcctcgggttagggttccttagggttttgtggaggggcnattttacaggctgatgtggagtaccgttgcttcgtcggcgggcttgcctgggccaccagcaacgagtcgctggagaatgccttcgcctcctacggcgagatcctcgactccaaggtttgcttcgtcctcgctaggtttcattccgcggtctgtttgtgccgttggggctagatccgggtcgtggttcaacagatctgcttcgttttggtacagatctgcgttcgctcgaatcgagcatgacgttttcatgtgattatgcaggtcatcaccgaccgggagacagggaggtctcgcggttttggcttaggtaccttctcctccgagaacttcatgctcgacgctatttagaacattaac

SEQ ID NO: 1051 - DNA, 224 bp, Zea mays
  Clone ID: LIB3115-020-P1-K1-A2
ggagaagatcaacgcgctgcccaccatggagatcaagagcggacgcctcgccatgctctccgtgatgggcgcctgggtccaggccgagtacaccggcacctgaccgatggacaacctattcgaccacctcgacgaccctggccacgccaccatattccaggactttacccgcaaatgaggagtcgaacttattattagcattgtggggagtgctaccacacatg

SEQ ID NO: 1052 - DNA, 285 bp, Zea mays
  unsure at all n locations
  Clone ID: LIB3115-020-P1-K1-A3
cggacgcgtgggcggacccgtgggttcagcttgttttcccactctgtcgcacatcgtcgcccgtcgccgctgagatcctatgaagaaatggannttttcgcaagctcttcacggccgtcctcctcgtcatgctgctgctgctgtccgcagaggtcgggccggtggcggtggcggaggcgcggacgtgccagtcgcagagccacaggttccggggcccctgccttcgccggtccaactgcgccaacgtctgcaggaccgaggggttccccggcggcaggtgccgcg

SEQ ID NO: 1053 - DNA, 165 bp, Zea mays
  unsure at all n locations
  Clone ID: LIB3115-020-P1-K1-A7
caagctgaaaaaggaggagtgcatggagacgtgggagaagcacgccaagaggaaggccgtnnaacgggcaccgtgtggaaggagctggagaaggagaacagtgagttcttcgagacgtacaagagggaacggggagggggaggaggaggaggaggccccaggaac

SEQ ID NO: 1054 - DNA, 275 bp, Zea mays
  unsure at all n locations
  Clone ID: LIB3115-020-P1-K1-A8
cacgcgnccggaaagagccgacattcngctagagaaaccggganagccgnaccaggacagganccgacagcggcgggagcaggaagnnncccgaatgctgcttaccaggtctcgggcgagtactcgatgatcaaagccggcggggccctgggcatggtggacgagcagaaggtgatgatggagtcgctcatgtgcctgcggcgagccggcgccgatgtcatcctgacctacttcgcccgtcacgccgccgcggtgctgtgcggcatggggcccaa

SEQ ID NO: 1055 - DNA, 122 bp, Zea mays
  unsure at all n locations
  Clone ID: LIB3115-020-P1-K1-B1
acccacacgtccgnagtcttagaatatgcctttttaatattttaagctctattcacagacatatggaaacatgatgctatacaggaaaacttnnnnaatatgtaatggccctcttgtttgtt

SEQ ID NO: 1056 - DNA, 392 bp, Zea mays
  unsure at all n locations
  Clone ID: LIB3115-020-P1-K1-B2
ccttctcagaagttgcggccgaacgggttcttgattatatggtcaggttgattgattatcctcagaccgttgtgaataacaggaacaaggcccnnccctgattgaagcatggggagagtccggtgatgaactccgctatctgccagtctatgaggaaacgtacaagagcttgaaatcaagagtgcggtttcctggacgtgacaatgagagcttggctcccatatttactcccccacgatcagttgctgaagctgatgttgaaaccagcttgccccagcaggcgttcgaagacgttcatgttcatacatatactggtgaagaaacaaaagaagcgtttgatgtaacttcgaacaacataaaacctctttcgactggtcttttctctttccctg

SEQ ID NO: 1057 - DNA, 443 bp, Zea mays
  unsure at all n locations
  Clone ID: LIB3115-020-P1-K1-B4
tgttgttcaggctccacacttgacagggcacaggttagggcgccaggagacggggagaatcggtcgccctgaaaaaagagcagagtgtnannctttccccccggttcctagttttggtactactacaggctcccgctgcatcatccccaacgaaccagcagagctcgcaagcaacaaaagagaaggacgaagcaggcgcagccgccacacggacacgcagcagagcatcgccgcagcggtccagaggcatgggggccgccgccgccgcaaagcacgccttgcaggttgtcgcggcgggaggagatgctgggcaatcgagcttcagcgccaactcaccccccaccaccggcgccgggttcgtcgccctcgacgtcggtgaagctttgtctctggccggcgacgccggcccttcgggcacgcccattgtgccggcccggacaccc

SEQ ID NO: 1058 - DNA, 421 bp, Zea mays
  Clone ID: LIB3115-020-P1-K1-B5
ccacccttccgatcgaccaggctaaccccttcgctaaccatgttgttcctagcctacgccatggactcccttggactgcccatgaacaggccattatgcatttaagctacaccttagccaccgctggcgctccagggctcctcttctgcggaatctacacgctggccgacatctacgggtatcggcggccgaccggcgccatggaatggatggggatgcacgcgctgatgatatacgtactgatcgcttgcgacatcttggccatattcatgcaccgcttctattggaaggagccccaaaacaaccttctgtagttcatcggaattggaccatgaggtgatgaactgatgacggacggtacattgtatgcggatattaggagtctactccgacagagatagagaaacacgtgcattcaagc

SEQ ID NO: 1059 - DNA, 443 bp, Zea mays
  unsure at all n locations
  Clone ID: LIB3115-020-P1-K1-B6
atttttataatataggcactgtggtggacttttttatttgccatccaaccgagtttgatttctacctgtgcagccatgctggcattcatnacaagccgtcctgcccattatcatgttctgtgggatgagaacaaatttacggctgatgggttgcaaactctcaccaacaacttgtgttacacgtatgccaggtgcacacgctcagtatcaatcgttcctcctgcatactatgctcatctggcagccttccgagctcggttttacatggagccagatacaagtgacagcggatctgtggcgagcggtgctacgacaagccgtggcccttcaccaggggcgcgcaacaccagggctggtgctgcgaatgttgctgtgaggccattacctgctctcaaggaaaacgtgaagcgcgtcatgttctactgctaagattgacgctgcgc

SEQ ID NO: 1060 - DNA, 197 bp, Zea mays
  Clone ID: LIB3115-020-P1-K1-B7
agccgacctgcccaatatcatgttctgtgggatgagaacaaatctacggctgatgggatgcaaacactcaccaacaacatggggtacacgtatgccaggtgcacacgctcaggatcaaacggtcctcctgcatactatgctcatcgggcagcctgccgagcacgggtttacatggagccagagacaagtgacagcgg

SEQ ID NO: 1061 - DNA, 359 bp, Zea mays
  unsure at all n locations
  Clone ID: LIB3115-020-P1-K1-B8
ccctgcagaccgtccgaattcccggtcacccaccgtcgacaccataactcactacctacacatcttacaagcatagccaataccaccgattagacagggacaagcccgacctcgagagannnnnnnacgagtggtcattctccagacccgcatgccgggggcgctgaaggaccgtgtgtacatgtactacggagataacgctgcagtcattgacaatgccaagggtgccatgaaaggctgtggaatcactcgacctatcgtcacggactgtgccgacattggggctacgatcgctagcgcaaaagatgtcatcgtctcagaccttgttggaatggacatagacttgcttatgaccatct

SEQ ID NO: 1062 - DNA, 435 bp, Zea mays
  unsure at all n locations
  Clone ID: LIB3115-020-P1-K1-B9
aggagcattcgagaagccgaagaaaattcgttgacgaggagcagctacactgcggacggacttcgggcatggagggccagttccannttnaaggaggaggtcatccaagcatggtacatggatgacagtgaagaggaccagaggcttcctcatcatcgcgagcccaaagaattcattcctctcgacaaactttccgaactaggaatattaagctggcgcctaaatgctgatgattgggagaatgatgagaacctcaagaaaattcgtgaagccaggggttactcttacatggacatttgtgatgtgtgcccagagaagttgccaaattacgaggctaagataaagaatttctttgaagaacacttgcatactgatgaagagatacgctattgccttgagggcagcggctactttgatgtgagggaccaagatgat

SEQ ID NO: 1063 - DNA, 437 bp, Zea mays
  Clone ID: LIB3115-020-P1-K1-C11
gagagctttccgattgcgatcccatcaacggccgccggccgccgctggttttctttcttctcgcccaagccgcgccgccggcgcggtccttgtaaaggcctcgccgcacgggagcggcctgcgctccctctctctggattagacaaagcatcctcctgtttggatcggcatggagaagacgacgacgacggcgcagccggtttgcgcgcaggagtcgctggcgctgctcaactgcgtcgcctcggccccctacgaccgggataggtgcctcgccctcgtcgacgccctccgtgaatgcatcgtgcgcaagagggtgaagaagttttcgctggcagaaccaaactccaccacaaccaccgaagctctgaagagcgatacgaagccctgagcattctgcaaagaaaattctcttatgtttcggaaactgtatcatctga

SEQ ID NO: 1064 - DNA, 443 bp, Zea mays
  unsure at all n locations
  Clone ID: LIB3115-020-P1-K1-C2
gctcgatcgcggtgtgcgtaaacttcagcactttcctggtgatcggcacgacgtcgcccgtgacgtaccaagtgctgggccacctcaanacnnnntggtgctctccttcggctacatcatcctcaaagaccccttcagcgcgcgcaacgtggtgggcatcctcatcgccatcttcggcatgggcctctactcctactactccgtcgtcgagagcaggaagaagaccgaggacgctagctcgctgccggtcgccgcgcagatgagcgagaaggactcggcgccactcctcggcgccaagagctcgccgcggacagagaacaaggccgaggaaaccttcgactacatgccgaggacggccaagagcgcgttcaccggccggtgagcgcgtagcttgtaaggagtacgtatctttctagagttgtgggtagacgacgagcaacaag

SEQ ID NO: 1065 - DNA, 422 bp, Zea mays
  unsure at all n locations
  Clone ID: LIB3115-020-P1-K1-C3
aaagcaagcagatctaagctccaggcatcgtctcgacagagtgagctagtgagtagcacgacaacaacaatggcttccctgaaggccgtnttnncagcggagttgcggcgcagggcaaggagccggcgcccaagctcagcgagacggcgacgaagccgtcagccgcgaagagcggcggcgttaagaaggctgagcagaagccccgggaaaccaaaaggaaggtgaagagcagcaaacaggcggcggcggccaaaaagtgacgtacagtacgtgtggagtgtaatggagcttccatgcatgagtgaatccatgccatgttatgaatctagtccttcctttcttgtatcttccatgtgacgcggcgtgtgcgtcccctcatgtgtgatgatgccagatgaatactacaaataagacgttgttgt

SEQ ID NO: 1066 - DNA, 439 bp, Zea mays
  Clone ID: LIB3115-020-P1-K1-C6
ccatcttcggcgggcgtggccatgccgggacatggggaaaggcacttggtgcagaggtctatgactgcaacaacatggtggagcaggagctgctggaggcgggctcctcgtgtaccagagcttctgtgctgctgaagacgctgttgctacctcgcccaaatctgttttccactgctttgacggcgagaacgtggagagtgctcctcctcctatgaagaaggactacaagctggctaatcttctctgctgggaggaggaagcggatgccatggaggagaaggcgggagtgcttgatgagtaagacgggcttctggggtcgatttgcttctgagttgtttattttatatcgtcgcaatttcgcggttgtcggttggttattctgtgaagcagccaaaccaggctattgttatgaaaatttgtcgtctgtaagcatgtgaac

SEQ ID NO: 1067 - DNA, 345 bp, Zea mays
  unsure at all n locations
  Clone ID: LIB3115-020-P1-K1-C7
gacccacacggccgccaacggcggcgggcgaggccaagccgggacaaggggaaaggcacgaggaacagagggggaggacagcaacaacaggggggagcaaaannnacaggaggcgggcgccncgngaaccagagcaaaagagcggcngaagacgcagangcaaccgcgcccaaaacagannnccaccgcgnggacggcgagaacgcggagagcgcaccnccaccaaagaagaaggacnacaagcgggcnaaacaacnccggcgggaggaggaagcggaagccaaggaggagaaggcgggagagcaagaagaggaagacgggacgacgaggacgaaaagaaacaga

SEQ ID NO: 1068 - DNA, 380 bp, Zea mays
  unsure at all n locations
  Clone ID: LIB3115-020-P1-K1-C8
cccacgcgtccgcccacgcgtccgccaagtccgcccatctccacccgaagcccttgtgcaagcctatctgatccacatcgcggacanntncttaccaacttccgcaaaatcatggaattgaagggtcttcgcaaggcggaacaaacgcagctcctggacctcttttctgcattcaaagcctcgcccaaccacgccgggctcgtcgacaactcgcccttcctcaccccgatttctcttcaagcgccaccttcatcaacgggcggcttgggaggtaatgtaagcagcgtgatgggcaacatgggtacgcctgggctagcagccggacgcttcgacgcagctggcttgggcaatatgttggtcaatgcttcgagggattgggt

SEQ ID NO: 1069 - DNA, 182 bp, Zea mays
  unsure at all n locations
  Clone ID: LIB3115-020-P1-K1-C9
ccggctaaggatatccaatgcatgcgcttcttgcgattcgtcatgtaaaatcagggtgtctgtctataatctagcctccatggatgctnaacttcgtcatgtaacaataatcagtgctactcttcattacataattttgatgctatatatatataccccatccctccctaataattcgttct

SEQ ID NO: 1070 - DNA, 433 bp, Zea mays
  Clone ID: LIB3115-020-P1-K1-D12
ggtatccatgccaggtgttataccggtggcttctgggggtattcatgtttggcatatgccagctctgaccgaaatctttggagatgatccgtattacaatttggtggaggaactttaggacatccttggggaaatgcacctggtgcagcagctaatcgtgtggctttagaagcctgtgtacaagctcgtaacgaagggcgcgatcttgctcgtgaaggtaatgaaattatcaaagcagcttgcaaatggagtgctgaactagccgcagcttgtgaaatatggaaggagatcaaatttgatggtttcaaagcgatggataccatataaaataaaaaaaaaagcaaaatagaaagagaaaaaataagttaagaaatgcagtaattcttctttattcctctaattgattgcaattcaattcggctcaatcttttct

SEQ ID NO: 1071 - DNA, 242 bp, Zea mays
  unsure at all n locations
  Clone ID: LIB3115-020-P1-K1-D3
tcacgctccagggcgtcgtcggccccgactgtctccttcaccgacgtctgcatcggctggcccggctccatgcccgacgaccaggtcctggnnnncccatgctccaccagcgcgccgcggcggggatgatgcacgactcgtggctggtggctggcgccagctacccgctcatggactgggtgctggtgcctgacacgcaccctaacctgacgaggacgcagtacgcgttcaacgagaaggtg

SEQ ID NO: 1072 - DNA, 305 bp, Zea mays
  Clone ID: LIB3115-020-P1-K1-D5
cccacgcgtgcgcacacgcgtgggtggctcttatgctccatacctcgctctacgggcatatgatccccaaccctgcttacgcgggggtccctacggcaagctacgactactgtgctagggagaggccatgaatcttctgatcgagcaggcaggaggccagtccttcacaggcaaagaacgggctcttgatctggtcccaaccaagatccacgacaggtccccgatattcctcggaagctacgactacgtggaggagatcaaagcgttttccgccgagcaggctaaggcaacctcggtttcatcct

SEQ ID NO: 1073 - DNA, 332 bp, Zea mays
  unsure at all n locations
  Clone ID: LIB3115-020-P1-K1-D7
gtcgccctcaaattcgttccgtccagtcatgttagaaatcgagcagccaaggagaggagaagatggctcgtacgaagcagacctnccnaatccaccggaggcaaggccccgcgcaagcagctcgccaccaaggcggcgaggaagtctgcgccgacgaccggcggcgtgaagaagccccacaggtacaggcccgggacggtggctctgcgcgagatccgcaagtaccagaagagcacggagctgctgatccggaagttgcccttccagcgcctggtccgtgagatcgctcaggacttcaagacggatctgcggtttcagagccacgccgttct

SEQ ID NO: 1074 - DNA, 437 bp, Zea mays
  Clone ID: LIB3115-020-P1-K1-E10
cggacgcgtgggcggacgcgtgggttatgttctgagaagggagtgaacccctggattgaggttgatggtggtgttggtccgaaaaatcctacaaggttattgaagctggcgcaaatgccattgtcgcaggttctgcagtttttggggctccagactacgctgaagctatcaaaggaataaagaccagccaaagacctttagctgtagccgcataaggagctggacgtgtaatcatttactctgtgcaagtttaccagtgatgcgatctgtatagatgtgtgtcttgtccagccatacgtataccggagatgaaaggagacggaggcagtgaaaaaatatccttttttttcttctcgtttttcacgaggatgccgtgcactgctcccagaatgctgtgttcaatttacaaacccacaagttgcacatgaactagcata

SEQ ID NO: 1075 - DNA, 442 bp, Zea mays
  Clone ID: LIB3115-020-P1-K1-E11
ctccgagctctttggacccaatagtgttggggtgaatcacaacattcttattaccaatatgccgcttggctcactcctctatgggcagttgctgccatggtatacgatgcaaatggccaaaagatgacagtagtggataaccgcactggcattgttgacaccatgactgtgtgcatgggggtgaagtgctactcaaccactttcttcgtgtgggcttgcatcacatttctggggttagcatcaagcatagttctattcatacgaacaaagtcagcttatgacactgctgctagtcggtcaagttgtaagcaccttcaccaagtttccagttagtagttaacagagaaatttactgttgaaatcacggttagcttgtacaaaattttggttagttctagctgaaatgggtcacatacaatacgtgaaatgaagagcttgtaca

SEQ ID NO: 1076 - DNA, 396 bp, Zea mays
  unsure at all n locations
  Clone ID: LIB3115-020-P1-K1-E2
agagatatacatggacctcttcaggcttcatggctgatccgcagcagatggaggcgaagagcaggctgccggaggtgaccatcgtnctnnntacggccgttggctggcgacggcacagtcgacgcggcaaaggcggcggcaggcaaggagcccgtaagcccgggcacttcgttctcggtggccgccggccgcagcagctgtgaggagaggcgcgcggtggacggcgtctccctgcctgggtggaagctcgacgccctttgccaggagttcttgccgtcgccggccatgagggcgcgctttccctactacttctgaagctttccgttgcagtcctgcgtgatcgagtttttgagcggcgacatctggtgcatgctcttgacgactgatggcgttttt

SEQ ID NO: 1077 - DNA, 411 bp, Zea mays
  Clone ID: LIB3115-020-P1-K1-E4
cttgctgctctcgctgtctcagattccctgctacgccgcctcctccgcggctccgccaccagtctcccctgcaaccgggaatccgggataagggaagagaaaccgcgcggcaaaaggaaaggagtacaggagcgagaaaagaatctctgaccggagtcctgccaggctgatagaatcctggcagccatggatatactgctaggttctgggagattcttggcgcgacggactcccctcatgctcgtccctcgctgctctcgaggcttccgggacagaagcgacagcgacaaaagtgaaacctctgctgactgggacaaggcatgggctaagttcaagaagaaagggaagaggaccctcttttctgatttctcaccagacaagtatgtgacctggaacccacggcgcaacgag

SEQ ID NO: 1078 - DNA, 400 bp, Zea mays
  Clone ID: LIB3115-020-P1-K1-E5
ctccctgttcgactatgagttgtgtgtgtcatttgtatctcagaagtggtggtttggtcctgttgcgcgtatttaatcttgctgtcctgtctttaaccgggagaactcttggtaattgttacaagcgacctgttccagtttatgtgagaattcgatatgctgcctggaatcatatattctgcttgccattgatatactgataggttctgggagattattggcgcgacggacttccctcatgctcgtccctcgctgctctcgaggctcccgggacagaagctacagcgacaaaggtgaaacctcttctggctgggacatggcatgggctaaaattaagaagaaagggaagaggaccctattttttgattatttaccacacaagtatgtgacctggaaccca

SEQ ID NO: 1079 - DNA, 448 bp, Zea mays
  Clone ID: LIB3115-020-P1-K1-E6
ctcactaccactgctccctcccctccagctctcctcaaagcatcagctcctttgcttatctcctttcgccccgtctcccgccactgcaagaactgtgcatcaagaccaaggccacagaaaatgatcagtctgctaaaaagcatcagaaggtgaagagcattctttgccaggactgcgaaggaaatggggcaatcgtatgcaccaaatgtgaaggaaatggggtaaattctgttgactattttgaaggccgatttaaagctggatctttatgctggttgtgcagaggcaagcgtgaaatcctatgtgggaactgtaatggtgctggcttcttgggtggatttctaagcactttcgatgaaactgcgcaatagtcatcggtttagcactttcgatgaaactgcgcaatagtcatcggtttaatttatgtttaagttacattgagggaccc

SEQ ID NO: 1080 - DNA, 358 bp, Zea mays
  unsure at all n locations
  Clone ID: LIB3115-020-P1-K1-E9
cggacgcgtgggaaagaagaaggctgaatattcacagaagatgaacaacaaggttgcaatgatacacatcgaagccgtagagagnnnngaacggtggaggcaaaacgcgagagaggaggtactgaacgccaaagagatggctgccaaataccggtccaccgggcacgcttctaagaagctcatcgggtgcttccgagcctaacaaaccttccaagtcagaccgagcagaaagtgaaaaacgatagccagtgattgctatgggctgtcattctatcaagtgtgtagtgtgtctacggaagtcttgaaagcctactggtgcctgtgaatatactgatatcgctttcaaggcaggcgtttg

SEQ ID NO: 1081 - DNA, 410 bp, Zea mays
  Clone ID: LIB3115-020-P1-K1-F12
cggcaagggcccgctcgagaacctcgctgaccacatcgctgacccagtcaacaacagcgcgtgggcctacgccaccaacttggtccccggaactaagctcaacggctatgctatgcaacttcattgtctttcggatcggagagggtgtacgtacgtggattgattgatgctgcgagatgcatgtgtgtcttttgtttcacgttgcattgcataggcaagtcgagatgatgagttggcgttgtacactaagatgaaccatgtttgtgcaatagtggtggtttttgtttcctgctggttaattgttgatatccattaatttgtttttcttcttaaaaaaaaaaaaaaaactatttttaaataacaaatataatttaaatattaaatattatataactttctattcttttttt

SEQ ID NO: 1082 - DNA, 449 bp, Zea mays
  Clone ID: LIB3115-020-P1-K1-F5
cttcgccgcaccagcgccagcccgcgccgtgtgtcagaaggaggtccttcaccgtgcgcgcctctctccgcaaggccaccggcaccgccgccgtgcaatggctgccagcgccctgcttgccggcggtgccatggcccaggaggtgctgctgggcgcaggcgacggcgggctcgtcttcgagcccagccagttcaccgtcaaggccggcgacaccatcacattcaagaacaacgccggcttcccgcacaacgtcgtcttcgacgaagacgaggtgccgagcggcgtctacgccaccaagatctcgcaggaggagtacctcaacgcgccaggcgagacctacttcgtcaccctcaccgggcccggaacctacggcttttactgggagccgaataaggagccggaatgggcggcaagatcaccggcaactaattaagcttgctatcgatcga

SEQ ID NO: 1083 - DNA, 292 bp, Zea mays
  unsure at all n locations
  Clone ID: LIB3115-020-P1-K1-F9
gttcgcctgcctcgtcgtgctgctggtgtacatcatcatccaggtctgcttcccgctgggaagggtagccatgaccatctancacnntncggccaccgtggtgttctcgggcttcatcgtctatgacaccaacaagctgctgaagcgccacgcctacaaccagtacgtggtggcagccatcttcctctacctggacgttatcaacctcttcatggcccagatggccatctccttccagtgatggattgcgggtctcacctgtacggctgtaccctatgcatgacggctcctt

SEQ ID NO: 1084 - DNA, 297 bp, Zea mays
  unsure at all n locations
  Clone ID: LIB3115-020-P1-K1-G2
cggacgcgtggggtgccattgaggtctgcgcctttctgaggcccaccgtcgacatctctgtgcctgccaactccgactttggcgcccnnncccggcagtcttcctagattgaggcagtgagcggagagggagagggagagagaaagagaggatttcgtgtcccgagttagaacagagtgctgtatgttttgtgcgactgtttgtaagtcaagtctgaactgtgaacctatgtttgcttttatcagaggacccggagaaagcctgggcatctgttttcggaataaaaattataaattt

SEQ ID NO: 1085 - DNA, 423 bp, Zea mays
  Clone ID: LIB3115-020-P1-K1-G3
tttgacgcgttggctgacgcgtgggaaaattttttttttttatttattttattttttttattgggtttgttttttatttttattggtgggtgtttctatatttttattttatatatatatattaaatttattatattataattttggggggtctttttttggggtttcaagttttttttccttttctttcgatttttttttttttttttggggtcctttaatttaaattatttggccttgtttttaaaactttgtgcttggaaaaattcttgctttaccaattttatttgctttgaaaaattttcttttttttccagtttgtttattatctttaaggtctgatcttatttctttttcataatttttcctattttttttggttatttggtctttccttttattggtcttttatcctgggggttt

SEQ ID NO: 1086 - DNA, 450 bp, Zea mays
  Clone ID: LIB3115-020-P1-K1-G5
tagccttcaaaaaattctggaacgaaaaagtcgaagttagttctctatttagcggattacctttattcttgtattctattaagttatttatcctaaggattttttgctattataaggtataaattctatggacattcgtagtagttttaattcatcgctacgggctaaaatattaattcgagttctagtagtacaggttcacatggccaaccgagctggaaaagctggtgggtatattgcaccacatacgagtagtccttcgcataatgataacacacagcataataatccaagcagtagtttggatcctcctgcttcaccgagattgcaccctgagttttcacactctgattggttactattagcttataaaataagagaaataagaccatatttttatataacaaacctgagtaatattttttctcaaccagaagaattatgctgcgt

SEQ ID NO: 1087 - DNA, 301 bp, Zea mays
  unsure at all n locations
  Clone ID: LIB3115-020-P1-K1-G7
ggggcccttcgcgctcacgggcccgctccgcagcacgcccgtgcacggccaggccggcgcgctcggcgccgccggcctcgtgggnatnncagcgtctgcctcaccatgtacggcgtcgcctccttcaacgagggggacccgtccacggcgcccacgctcacgctcaccggcaggaagaaggaggccgacaagctgcagacctccgacggctgggccaagttcaccgggggattcttcttcggcggcatcttcggcgtgctctgggcctactttcttctctacgtgctcggcctcccctact

SEQ ID NO: 1088 - DNA, 348 bp, Zea mays
  unsure at all n locations
  Clone ID: LIB3115-020-P1-K1-G8
cttgattctgctatcaactggtggaagaatttcatgaccgaggataacaaattagatatattaacacgggaggctgctgcatttaanctagccatggacgtgatgaagaggcttgtttgttgtatgaggaacttgtgaagagccatggaagcatagaagctttggctgggctagtaatgacttcagcgcgcactaacttggagaaggcagaacaatacgagaagaaactgaagccattgccaggcctcaaaggagttaatgttgagagcttggagaagacatctggtgcaaggcatgtggaagggccccaagacatgaaggtagatgttcccgaggaagtgaagaagc

SEQ ID NO: 1089 - DNA, 167 bp, Zea mays
  Clone ID: LIB3115-020-P1-K1-G9
ttttggcatggacgtgatgaagaggcttgtttgttgtatgaggaacttgtgaagagccatggaagcatagaagctttttttgtttttgtaatgactttaactctcacttactttgttaaggcagtacatttctagaagaaactttagccattgtctagtcttaaaag

SEQ ID NO: 1090 - DNA, 419 bp, Zea mays
  Clone ID: LIB3115-020-P1-K1-H11
cccacgcgtccgcatgaatgacgagaccactctcaagtaccttcagtcaatcaagaggctgatgacgctttgccagcggggggaccctgcatgccctcaaaatcagtggagttcaacagcctggcaaatgggagtgacctacaggcgcttctatcggaagagaatggttcgggtaaagcttctgaggaaaggctccggttgatgccagcatcgaaagagtgatgccttcgcagactagattggattacaagtagagcttgagatgcttgtgtaatatatacaatcaattctgcctgtttttttttcttttctgtttgtgctgaagagaaaagcaacgaattgtgtttgcttattaaatcgctttaccgctacatgtggtcgggcaaaagttatactatacttaaaggaccagtttcaac

SEQ ID NO: 1091 - DNA, 350 bp, Zea mays
  Clone ID: LIB3115-020-P1-K1-H12
accagctgccattgccatctactgacctgtgacctccgcatttccaaacagcccgagcgagctagagctagcagagcggcaggcacctccccctcaaggaacatggcccgcacgcagcagttggcagtagtggcgaccgccgtggtggccttggtgctgctggcggcggcgacctcggaggcggccatcagctgcgggcaggtggcgtcggccatcgcgccctgcatcttctacgcgcgcggccagggctcggggcccttcgccggctgctgcagcggcgtcaggagcctcaacaacgccgtccgcaccaccgccgaccgtcgtgccgtctgcaactgccttaagaacgc

SEQ ID NO: 1092 - DNA, 143 bp, Zea mays
  unsure at all n locations
  Clone ID: LIB3115-020-P1-K1-H4
cgctgcgcacagacacaccaagcgtcggcaccaaagtcgtactaccaggaggtggactactgctcggaggaggtgaggtcgggggccccnncctcaccggccgtcacggcggctgctttttttatcacggcttcaaggagaag

SEQ ID NO: 1093 - DNA, 436 bp, Zea mays
  Clone ID: LIB3115-020-P1-K1-H6
ccgaatggcatggccgacccagacccacccgtaatgtagctccaactcttaacgtgacgagttttactaggctgcaatggccaaagagagcgactcttctgaggatgaggtggccccaaggaatacctgggagacgtgcctctagagtaatacaagaacgaatagcacattgtgtatgatatcgatggaagatcaagaaacatgataaggaggggcgcattgaggcctacctcaggaacgcacgtgatgccaagaattgacatctcagatgcaaatgtggggagacggtgccttatcaatgacgagtaggttgattctttgctagctagcggcaccattgctcaccacaactggtttgtttgagcaacttaaatgttactctttaagaggattctcatttttaaccacactcttgaagtatcacactagcttttag

SEQ ID NO: 1094 - DNA, 241 bp, Zea mays
  unsure at all n locations
  Clone ID: LIB3115-020-P1-K1-H7
cccacgcgtccgtgtagaagcaggctttatttaagaaaaggatgaaggcaataggaagggttgatgtccctcaagaagcattcatttccnattgagactggaaaaggaggtgctatgaaagtgctcatgaacctttgtgtctccgtaaattaaagacctcttcctgtgcgccactcacaagtatagtcagacgagagctttgagacaacaagcattcactatggttcaacctgtccgctct

SEQ ID NO: 1095 - DNA, 439 bp, Zea mays
  unsure at all n locations
  Clone ID: LIB3115-020-P1-K1-H8
ccctccactactacgccagccactctgtctttcctcccccaccaccacaagaaccgcttcaccattgccgcgtccagctgagcctnctntagccgcgtccagccaggagaaggcgggcgcgcacacctgctgcttggtgaccacgttcgatggagctgcacaagtactggggcgtggggggccggcggtgcggcagctgcgagggggccccggcggcggtgcactgccgcacgtgcgttggtggatccttcctctgcacgacgtgcgacgcccggcccgcgcacgcgcgcctgggccacgagcgcgtgtggatgtgcgaggtctgcgagctggcccccgccgccgtcacgtgcaaggccgacgccgtcgtgctctgcgccgcctgcgacttcgacatccacgacgtcaacccgctggcccggcgccacgcgcgggttcc

SEQ ID NO: 1096 - DNA, 408 bp, Zea mays
  Clone ID: LIB3115-021-P1-K1-A10
gggatgacagagatcgctatggcgattatcacaggcacagggatcgcgattcggagcgtaatgaagactgggacaggggtggagcatctgggatacgcggcaggtcaagggaggctgaccactctaagcgcaggcggatgacacctcagtagtcgtagctgggtgagctactaatgtagaggcaaacgatgatccagagccgagtcttgcttgcacactggcatggttaacagctagcatcttcttgctgcctctggctgtggtggttctaatatcttgtgtctccggcaatgtgttgtagcaagaacgagagatgaatgtctggttgggacctgttgagctgtgcgaagatggacttccctggatgatagttgctgcctcttattgtacgccaagttaaatgtctga

SEQ ID NO: 1097 - DNA, 371 bp, Zea mays
  Clone ID: LIB3115-021-P1-K1-A11
cagcaaccaacaagtcgtccaacgtccaggcttttctgttttgtttctctctcacgcaagtcgcaaagcaaagcgtcccccaccatggcttccacgacgacgacggcatccaacaacctggcgggcgtgtggctcggcgagctctcgtcggcgctgcatgggacgtggcaggcggtggccgtggccgccacccacgggctcggcgaggacgacgacccgcggctgccgtgccagcagcagcagaggccgtggcgaggcgacgacaggagcagcagcaacaacaaggcgttgcgaggagccgcggcggccgggacggacaggcgggaggtggacgtctcgaggtgcggcggtgccatgttcgacaccacgct

SEQ ID NO: 1098 - DNA, 349 bp, Zea mays
  Clone ID: LIB3115-021-P1-K1-A12
cccaatttttgctattgcgtttagtatcttcctcagcttcagccttgctgccatgtatggtgttgctgtggctgctcttggaatgctgagcaccattgccacaggtcttgctattgatgcatatggccctatcagtgataatgctggaggaatagctgaaatggctgggatgagccataggattcgtgagagaactgatgctctagatgctgcaggaaataccacggctgcaattgggaagggttttgccattggctctgcagccttggtttcccttgcactatttggtgcgtttgtaagccgggctgctatctccactgttgatgttctgactcctaaagtattcatc

SEQ ID NO: 1099 - DNA, 474 bp, Zea mays
  Clone ID: LIB3115-021-P1-K1-A2
gcgctgcaggtacggattcgcagtttcggcccaggcgtacgcatcagaacatgctggagcagtgatatttgcgtttaaaaacaatctggacatcaccctcggagtatctttggggtccgctacgcagatgtccatgtttgtggtgccattgagtgtccttgtagcatggatcatgggagtcccgatggatctgatttcaacttgcttgagactggttgtttgtttcttgcaatattagtaacggccttcacgctccaggatggatcatcacattatctgaagggactgctgcttgtgtttttctacattgtcatctccttatgctttttcgttttgagacagcatggaaatggaagcaacgatgatcagctgggtgtagcaagcaagccatggaggatttagggcgcctgagctggcagtagtttctcaacaagtagcgtggactttggtttgcacgattttgcatggaacact

SEQ ID NO: 1100 - DNA, 398 bp, Zea mays
  Clone ID: LIB3115-021-P1-K1-A4
caacgtgcacagcgcatacctccacgtgctcggggactccgtccagagcgtcggggtcatggtgggcggggcgatcatctggtacaagccggagtggaaggtcatcgacctcatctgcacgctcgtcttctcggtggtggtgctgttcaccacgatccggatgctgcgcagcatcctcgaagtgttgatggagagcacgccccgcgaggtcgacgccaccaggctggagagcgggctctgcgggatggagggcgtggtggccgtccacgagctgcacatctgggccatcacggtgggcaaggtgctgctggcgtgccatgtgaccatcgccagggatgcggacgctgatgagatccttgacaaggtgatcgggtacatcaagacggagtacaacatca

SEQ ID NO: 1101 - DNA, 338 bp, Zea mays
  Clone ID: LIB3115-021-P1-K1-A5
aaatatccccaaaccctagctcccgatctcgatggcgaaccctcgcgtcttcttcgacatgaccgtcggcggcgccccggcgggccggatcgtgatggagctgtacgccaacgaggtgcccaagaccgcggagaacttccgcgcgctgtgcacgggcgagaagggcgtgggcaagtccgggaagccgctccactacaagggctccaccttccaccgcgtcatccccgagttcatgtgccagggcggcgacttcacccgcggcaacggcaccggcggcgagtccatctacggcgagaagttccccgacgagaagttcgtgcgcaagcacatccgccccg

SEQ ID NO: 1102 - DNA, 437 bp, Zea mays
  Clone ID: LIB3115-021-P1-K1-A6
cggacgcgtggggaaggagcataagcacaaggagcgcctcggcgaggtgggcgccctcgcgggcggcgcctttgctctgtacgaggggcaccgtgcgaagaatgacccggcgaacgcgcagaggcacaagatcgaggccggcgtggcaacggcggcggcgctgggcgccggcggctacgcgtaccacgagcaccgcgagcagaaggaggcccactacgagagcaggcagcaggagcacagggtgccgcacgggcacgggcacgggcacggctactcctactactgcgactgaaacgactgatcatcccatcgatcgagatatgcatgcagaactcgatatatatacggcccctagcgccgtacacgtgcgtgcgtgtaagtaaataagagcaaacgtcggcacgtgtgtgttgctcgatcactactccatcgatcta

SEQ ID NO: 1103 - DNA, 447 bp, Zea mays
  Clone ID: LIB3115-021-P1-K1-A7
aatcaagaatgatgggtgattcaatgtacaaaagtactcttgattgttttgccaagacactaaagaatgatggaccttgtgctttctacaagggattcattgcaaacttttgtcggattgggtcatggaatgtgataatgtttttaactctggagcaggttagaagattctttctatgaagagatgcctgcactgcaagtagggattgtgtgggacaagggtatgttgatatatatgggcggcatatatacgtaattgcatggttatttgaagctacaggttctcatggcgtcaaccaacagaaagcagccatactgccacgatgttgtaatcttgtatcgcagattgatcatacagaccgctgtgttggtatattatagagagctggattggaggagattgagagagattaggagagattttgactgatttaaacccactcaattc

SEQ ID NO: 1104 - DNA, 431 bp, Zea mays
  Clone ID: LIB3115-021-P1-K1-A8
gaccaacaagcaacatagaaagtggaatccagtagcaacaatagagcaacaatggcgaccaagatattttccctccttatgctccttgctctttctgcatgtgttgctaacgcgacaattttccctcaatgctcacaagctcctatagcttcccttcttcccccataccttccatcaatgatagcttcagtatgtgaaaacccagctcttcaaccctataggctccaacaagcaatcgcagcaagcaacatacctttatcacccttgtttcaacaatcgccagccctatctttggtgcagtcattggtacaaaccatcagggcacagcagctgcagcaactcgtgctacctgtgatcaaccaagtagctctggcaaacctttctccctactctcagcaacaacaatttcttccattcaaccaactgtctac

SEQ ID NO: 1105 - DNA, 467 bp, Zea mays
  Clone ID: LIB3115-021-P1-K1-A9
aactagcaacatagaaagcacaatagtgtaccaacaatggcagccaaaatattttgcctccttatgctccttggtctttctgcaagtgctgctacagcgaccattttcccgcaatgctcacaagctcctatagcttcccttcttcccccgtacctctcaccagtgttgtcttcagtatgtgaaaacccaattcttcaaccctacaggatccaacatgcaattgcatcaggcatcttacctttatcacccttgttcctccaacaatcatcagccctattacagcagttacctttggtgcatttattggcacaaaacatcagggcacaacaactcgtgctagcaaaccttgctgcctactctcagcaacaacagttacctttggtgcatttgttggcacaaaacatcagggcacaacaactacaacaactcgtgctagcaaaccttgctgcctactctcagcaacaaca

SEQ ID NO: 1106 - DNA, 389 bp, Zea mays
  Clone ID: LIB3115-021-P1-K1-B11
cggacgcgtgggtggacgagtcggtgctgtggacggagagccgcgacgtcggcaacggcttgcgctgcgtccgcatggtcaacaacatctacctcaacttcgacgccctccacggcgacaagtggcacggcggcgtccgtgacggcaccgacgtcgtgctctggaagtggtgcgagggcgacaaccagcgctggaagatccagccctactactgaaccaacggatgatatgaccatcgcgcccatcgatcgtgcacatgcatgcatacgtactagcagaataacaggggtcttatctcccgaggcgtcttttgcatgcatgccagcagttgcatagataaagcaggagcgagacatagggtgttcatgtatattgcagctgtatcactg

SEQ ID NO: 1107 - DNA, 366 bp, Zea mays
  Clone ID: LIB3115-021-P1-K1-B2
cgtcctcgtacataaccccccaccccaccgcgtacagcgttccctctcgcgccccgcggtgagctacgcgcccgctcgccttagaccatgggcctcccgccgtcctcctcgccgtcgtcgctctccgccgcgtcagcgcagcccacgcccctgcacctgcacctcccgaccaaggcgcccggccgcctcccgctgctccccttctcgcgcgccgccctcccgccgccgctgcgcctccgcattgcgcgcaccagcctccccccgggcacgcccctcccgcgcgcgctcctgccaccaccctccggcttcgacgtcggcggcggcggcgccggctttggcggccatgacgacgacgggcacaaccac

SEQ ID NO: 1108 - DNA, 225 bp, Zea mays
  Clone ID: LIB3115-021-P1-K1-B3
aagacgacttgtttcattgattcttgaagagatcgagcttcttttgcaccacaaggtcgaggatgtcttgcaactgcggatcaagctgcggcttcagctcaagctgcaagtgcggcaagaagtaccctgacctggaggagacgagcaccgccgcgcaggccaccgtcgtgctcggcgtggccccggagaagaaaggcgcgcccgagttcgtcgaggccgcggcgg

SEQ ID NO: 1109 - DNA, 423 bp, Zea mays
  Clone ID: LIB3115-021-P1-K1-B6
aataaagagtagatatcttattattgttggcacgccgcacgcacgaggataatgcaataaattgtatctgttattgaaaaatacatgaatatattactaatatatatttttttaaaagaaatgatgaccggcacttcatccgtcgcgtaacgtcacccgttcccaatccccacgtaccgcgtcaaatgcgtttccactcgtccaccaatccggtcagtgtggccttcgactcaccggcctcacgcagcgcgttcttggcctgccgcatggccgccagcgtgcgcttccggagcatcctcccgccatcggactccaagagccatcgcaccttggcagcaacctcctcggccgccacgatgccctcgtcgctgtcgtacccttccacggccacggccagctgcatttcttcttcaggaacacccg

SEQ ID NO: 1110 - DNA, 445 bp, Zea mays
  Clone ID: LIB3115-021-P1-K1-B7
cccacgcgtccgggcaaaagccaaaaggcatcaccgccgcgacgacgatggcagcctcgctcgaagccgcggccaccctgatgcagccggccaagatcggcggccgggcgccctttgcctcgctgccgtcccgcccgtcgtcgcaactcgcctgcagggcgttcggcgtcgacgccggcgccgccaggatcacgtgctccctgcaggacgtcgccagcaggtgcgtcgacgccgcgaagctcgccggcttcgcgctcgccacctcggcgctcctcgtctcgggcgcgagcgcggagggcacgcccaagaggctgacctacgacgagatccagagcaaaacgtacatggaggtgaagggcacgggcacggcgaaccagtgcccgtccatcgacggcggcgtggagtcgttcccgttcaatgccggcaaggtccagatgaagaagct

SEQ ID NO: 1111 - DNA, 405 bp, Zea mays
  Clone ID: LIB3115-021-P1-K1-B8
gttctgccgacccagttgattcccgacgacatcgaaagaaaggtgctgcgtgttaagctcatcatgaaagaaggggtgaagaacttcaacccggtttatctctttgacgaaggatcgaccatcagctgggtgccttgtggaagaaagctcacatgctcttaccctggcatcaaattttcctatggcccggacacttacttcggaaacgaggtatctgttctggagatggatgggcaattcgacagactagatgagctcatctacgtggagagccatctaagcaacctttcaaccaagttctacggagaggtgacacatcaaatgctaaagcatgcagacttcccaggtagcaacaacgggacaggtctcttccaaaccatcattggactgaagattagagacctc

SEQ ID NO: 1112 - DNA, 282 bp, Zea mays
  Clone ID: LIB3115-021-P1-K1-C11
cccacgcgtccgcaatgttgaacactcttgatgtacactgtgaagttgcagaggatgggcatgagaatctcaaagatcaagaattgccataaaggtgctgatgagttctttgatgatatatgtaatttcaattacatgaactataagaaagtgcaaattgaataagtagagatgatataatattacatatttatatcatcaaaataatattaatattacgatgatattttatcacacaaaaaaaaaattaaaaaatttttattttaatatttatcttaattt

SEQ ID NO: 1113 - DNA, 370 bp, Zea mays
  Clone ID: LIB3115-021-P1-K1-C12
agaggagaggacgcgcacgccatgtcaggtccaccaccaaagccttgggagcgatctggaactgaaggaacttcaggtccagcagctttcaagcccccatctggtggaagcaccagtgatgttgttgaagcttctggtaccgctaaacccagcgaaaatgttactgcgatggaggggaatgccgctcctaatgtaaatagcactgtttcaaggcctatgccacagcggccttggcagcagacaggttatggaaacacctatggagggtatggtggatccaacatgtatagttcatatggtggatttggcaacacttatggtaccggtggactcggaaatagcatgtactcgagttacggaggaggttatg

SEQ ID NO: 1114 - DNA, 443 bp, Zea mays
  Clone ID: LIB3115-021-P1-K1-C2
tggtgattcaaggtcaagcatctttgatgccaaggctggtattggactgagctcttccttcatgaagctcgtgtcttggtatgacaacgagtggggctacagcaaccgggttctggatctgatcgctcacatggctcttgtgagcgccaagcactgatgttcgtactcgttcctccagtaccagtagtagcctagataagaggctgcagttttgacggccattttcttttagctgttgtttggaataaaagaccaaatgttggaacacttggaactcgcgcaaaactggaatccgattcatgacctgtgttttagttgtagagggggcaaatttgcatcgtactatatgcgggattgttgatcggatgtcgtatggttctaaataaaaaaattaaatatatattaattaaattatttttattaattttttatttattttattt

SEQ ID NO: 1115 - DNA, 389 bp, Zea mays
  Clone ID: LIB3115-021-P1-K1-C4
aaatccattgccgctcctgcccccaacggcgcatgccttcacctcctcagccatggagctcacgagcatctccctctgtgcaccccctccgcgcgtccctgctccctcgtcaccaggtgcacgcgcgcagcttcctgcgcgccgggatggccctccagccccagctcgcccctgccctcagctatggcgccttgccgccgccgcccctgctttccatggcggcacttcctgcttcctggtggtcggcgccctccccaacctctctgctggtggttgtctccatcccctccatggcgagctcgcccctgcattcctgctcgcccaagatccccttccatgttccagccacctcccatggacgtcagccctcacctcatagtcgccccagc

SEQ ID NO: 1116 - DNA, 421 bp, Zea mays
  Clone ID: LIB3115-021-P1-K1-C5
cgactagtttcattgattcttgaagagatcgagcttcttttgcaccacaaggtcgaggatgtgttgcaactgcggatcaagctgcggctgcggctcaagctgcaagtgcggcaagaagtaccctgacctggaggagacgagcaccgccgcgcaggccaccgtcgtcctcggcgtggccccggagaagaaggccgcgcccgagttcgtcgaggccgcggcggagtccggcgaggccgcccacggctgcagctgcggtggcaactgcaagtgcgacccctgcaactgctgatcacatcgatcgacgaccatggatatgattattatctatctagctggtggtggtggttgaacaataataaagcgaggccgagctggctgccatacataagtattgtgaggtgtgtgtgaaagagagagaaac

SEQ ID NO: 1117 - DNA, 449 bp, Zea mays
  Clone ID: LIB3115-021-P1-K1-C8
gcacaacctacaattgtcacttccattttctcaataccttaagcaaggaccaatgtctcaaggccagccccctcgttcccaagcgccagtggaaacacgttaaatttcaggataaccaagctaatgccatgaaggaaccaggaaccggtgggtatggctatgggacgaaaaatgacaagaataaggatgtggatacaatagcttcggacttcatcaagctgaagcacaaggcttgggcactccagaagagcacaaccatgtaccaaccttctacctaaaggtgtcaatagttcaagaagttgatactatatacttatgcttgtctctgtatagtctataagtcctaattcaaataacaggtgctgcttgcagccttggatatttgcggatgcggagtgaagttaccatggcatccttgctaagaataagaaagtaatgtggttatgagg

SEQ ID NO: 1118 - DNA, 438 bp, Zea mays
  unsure at all n locations
  Clone ID: LIB3115-021-P1-K1-D3
cataaactagccgggcaagcgaacaaaaggtgtaagtgcttacgaccgacgcggccaaatcgagataagagcaagatgacgtcgtcgacggcgttcatccaactgttcccttccgccgctgcggtatcccccgtccctcgctgcgtctccctgcagctcttctgcgccagcggtggagttgtccctggatggaggagaagatgccgccgcatggccatggtgcgcgcggccaccgcggatgctgcggcgcccgcctacacctncgattccctcatcctctacttcaaggcggagggcaccatggaggagagggccattcccaagatcacagaatctcttgagggtatggagggagtcaaggacctggaggtgctcattgaagaaggcatcggaagtgttgtggtaacaaaggagacaactgtgcaagctactggagta

SEQ ID NO: 1119 - DNA, 386 bp, Zea mays
  Clone ID: LIB3115-021-P1-K1-D4
ctagaactagtcagctgccctgctacacggtcccctgccaagatccatcttcccggttacgccggctgatcgaagtgaacaaggaaggaagagccatggcgagcgagcacgcggcggggggcgaggctaagcatgaccagaagcagagcctgatggacaaggcgaaggggttcgttgtggagaagatcgcgcacatccccaagcccgaggcgacgctggacggcgtgacgttcaagggcctgagccgggagtgcatcacgctgcacagcagcgtgaacgtgtccaacccctacgaccaccgtcttcccatctgcgaggtgacctacacgctccggtgcgccggcaaggaggtggcgtccggcaccatgccggaccccggctggatc

SEQ ID NO: 1120 - DNA, 395 bp, Zea mays
  Clone ID: LIB3115-021-P1-K1-D6
tgctatttcaagagttcctagggatgaaagtttgagcaatctcaaaaactgggctgagaatggaaatcttcatcttctgaatcttaagtatgatatcaccccttccgattatgtttcaatgctcataacagattatggaatgctcccacctactagtgtaccagtcattgtaagagagtaccgcagggagcacgtttggatatagaagccaccgttttcctttctggttttgtttgaggtatgataatctgaacagcttttgctgcctaagtgttagtggaatggtaagggggtggtgtgagcatatcagcaaatgtttatatctcagttttgcaaccatcaaattggttgttttctcctgtagttcatttctgtgttgatgcggtttgcattta

SEQ ID NO: 1121 - DNA, 360 bp, Zea mays
  Clone ID: LIB3115-021-P1-K1-D7
gggctccgtgatgggcgacgaacgcgttctgttcatcatggacgaccacgagggcttggccgactccaagcgcatcggcgtggcctacaacctgcacatgcaaaccaagcatttaggcctcctaaccgaagtgctttttgcctcgaaaggtgatttcacgctcggcttcaccaggcttataatgcaactaccatgacacctgaagagggtatggactcacgtctgcaacagagggcacgcaaggcggtacctcaactgcttgtaccatggactaactgactactatgtctggacatttctgaagatcagcactgcatcaatgagcgatgtccaagggcgcctaattgtggacaagctaat

SEQ ID NO: 1122 - DNA, 320 bp, Zea mays
  Clone ID: LIB3115-021-P1-K1-D9
gcagtgcaggctggcggtgacctgcatcgctctggcggtggcgccgaccagctttgcgcaggggacgcccgtccggccgacgagcatactggtggtaggcgccacggggacgctggggaggcaggtggtcaggagggcgctggactagggctacgacgttaggtgcctcgtcaggccgagcccagcgcctgcagatttcctcctggactggggtgccaccgtagtcaatgtaggattttgttgggctgcctgtgcttctgttatatgtctatttttgcaattgggcttgcttttgtcgttaatggtttatttgtgatttt

SEQ ID NO: 1123 - DNA, 432 bp, Zea mays
  Clone ID: LIB3115-021-P1-K1-E11
taagaaaccacttttgaggagcgacaagatgttcatggccaccctcttggcagagtttgacaggattaacaaaaagcttggctggcggaaggaggatcttcccaagatcgaggaagagcttgaattggaaattgccaaaagtgagctgactgaacttaagaaggaatgcgttgaagcaatggagactcaactcaagagggaggagtttcaagatgaggagatgcctgatgtcaggaaattggacatcagaaactttctgtaggcctgatcgacgataatctttgaggcccaacgcacctatggttttggtttcaagttgatcggtgctccacacctatgaatgctgctcctttcctttttggaataaaagaaactgcacggttgggtatgagttggatttcctcttgcctttctgtcgctctggactcttat

SEQ ID NO: 1124 - DNA, 441 bp, Zea mays
  Clone ID: LIB3115-021-P1-K1-E3
gcgattcgctcgctcgatcctagcttcccttccaagaagcgcagcgcccatggccatgtccacgcaagcctccgccgccacgcgccacctgctggccgccgcctgggcgccggcggcgaagccgcggcagctgagctcgcagctcgcgctgccgtcgtcgtcctcccgcgggccggccccgctccgcgcgtccaccgaggaggcggtggaggcgcccaaggggttcgtggccccgcagctggaccccagcacgccgtccccgatcttcggcggcagcacgggcgggctgctccgcaaggcgcaagtggaggagttctacgtcatcacgtggacgttccccaaggagcaggtgttcgagatgcccaccggcggcgccgccatcatgcgggagggccccaacctcttggagctggcgcgcaaggagcagtgcctggggcttgg

SEQ ID NO: 1125 - DNA, 431 bp, Zea mays
  Clone ID: LIB3115-021-P1-K1-E4
cttactgatggtgcatgctacatgttacagcgaatatgaaacatgagcgctgatcggtacatgttacatcaactgtctgtatggctgtctcccattgtgttctgcaaaagtgaggccccgtgaatcagagcctactttcacatgggactcattgtgggtgcaagtgttggcggattccaaactggggcaagatcagggcgtctttctttcccctgtttttccaggttggatgacaacgatttctctcttgcagtctgtactcttgtgtaccatggctctccgtaagttgtgaaagcatgagcacctatttccacctttgatggccaagaatctcattgtagctttgctgtaccatgtataagctgttattaactagtggaaagcagcaggaaaaaaattctgaagggagtgtgaatcttggtgtgtcatct

SEQ ID NO: 1126 - DNA, 339 bp, Zea mays
  Clone ID: LIB3115-021-P1-K1-E8
gggcaagaagagccaacagaaaagtattcattcaagaacaccacccccacccgctccaagcagaaattttgtcttgaagagagccaccaccaatggcttgttacaacaacactgcatctttagcggcgactctgctggcgttcgcgctgacgtttcaagcctgcctcgccgggaggaggctcaccgcgctggtgcaggagccggccataaccatgaagtaccacaagggcgcgctcctgtcgggccccatcgccgtcaacttcatctggtacggcgacttctcggcgccgcagcgggcggcgatcaccgacttcgtctcgtcgctgacggcggcggccc

SEQ ID NO: 1127 - DNA, 425 bp, Zea mays
  Clone ID: LIB3115-021-P1-K1-F1
cccacgcgtccggggaaaaatgtacaaggcattttttcgagatagagaggggagaactgtaatcatgatgaggcctacaaaggagaattcaacgtcccatgacggtcagattcggtttcttgtgtatgttttggagaatgcgatcctggaccaacgtgaaggtcaagagaaaatggtatggctgatagacttcacgggatggacaatggcccatgccacacccataaagactgcaagagaatgtacaagcatcctgcataatcattaccctgagaggctggccattgcatttctgttgaatcccccaaaagtattcgaagccttttacagggctgttaaatattttcttgacccaagatcgatcgagaaactgaacttcgtgtacctgaaggatgaggagagcatgaaagtcctgtacaagtgca

SEQ ID NO: 1128 - DNA, 445 bp, Zea mays
  Clone ID: LIB3115-021-P1-K1-F11
cccacgcgtccgcaaatacacaaccgtgcagtttacaggcgaggttttgaaaactcctgtctcactcgatatgcttgggcgcatttttaatggttctggaaaacctattgacaatggccccccgatattacctgaagcctacttggatatctctggaagttctattaatcccagtgagagaacctatccagaggagatgatccaaactgggatatccaccattgatgtgatgaactccattgctcgtgggcaaaaaatccccctattttctgctgctggactccctcacaatgaaattgctgctcagatctgtcgtcaggctggccttgtgaagacattggagaaaggaaagcatgcagagggtggtgaagatgacaactttgctattgtgtttgctgctatgggagtgaacatggaaacagctcaattcttcaaacgtgatttt

SEQ ID NO: 1129 - DNA, 371 bp, Zea mays
  Clone ID: LIB3115-021-P1-K1-F3
gagggaggagccatgtctgaggagaagcaccaccaccacctgttccaccaccgcaaggcagaggaggaggaaggcgcctccggcgaggtcgactactagaagaaggagaagcaccacaagcacatggagcagctcggccagctcggcgccatcgccgccggcgcgtacgctctgcacgagaagcacaaggccaagaaggacccggagaacgagcacggccaccgggtcaaggaggaggtggccgccgtcgccgtcgtgggctccgccgggttcgccttccacgagcatcacgagaagaaggacgccaagaagcacgcccacaactgatccgtcgcaagctgcctcagccgaagcagcaacacatcgttgcg

SEQ ID NO: 1130 - DNA, 376 bp, Zea mays
  unsure at all n locations
  Clone ID: LIB3115-021-P1-K1-F4
actagttcatgtcgcaatacggcctgtaccgtgttgatttcgaggacgaggcgctaccaaggcaagcaaggctatctgctcgctggtattctaaattcctagagaacaaggggatccatgtagaggacgagcttgatgatgcgggatcacacgttgagcaataagttttctacagcgacacattgatctgtacatcctctagcgagactattgaatactactgtgcgttgcaataagaacacttatnttnaaaaaaaaaaaaaaaaaaaaaaaatatttataaataataatataaaaataaaaaaaatataaaaaattttatataataataaatttaaaataatttatttaaaaaattaaaataaaaagggggggc

SEQ ID NO: 1131 - DNA, 137 bp, Zea mays
  Clone ID: LIB3115-021-P1-K1-F5
cccacgcgtccgccaagaaatactacgcccatcggatccaccgccgaggcaggcagaggagcacacaccccagagctgatgaccggtttcgccatggccgccaagaagctggtgctcaagctggacctgcacgacga

SEQ ID NO: 1132 - DNA, 400 bp, Zea mays
  Clone ID: LIB3115-021-P1-K1-F6
cccacgcgtccgcccacgcgtccgagaagccaaccggctcgtccgcccgttgcctgtcgtcgcgtatggccgccgtggaggtgtgcgtgaaggcctccgcggggaaccccgacacgctcggcgattgcccgttctcgcagagggtgctgctcacgctggaggagaagaaggtcccgtacgaggtgaagctcgtcgacctcggcaacaagcccgaatggtttctgaacatcatcccagagggtaaggtgcctgtgttcaacggtggagatggcaaatgcattgctgattctgatgtaatcacccaagtcattgaggagaagttcccgactccttctttgggtaccccttcagaatatgcatcagtgggatcaaagattttcccagcccttgtcaagttctt

SEQ ID NO: 1133 - DNA, 385 bp, Zea mays
  Clone ID: LIB3115-021-P1-K1-F7
cccacgcgtccgctcggagcagagcagtggttgctgctggtacgttttcgtagatagagatagatatactactaggagtctaggagtagtatataaaagctgctgctacgtgtttgtttaattgtctgttggtggacaaggcaggtgaagagggacgataggaccatgcataccatagatggaggatggcatcttttgcaatcagctttgggattactatgcgatgtgttagccttttatagctagccattgtccaatcgacaactgctccggctacacaagagcgattccaagcggcgtgccaggactaggagggagggattccgtttctcgtgaggaaagcttgctacctacctgtcgcgcactcgcgcaagagccccattcg

SEQ ID NO: 1134 - DNA, 345 bp, Zea mays
  Clone ID: LIB3115-021-P1-K1-F8
cggacgcgtgggcgccggcgcctatccagtgcttcctcacgagcagcagaccggccgtatggacggcgacgccgcccaataagcgcgcgaggaggccgtcgaggatctcgtgcagggcgtccggcgatgacaaggacaaggtcccgtcgtcgggagggaacgatcttggggtcaagcagctcgggaagctggccatggtcgcgctggccgccggcgtgctggcgctcggccccgtcgacggcgccgtggcggccaagtccggcggcagggtcggcgggcaggcgttccggtccgcgccccggtcgttcggccctcggatctacaactccaggacgaacatctaca

SEQ ID NO: 1135 - DNA, 317 bp, Zea mays
  Clone ID: LIB3115-021-P1-K1-G4
tgctactctgctccgagatctggtctggtgagatcggggatcggaccgtcgactcggcgagacatggcggactggggccccgtggtggtgggcgtggtgctgttcgtgctgctctcgccgggcctgctctgcgagctgccgggcacccaccgccacgtcgacttcggcggcttccacaccaacggcaaggccatcttcgtccacaccctcgtcttcttcgccgccttcaccattctcacgctcgcgctccacattcacatctacaccggctaggctagctagctagtgcggagcacatgctgccggtctggactcgc

SEQ ID NO: 1136 - DNA, 368 bp, Zea mays
  Clone ID: LIB3115-021-P1-K1-G7
cccacgcgtccggaacaattgaaatgataagtaaaaagtattgttccttcaaatcaaaggtgagactatctacataacactaaatggggatactttaaataattatttcaaaataatatatatcttaaacatctaaacctgctaaataacttaataattattactacaacatatttaattcataattattaaaatacctaattccttattaataaaaacatagtgttcgccccctttaaatataccaaacttatcttcccctttcttcaataaaaattctttttttattttgtcctctaatatttaatcaattccccccctttttacaaacaccttataccagaataaaccccttttatctaccccat

SEQ ID NO: 1137 - DNA, 294 bp, Zea mays
  Clone ID: LIB3115-021-P1-K1-G9
gctccactgtgcagtgcgcgcgtaaatcttgcttatctagccgacatggcctgactagcaggcgtcttccccaagcccatgacgatcaaaattctcgccatcaactccatctacggaaggaagctcgccgacaccaggacgacggtccgctacatactcatgcccatgtcagccgaccagatggacatgttcggtgacaagcacctgtaccatgaccttgacctcatagacatcaccaccggacagtgggacctctactgatttgacgcgcactcgtcatacaaccggatacag

SEQ ID NO: 1138 - DNA, 285 bp, Zea mays
  Clone ID: LIB3115-021-P1-K1-H1
cccacgcgtccgctgcaagtctcgctacgtttttttcaataaaaaaagcagccgcattggcgagcagcaccatggccctctcctcgagggccttggccagcaaggccgtgaacgtgccgtcgtcgtccgccttcggcgaggcccgcgtgacgatgcgcaagacggcggcgaatgccaagccagcggcggcgtccgtgagcccgtggtagggacccgaccgcgtgctgtacctgggcccactgtccggcgagccggcgagctacctgacgggcgagttcccgggcg

SEQ ID NO: 1139 - DNA, 420 bp, Zea mays
  Clone ID: LIB3115-021-P1-K1-H10
cccacgcgtccggtttcaactaatcagcttactaggatgaagcctgcaacggtggcactgctcattttgttgaacatgatgtgcatagttgcatactttgatcatggaacgatggctgaagaaaccaccttgctggcaaattcgtatggaagaaatgaaggaaccaagggcatacatcatggaagaaagctgatggacaatagtattggttcaaaccgtgagtattcaatcgatgatatgtctcatccaaaggcaccacatactgagctcaagcaaccctcatacttagctcctggttgctcaagcaaccctctcaagcaaccctcatacttagctcctggttgcattccctaaagttcatgcatacatatatagccttccactcatcatatgctggtatccgatctttatatagacaca

SEQ ID NO: 1140 - DNA, 433 bp, Zea mays
  Clone ID: LIB3115-021-P1-K1-H12
cccacgcgtccgcggacgcgtgggccgtctcctgtgcccaaggccaggccaacagttttgaggtggtaatggcggaccaggctaaccaacccactgtccttcataagctaggtggccagttccacctgagctccagcttctctgaaggtgtacgggcccgtaacatctgcccttctttctcaccttatgaaaggagatttgccacgaggaactacatgacccagagcctttggggcccttcaatgtctgttagcggtggcatcaatgttccagtgatgccgactccgctttttgccaatgctccagccgagaaaggtggcaaaaacttcatgattgatttcatgatgggcggagtttcagctgctgtttcgaagactgcaactgctcccattgaacgagtgaagctgcttattcagaatcaggatgagatgat

SEQ ID NO: 1141 - DNA, 395 bp, Zea mays
  Clone ID: LIB3115-021-P1-K1-H3
aggagtcgcacctgccgcagcttccctacctgcacgcggtggtcaaggagacgctgcggctgcacccggcgctgccgctgatggtgccgcactgccccagcgccgacgccacggtgggcggctaccgcgtcccggcggggtgccgcgtgttcgtcaacgtgtgggcgatcatgagggaccccgccgtgtggaaggacccgcgggacttcgtcccggagcggttcctggacggcgccggcgaatggcgcaagtgggacttcacgggcagcgagatggagtacctcccgttcgggtccgggcgcaagatctgcgctggcgtcgccatggcccaacggatgacggcctactcgctggccatgctgttgcaagcgttcgactgggagctgcctgccggc

SEQ ID NO: 1142 - DNA, 408 bp, Zea mays
  Clone ID: LIB3115-021-P1-K1-H5
cgcctgcagtaccggtctcggcatttccgacccaggcgtcccatcgttgggcggccctcttggttgcccgtgccgggatttgcgctcaaagcggtgctaggagaaggcgcttctgtggtgttggaaggacaaaaggttgttccggcgaaggccaaggatctaggcttctcctatagatacccctatgttgaagacgctctaaaggccattgcccgagacctgtagagctaggttgaggacgatacaggcaacttaatttaattatttcttatcttaactaggaacgtgcccgtgcgatgccacggaatacaaattgcgaccctttaatagacttatggccctgacgacgtgcggcgtgagtacaatagtgacggcaaaatatgtgattgtttaacatagatatagaat

SEQ ID NO: 1143 - DNA, 263 bp, Zea mays
  Clone ID: LIB3115-021-P1-K1-H7
cccacgcgtccggcagttcctcaccatttcctcgtacgccggcgtgcaaagatgttgggacatgttcttatatatgctgtttcgtttatgtgatatggacaagtatgtgtagatgcttgcttgtgctagtgtaatgtagtgtagtggtggccagtggcacaacctaataagcgcatgaactaattgcttgcgtgtgtagttaagtaccgatcggtaattttatattgcgagtaaataaatggacctgtagtggtggaggtaat

SEQ ID NO: 1144 - DNA, 332 bp, Zea mays
  Clone ID: LIB3115-021-P1-K1-H8
tggctgtaccacgtcggccagaaccttatattggattcagacattttcctcctccacgttgaggagcgtaaatttgctgcggcggggctggataactggcagagagcttgttacgtgccgacgtcgtcggacgccatggtggtcgccttcaggaactggttcagaaaattctgcaagaaccaggtcggctgggcaaccttacaagtcgaccagctgccaccaacgcgtaccaaggaccagctcatggagaggtactggtcgcacgtggtgcagtgcaagagctgcaacgcggcgcttaaggccatgaaagcgctcgaggctgccctgcatgt

SEQ ID NO: 1145 - DNA, 448 bp, Zea mays
  Clone ID: LIB3115-021-P1-K1-H9
cggacgcgtggggcgaccgtctcacccgcgcctcaaaggtgctcgagcagctcatcggccagacccccgtcttctccaagggtgagtactgagttctcgcggctccgtttcttgccttccgctgacggggtgcttccttctgcctgctggcggtgttggttcgtcttgcagcgaggtacacggtgcggtcgttcggcatccggcgtaacgagaagatcgcctgctacgtcacggtgaggggcgagaaggccatgcagctgcttgagagcggcctcaaggtcaaggagtacgagctgctcaggaggaacttcagcgacaccgggtgctttggtttcggtatccaggagcacatcgaccttggtatcaagtacgatccgtcaacaggcatctacggaatggacttctacgtcgtgcttgagcgtgccggctaccgtgtggcgcgccgcat

SEQ ID NO: 1146 - DNA, 271 bp, Zea mays
  Clone ID: LIB3115-022-P1-K1-A1
gcctcatcaccaaccagggaaggcgtgatctggaccatgtggttggaagggtcgctgttgaagcgtgagcagtgtcatctttggtttcaatggtgtcatgtttgatggttgagaaggctgcgctctatttgctcttttgggttaggattttcgagttcagaggactttaaggtttattgcatctagctatggcgccacactatgttccccgagtacctaatgtgatatcaagactcaattctcgaatctaagatatatgtttgcaaagtgt

SEQ ID NO: 1147 - DNA, 419 bp, Zea mays
  Clone ID: LIB3115-022-P1-K1-A10
cccacgcgtccggattcttgaagagatcgagcttcttttgcaccacaaggtcgaggatgtcttgcaactgcggatcaagctgcggctgcggctcaagctgcaagtgcggcaagaagtaccctgacctggaggagacgagcaccgccgcgcaggccaccgtcgtcctcggcgtggccccggagaagaaggccgcgcccgagttcgtcgaggccgcggcggagtccggcgaggccgcccacggctgcagctgcggtggcaactgcaagtgcgacccctgcaactgctgatcacatcgatcgacgaccatggatatgattattatctatctagcttgtggtggtgggtgaacaataataagcgaggccgagctggctgccatacataggtattgtgtggtgtgtgtgagagagagagaaaca

SEQ ID NO: 1148 - DNA, 449 bp, Zea mays
  Clone ID: LIB3115-022-P1-K1-A12
cccacgcgtccgcccacgcgtccgcccacgcgtccgcccacgcgtccgcctacagatatattgtatgactcgtggtccccagcaatgactgtcagttctatctgtatcagcatattatctatgctgtccagctcaccagcaaaggttacatatttcctctacatatccttgttcaatcggtgggtcttgctttctgactgcaatacatacatgtaccgattgcagcaacgcccagccgataacgatcgctatgtcaggaactgtcgcaatgggaggtcaccaaaggagaccacgtggtggttccatgacgacactgtgtgatgggtggttccggctgttgtcctgcccgcattttagttgccagactacatgggagatgatctaggcatatttcaagcgagccatttgaccagaaactaacacgctcttctggtttggaaatgagtgtg

SEQ ID NO: 1149 - DNA, 444 bp, Zea mays
  Clone ID: LIB3115-022-P1-K1-A4
accatgtattgtgtatctatatgtccgcaaattcaaattgtggatggcacacatgctttagagttctgatgaaccctttcgtgagtatatccactcatggcaggtacaaaatggagatctctaaaaaatgtgtgtggctcaaacgcttgtccctgatgaacaagacatagaagcttcaatttcggtgaaccggttggtacataataatggttccttgtatatttttgaccgaagtagaggtatcaactggttgtttgttgtaaacagcgctgttgtagtactctgaacagagtccatatcgtacatgtaaattctctgtgtcactgttctcatatgcagttgctgttgaaatctgtgcgttactgcagcctgtaggggataggcaaaatggaaacttttgttgatataaatataatgtacagttctgtcgtggctgaacttcta

SEQ ID NO: 1150 - DNA, 370 bp, Zea mays
  Clone ID: LIB3115-022-P1-K1-A6
cccacgcgtacggaggtggtgcggagtccgaggcttagccgtcgccggcggcgtaacgagcatggattcatcgagctgagcgggcatcggtgtgttatatataatctaatctaaggcagagctgggtgctccgaaggatcgacgtatacgggtattgttgatatctacggcttgttgtatagcatgtccatcgattacacaccaaattactccgacatccaaacaaaacaagtatatatgtacagttgcacgttgattcatgtgtgacgcgtgtatatcgtccggagcagaaaattagcttgggagggatttcttccatacacagatttttttatagaaactctcacactgaaaagctaaatatatattt

SEQ ID NO: 1151 - DNA, 258 bp, Zea mays
  Clone ID: LIB3115-022-P1-K1-A7
cggacgcgtgggacattgagttgcaacaaattatcgatggagaccgagtcaccgcagccagaagccattgtctcaatttgaggagattttccatctatgtttgttagaaggcataatgcctatttatctcttatattcgaacatttggcaattaagaaatagaagattacttccccaatatcccttcttcctaatctcacctttcacggcttctggggaacaatcacttgctattactgactgacatgttcactcctc

SEQ ID NO: 1152 - DNA, 263 bp, Zea mays
  Clone ID: LIB3115-022-P1-K1-B1
gtgctaggatgttccggtctggccttgttgtgttcactcttcatgggtcactttcacattactactgccatatatgcgaggggctgtggccattcaaggattggtgggttgtccctgcaaaggttgtattcgatcataccatctgggctgcgatctggaacagactctactttgtgtgcttgggtttccttcggttggaatcacctacctctattctacaacgagctcaagtccacaattctttcttatgcttactgcttgtt

SEQ ID NO: 1153 - DNA, 350 bp, Zea mays
  Clone ID: LIB3115-022-P1-K1-B11
ctaccagcgactcagcgagcgagagcagcacacacgcagctagctaggagcagcagcagcgggggcggctatggcggcctccgggatctcctcgtcagctctggcggtggcgcctcagggcctgccgcccctcggccgccgcgcctcctccttcgccgtcgtctgctccaagaagaagatcaagaccgacaagccctacgggattgggggtggcctgaccgtcgacgtcgacgccaactggagaaagggcaagggcaagggcgtgtaccagttcgtcgacaagtacggcgcgaacgtcgacggatacagcccaatctacaacgaggatgactggtttcccaccggcgact

SEQ ID NO: 1154 - DNA, 460 bp, Zea mays
  Clone ID: LIB3115-022-P1-K1-B12
ggagggtcccaggtgcagcctaaggactcatatggtgtacagtgacttgaatgttgactacctaaagatgttcctcctaaatgttccagccaccaccgtagctctgggactgttctttttcattgatgaattgactggttttgagatcaatgtgttccagctgccagagcctttcggattcattttcacatggtttgctgctttgcccctaatattgttcttagcgcagtcattgactaaggctatagtccaggattttttaatccttaaggggccatgtcctaattgtggtactgaaaacctttccttctttgggactatactgtcagtctccagtggcggtacaacaaacaaagtgaaatgtgcaaattgcagtaccgagctggaatatgactcaaaatctcgggtgatcacacttccagaagcatcaaatgcataaacataggtgactctacattta

SEQ ID NO: 1155 - DNA, 414 bp, Zea mays
  Clone ID: LIB3115-022-P1-K1-B4
cggacttcatctcctacgtcggcgacggcttcaagctgctgatcccgtccaagtggaaccccagcaaggagcgggagttccccgggcaggtgctccgctacgaggacaacttcgacgccaacagcaacgtgtccgtcatcatccagcccacctccaagaaggccatcaccgagtacggctcccccgaggagttcctctcgcaggtcgactacctgctcggcaagcaggcctacggcggcaagaccgactccgagggcgggttcgagaccgacgccgtggccaccgccaacgtgctggagagctccacccccgtggtggacggcaagcagtactacagcatcaccgtgctgaccaggacggcggacggcgacgagggcggcaagcaccagcttattaccggcaccgttttcgacg

SEQ ID NO: 1156 - DNA, 473 bp, Zea mays
  Clone ID: LIB3115-022-P1-K1-B6
ggcgtctcgaagaacagaaagggtccgacatactcattgcagccattccagagttcgtgggcgagggtgtccagataatcgttgttgggacgggaaagaagaagatggaggaggaactaacgcagctggaagtgaaatatccaaacaacgctagaggcatagcgaaattcaatgttccattggcacacatgatgtttgccggggctgacttcattatcgtcccaagcaggtttgagccatgtggtctcattcagctgcaagggatgagatatggagtgattcctatctgttcatccactggaggacttgtcgacacggttgaggagggcgtcaccggattccacatgggttctttcaatgtcgagtgtgaaactgtagacccagtcgacgtgacaagcagtgggcgtaacccgtacgcgagccctgaagcagtacgacaccccggcattccatgagatgggtcagaactgcat

SEQ ID NO: 1157 - DNA, 72 bp, Zea mays
  Clone ID: LIB3115-022-P1-K1-B7
atcgtctcgaataacataaagggtccttcattttcattgcagccattccatagttcgagggcgagaatgtcc

SEQ ID NO: 1158 - DNA, 441 bp, Zea mays
  Clone ID: LIB3115-022-P1-K1-B9
cccacgcgtccgcggacgcgtgggcaggaagtggctcgtcttcatccagcgattccgactcggactccgattctgacgggggcgatgccagctccccgcactaggtgtggctgttgttgctgttttatctgactgtactgtaggattagcgatgagtaggtgactgaaaaggatccatttgatgaggcgttttgaagaacggtatatagaagcctgtatggaactcttgtacatgcaatgcaagtggttgtgttcgtctgtgtatgtgtgggcgcagcatttatgtttgctgtacttgggtgatgtgtatgtggtttatttttggtttgttgattagtttttttttacatgttttttttatttttaaacatatttttttttattatttgtattctgtctctttttacattaatttattttaataatatttattttgtttct

SEQ ID NO: 1159 - DNA, 387 bp, Zea mays
  Clone ID: LIB3115-022-P1-K1-C1
gcacattagcgtcatgtacgcgaggatgcaacgatatggaaggtgctcttacagacaactgcttgagttgagttaccgtacaggaggagaccacggatgtagcagtcggagatgattatacagaactagtagctcattagtttatgttagatgattataatcagcccccccaaccatgaataatgttggaatttttgacatctctgcgcccgagggttgtgcaaggtagcccattctttgtttcgaagccatggcgcctggtgcaccagctggtagcgtgagacttcgttgtattgactagtggatgtttctgggtaaactgatacatttgattgcacacatgtattgatttgtttcttttctctttgatgagtatagcgaaaatgc

SEQ ID NO: 1160 - DNA, 467 bp, Zea mays
  Clone ID: LIB3115-022-P1-K1-C11
tgatggagcagatcatttcttcgttgttccgcatgattttgcagcatgcttccactatcaggaagaaaaagctatcgagcgtggaattcttccattgctgcgacgtgctacattggtccaaacctttggacaggagaatcatgtttgcctgaaggagggttccatcattattccaccctatgctcctccgcagaaaatgcaagctcacttgatttccccagacactccacgctcaatcttcgtttacttccggggacttttttatgacacggggaatgaccccgagggcggatactatgcaagaggtgcgcgagcttcgctatgggagaacttcaagagcaaccctctgtttgacattttcacagaccaccctgccacttactatgaagacatgcagcgcgctgtcttctgcctgtgcccattgggctgggcaccgtggagccctaagttggttgaggctggggtct

SEQ ID NO: 1161 - DNA, 355 bp, Zea mays
  unsure at all n locations
  Clone ID: LIB3115-022-P1-K1-C2
gggaactccgttacccggccccggctgtgcgtggcgtcagaacgccccgcggacaggagggggaggctgctgagcgtgaggtgcgagcagggagccaagggcggtggcgggctggacgtgtggctgagccgcggggcgatgctgggcttcgtcggagcggtggccgtggagctgaccaccgggaaaggcgtgcttcagaatgtgggattgaccgcgccgngcccggcactcgatccttcgcttacaagccctggcgcctggtgcaccagctggcagcttgagacttccgtgactctgactagtggatgttaatggttaaactgacacatatgattgctcacatgtattgatttgt

SEQ ID NO: 1162 - DNA, 474 bp, Zea mays
  Clone ID: LIB3115-022-P1-K1-C3
cgaccttttcgtgcggggcttcaagcggtacccggacctggcgtacccgggcggaaagcccatgtcggtgcacgccacgctgggggacggcagctactgggccacgcagcatgggaaggtgaaggtggactggtccgccgcgcccttcgccgtctcctaccgcggctactccgccgacgcctgcgtgcccgacggcgacagccgcccgctctcctgccccgccggcaccgaccgctggatgagccgccagctcgacgccgccgagtggggcaccgtcgcctgggccaggcagaactacatgcactacaactactgcgacgacggctggcgctttccgcagggctttcccgccgagtgctcccgcaactgattcattggtttgtttgttatccccgatccgttcgcgcggtcgtcggtcgtcccacacagtgcccttgccctgccccccgacgattttttgcttcctgttcttat

SEQ ID NO: 1163 - DNA, 469 bp, Zea mays
  Clone ID: LIB3115-022-P1-K1-C5
cccacgcgtccgctcggcaaaatggaccaggctgctgattcagggctggcttcctatgtcgccggccaagtcgaccgcaccctgagctggaaagacgtcaagtggttgcagaccatcaccacgctgccgatcctcgtcaagggagtgctcaccgctgaagacacgaggcttgcggtggcgaacggcgcggcggggatcatcgtgtcgaaccacggcgcgcggcagctggactacgtgccggcgaccatcagcgcgctggaggaggtcgtgaaggccgcccggggccagctccccgtgttcgtcgacggtggcgtccgccgcggcaccgacgtcttcaaggcgctcgcgctcggcgccgccggcgtattcgtcgggaggccggtggtgttctccctggcggcggcgggcgaggccggcgtgtccaacgtcctgcgcatgctgcgggacgagttcgagctcaccatggcgc

SEQ ID NO: 1164 - DNA, 435 bp, Zea mays
  unsure at all n locations
  Clone ID: LIB3115-022-P1-K1-C6
acaagccgctggcaaagatggcctcctccttggtcctcatcgcagcggccctgcttgcgctggcctcgtcgtggcagcaggcggtcgcctacgatcctagccccctccaggacttctgtgtcgcagacaagaactcgcctgttcgcgtcaacgggttcccttgcaaggacccgatggcggtcaccccggacgacttcttcaacgcggcgatgatcatcgacaagcggagggacacgaacaacaaggtggggtccaacgtcaccaacgtgaacgtggagagcttcccggggctgaacacgctgggcatctcgctggcgcgcatcgactacgcgccgctcggggtgaacccgccgnacattcacccacgcgctaccgagctgctcaccgtgctcgagggcaccctctaccttggtttggtaacgttcaaccccaacc

SEQ ID NO: 1165 - DNA, 392 bp, Zea mays
  Clone ID: LIB3115-022-P1-K1-C7
tagttctagaccgagctctgccccgcccaagttcactacccgacccgccgcgccgcagtctagaagcttctgccgggcggctgcggcccgcccatccgcaacccatggctgtcgtcgaagaagacgctgcggcgtctgcagatcccgccgccgcgtccgatcccgccgctggctccagcgaaaacgagatcacagtagaagaggcttctttcgtgcattctgaacctccccaggatggcagcgccccacccgtggtttcctctgacatggaggcccttcacgacaaggttaagaagcaaatcatcaaagaaggccatggcaggaaaccgctgaagttcgcgacctgctttgtgcactatagagcatgggttcaaggatcatcgcataaattt

SEQ ID NO: 1166 - DNA, 238 bp, Zea mays
  unsure at all n locations
  Clone ID: LIB3115-022-P1-K1-D1
gcacattagcgtcatgtacgcgaggatgcatttattttgaaggtgctcttacagacaactggttgagtggagttaccgtacagcgggagaccaccgataaaacaataattttgacnatacagaactagcagctcattagtttatgttagatgattataatcagtccccccaaccatgaataatgttggaatttttgacatctctgcgtccgagggttgtgcaaggtagcccattcttt

SEQ ID NO: 1167 - DNA, 438 bp, Zea mays
  Clone ID: LIB3115-022-P1-K1-D12
ccccactcgcctccgctcaccttgcctcgatcgttccaggagtaataaaacactaaaatggcgatggcggcggcgaggagagcgctcctggcccacctccgcgtgccggtggtccaccctgcagcggcggcagcgaccatccccgcggcagggcggctcctgtcgtcgacgacggagacaaaggggtcgttcctcgacaagggcgaggtcgctgaccgtgtcgtctccgtcgtcaagaacttccagaaggttgaaccctcaaaggtgacacctagtgctcattttcagaaggaccttggacttgatagcttggacactgtggagatcgtgatggcgtttgaggaagaattttcctttgagattcctgacaacgatgcagagaagattgactccatcaagacaagcggtgatttcattgcttcgcatccttaagccaaa

SEQ ID NO: 1168 - DNA, 413 bp, Zea mays
  Clone ID: LIB3115-022-P1-K1-D5
agctagctagccttccctacagcaactgcttacatacaacacttccatcttcccgagctcgtcttcgatcaattcccaagtcaggatagtaatataacaacaatggtggttcccgtcatcgacttctccaagctggacggcgctgagagggccgaaaccctggcgcagatcgccaatggctgcgaggagtggggattcttccagctcgtgaaccacggcatcccgctggagcttcttgagcgcgtcaagaaggtgagctccgactgctaccgcctccgggaggccgggttcaaggcgtcggagccggtgcgcacgctggaggcgctcgtcgactcggagcggcgcggcgaggttgtggcgcccgtggatgacctggactgggaggacattttctacattcacgacggatgcca

SEQ ID NO: 1169 - DNA, 186 bp, Zea mays
  unsure at all n locations
  Clone ID: LIB3115-022-P1-K1-D7
cccacgcgtccgcggacgcgtgggcgacggcgaccttcgcggcggcggcggcggcgggcggcgccgacgtgctgatcggcgggccgggagaacanaaataacgcgcgncnggnccccgcggcggcgcgccgcgggggggcggngggncccgngcggnctagcgggcccggcctccttcggagatct

SEQ ID NO: 1170 - DNA, 285 bp, Zea mays
  Clone ID: LIB3115-022-P1-K1-D9
aaactacaccatctaattactactacatttgtgaaaagaatggtggctcgttgtctgacaagatggatgaacttgctggctgggctcctggtatgcttatcttaggggcctctgggtaccggccagaaaaatcagagcaaattatgaatcttgcaaaagagcttgctaggacctgctataatttctaccaaaccactcccacgaagttggctggagaaaattattttttccatactggacaggacatgggtgtgggcacgtcgcggaacattttgagaacggaga

SEQ ID NO: 1171 - DNA, 353 bp, Zea mays
  Clone ID: LIB3115-022-P1-K1-E12
cccacgcgtccggcttctcctccccctcttaccaagtcctcctcgggttagggttccttagggttttgtggaggggcgatggcggcggctgatgtggagtaccgttgcttcgtcggcgggcttgcctgggccaccagcaacgagtcgctggagaatgccttcgcctcctacggcgagatcctcgactccaaggtcatcaccgaccgggagacggggaggtcccgcggcttcggcttcgttaccttctcctccgagaactccatgctcgacgctatcgagaacatgaacggcaaggagctcgactgccgttacatcaccgtttaccaggcccagtcccgtggctgtggctgtgg

SEQ ID NO: 1172 - DNA, 133 bp, Zea mays
  Clone ID: LIB3115-022-P1-K1-E3
gatcctcgccgcaggccccaacttctgaactaaagcattgtgatccggatgaataaaacgatggcgtgcgtgcttgggtgcgtgtgaagatgattacgacgactacgactaaaaaaaagggttggatcgatga

SEQ ID NO: 1173 - DNA, 315 bp, Zea mays
  Clone ID: LIB3115-022-P1-K1-E4
cccacgcgtccgaacgcacacatttggaatagtgactgatatttttcttgttgacggttgtgtttatatgagaaaatacactatcaggatacacgtgtttacgtgagaaaaaaaaaaaaaaaaaaaaaaaaaaaaaaaaaaaaaaaaaaaaaaaaaaaatgttaaaaaaaaaaaaaaaaaaaaaaaaaaaaaaaaatttatataaaaaaaaaaataaaactgatggccttttttttatataataaaaatatatataagaaggggggggtttttaaattgtttattattttttattatacataaattatttctttt

SEQ ID NO: 1174 - DNA, 435 bp, Zea mays
  Clone ID: LIB3115-022-P1-K1-E8
cccacgcgtccggttgcctcataatttctagtttttcgatatctgacaatgccctgtccgccgcggaatgtcacgccaccggacaccgacatctactccattccgagggttcttgccccgatgccgtagaagtacgcgaggtgcacgaagaaaaactttggccgttaccacgtgagcgagccaccagttgagcatttgcgcgattcactgtacaagacagagagggatgtcatgaaggtgattagtccagctatgtttggtagtgaagggcgatgtccagagagtaagaatgaggcgacacagtatggactcgatatgactgagcaataatatcttgagcattcgattccatggatagctgccaatgatgttgtacatttatattagaccccttcagctaccttgtcgatgcatgaacaagaagacatgttagac

SEQ ID NO: 1175 - DNA, 398 bp, Zea mays
  Clone ID: LIB3115-022-P1-K1-E9
cccaaaccctagccaaggaccacgttgccctatcaatgaccgccaccgaagaagcgcttgggggcttcaccaacacacggggggaacccaagacctttttcccgaatttcccgcgcgcccagaccgcatttgtaaagggcttaccaccggattggagaagttctatcaccagagcgatccacagaaagagaacttgtgcctttattgtttgccaaataagacttgtgaggtcactcttccagctgaagaagtaccttctgagcttccagaaccagcactggggataaactttgcccgtgatggaatggtctaaaaagactggttgtctttagttgcagttcatagtgatgcatggctcctgtctgttgcattctactttggagcttcgtttggatttg

SEQ ID NO: 1176 - DNA, 264 bp, Zea mays
  Clone ID: LIB3115-022-P1-K1-F10
cccacgcgtccgattgagtccagtttagctttttcatttttttactttatgtttaccagctattatatatttttgtaagaagaggttagttctacagaaatagaaaagcaaaaaagagttgcatacagtggcgaattcgctggactgatatagcaggcttgagatgttagtggtacatgggtatagtagtaattgagggactaggaggatgtgattttttattagttctgaagcttttggaccttgcttccggacaaggctggc

SEQ ID NO: 1177 - DNA, 335 bp, Zea mays
  Clone ID: LIB3115-022-P1-K1-F11
tgaacgcctactcccggctgctggcgcggcgtctggaggcgcgcggcgtgagcgtggactggttctgccccgggttcaggcgcgcggacatgaccaggggctgggggaagcgcaccgccggcgaggcggccgacgtctgggcgcggctcgcgctgctgccgcccaccgagctccccacggggaccttcttcaagtggcgcacgccgcagctatactctaagctgtgactggctagctgagctgtcgtccgtcggccggggcgtacagcattttggtccggctggtgtagccgttcctacttcttctgcttactagttctagcaagtataaacaac

SEQ ID NO: 1178 - DNA, 388 bp, Zea mays
  Clone ID: LIB3115-022-P1-K1-F12
gcaggaagctgctgctgctgctgctgcgggtgcggcggcgggaggcgaggcgtccgagcctcacggcaccgccgccgatggtgccgccgtggcgcggcgcgcgtgcacgtacacggtgcagatcaagacgagctgcgcgtccccgcggagctccgcggacgcggtgagcctcgcgttcggggacgcgtaccgcaacgaggtgtatgcggcgacggtgacgccgcggcgcgggttcgagcgctgcgccacggacacgttccgcgtcgccgggccctgcggctacggcgtctgctacctctacctgcgccggtcgggccgcgcggccgggtggacgcccgagtgggtcaaggtgtacgagccggcgttcggcgcgcccttcaccttttac

SEQ ID NO: 1179 - DNA, 337 bp, Zea mays
  Clone ID: LIB3115-022-P1-K1-F2
ctagcaacatagaaagcacaatagtgtaccaacaatggcagccaaaatattttgcttccttatgctccttggtctttctgcaagtgttgctaccgcgaccattttcccacaatgctcacaagctcctatagcttcccttcttcccccatacctatcaccagcggtgtcttcagtatatgaaaacccaattgttcaaccctacaggatccaacaggcaatcgcaacaagcatcttaccattatcacccttgttcctccaacaaccgtcaggcctaatacagcagttacctttggtgcatttggtggcacaaaacattagggcacaacaactacaacaa

SEQ ID NO: 1180 - DNA, 452 bp, Zea mays
  Clone ID: LIB3115-022-P1-K1-F5
cagcaacagctaagcctctcccacaagacagcaacatggctgaggaggaggccaagaaggtggaggtggaggtcaccaaggagcccgaggcggcggcgaaggaggacgtagccgatgacaaggccgtcatccccgcgaccgacccgccgtcgtcgccgccgccggccgacgactccaaggccctggccatcgtcgagaaagttgcagatgaacctgctcccgagaagcctgcccctgcgaagcaagggggctccaatgacagggatctcgctcttgcaagggtggaaacagagaagaggaactctttgatcaaagcttgggaagagaatgagaagacaaaagctgagaacaaggctgctaagaaagtatccgctattctttcatgggaaaacacatagaaagcaaacatagaagctgaactgaagaagattgaggaacaactggaaaagaag

SEQ ID NO: 1181 - DNA, 323 bp, Zea mays
  unsure at all n locations
  Clone ID: LIB3115-022-P1-K1-F6
cccacgcgtccggtctcggtatatactaatgcatggttttgctttagtgtgtcttgttgtggctgctagcattaggtgataaaggcgtgggtgaccaatgaagttgggcagcttttttagtgtcctcagcatatctgatagagaggtttgctaaagaggtttcttccacgatcctacagactaccagtgctaccaaggcaaacattagccaccagacatgacatgcttattccttatagtctggtgcccatcttgtccaaacataatctagaagagtgtacaaccactaatgaccttgtgtcacgttcatgctctggccttnt

SEQ ID NO: 1182 - DNA, 391 bp, Zea mays
  Clone ID: LIB3115-022-P1-K1-F7
ggaacaagaaagcacgtggtatcctcgcgatggccaaggttgcagctccaaatatggccctgaaggtgcttgacatggcgatgcaagttcacggcgcagctggtgtctcgtctgacacggtcttgtcgcacctatgggcaacggctaggacactgcggattgcagacggccccgacgaggtccatctcgggacaatcgccaagctggaactgcggagggctaggttgtaactcgagggcgatgtacagctcgcccgtcttgcgaatgaataaagaaggaacatcacccgtcgtcatttaacgtccatgtgaatacttagatgaataaataaatcctactttcagtagcagttactcttattttcaataaaccatatataatatcaatcttt

SEQ ID NO: 1183 - DNA, 262 bp, Zea mays
  Clone ID: LIB3115-022-P1-K1-F8
cccacgcgtccgcgcagagtttccacattgtagtaccatggaccgcggcatcaagaggagcgtcgcggcagcgggcggcggcgcgccaccgcccaaggtgtaccgcgtggagcccagggactttcgggagctcgtgcagaggctcacgggcgccggcacgcccgccgccgtcgtcgcggggctggtgccggcgcaccggaaggcgacgcttacgccggccatggccgttgagagcaagcgcgcacaggccgcggcggtcgtg

SEQ ID NO: 1184 - DNA, 368 bp, Zea mays
  Clone ID: LIB3115-022-P1-K1-G10
caccaccagctgccattgccatctactgacctgtgacctccgcatttccaaacagcccgagcgagctagagctagcagagcggcaggcacctccctcctcaaggaacatggcccgcacgcagcagttggcagtagtgccgaccgccgtggtggccttggtgctgctggcggcggcgacctcggaggcggccatcagctgcgggcaggtggcgtcggccatcgcgccctgcatctcctacgcgcgcggccagggctcggggccctccgccggctgctgcagcggcgtcaggagccttaacaacgcctgccgcaccaccgtcgaccggcgggccggctgcaactgcctcaagaacgccgccgccggcgtc

SEQ ID NO: 1185 - DNA, 405 bp, Zea mays
  unsure at all n locations
  Clone ID: LIB3115-022-P1-K1-G12
gaagtacggcgccaccgggtggctcgtcaacaccggctggtctggtggcaggtacggcgtgggcaagaggatcaggctgccctgcaccagaaagatcatcgacgccatccactccggcgagctcctcaccgccaactaccagaagaccgaggtgtttggcctggagatccccactgagatcaacggcgtgccgtcggaaatcctcgacccgatcaacacctggacggacaaggccgcgtacaaggagaatctcctgaggctcggcgggctcttcaagaagaacttcgaggtgttcgccagctacaagatcggggacgacagcagcctgactgacgagatcctcgccgcaggccccaacttctgaactaaagcaatggatccggatgaataaaacnattgtgtgtg

SEQ ID NO: 1186 - DNA, 447 bp, Zea mays
  Clone ID: LIB3115-022-P1-K1-G2
gcaacatagaaagtggaatccagtagcaacaacagagcaacaatggcgaccaagatattttccctccttatgctccttgctctttctgcatgtgttgctaacgcgacaattttccctcaatgctcacaagctcctatagcttcccttcttcccccataccttccatcaatgatagcttcagtatgtgaaaacccagctcttcagccctataggctccaacaagcaatcgcagcaagcaacatacctttatcacccttgttgtttcaacaatcgccagccctatctttggtgcagtcattggtacaaaccatcagggcacagcagctgcagcaactcgtgctacctgtgatcaaccaagtagctctggcaaacctttctccctactctcagcaacaacaatttcttccattcaaccaactgtctacactgaaccctgctgcttatttg

SEQ ID NO: 1187 - DNA, 305 bp, Zea mays
  Clone ID: LIB3115-022-P1-K1-G5
gacgacgacggcatccaacaacctggcgggcgtgtggctcggcgagctctcgtcggcgctgcatgggacgtggcaggcggtgggcgtggccgccacccacgggctcggcgaggacgacgacccgcggctgccgtgccagcagcagcagaggccgtggcgaggcgacgacaggagcagcagcaacaacaaggcgttgcgaggagccgcggcggccgggacggacaggcgggagggggacgtctctatggtgctgcggcgccatgtccgacaccactctttatctccttcttgaccggtttgcgccc

SEQ ID NO: 1188 - DNA, 166 bp, Zea mays
  Clone ID: LIB3115-022-P1-K1-G6
acactaacgaacgaactcttgctcctttcactatctagctgaggtcgaccatatcgggtgtgcttaacagcacaaagagtccggcacaaaaaaccactctttttttttttcccccccctatctttctccacttttactcccatcacctcactactattttcatact

SEQ ID NO: 1189 - DNA, 420 bp, Zea mays
  unsure at all n locations
  Clone ID: LIB3115-022-P1-K1-H1
cccacgcgtncggctcgctcgacgcaggccacgcgcacgcccagctctgctctttgcgtcgtcttccaactgctcggtctcgccctagcgctgagcgccttgcaccgncagccacgccttcctggccatcatggcgtcactatttcctgttgcgccgcgacatcgtcgagctcgggtgcttagcgtcgaagtcgtcgcgccgttgtcgctctggcttccctgtcctcgcacggggtttggtggtcgtgtccacatccgactccgaggcatcaacgtccgcatccccggtatcgtcatcgtttcagcagccttgtcacaccttgcgttcacgccggaagacgaaagggaagcaccagtgccacgctcgtcaagtattggtgatatgcgcaaggcggacaacgtcgtcgatttcgtagtttc

SEQ ID NO: 1190 - DNA, 407 bp, Zea mays
  unsure at all n locations
  Clone ID: LIB3115-022-P1-K1-H10
cggacgcgtgggcaaaacaaagctctggttcctttaagcgacgacgtcgatgaactgaatttcagactgaaaggtgcgaatcagcgcggacgccggttgctgggcaagtgatatggaaccagaattcgggcagtttggagaccgtcgcctcgactgcaggattttaagaaccttgttgtttacatgttttagagcaaactagaaacataggcgctgtcgcgcccttcagggtgaatcagcccgtgttctttggagtgaatcaggccacacatgttgtattagtgagagaatgatgatctattttgtgtcattatggatttcatagattattttccctgaactgcatttgtttcaataacataggagggaactttccttgaaaaaaataanttagaaaattttttttt

SEQ ID NO: 1191 - DNA, 254 bp, Zea mays
  Clone ID: LIB3115-022-P1-K1-H11
cacgacacgaaccgagcaagaaccgtacgagtcgagcccagcagcaggatggcggcggcgagcgggaaggcgccgtcgctggtggtggcggcgagcatgggcgcggtggaggcgctcaaggaccatgcgggcctgtgccgctgggactacgcgctgcgctctatctaccaccgtgccgtcggcacgccatggatccgcgcgctgttcgccatgctttcggactccttttttgtgcctgctgaatactttctttt

SEQ ID NO: 1192 - DNA, 438 bp, Zea mays
  Clone ID: LIB3115-022-P1-K1-H12
gtagaggagcagcaggtgcaccaaaaggatggcagcgccaggctccctgcgacttctccaggccccgtccttcgctgcggccgagtgccagccggtgggtggccgggcatccgcgcggcgagcgccacggccactgttcgccgtgcgcgcctcggctgctgacgccgccaacagggatgccgtgctcaaggccttccgcgagaacagggctctcaagataatttccggtcttcagaactttgacaggagcagtgttgcatctgttgtcacagctgcagataagggaggtgcaacacatgttgacatagcatgtgacaaggacttagtaaagcttgccatggatcttaccaaccttccgatctgtgtctcatctgtagatccttcagcgttccattctgcagtacaagccggagctaaaatgggtgagattggaaacta

SEQ ID NO: 1193 - DNA, 378 bp, Zea mays
  Clone ID: LIB3115-022-P1-K1-H2
gtcaaatttcatgggcaagatgggcttttcctgatacacagcattttgtcagaccgctagactttttcctagcgcatgagtgcagttgtcgttgagattgccagccttgtggaaggagattttgtaagtttacagcaatattgtagagggcaagttcatcgtacagttcctccaacggagatgcagattatagttgctaacaaaaaaaaggatagaaatgtagacttgtccgcgtacttttgacttcaaatttatcagcatgactgccgcttaccacttatgaatgaaaaatatgtatttggccattcatacaaccgccgctggaagaaagacatgcacgctattgtactgttttgttttacaaaataaataaatagc

SEQ ID NO: 1194 - DNA, 413 bp, Zea mays
  Clone ID: LIB3115-022-P1-K1-H5
aagcaaggcttcccaatgaagcaaggagttttgacttctggtcgtgttcgtcttctgctccatagggggactccctgcttccgtggttatggcaggcgtaatggtgagcgcaggaggaagtctgtccgtggttgcatcgtgagccaagacctatctgttatcaacttggtgattgtgaagaagggtgagaatgatctgcctggtctgactgacactgagaagccaaggatgaggggtcccaagagggcctccaagatcagaaagctgttcaaccttaacaaggatgatgatgtacgcaagtacgtgaacacataccgcaggacattcactaccaagaacggcaagaaggtcagcaaggcacctaagatccaacggcttgtgacacccttgacccttcagaggaagcgtgctag

SEQ ID NO: 1195 - DNA, 201 bp, Zea mays
  Clone ID: LIB3115-022-P1-K1-H6
cgtccgcagcacaatggacgccgccgtctccctctccctgcccctgcaccaccacgcccacggcccgcttccgctcccgcacgcggcgccccaccaccttcactgcgctgtcccgctcaggcaccacgccacctccgcgtccggcgtaaccgcgccgccgtccaagcctgacgttcaggctcctccagcggctcgcctgag

SEQ ID NO: 1196 - DNA, 422 bp, Zea mays
  Clone ID: LIB3115-022-P1-K1-H8
gctgatgccaatggtgatgtcactgcagttaatctaaaggatggcacagtacttgaagccgatattgttgttgtcggtgttggaggcagaccattgactactctcttcaagggtcaagttgctgaggagaagggtggaatcaagactgacgcttcctttgaaacaagcgttcctggagtatatgccattggtgatgtggctaccttccctttgaagatgtacaatgagttgaggagagtggaacatgttgaccattctagaaagtctgcagagcaggctgtaaaggcgatcaagggcaaagagtccggtgaaccagttccggagtatgactacctgccatacttctactcccgatcattcgacctggcgtggcaattctacggcgacaacgtgggcgaaaccattctgtttggggacagtga

SEQ ID NO: 1197 - DNA, 464 bp, Zea mays
  Clone ID: LIB3115-022-P1-K1-H9
aagaagaccagttcccctctcctgatcgtcctgttcctcacagcagcagccatggcggccgagccggagaagcaggcggcccgcgcggcacaggagacggccgtgcacatcgtgtacgttgaccgccccgaggacgccgaccctgaggagttccacatccgcaccctcacccccgtcctcggcagcgaacagaaggccagggacgcagtgctctaccactacaagaacgccgccagcggcttctccgcgaagctcaccccccagcaggtcaaggatctcaaggagcaaccaggtgttctccaggttgtgccgagccagacttaccagctacatggtcctgggtctggcactcaccagggcacgacacacaccttgggccttatgtgaaggcgtatgagaatcaagaagattgtgtttagtatggctgtatggcacaggtctgacgaatgtgtatagtacagtac

SEQ ID NO: 1198 - DNA, 281 bp, Zea mays
  Clone ID: LIB3115-023-P1-K1-A12
gcttgcactcaaaagattagttgacatcagcatgggcgtgctggcccccttatcggagcagttgacaaagccactcccacatgcaatagtacttgtcaacctcgacgaattgtcaagtggtgcacacaaacttttgccagaaggcactagactagctgtcactcttcgtggtgatgaatcatacgagcagctagatattcttaaggatgttgatgatataacaatgttgttacataatgttccatatgttgaggagaagacaggcagggtgcatgctgcta

SEQ ID NO: 1199 - DNA, 259 bp, Zea mays
  Clone ID: LIB3115-023-P1-K1-A2
cggcgcctttggcgtctccgcgtccgtcaccgccctcgcgcgtgtgccggttctcgccggtaggcggcgcaggtggagcacgctcgtggtctgcgcggcccccgacgaggagaagattaccaagcggtcgcccctcgatttccccatcgaatgggagagaccaaagcctgggaggagacctgatatcttccctaagttcagcccaatgaagacaccattaccgcatccgttaccagctgatgatcctctggatgatgat

SEQ ID NO: 1200 - DNA, 258 bp, Zea mays
  Clone ID: LIB3115-023-P1-K1-A8
ggaatggactgatgcaatatcaggcttcagcatctagatgagcttgtaggtcatcactcggtgctttatgccatcattatgtacagagaatatacatgtaacatggtgaggatagatcctcaaaatatgtgcaggactttccaaatttgtaagacagattttggactgaaagacagctggttctgtactgtcaaaacactgaaagacagagtcgtattactcctcaacatttcttgcaagccagaaccctttcgggcc

SEQ ID NO: 1201 - DNA, 208 bp, Zea mays
  Clone ID: LIB3115-023-P1-K1-A9
ccggtccaagatgtttgccttcggcagcggcactctacagggccatctgctggccggagaggagcggttctcggtacaggtggacgaggaggagagggtgtggtacgaggtgctttctttctcgaagccggcgcacgtcctggcgacgctgtgctacccgtatgtgcagctgaggcagaagcatttcgcgcagcagtcgggacaggcg

SEQ ID NO: 1202 - DNA, 187 bp, Zea mays
  Clone ID: LIB3115-023-P1-K1-B1
acgctgcattcggatctgtcaggtgaaatgcggagtgagaggagacaccagaccagcttgcaacgcagtcggaatggtcgaccgtacgatcctagtgattgaccacctctatagacgaccagtttatgtgcgcacgaaggaatgcagtatagattatccagagaatgggcctcttccacctgacgct

SEQ ID NO: 1203 - DNA, 216 bp, Zea mays
  Clone ID: LIB3115-023-P1-K1-B2
cggaggagaatatgcggtacttcaatgtcatgatccttggccccgcgcagtcaccctatgaaggtggagttttcaagcttgaactattcttgcctgaggaatatccaatggctgccccaaaagttagatttctcacaaaaatttaccatcctaatattgacaaggctggtaggatatgcctcgacattcttaaggacaaatggagtccagctcttc

SEQ ID NO: 1204 - DNA, 250 bp, Zea mays
  unsure at all n locations
  Clone ID: LIB3115-023-P1-K1-B4
ttttgcaattttttcgcatacttttctaaattaaattttttcccacgattttttgaccaaaaatttttnnnggtccaggatatggttctacttagcccagtctcggcgaagacttctatagcgctgcgttataactatccgacaggtttcatcacgatgaaattgtcgctttataatttccctgttaaatcattaaatttggtaatgtatcagtgttaaatgtaaataaaactaagacaaaatttcaccg

SEQ ID NO: 1205 - DNA, 249 bp, Zea mays
  unsure at all n locations
  Clone ID: LIB3115-023-P1-K1-B7
ttttttnnnnttcttttagtggttgcaagagctgataatgagtatctgtttgccttgcacaatgttagttggccatttttctgtgaggtacctctgtgcaagtgaatactgaattggaggagaatcttaggtagggaatatagataacaggcgctccatatataaacttcgttattaggtgctgtatggactatggttcacatatttgtaacgtgaacgggaaccgataatgttaaaacatgtttgttt

SEQ ID NO: 1206 - DNA, 283 bp, Zea mays
  unsure at all n locations
  Clone ID: LIB3115-023-P1-K1-B8
aaatatttttttttttccaaaaaaatttgttgtttagcagaaaaatataaaaatttttttttttcagccaacaaattatttttccagcaaaaattnttttnnggccgggaagcagctggaggatggccgcacccttgcggactataacatccaaaaggagtctacgctccacctcgtgctcaggctccgcggtggcatcattgagccctcgctgcaggcgctcgctcgcaagtacaaccaggacaagatgatctgccgcaaatgctatgcacggctgcaccct

SEQ ID NO: 1207 - DNA, 209 bp, Zea mays
  Clone ID: LIB3115-023-P1-K1-C1
cggcttcggcttcgtcaccttctccacggaggaggcgatgcggaacgccatcgagggcatgaacggcaaggagctggacggccgcaacatcaccgtcaacgaggcccagtcccgcggcggccgtggaggcggcggcggcggcgggtaccgtggtggccgtggaggcggcggctactgcggtggcgggcgccgtgatggcggcggcggct

SEQ ID NO: 1208 - DNA, 331 bp, Zea mays
  unsure at all n locations
  Clone ID: LIB3115-023-P1-K1-C11
cgnnccagcatgagtcatcacatacacctcaagggtccgctcataacaactcaaatgaagcgactcatgctgcaagtgcatcagaacgccgtagaaatgctgcccgaaatgctgtgcttgctaatcctaggatcaatgcgctgtttgaccacttcaagatggccctggattgtttctttgctgtctggtttgttgttggaaacgtgtggatatttggtggccggtcttctgctgctgatgcaccgaacttgtacaggtaaaatgtgaactgctcttcaattgaagagatgtcactatgtcagcttctttaacctgctgctgactttctact

SEQ ID NO: 1209 - DNA, 212 bp, Zea mays
  Clone ID: LIB3115-023-P1-K1-C3
gatcatgtctagtacatttcttcttcttcgatgaaggtgcttgttgctcatcaaggggagtgggaagtagcagcacatccaccttcattctcataataatgctgcccagacgcagccatgatttaattagaaacttcttgtcaaaggatgtttgtttttaactagtcgtgcgcactgattaattcagttcatgttgttatggttgtcttccc

SEQ ID NO: 1210 - DNA, 190 bp, Zea mays
  Clone ID: LIB3115-023-P1-K1-C5
tcaggggggggaatcaggtgtagcttttgtaactgcaaaatgattgcagcaggtatacctgaagcctgagcttctgaggccctgtgcttggtagccgaaggagaggttacttgatgtgtgtgcttatagtcagtggcgagcggctactacaaggtgtcaaggttcacccatatggtcatctaaagcactg

SEQ ID NO: 1211 - DNA, 202 bp, Zea mays
  unsure at all n locations
  Clone ID: LIB3115-023-P1-K1-C7
ggcggcgcccccgacgcggcggtggtggagaagcacgcggagcagctcgccaaggtgctcgacgtgtacgaggcgcacctggcccgcaacaagtacctcgccggggacgagttcacgctcgccgacgccaaccacgcgtnctacctgctctacctcagcaagacccccaaggccgggctcgtcggcgcccgcccccacgtca

SEQ ID NO: 1212 - DNA, 181 bp, Zea mays
  Clone ID: LIB3115-023-P1-K1-C8
tgcgccgcagcctcagggaccccggcggcgtgctgcagagctgggaccccacgctcgtcaacccctgcacctggttccacgtcacctgcgaccgcgacaaccgcgtcacccgcctagatcttggtaatttgaacttatctggtcatctggtgcctgagcttgggaaattggagcatctgca

SEQ ID NO: 1213 - DNA, 240 bp, Zea mays
  Clone ID: LIB3115-023-P1-K1-C9
gaccttgtctctgttgacactctcatcgaggaccatctctgcgctgagccagtgagcgaatacgtccagagctgcgacattgtcgccttcaacaagatctaaatttccttgtgatggtggcaatggtggttggtgggcactgtaccagcctaatttataattttccatgagcatcttcaagagtttttctaaattatcatttggagtcatttacataaaaagcactttctatatcttttt

SEQ ID NO: 1214 - DNA, 130 bp, Zea mays
  Clone ID: LIB3115-023-P1-K1-D10
gcgcgctgccagcccacgccgggcctggacgcaggcgctgctccgccaggctcgcgcgcgcagggcggctgccaggtcctccaggggagccgtcctgctgcggagacgcgtagactgcgacggggaggct

SEQ ID NO: 1215 - DNA, 260 bp, Zea mays
  Clone ID: LIB3115-023-P1-K1-D11
gatcgtcgtccaactcaacggtcgcatcaaccaagaccggagtcatctctccccgattcaacattcaattgtctcaaattgaaaactgggtcaacttgttgctccccgcccgttcgttcggttacatcatcttgaccacctcggctggtatcatggaccacgaggaggctcgtcgcaagcacgttgccggaaagatcctcggattcgtctactaaactagtcaaatacccgtctgggttcctttcttggggttatctgag

SEQ ID NO: 1216 - DNA, 206 bp, Zea mays
  Clone ID: LIB3115-023-P1-K1-D2
gaaccccgaggcgatcatctcgggggcgtggcccgggaactgctccctcctcagctacgacgacctccgcgcctacctcgagtcgcaggagacggcggcccaggcagacgatcagcgcggcgtggcgctcctgagcgagaccatgtccacacccgtgctggtggccacagcagaccagaccctggaggacgtcgagtgccacttcg

SEQ ID NO: 1217 - DNA, 128 bp, Zea mays
  Clone ID: LIB3115-023-P1-K1-D4
tgtaactaatgtaaaaatgcgatggtcgttagatgctatgtcctcttaattaaggcggacctacatgcaagtaaggatgcaaataagggtattcagtatttaattgaatactcattattttttgcaaa

SEQ ID NO: 1218 - DNA, 335 bp, Zea mays
  unsure at all n locations
  Clone ID: LIB3115-023-P1-K1-D6
aagacattcacatactaccatccagagtcaagagggcttgatttctcaggattgatgaatgaaatcaagaatgctccagatggttcattctttttgcttcatgcatgtgctcataatcccaccggtgtagatcctacggaggaacaatggagagaaatatcccatcagttcaaggtgaaaaaacattttccattctttgacatggcataccaagggtttgccagtggtgatccagagagagatgccaaggcaatccgaattttccttgaagatggacaccaaattggatgtgctcagtcatacgcaaagaacatgggactntatggacaaagagc

SEQ ID NO: 1219 - DNA, 178 bp, Zea mays
  unsure at all n locations
  Clone ID: LIB3115-023-P1-K1-D7
agaagaagaaggggctgagaaaactcgcaagaaaagttccaaccgatcgtctacttaaattcgaacgggttttcaaagcacaaaaacgcatacatatgtctgttttcaaagcacaaagagttctagatgagattcgctggcgttactacgaggaaaccgntatgatactgaatctcat

SEQ ID NO: 1220 - DNA, 218 bp, Zea mays
  Clone ID: LIB3115-023-P1-K1-E10
gatgtcggtggcgtcgctcctctgcccctgcaacgacgcgcgcatcggccccgccgccaggctcctcaccgacggcacgcccgccgtctacagggactacacctacgccgagtactacgccaagttctggagcaggaacctggaccaggagcactgcctcgagctcttcaggaccccgacctcctaggagtaatttggatgcttctctttcattttag

SEQ ID NO: 1221 - DNA, 285 bp, Zea mays
  Clone ID: LIB3115-023-P1-K1-E12
gcggcgccggcgcggcggtccgtggcggcgcgcgcggagctgagcccgtcgctggtgatcagcctgagcacgggcgtgtcgctcatcctgggccgcttcgtcttctttcaacttccagcgggagaacgtggcgaagcacgtgcccgagcagaacggcaagacacactttgactcctgtcgacgagcgctccaaggagttctcgggcctgcttaaatccaacgaccccgtgggcttcaaccttctgagactcctcttctggggcttgctctgtcacatcgtcaact

SEQ ID NO: 1222 - DNA, 558 bp, Zea mays
  unsure at all n locations
  Clone ID: LIB3115-023-P1-K1-E4
cctccccctccttctttctcctctccccccccctcctctcttttttttcccccccccccctcttctttcctcctccctcccccctttctttcctctctccccccctttttcttcccccccccccccttttttttcctccccccccttttttttccccccttcccttttttttccccccctccccccctcttttttctcccctctttttcccccccttttcnnacagtactttccttttctttctctccctcctcctctctctcctcttctcctctcccctctcctctccctccctcccctttttttccccctcttctctctcctcttcctcccctcttctccctcttcccccctccctcctttcttctttttttttctcttcttttcccctcttctttctctcccttttctctccttacttcttcttcctctccccccttcccctccctcttccttcctttctctttcttctcctcccttttcttccctctcctctccataatcttcctctctcccctctccttttcctcccccctcttctccttncccttctctcct

SEQ ID NO: 1223 - DNA, 279 bp, Zea mays
  unsure at all n locations
  Clone ID: LIB3115-023-P1-K1-E5
ttctctgtttttcacactactataattttactattattttttttncccgaccgggagacggggaggtcccgcggcttcggcttcgttaccttctcctccgagaactccatgctcgacgctatcgagaacatgaacggcaaggagctcgacggccgtaacatcaccgttaaccaggcccagtcccgtggcggtggcggtggcggcggtggctaccgcggcggtcgcggcggcggcggcggttatggtggcgggcgccgtgacggcggttatggcggcggt

SEQ ID NO: 1224 - DNA, 209 bp, Zea mays
  Clone ID: LIB3115-023-P1-K1-E7
ctaccaccgctgacccttctgttcaacgaattctgccggaacagatttctgcctatctttgaagcatactctaccgagtcattgctaaagaaagatagagaagaacagagcaaaccagatatggcggagttcttcagtaatcttggaacagcttactgtgacccagctctgaaacctttccaacgggcttctaactccgacgaacgcac

SEQ ID NO: 1225 - DNA, 170 bp, Zea mays
  Clone ID: LIB3115-023-P1-K1-E8
gagtactgtgtacctcatatgtgcaaaaataatctctgaccatattttgaaatcagatgtcatgtattttgctgttttccccctccccctttttgaggtggtgtgcctcatatgtggaaaccttttagctgtaattaaaaatgttggatacagtaaatatttcacacaga

SEQ ID NO: 1226 - DNA, 166 bp, Zea mays
  Clone ID: LIB3115-023-P1-K1-E9
gcgtcgttcctctgcccctgcaacgacgcgcgcatcggccccgccgccaggctcctcaccgacggcacgcccgccgtctacagggactacacctacgccgagtactacgccaagatctggagcaggaacctggaccaggagcactgcctcgagctctttaggaccc

SEQ ID NO: 1227 - DNA, 160 bp, Zea mays
  unsure at all n locations
  Clone ID: LIB3115-023-P1-K1-F1
aaatttattttttaaaaaatattttttttatattaaattatttattanaatataaattttttattatatataaaatatttattttactatattttttttatatagatatatatttttttttagatttaatttttatttaattattaaattatttttaatt

SEQ ID NO: 1228 - DNA, 298 bp, Zea mays
  Clone ID: LIB3115-023-P1-K1-F11
ttcgtgacgctcaaggacggagcagcagccgacgggtcggacgaggcggcgctggccaacgacatcatgcgcttctgccgggagaggatgccggggtactgggtgcccaagtcggtcatcttcgggccgctgcccaagacggccacggggaagatcaagaagcacgagctgagggccagagccaaagagctcggccctgtgaagaagagcaggatgtgagagatctgggggccgacggcgatagcgtgtgatgccatggcaacaactcagaatcttgctccaagtcgcgcatataaaa

SEQ ID NO: 1229 - DNA, 189 bp, Zea mays
  unsure at all n locations
  Clone ID: LIB3115-023-P1-K1-F2
aaggacactntttttaggtcaagagattcgttgcgagatcacaaatcatattacaggtctgatggtatatctcagtatagaagatggaaatagcgatatttttttgtttataaactcccctggcgggtggctaatctcaggaatggcgatttttgatacgatgcaaacggtgacacctgatatatatac

SEQ ID NO: 1230 - DNA, 202 bp, Zea mays
  Clone ID: LIB3115-023-P1-K1-F4
gagaacttcaaattggttcacactggacctggagtggtcagcatggctaatgctggaccgaacaccaacggcagccagtttttcatttgcactgtcaagacgccttggttggatggaaggcatgtcgtgtttggccaggtcgtggaagggatggatattggaaggctgatcgagtcacaggagactgacaggggtgacccgc

SEQ ID NO: 1231 - DNA, 169 bp, Zea mays
  Clone ID: LIB3115-023-P1-K1-F5
gccaagaaggagatgcggatcctgatggtgggactcgacgccgccggaaagaccaccatcctctacaagctgaagctcggcgagatcgtcaccaccatccccaccatcggattcaatgttgaaactgtggagtacaagaacatcagcttcactgtctgggatgtcgggg

SEQ ID NO: 1232 - DNA, 179 bp, Zea mays
  Clone ID: LIB3115-023-P1-K1-F7
cgtctacgacatggtcaagaaccccggcagctacgggttcagctcggtgttccaggcgtgctgcggctcggggggcggcaagtacaactaccagaacagcgcgcggtgcggcatgtcgggcgcgtccgcgtgctccagcccggcgtcgcacctcagctgggacggcatccacctcaccg

SEQ ID NO: 1233 - DNA, 150 bp, Zea mays
  Clone ID: LIB3115-023-P1-K1-F9
tgtcagcctgtgctctgttctcaaagacatggattgaagtttctggttcatcagcaaaggatgttgctaagcagctcaaggaacaacaaatggtgatgccaggccatcgtgagtcaaacttgcagaaggaacttaaccgatacatcccca

SEQ ID NO: 1234 - DNA, 142 bp, Zea mays
  Clone ID: LIB3115-023-P1-K1-G11
gagaaacacacacaaacacccatcaggtgcatactgaatagattgtagtaagaacaactctaggccacatagcattcacgaattatattgtagtgtaaatgtagcagaacccataaaagagttcatgagtagaattgatacg

SEQ ID NO: 1235 - DNA, 263 bp, Zea mays
  Clone ID: LIB3115-023-P1-K1-G2
cgaagatctccaacagaggattatttgatctatcgtcgaccttttgccacgtgtttaggctttacagccagcttattattaggtttttttctccctttcgtttgaatattactggatgggtaaaagaggtcatgtatctaaattgtctcctcagggcttgttcggttctactccaatctatatggattgaggggattgagatggtttcaatcactagtaagtccaaatctctccaatccgtatcaatcccttccaatccatat

SEQ ID NO: 1236 - DNA, 75 bp, Zea mays
  Clone ID: LIB3115-023-P1-K1-G3
agcagtttgttgtaacaattaaatgaggcgccggatcctcacgccatcgaaagtttgaaacagcttggttgttgt

SEQ ID NO: 1237 - DNA, 231 bp, Zea mays
  Clone ID: LIB3115-023-P1-K1-G6
cgggggctgtcgattttgagaaaaccctggggtattggcaacaggacaagtggaatggttccttctctgttaagtggcacattgtcaaggacgtgcctaacaacattctcaaacacatcatcctagagaacaacgagaacaagcctgtcacgaacagccgcgacactcaagagatacacctagaacaaggccttcagatgctcaagatattcaaggagcatgtcagcaaga

SEQ ID NO: 1238 - DNA, 122 bp, Zea mays
  Clone ID: LIB3115-023-P1-K1-G8
aacgtggtgcatcagcatacctgctgctgccgccgccgccgccagttgtttgctgtggaaagctagatgcatgcgtgttgtaaaggaacctgaagcgttgcatcggtcatgattcatgcatg

SEQ ID NO: 1239 - DNA, 170 bp, Zea mays
  Clone ID: LIB3115-023-P1-K1-H10
tgagcgcatccaccgtgagaagaccaacggcgccactgttccgcttggcatccacccttccaacgttgtgatcaccagcctcaagctcgacgaggaccgcaagaagatcattgcccgcaagtctggttccaagaaggaggctgctgagaccaaggacaactaagcgcttc

SEQ ID NO: 1240 - DNA, 162 bp, Zea mays
  Clone ID: LIB3115-023-P1-K1-H11
caaaactagttgactcactgtcagagcaggacttccgcaagcatatgcctagacttcaaccagagaatattgtcaagaatgctaagatattcgagcatgtgaatgcaatggcagctaaaaaaggatgcacaccatcacagctagcattggcatgggttcacc

SEQ ID NO: 1241 - DNA, 321 bp, Zea mays
  unsure at all n locations
  Clone ID: LIB3115-023-P1-K1-H7
ccgccaataattttttgngngagaccacctatttccttccctgcgtcatgtggctcgcaatctacaagcccaagaggttcagcctctcctggttgaccaactggatgtgcatcattcttggggtgctcctgatgattctgtcgcccatcggagggctccggcaaataataatggacgcgaaaacctaccagttctactcgtgagctaccaccagccatgacttgtaagcacgattggagaaatctgtcaaagcctcaaccacgagtttttggttttggtttttgtcatgccaaacacatacatatacggactggtttttta

SEQ ID NO: 1242 - DNA, 388 bp, Zea mays
  Clone ID: LIB3115-024-P1-K1-A10
ggaagcttcaaagcccggaaggaaaggggtaatgggtatcgatgccgaagtatttgagggtagccctaactttcatcttgtggagataaagaagacgaatggcgacactctagagtatcaaaaggtcctgaaccaagaaatgaggcccgcactcaaggaaatagtgtgggcttggcaaggtgagcaatcaaagcaaaagcaggaacaacagtcgtgttaaaaacttatgagctagtgcaatacatctttttagccaatttccaatctttcgtgtatttgtgtagtttttactcttttattatccatttttgttttcccgtgtaatgccaacataaacttgtgttattttctgaggacaaatttatttcaaagatgtgtttacgctgtt

SEQ ID NO: 1243 - DNA, 419 bp, Zea mays
  unsure at all n locations
  Clone ID: LIB3115-024-P1-K1-A11
aaaaccgggccgacccacgcgaccgggaagctacaaaactttttttgaaagttttattgtccatcgaagccgaantattcgccggtctccctaacggacagctgggggggataaaaaaaacnaatggcgacactctagagtatcaaaaggtcctgaaccaagaaatgaggcccgcactcaatgaaatagtgtgggcttggcaaggtgagcaatcaaagcaaaagcaggaacaacagtcgtgttaaaaacttatgagctagtgcaatacatctttttagccaatttccaatctttcgtgtatttgagtagcttttactcttttattatccatttttgttttcccgtgtaatgccaacataaactagtgttattttctgaggacaaatttatctcaaagatgtgtttacgctgtttaaaaa

SEQ ID NO: 1244 - DNA, 421 bp, Zea mays
  Clone ID: LIB3115-024-P1-K1-A12
cccacgcgtccgcagcaatccacacaagcacttcgacgtcacacgggcgctgcgcacagacacaccaagcgtcggcaccaatggcttactaccaggaggtggactactgctcggaggaggtgaggtcggtggccccggccggcttcggccgccacggcggcggcgtccagcagcacgtcgtcaaggagaagttcgaggaggtcgacacggtctcacgcgccggcgccaaccaccaccaccaccatggtcaccacggcggccacggcttcgtggtgcgcgagaccagggtcgaagaggacatcaacacctgcaccggcgaggtccacgagcgcagggagagcttcctcgccagggctaactgagccgcccggcggccggcatccacgcccgttcgtgcttgcctgcgtgccttatgtatgtc

SEQ ID NO: 1245 - DNA, 273 bp, Zea mays
  Clone ID: LIB3115-024-P1-K1-A6
ccacccgtccgaaaaaaaaaaaaaaaaaaattaattaaaaaatttatttataaaaaaaaaaaaaaaaaaaaaaggtggggtttaaaaaacaaaaattgtcgaacaaaaaaaaaaaaaaataaaatttaataaaattaacttacattataacaacatataaaactataaaaacctccggccctttttaaattttcaaattttacttccctttctttccaatttaattttttttttttttgaacacaaaaataaaattcactccccccattttta

SEQ ID NO: 1246 - DNA, 394 bp, Zea mays
  Clone ID: LIB3115-024-P1-K1-A9
cggacgcgtgggtgtgcgtggagtggcttggcatagcgacgcacggcgcgccagaggctggacacggccctcgaggcgagcacgtgtgcgcccgggatcatgggcaatgaaaggcgagcggaacaacggaacgaatgacggaagagcgcgattagattccgtcggcgtccttgaacatgaacgtcacgtccttgcccgtgagcttgcggtacacggacgagaagctgtcgagcttgtactcgaggctcgtggcgtccttggagtcaaggaagcacttaacgagcttgctgccgtcggtggcgacgcgcacgcgcttgccggtgatctcggtggggaacacgaagtcctcgaggatcgagtcgtgcaccgccgttagggtgcgcgagcgcgggcg

SEQ ID NO: 1247 - DNA, 458 bp, Zea mays
  Clone ID: LIB3115-024-P1-K1-B12
actgaagaaactgacacacttgtatttgagcttcaacaacttcaaaggcgagattccagtggggcttgcaaacctgccagaactccgttacctttatcttcacgagaaccgcttcaccgggcgaatcccccctgaacttggaacgctaaagaacctacgtcacctcgacgtgggcaacaaccacctgacaggcactctcagggattttatcggcaacgggaacggcttcccgtccctgagaaatctataccttaacaacaatgagctgactggtgtgctgccagaccagattgcaaacctgacaaaccttgagattctgcacttgtccaataacaagatgatcgggtcgatatcgcctaagctagttcacattccaaggctgatctacttgtacttggacaataacaacttcattgggaggataccggaagggttgtacaggcatccatttctgaagg

SEQ ID NO: 1248 - DNA, 310 bp, Zea mays
  Clone ID: LIB3115-024-P1-K1-B3
gcgcggcgtggtgggcgttcgggacttcctctttttcgacggcttctgcgggtgggagggcgggcagctgcgcgacgaggggcgcgcggggctctggcatgtcgcggcctgcagcgccgccgtgctggagctcgccaccgtcgtcaagggcgggctctgggaggaggtgcaggggctcgtcggggagaggaggctctggtgacgacctcactctcactgctgccgtggggcgttcaatcttcaatgtaattattatgagatcgatcgatcgatcgacttgcaagtcaaaccaatgcatccatccatttcg

SEQ ID NO: 1249 - DNA, 340 bp, Zea mays
  Clone ID: LIB3115-024-P1-K1-B7
cgcccacgcgtggcggtaaattcgtcgggtgcaggttgaaaggatgcatgcttgtagctaccctgcatcgcttgatctgtgcagcagggaatcaggttttaaaatctgtctgctatatcgtttgcagtttgtataggctaattaaaattaagtcaacagagcgtaaatgaccatctctgctccactcaactcaactgtagcaaggagcatatgtttagcatagacgtttgactgaatggccctgcccaagaagcaaattcagctcttgggcatggtctgtatcatcctgacattctgttggatggaactgcaattgtgcaaccggcatctcttgacaccg

SEQ ID NO: 1250 - DNA, 344 bp, Zea mays
  Clone ID: LIB3115-024-P1-K1-B8
tggacaggtactacctgtactacgacgagccaaaaacggtgttccctgacgaggcgtgctatgaccttgtcagctagttctgcgaggctccgtaccaggacggcgtttgcaaggagctggctcacgcctgaagaccctgatccatccatttctgtccaccacactatgtacatatgtgtagcagatagtttacatgtacatgttagatccctgagagctggagaagctagctagcgtgcttacagaataacagcagccaagcaaagccaagggtgtgtatataataagcatgcctatggttgtgtcaaatgcgaatgtatgtatagttaaactaaaatgaaatg

SEQ ID NO: 1251 - DNA, 233 bp, Zea mays
  unsure at all n locations
  Clone ID: LIB3115-024-P1-K1-B9
taattaaaaaaaaaaaaaaaaaaaggccgcnaaaaaaagggggggggaaaaaaaaaaannaaaaanaaaaaaaaaaaaaaacaaaaaaacaaaaaangggaagaaaaaaaaaacaaaaaacaaaaaaaaaaaaaaaaaaaaaaaaaaaaaaaaaaagagaaaaaaaaaaaaaaaaaaaaaaaaaagaaaaaaaaagaaaaaagaaaaaaaaaaaaaaaaaaacagaagccaag

SEQ ID NO: 1252 - DNA, 430 bp, Zea mays
  Clone ID: LIB3115-024-P1-K1-C1
atttgcttcaccacaccttcatcagagagccgagacgacacgctcgagacccagcaaggcaagaagaacacgagagagacaggaggcaccaggcagggatcaatcatccgtccatggagaacctaaaggagcagcggggccacgacgcggcgggcgccaacgcctggatgacggtgccggcgttcggggactgggacacgaagaacggcgcgctgccggactactccatggacttctccaagatccgcgagatgcgcaagcagaacaagaaggagctctcccgcgccagcctcggcggcgacgacgacctcctcgcccacgcccagaagccgcagcccagtatcgccccgcccaagctcggccgcccccgccccggccccgccgacgaccactccccaacgggagggaagaagttcctgagctacttccg

SEQ ID NO: 1253 - DNA, 455 bp, Zea mays
  Clone ID: LIB3115-024-P1-K1-C10
ggctgaccccaagaagtaccgcaagatgaatgtatgaggcttgtcggcgtctctgaggagaccggcacgggtgtcaagaggctctaccagatgcaggagaccggcgccctcctcttccctgccattaacgtcaacgattccgtcaccaagagcaagtttgacaacctgtatggttgccgccactcgctccctgatggtctgatgagggccactgacgttatgatcgccggaaaggttgccgtggtctgcggatacggtgatgtcggcaagggttgtgctgctgcactcaagcaggctggtgcccgtgtcattgtgaccgagatcgaccccatctgtgccctccaggctctgatggagggtcttcaggtccttcccttggaggacgttgtctctgaagctgacatcttcgtgaccaccactggcaacaaggatatcatcatggttgaccacatgag

SEQ ID NO: 1254 - DNA, 418 bp, Zea mays
  Clone ID: LIB3115-024-P1-K1-C2
gtccttgttgatcggaagggcaccatcaagatctttgacttcggcctcagcgctctacctgaacatctcgggagtgacggacttctgcacacaacatgtggcagccccaactacatagctcctgaggttctgcaaaacagaggctatgacggctccttgtcagatctctggtcgtgtggggtgatcctctacgtgatgcttgttggctgccttcccttcgacgacaggaacctcgtcgttctttatcagaagattttcaagggagactgtcagatccccaagtggctttcgcctgccgcgcaggaccttctcaagaggatcctccaaccgaatccgatgaagaggatcaacgtcgcggggatcagggagcacgagtggttcaagaaggactacgtgcctgctgttccgcacgatgatg

SEQ ID NO: 1255 - DNA, 259 bp, Zea mays
  Clone ID: LIB3115-024-P1-K1-C3
ccttcttcaagttattggtatcttcaattatgactgtgtatactctgcgaaatgctgaatacagtgtttcttttgaaagaaaggtaggactgcctgaagaaggtgtagaatgcctaaaaagtgatgtcactgaagataatcatcataacatcaatttgggaagacctgtcactatttttagattatccgaagaagacatgcctcaggaccctggaaaaaccgatgaagcatcattttatgaaaatatgggagaagagct

SEQ ID NO: 1256 - DNA, 107 bp, Zea mays
  Clone ID: LIB3115-024-P1-K1-C6
atttacattctcctaactccttcaacttaccgttctgtccataccaaacaatcaaccttatccaaagctttcatataaccaccaccaccattccatccccctttaat

SEQ ID NO: 1257 - DNA, 226 bp, Zea mays
  Clone ID: LIB3115-024-P1-K1-C8
gactgtgcaaagcgagctattcctgcttctctcaagcagagagtcatactgaatttttgagggtccgtaacaagaaagcgcatggcaacttaaaaggccttgtctacttcattaacaccttctattccctggggtcaggcattaaggccaggtaacggcttccggcattcccaaagtcctaaacactattggtattcttcaatcaacggtgtactttcaggaccac

SEQ ID NO: 1258 - DNA, 450 bp, Zea mays
  Clone ID: LIB3115-024-P1-K1-C9
gtcatcgagttctgcttcgtggaggagcacctgtgcttccagactctgcagcgcttcacgggcgccacgctggagcacggcatgcacccgccggtctctcccaagcccgagtggcgcaagctcatggacgagatggcggtcgtggccacggaggagtaccgctcggtcgtcgtcaaggagccgcgcttcgtcgagtacttcagatcggctacaccggagaccgagtacgggaggatgaacatcggcagccggccagccaagaggaggcccggcggcggcatcacgaccctgcgcgccatcccctggatcttctcgtggactcagaccaggttccaccttcccgtgtggctgggagtcggcgccgccttcaagttcgccatcgacaaggacgtcaggaacttccaggtcctcaaagagatgtacaacgagtggccattctttagggtcacc

SEQ ID NO: 1259 - DNA, 403 bp, Zea mays
  unsure at all n locations
  Clone ID: LIB3115-024-P1-K1-D10
cccgggtcggacccaacgcgtccggtgatgcttgctgttcttatgtcttcaagaagtaagtatcctacagatnntaccagttgtaaacccagggacgagaaaagtaatgaggtatgaggtacgccgcgccctgatgttcttcgcgtggttggaaggcatgtntgaagatttagtgagcgcagataccccatgcttcggaagnccacagcctcttgtaaatatgtagatgtgcccgggcatggtgtttctgagtagcagcaaagagatctaccatgtataggagtttctccttgtaaataatagtagcacgccaggagactccatcccaggttccgtactgcttgcgcgaccagatgctgtaaactagccagatacttgaagaccaatataaatggatatgtct

SEQ ID NO: 1260 - DNA, 360 bp, Zea mays
  Clone ID: LIB3115-024-P1-K1-D12
tcccggtccgtgctcaaattaatcaaaggcgttcgcaacgtcaactaacaataacaacccggggtcggaccatcctcgcaggtgctacttactagttactactcggcagcagagggctggggctagtcaaggccgccgacgacggacggcgcggcagcggaagcagtgctctcccgtttcgaccccctccccctgcagcgtcatgttcatcagctccagtgcttctgtgtagtagattaggggtgcagagaagaagaggaggacgacgacgacagcacgcggcgacctaatgcgaagcggcaggttgtggttgtggttgcgtgcgtggacgcgtcctcgatcgttcgtcgtccatccggg

SEQ ID NO: 1261 - DNA, 109 bp, Zea mays
  unsure at all n locations
  Clone ID: LIB3115-024-P1-K1-D3
aaaaaaatgaaaaaaaaaaaattattaaaaatttttttaaaaaaaaaaaaaaaaaaaaaattaggtaaaaaaaaaaaaaagggggggaaaaaaaaanaanananataat

SEQ ID NO: 1262 - DNA, 452 bp, Zea mays
  Clone ID: LIB3115-024-P1-K1-D5
ggggcccaacgagttcttcattatccagtagtttttgtcgccctcgctgccgtaccccaccagcggggcaccgtggtccaggtacgtcccgcatctcccgtcgaagatgccagaactgtagagctggaacgcgcgccgagatgcttcaatgctggcactaacaggctggtgcgccacggccttctgcaacgctctctcgtagttgatgggcacacgctcgaacgaatcaatggatacaacccttgtatttttcagtttgagatcgcacgtcccgtcgtggccagtgaacgggtagtcggcctcggtgtcgatcccgccgttcttgatcatgaagacgaaagcattgtccatgaagccgccatcgcagccctggtcctggaacttatcgcagtcgataagctcctgctccgacagcgagatgaggctgcctgtcacgatctttgtgatccctt

SEQ ID NO: 1263 - DNA, 378 bp, Zea mays
  Clone ID: LIB3115-024-P1-K1-D7
cagagccatcccgttcaagtgcaggtcttaatctgccgtggccgtgccgagacatgccagtgcgaagaacgggcgtcttcctgtgatgtcttcttgtctgcccacgcctagtttctctgtcgattcctattcgtcgtctcttcagggctggtgctcactgctgcgccgttctgttaaccgaaacaagaactctgtgtattcctgtaccgagctgtgcatgtttttttctttccatcgtggagaatttaagttattatccgtttgctgcaaggtttgccgtctcattttatgcgttgggatgttggcaagaaagggcagatgtcatgtgagaatttaagttaagtgaaatcgattcaaggttttcttggtttcagtttc

SEQ ID NO: 1264 - DNA, 413 bp, Zea mays
  Clone ID: LIB3115-024-P1-K1-E10
accacgcgtgcgtccacgcgtgcgcccacgcgtgcgaccacgcgtacggcagaggatcccgcggcttttgcttcggcaccttctccacggaggaggcgacgcgcaacgccatcaagggcatgaacggcaaggagctggacggtcgcaacatcaccgacaacgaggcccagtcccacagcagccggggaggcggcggccgtgggtacagtggcggccggggaggctgcggctactgcggcagcgggcgccgtgatggcggaggcagatacggaggtggcggcagatacggtggccgccgccgatacggtggaggcggcggcggctacggaactagcaaccgaaggggatgctacagcaactgcgacgggaactggaagaactgagctgtggggctcgcgcggacaagttatgct

SEQ ID NO: 1265 - DNA, 455 bp, Zea mays
  Clone ID: LIB3115-024-P1-K1-E11
cacaagcacctgctatagttgtgtggtgcaaacaccaaaatgttgcctgccaaagtgtcatttgttttcctgatagtgtactgcgcagtaacattttcgctaggtcagatagctgttggcgaggcatgcacagtggatcagagggacaagatcacaacggactgcagagagttcatcaagctgaaaggccccgtcacagccccgtcgtacaccgacgactgctgcgtcgccataagagcggtgcccaatctcgacatggagtgcatcattcgcctgctctccaataaacagaagaagaagtacgacgtggacaagatccggcggctcggcagcgtcctctgcaatccacatccggtgatgacgtaaaatggggtgtggcagtagtttctgatggagtgcatcgcgtcaacaatatggagcttgaactatacaaaccctactgataatgtgtcacc

SEQ ID NO: 1266 - DNA, 474 bp, Zea mays
  Clone ID: LIB3115-024-P1-K1-E12
gggccgaccgcacgcgtacgcacaagcacctgctatagttttgtggtgcgatcattaaaacgcggcccgccaaaatggcgtggcttttattgatagagtgctgcgcataaacattttcgctaggacagatagctgttgacgaggcatgcacagtggatcagagggacaagatcacaacggactgcagagagttcatcaagctgaaaggcccctgtacagccccgacgtacaccgacaactgctgcttcttcataagagcggtgcccaatctatacatggagtgcatcattcgcctgctctccaataaacagaataagaagtacgacttggacaagatccggcttcttgtcatcgtcctctgcaatccacatccggagatgacgtaaaatgtggtgttgcacctagattctgatggactgcatcctttcaacaattttgaatttgatctatacaaaccctactgtatttgtttta

SEQ ID NO: 1267 - DNA, 462 bp, Zea mays
  Clone ID: LIB3115-024-P1-K1-E3
aagtttatggccccttctatatggtaccagttgttttttcattgaatttgcttcattaataggctcacgattcgactttgatcgttatggattggtaccaagatcaagtcctagacaagcggacctaattttaacagctggtacggtaacaatgaaaatggctccatctttagtgcgattatatgagcaaatgcctgaaccgaaatacgtcattgctatgggagcctgtactattacagggggcatgttcagtacagattcctatagtactgttcgaggagttgataagttaattcctgtggacgtctacctgccgggttgcccgcctaaaccagaggctgttatagatgccctaacaaaacttcgtaagaagatagcgcgagaaataattgaggatcgaactctatgtcaaagtcaaaagaaaaatagatcttttactacccgtcacaaactttatgttcg

SEQ ID NO: 1268 - DNA, 57 bp, Zea mays
  Clone ID: LIB3115-024-P1-K1-E4
aaaaaaacgacgggaggaaaaaaataaataaaaaaaataattaccacttttattaac

SEQ ID NO: 1269 - DNA, 431 bp, Zea mays
  Clone ID: LIB3115-024-P1-K1-E5
cggacgcgtggggactagtggtacgagtacgacgcctatttgtgtcgacgacgagccttgagctgatgatcttcgacttggagacgcaggcaggatcgcgtcccacactgtcatcgaaagatgtcagcgcgatggtaaggtactacactactactacggtactacctgtggagctgaaacctggagcgaagcgcgtgtatggcagtcagcagccaagtgccagcagcagcgtgtgccagccagggaaatcccctggcctgtgcgcgcgttcggttacaccgctagccccccgaggaggcgcgggaggtcagcatgcatgttctaggtgtggtctttggccctctttgttcacctgtatacattgaaacactcatcagtggtttttggctggaagggggaccggggcagggccagagcctgcctttctgctg

SEQ ID NO: 1270 - DNA, 459 bp, Zea mays
  Clone ID: LIB3115-024-P1-K1-E8
cggacgcgtgggattttcagcattcagaaacacaccaagcgaagcgcactagcaacgacctgacaacaatggctaccaagatattagccctccttgcgcttcttgcccttttagtgagcgcaacaaatgcgttcattattccacagtgctcacttgctcctagtgccattattccacagttcctcccaccagttacttcaatgggcttcgaacatccagccgtgcaagcctataggctacaactagtgcttgcggcgagcgccttacaacaaccaattgcccaattgcaacaacaatccttggcacatctaaccctacaaaccatcgcaacgcaacaacaacaacattttctgccatcactgagccacctagcagtggtgaaccctgtcgcctacttgcaacagcagctgcttgcatccaacccacttgctctggcgaacgtagctacataccagcaac

SEQ ID NO: 1271 - DNA, 222 bp, Zea mays
  unsure at all n locations
  Clone ID: LIB3115-024-P1-K1-F1
ttccggggcggccacgcgtccggcaattgttgaagcagccacttcaccttggggtcatacagaaatggcggcttattgcgcctgcgcactccctccactttcctgcgtttcctcctacagttcaccccgccgattcaggcgctctggtgtggtggccatggccagcgttgggcagaaggtgtatgcgcccggtgtggcggtgtcngagggcaatggcgggct

SEQ ID NO: 1272 - DNA, 242 bp, Zea mays
  Clone ID: LIB3115-024-P1-K1-F11
gcggcaggtaccccataccggagctgtggaacttcaaggaggaccggagagcaccgatgggcgaggcagtagcctacatagtgaagcagtggaaggtgagcaagaggaagcattaggcgggcctgatgcctgatggcccttgtgccattggttcctgggtcgatgtccctgacagtgagagctgagaccctgatcccctgactttttctgctgatggaagacctagtaccagtagcactact

SEQ ID NO: 1273 - DNA, 233 bp, Zea mays
  unsure at all n locations
  Clone ID: LIB3115-024-P1-K1-F12
tccacgcgtccggattatttttcgccctgcctgtcaagtgcatggngcggactaggatcgcttgctacctgcgacaggggccatatctatatatggtcttgagagatgtacaatttcatcaaggcgtggaaactggagagtttcgcatcatcagtatgctaatatgtgttctcttcatttcttgatgacactagttttcatgtgattatgtgaacgggttaactggttctgat

SEQ ID NO: 1274 - DNA, 279 bp, Zea mays
  Clone ID: LIB3115-024-P1-K1-F2
gaacagggagaagaacaagggcagttttgagacatccacgtgctgcttggagctttttgctatgtgtagttttctcctatttgttgtacaggaaaacatagaatagaattcaaatttggtggtcgcaaaagtgtggagactttaattcatataaagttaggcttaacattagtgcaaacagttgtattttagtttagatttagagtacacttatgtatgcgtttgtatgcgttgattgacaatgtttatttatgatatattgaatgatacttatttata

SEQ ID NO: 1275 - DNA, 388 bp, Zea mays
  Clone ID: LIB3115-024-P1-K1-F6
cccacgcgtccggacgcacacaagtcgcagtttgctagctcccaaccgagccaggaaaacggacgccgtgcagctcgctcgcgcgcgccccacggaaagagagggcaggtaggaataatgtaccaggccatcccgtacagcgccggccagccgtggccgcggccggccccgacgatcggtcctgacgtggcggaggaggaggggttgctggcggcttcgcagcagcaggcgtcgacgccagcggaggcggcggcgagggtggaggaaggagaggtgcggcgcgcggtggcggagtgccccgtgctcgtggtgggcgtgcgcgggtgctgcctcagccacgtggtgaaacggctgctgcaggggcttcgggtgaaccccgccgtgcacg

SEQ ID NO: 1276 - DNA, 403 bp, Zea mays
  Clone ID: LIB3115-024-P1-K1-F7
agtccatcccatcatctattctcaagggggcgaagggacttgcaattctaacagttgccaaggcaggtgcagttcttacatacaaagttggcactggtcttgtggttgctcgcagatctgatggatcatggtctgctccctctgcaattttatctgttggcctgggatggggagtgcagattggaggagaactgacagacttcatcattgtgcttcatgaccgtaaagctgtcaaggctttcagcagtcgcattcatctttcacttggggcaggattgagtgctgcagcaggacccattggcagagcatttgaggcagacgttcgggccagtgaaaagggttctgggatatgctacacttacagctgcaccaaaagtgccttcgttgggtttcactggaaggg

SEQ ID NO: 1277 - DNA, 434 bp, Zea mays
  Clone ID: LIB3115-024-P1-K1-F9
cccacgcgtccgcccacgcgtccgcccacgcgtccgcggtttccttcgtaagcccgtcgtcgtccgtccgcgactctgcgcgagaagcgagagtatggacacccaagtgaagcttgctgttgtggtgaaggtgatgggaaggaccggctccaggggtcaggttacccaggtcagagtgaagttcttggatgaccagaaccgtctcatcatgaggaacgtcaagggaccggttcgcgagggagacatcctcacactgctcgagtctgagagggaggctaggaggctgcgttgaggcggaatagtgtattggtagttttcgtatggagttggatgtcatctaattgtgctatgtttgtcaaactttggtatgaccttcaaaacacctgccttgtatgattatttgtgagcctggtgataagattgcagtttggttt

SEQ ID NO: 1278 - DNA, 407 bp, Zea mays
  Clone ID: LIB3115-024-P1-K1-G10
ctccggcgggagggactgctccggcgggagggactacttcggcggcggcgccatcggcgtcggggacgtggtcctcggcagctacctgggctggttcaaggtgttcgagaagatggtcggcgtcagggtcctggacgtggcgaggacgccgctcctcgccgcgtggggggagcgtttcgcggcggcggaagcggccaaggacgtcctgccggatgacgttgataaggtgctcgagttccttcagaagttcctggactagactaggtgcgcgccaccatgtgctcggtgctctggtgtccaacccgatgtttgtttgctttggtcattttccgtgcgctgttaatgggcctcggatgtttgccagttgattttatagaatcttaatctctactacctattaagagagt

SEQ ID NO: 1279 - DNA, 367 bp, Zea mays
  unsure at all n locations
  Clone ID: LIB3115-024-P1-K1-G11
tgctttagaagcacgtaagttaaccgtttgcgttcgacggacccgtgggcttgacgcgaacgcggcctgtgggcagctgaggaatgagtttcagaagaatccactacttgagattgaaccgtcaccctccacagagcggaccctcgtagctgcttaattgaaacacctatcaggttgatgcagcatgttcaagcatacggaatcgtcatttaatttatggggacattaggtgttgtaaagtgacagcaagttatgcataacgctagagaattttggaacgttctgtccgtgcccatctgatgtcatgagtggcaattacggaattaccacactngtctcagatattataaacccatctttgttacag

SEQ ID NO: 1280 - DNA, 455 bp, Zea mays
  Clone ID: LIB3115-024-P1-K1-G4
atccttgttccacaacaggtcatacaggagttttgttacaaagcttggtcttccaaagctggggatgcattttgcggctagcgatgatcacttggtgcgtgaagctgctctaagcggcctccttgagttgtcacaggaccagacatctggtaatgcgctacctgaccaagacaagctgaaaagagatcctgaagagccgaatcgaagggatcagtgcgatggactctgacgatctccatgccgcacacgagaagcgcagctggtggacacactaatgtaaatgttgttaattaggaagcggatcccagtgtgtgcacgtattgtgcagttgacacttgaaatagcggcgagcataagtgatgattggcgtctacttcatctcttcgctaatggcaaaaatcgtcaacctaggtcagctagggaagaagaagagcggcgtctgccgaagcagcaac

SEQ ID NO: 1281 - DNA, 458 bp, Zea mays
  Clone ID: LIB3115-024-P1-K1-G5
gaaaagtacacatttgtggagaatgtgaaaaatcctcgctcttgtactatactgattaaaggacctaatgaccataccattgcacaaatcaaggatgctgtccgtgatggtctaagatctgttaagaacacagttgaggatgaagcagttgtgctgggtgctggtgcttttgaggttgctgcaaagaagcatcttatcgacaatgtgaagaaaaccgtcaaaggacgagcacaacttggggtggaggcgtttgcggaagctcttcttgttatacccaagactttggctgagaactctggtttagatactcaagatgtgattgtttctctccagaatgagcatgaccgtggattagttgtggggttgaaccatcactctggggatccgattgatccccagatggaaggcatcttcgacaactactctgtgaagcgccagatcatcaattctggacccat

SEQ ID NO: 1282 - DNA, 388 bp, Zea mays
  Clone ID: LIB3115-024-P1-K1-G7
cgctccgctcttggctctccccacctgcgggcgggggctgttggttcgggggggaggcgagggaatccgcctgcggctgaatcgggggagagggcccgcatggcggaggaggacaggcagcggcggtggcggcggcggcggttcgcgaacctgcgcagcgtccggtggcggatcgatctcggcatcctgccggcgtcgcccggggcctccgtcgacgagctccgccgcgccgccgcggattcgcggaggaggggagcctgatttggccacttgctggttggtgcgcttcttgtcggcaggattctcttctctttggttgggtggtccgctggtgttctcgtcctctcatgattatgacgagagagagagagaaaaaaaaatttggctt

SEQ ID NO: 1283 - DNA, 462 bp, Zea mays
  unsure at all n locations
  Clone ID: LIB3115-024-P1-K1-G8
atcggcttcattgccaagatgaaggtaaagaaagagcacgcctcggtgccgttcgatgaccagtgctccattctcgagaaggaggccgtgaacgtgtccctggagaacctcaagacctaccccttcgtcaaggaagggcttgcaaatgggaccctcaagctgatcggcgcccactacgactttgtctcaggagagttcctcacatggaaaaagtgaaaaactagggctacggcaattctaccggcccgccgactcctgcatcatcataaatatatatactatactatactactacgtacctaccgatatgcacccgagcaatgtgaatgcgtcgagtactatatatctgttttctgcatctacatatatataccggatcaatcgcccaatgtgaatgtaataagcaatatcattttctaccacttttcattcctaacgctgagctntttatgtactatatct

SEQ ID NO: 1284 - DNA, 370 bp, Zea mays
  Clone ID: LIB3115-024-P1-K1-G9
cccacgcgtccgtgttctctctccctctctgtctgaccagctaggatcagcggaagcagcagtggtgatggcgtcgtcgagcgggctgaggagctgcagcgccgtgggcgtgcccagcctgctggcgccgtcgtcccggtccggccgcctggcgccgttctgcgccaacgccaccacctctggccgcgtcaccatgtccgcggagtggatgcccggccagccacgccctgcccacctcgacggctcctctcccggggacttcggcttcgatccgctgggcctcgcgaccgtgccggagaacttcgagcggttcaaggagtcagaggtgtaccactgccgctgggccatgcttgccgtccccgggatcctg

SEQ ID NO: 1285 - DNA, 406 bp, Zea mays
  Clone ID: LIB3115-024-P1-K1-H10
gtgatcaacggccgctacgccatgctaggcgcggtgggcgccatcgccccggagatcggcggcaagatgggcatcatccccccggagaccgcgctgccgtggttcaagacgggcgtcatcccgcccgcgggcacctacaactactgggccgactcctacacgctcttcgtcttcaacatggcgctcatgggcttcgccgagcaccgccgcctccaggactggtacaacccgggctccatgggcaagcagtacttcctcggcctcgagaagttcctcgccggctccggcgacccgtcctaccccggcgggcccctcttcaacccgctcggcttcggcaagaccgagaaggagatgaatgagctcaagctcaaggagatcaagaacggcaggctcgccatgctcgcca

SEQ ID NO: 1286 - DNA, 276 bp, Zea mays
  Clone ID: LIB3115-024-P1-K1-H11
cccacgcgtccgctgcgggcggacacgaggaagcgggtgaaagggcggttcgtcaagtcgaccgaagcactcaacgccggcagatacaacggatgaggcagccatatatatatatatatatgcatggcctgcgggccgatgaagtttgctgcccgcctgcgtaattacgtgcggaagttacctaacggagaggtaggtactgctacctggaggtgctacgtatgtatggcgcggccggaatcgttacgcacgcggcccaagtttaattttgcgttg

SEQ ID NO: 1287 - DNA, 195 bp, Zea mays
  Clone ID: LIB3115-024-P1-K1-H12
tattttggctcacacttttttttttttgaaaggacggttcaacaacgcgagcgaaacactgaacgccggcgggtacaactgatgaggcatccatatatatatatatatatgcatggcctgcgggcggatgagtttgctgcgcgcctgcgttattacatgcggtagttacctcaccgagaggtaggtactgctacc

SEQ ID NO: 1288 - DNA, 431 bp, Zea mays
  Clone ID: LIB3115-024-P1-K1-H3
tgttattggaatgggaaaggatagacaacaggcgggtccttgtggacatagcccggggtttaacaacggcaaacaagctattggcagacatttaactattggggctcagaatcgtggggctttagtaccgcccacaatacctggacgaaaccaggaatggctcaagaataaggcggcactaggaatggctcaagaataaggaagcgccccatgttaagcaaagctgataaaaccatggcgatatgtgagtgacctttttatcggaaggaaaattgtttgcatgcttatgtattgacctcaatttttacgtattggagtgatttgatgtgaaatttaaccaaattccacgtccagtacatggccatccaaacatggcctaaagtggtgtttgatcagtgagaattggaataaacccagctttgcctgaacag

SEQ ID NO: 1289 - DNA, 428 bp, Zea mays
  unsure at all n locations
  Clone ID: LIB3115-024-P1-K1-H5
tttaaaaaaaaaaaaaaaaaaaaaggttcggtttattttaaaaatggtgggtaaaaaaaaaataataaattaatatattttttatttcatattttggtacctacatnaattttattattatatttatattattatttttttttttatatttttaattttttatattatttttttttttttttattaattaatggaaaaaaattaataaatttataatatatatttttatataataaattaaaaaatttatttttaatttaaaataaaagaaataaaaaagggaggagaattttttaaatatttttttttttttgaaaaaataaaaaataatattatttattttaaaattaaaggaatataaaaatggaaagttttatatgtttaaaatttttatttttttttattatatgttttataaatttttttta

SEQ ID NO: 1290 - DNA, 434 bp, Zea mays
  unsure at all n locations
  Clone ID: LIB3115-024-P1-K1-H6
catgcagacggctattctagtgtgggccaccttgagaactgattggaacaaagaggtagaggaggcacagaaaaggttaaataaatgggcggattcgaagacgacagagccccttcttgttggtttcggcgatggcaactaatttactgcaagggtggatggatggatccacatcatcctctggcttcaccatcgtcaccatcaggaatctacgaaggatcagaagagacgacggagccccttcttgccggcgttggcgatggcaattaatttactggatggatgaatggatccacattattctctggatggcttcaccattgtcaccatcaggattgctaataaatcatgcggagggttattttagccagtaccaaacgtatttcgaggactctatatttcaatttaataaatatgtaccatntataatgaat

SEQ ID NO: 1291 - DNA, 384 bp, Zea mays
  unsure at all n locations
  Clone ID: LIB3115-024-P1-K1-H7
cggaacaaanacggggccgttgcatttaaaaggttgggtgggtccccaaaaacaaagaccacagaaccccttcttgttgttttctgcgatggcaactaatttactgcaagggtgtatggatggattcacatcatcctctggcttcaccatcttcaccatcatgaatctactaaggatcataatatactactgaaccccttcttgcctactttggctatcccaattaatttactccatggatgaatggatccacattattctctgtatggcttcaccattgtcaccatcatgattgctaataaatcatgcttatctttatctatttcctattccaaattatttccttcggcctctatatttctactttataaatatctaccattt

SEQ ID NO: 1292 - DNA, 576 bp, Zea mays
  unsure at all n locations
  Clone ID: LIB3115-024-P1-K1-H9
cccggggtcgacgccancagcgtctcgcccaccgcgataccgcggaccgcgnttgggcccggccttctcgcgccggcttcgccgccgagcccagacgtgctgcgtgggtgaactctgcttgtgcgaagggacggccacnngccggcgaccatanntttgcgctagttggtnncggagcagtggagctagatgtnggtggcctttaatctatcngnnaccgtcannctgctggcttcnnatagcatctannngctgacgcaaagtgtcaattcgcgntttcctttcaaattggtttnnntccccctttcggtttggcttaaatnntcgattcaaatatgangatnnngtttttgtacctangtacccatantnnatataagngacngtntnnctataantnnatttgtntcaatcacncaaagaaagcnnatgggatgctcaaaaggggaagctcttgtatttggattgagggaagggaaccacccagtattttaccttgtaccgaatntgataaatatgtttntatatttaattgatatcactggatatatatataaaagatatcgagaggacagt

SEQ ID NO: 1293 - DNA, 436 bp, Zea mays
  Clone ID: LIB3115-025-P1-K1-A12
aaaatgtccttattgaattctatgccccctggtgcggacactgcaagaagctggcgcgcatcttggacgaggcagccgccactctccagagcgacgaggaagtcgtgattgctaagatggacgcgactgccaatgacgttcccagtgagtttgacgtccaaggctacccgaccttgtacttcgtgaccccgagcgggaaggtgacatcctacgacagcggcaggacggcggacgacatcgtcgacttcatcaagaagagcaaggagaccgcaggcgccgtcaccaccaccaccacccaggcgccaccggcattcgagaaggcagccgccgccgagcccgtcaaggacgagctgtgagcatccaaggtgtggacggctgtggctgcgttagcatgggaggaaaacctggcgctaacgtgccttcaacggctaggttt

SEQ ID NO: 1294 - DNA, 116 bp, Zea mays
  Clone ID: LIB3115-025-P1-K1-A4
cggacgcgtggggtaagcgtgtagttcaaaacaatgctttacacaaccatatgcacagtcttatcggaggttggtctgttctatcagcttgttgggaaaagtttgcgtgtgcttgt

SEQ ID NO: 1295 - DNA, 411 bp, Zea mays
  Clone ID: LIB3115-025-P1-K1-A6
agcttaacggcgaccatgtactgaacacgtacccagatattggcaggaccatgactgtcggggaagcgaaccgctacgcagaggatgctgtcgccagattcctggaagctggtcggattgctttgagagctggtgcgaatgaatctgctttggtgacgatgaggcccgctctcacaagcagggcctcaatgtcctctggtttatcatcagagctctagtagatggttccagtctgcccacaaattacacatcgccattcactctgattcagctcttgggtggtgtagtgcaaatatgatagtttggttctgtaaatagacagtcggtacatgtcaaagccttaatgtgtagtggggatttctaaaagcaatttgtggggttgtgtgaattaagtctgtactggacatgctt

SEQ ID NO: 1296 - DNA, 417 bp, Zea mays
  Clone ID: LIB3115-025-P1-K1-A7
gacccacgcgtccggacagggcacgcctctcaagcccgtcgtgcccgtcgacgtgtacgtgttcgcgctgttcaacaaggacttggagggcgggcccacatcagagcggaactacggcctgctctaccccgacggctcgccggtgtacgcgctcgacgccggcggtccgggcccgggcggctcgctcaacccgtactacacgtccatgttctcctcctcctcctcgtccggatcggcggtgggcgtaacctttttgacggagaaagaggtactatcactgctggtgcaagcaattgtaatactccgacgatcacattcgtactgttagactgttagtcagtgccatatactcttgtaatcttggatacgaaaaatatgcatttcaattcaaccataggggaggcctatattcgggaa

SEQ ID NO: 1297 - DNA, 447 bp, Zea mays
  Clone ID: LIB3115-025-P1-K1-A9
acagcaatccacacaagcacttcgacttcacacgggcgctgcgcacagacacaccgagcgtcggcaccaatggctgaggaccaggaggtggactactgctcggaggaggtgaggtcggtggccccggccggcttcggccgccacggcggcggcgtccagcagcacgtcgtcaaggagaagttcgaggaggtcgacacggtctcacgcgccggcgccaaccaccaccaccaccatggtcaccacggcggccacggcttcgtggtgcgcgagaccagggtcgaagaggacatcaacacctgcaccggcgaggtccacgagcgcaaggagagcttcctcgccagggctaactgagccgcccggcggccggcatccacgcccgttcgtgcttgcctgcgtgccttatgtatggtctgggttgactggttgtgcagggtcatcgtacttggc

SEQ ID NO: 1298 - DNA, 447 bp, Zea mays
  Clone ID: LIB3115-025-P1-K1-B1
cgggccgacccacgcgtacgtgaggttcttctccagggactctctggtgttccgaaagagcgttttagggtgcatgagctgggccgtaaaagtgggcccaggcgtaggtgttgtcccatcggaggttcgtttgttgtgtgacttagctcagcccacaccatcctggaccataagacatgttggtggtgccatgagaggtgctggtgcggagcaaatctcagttctggttcgtacagttgtggagagcaaagctagcaagaacgtcttgcactacttctacaccctagggtacaagctagaccatgaactcttgaagagcggttttgcatttcgttttcaccgaggtgcccaaatcactgtcactgttacatctgctaacaagatgtcaaggctccatgcaaccgatgaagctacgtcagtcacttctggcatacagctaggggaaat

SEQ ID NO: 1299 - DNA, 222 bp, Zea mays
  Clone ID: LIB3115-025-P1-K1-B10
cccacgcgtccgcggacgcgtgggcaagcacttcgacgtcgcacgggcgctgcagcgagagacgacaccaagcgtcggcggcaatggcttactaccaggaggtggactactgctcggaggaggtgaggtcggtggccccggccggcttcggccgccacggaggcggcgtccagcagcacgtcgtcaaggagaagttcgaggaggtcgacacggtctcacgcg

SEQ ID NO: 1300 - DNA, 307 bp, Zea mays
  Clone ID: LIB3115-025-P1-K1-B11
cccacgcgtccggactgctataacgacagtttactgatcttacactgaggcactgattggggtctctgcatgctttatgtttaaatttgcaggtggcaaatcgttggatccagtgacgaggtcgagtacagcccgttccctgtgcccaagcccggcttgcctgtcagattatggaaacaaaacaatccgttcgacttaaagggccgtgagaccgacgaccatcatttgagggaggttttttaagttggccttttgagttaaggcatgaatttaaccccaagctagctagagaagtttttttttcacc

SEQ ID NO: 1301 - DNA, 489 bp, Zea mays
  unsure at all n locations
  Clone ID: LIB3115-025-P1-K1-B2
cgggtcgagcccagcgcgtccggcgtgcagggncgcgagcgtcggagggcaccgttcaagatggctgacctacgacgaggatccagagcgaaaacgtacatgganggtgaagggcancgggnncacggcgaaccagtgcctcgaccatttcgacggcggcgtgnngagtcgttcccgttcaaggggccggcaagtaccagatganagaagcttgtgcctggagcncgacgtccttcacttgtcaagggcggagggcattcgccaagaaccgccccgcccgagttccagaagaccaagctcatgacccgcctcacgtacacgctggacgagatcgagggcccgctcgaggtcggctccgacggcacgctcaagttcgaggagaaggacggcatcgactacgccgccgtcaccgtgcagctcccggggggcgagcgcgtgccgttcctcttcaccgtcaagcagctcgtcgccaccggcaagcccgagagc

SEQ ID NO: 1302 - DNA, 390 bp, Zea mays
  Clone ID: LIB3115-025-P1-K1-B3
cacaagcatgccatgttctacaaccaaggctaatttctctccaaactgaataatacctcggaccgcaaatcacaataagctaaatggcctgtcaagacacaaatattaatggactttggaggaccattgtgccaagttaaactgatgttttacctaggcaaggccctaaaaaagggtttcaaccggaccgtatccttattgaatccagttcatataaaaacgcatcctgctaaattaaccatactcttatataaagaggggaccctctgagagagcaatctgtgatcaggttgacaataaactgatagatagacgattccagcgcgcgcaacacaatgtgtgcactgtcacatctttttgttctagcacatacatagaaggatattgctt

SEQ ID NO: 1303 - DNA, 405 bp, Zea mays
  Clone ID: LIB3115-025-P1-K1-B7
gcccggtgctccctctctgcaggttgcggctcgctcccctcgcctcccgccgagggaccggttcacagcgcgggagatggctgaacaggaggccccagtcgtggttgaggcaccaaccccagttcttggggagcctatggacttgatgactgctctgcagctcgtgatgaagaagtcaagtgctcatgacggacttgtgaagggtctccgtgaggctgccaaggccatcgagaagcacgccgctcagctttgcgtgcttgctgaggactgtgaccagccagattacgtcaagctggtgaaggcactctgcgctgagcacaatgttcacctggtcactgttcctgccgcgaagactcttggcgagtgggccgggctttgcaagattgactcttagggcaaggcaag

SEQ ID NO: 1304 - DNA, 399 bp, Zea mays
  Clone ID: LIB3115-025-P1-K1-B9
cggacccgtggccctcttcttatcgcccgtttccgccgccgcccccccccttcggtttaggaccacctccagcaaggggagggaaaaattcctttggcgtgccccatgtttaagaaggtctcttcagaagatatatctggacagaatcaagttaaggcttctgtacaacgaaagattcggcaaagtatcgctgatgagtaccccagccttgaacctttgctagatgacttgctcccaaaaaagtcacctatgattgttgttaaatgccaaaatcatcttaatcttgtagtggtgaataatgttcctctatttttcaatatacgtgataggccttacatgccaaccctgcgtgtttttcatcagtatcctgatatcatgaaaaaaattcacgtgggtaga

SEQ ID NO: 1305 - DNA, 448 bp, Zea mays
  unsure at all n locations
  Clone ID: LIB3115-025-P1-K1-C10
attacattcaatgttgcacccaagatgaaggcgcttcaaattgctgagaaagctagggacgcgtctcctaagtggaaaggttgaccaggtacgtgtcaacctgccaaatggtgacatggttggtcacactggggatattgaggctaccgttgttgcttgcaaggcagctgatgaagctgttaagatcattctgaatgctgtcgagcaagttggtggtatttaccttgttactgccgatcatggcaatgctgaggatatggtgaaaaggaacaaatctggcaagccgttgctcgacaagaatggtggtatccagattctaacctcgcatacccttcagccggtgccggttgccattggaggccctggtctttaccccggagtgaaattccggaacgacattcanatccctgggctcgccaatgtagccgcaactgtgatgaaccttcat

SEQ ID NO: 1306 - DNA, 436 bp, Zea mays
  Clone ID: LIB3115-025-P1-K1-C11
aaataagacgacttgtttcattgattcttgaagagatcgagcttcttttgcaccacaggggggaggatgtcttgcaactgcggatcaagctgcggctgcggctcaagctgcaagtgcggcaagaagtaccctgacctggaggagacgagcaccgccgcgcaggccaccgtcgtcctcggcgtggccccggagaagaaggccgcgcccgagttcgtcgaggccgcggcggagtccggcgaggccgcccacggctgcagctgcggtggcaactgcaagtgcgacccctgcaactgctgatcacatcgatcgacgaccatggatatgattattatctatctagcttgtggtggtggttgaacaataataagcgaggccgagctggctgccatacataggtattgtgtggtgtgtgtgagagagagagaaacaaagttct

SEQ ID NO: 1307 - DNA, 448 bp, Zea mays
  Clone ID: LIB3115-025-P1-K1-C12
gctctcagaaagatgtggtgattaaagttctaaagcctggtattgaagatactttgggtgctgatctgaattttatctatgttgttgcacgtgttttagagttcttgaaccctgaactacaaaggacatcactggtaggcattgtcaaggatataaaggaatcaatgcttgaggaagttgactttagaaaagaggctgcaaatattcaggcatttcagggatacattgatgcaatggggtttgacaggcaggcaaaagccccatttgtgtatcagcactgtagtacaaaacgtgtattgactatggaaagaatgtatggagttccgcttactgatcttgattctataagatctcttgttcctgatcctgagttgactttagtcactgcccttaatgtctggtttggaagcttaatttcatgtgaatccttccatgcggatgtgcatgc

SEQ ID NO: 1308 - DNA, 447 bp, Zea mays
  Clone ID: LIB3115-025-P1-K1-C2
cccacgcgtccgagcaaggagcggctgtggcagtttgtcagtgcaacgcgcagaggcaggggctacattattacatccatggatcatccaaacaagatcccccacggcaacgacgagaagaagaaggagcacgagaagcaggtcgagcaaagcaagacccacaggacgcgcgagaagaacccaatcaaggagccggagcccaagccgaagaacgaattcgaagtcccaaaacccatcccgagaatgagccgccaaggcacgtcgagggggtagtaatctcctcaaccctcattcgtctcggtctcggcgatcaatgcatccattgttcgatcgatatatatagatcatatataggcccacggtcgaggttatgcgtcctgctagctatactccgtgattttacgacgttagtgtgtcctagcagctataccctcggtcgttgtatgt

SEQ ID NO: 1309 - DNA, 451 bp, Zea mays
  Clone ID: LIB3115-025-P1-K1-C3
gtcatgcctaccacttggcttcgtgatctcagctgcctcagcttcatttcagctggtggaggcatggcatctatcgtcattggctcctgcttgttctgggtgggacttgttgatcacgttggcacagtcgagagtgaagggacggcactgaaccttcctggaatccccattgccatcgggttgtatgggtattgctactcaggccatggagtgttcccaaacatctactcttctctgaagaaaagcaaccagttccctgctgttcttttcacctgtatcgctctgtctactgttctgttcgctgctgctgcaatcatgggatacattatgttcggtgaatctacagagtcccaattcacactgaacttacccccaaatcttgtggcttccaagattgcggtctggactacggtgacgaatccaataaccaaatatatgcgctgaccatgac

SEQ ID NO: 1310 - DNA, 346 bp, Zea mays
  Clone ID: LIB3115-025-P1-K1-C7
gcggtggctgggcctgtcggaaccggcgagctcgggccggtctgccgtccgcggggtctgcgtcttccctggcgggcacggcgtaaagcgggagctccggcagttcctatcggagggtctcagagccggcatggtgcccatcagcgacaccgacatctactggttcctcgtcaacaacacggtcgccgcaggcaagtgaagtcactgccgcatgccacttcggtgccagtccttcagagctcagctcagacgcgcgcgtgctggtggtgcctgcgtttgcagagaaagaagccgccggggacccggtgaagaccctgcgcgaggtgaccgacaacctggccaggca

SEQ ID NO: 1311 - DNA, 273 bp, Zea mays
  Clone ID: LIB3115-025-P1-K1-C8
cggaaaggtaaagatgatcatggcctccaatttacctgatgttcttgacccttcggggctgggttcttgacctttaggccggaacattgaaatttcccttcccaaccagccatcaagaatggaagtttttaaaattcattccacttgtattgcccagcattgggaaattgattattaaacaatcctgaaactatctgaagggttcaatggtgctgatctttcgaacctgttcactgaaactggtatggctgcaattcgtgcagagagagatta

SEQ ID NO: 1312 - DNA, 330 bp, Zea mays
  Clone ID: LIB3115-025-P1-K1-C9
atcctatcttatgcatggagacggcagcactcacctcccactccctgcaacgcccaggaggggcagctgctgctcccgcgcgtggccagccgcgaaaggtcggagcggcgggcctgcggcgccggcagtcgcgcgccggcggcaggatccgggccctgccttggacggaggtcatcagcgagaacctgtgccccaagctggtgcccggctcgcccgccgacaccggcgacgtctcctcactcgtaccggtcagggccctgatgcatggtctcctacttcgcgtgcaactgcttgatacccgagctgctcctgaaaggcctcaatgagccc

SEQ ID NO: 1313 - DNA, 443 bp, Zea mays
  Clone ID: LIB3115-025-P1-K1-D11
gatttgtaagggtttagtttagattaaaaacatcggcaaaggataggtacagatatacgaggtcagatcgaaaacccgatatgtttgcagctttgcacacacacagaaaaaaacatctgacatttgctatggcacagccgggactctcaactctgaccaggcgagggacttcgacctccccttgaaggagcggttctacctgcagccgctgccgccggcggaggcggcggcgagggtaaagacgtcggcgcaggacatcatcaacctcaagccgctcatcgacaagaaggcgtggccgtacgtccagaacgacctccgcctccgggcctcctacctgcgctacgacctcaagaccgtcatcgcttccaagcccaaggaggagaagaagagccttaaggagctcaccggcaagctcttcagcaccatcgacgatcttgaccatg

SEQ ID NO: 1314 - DNA, 387 bp, Zea mays
  Clone ID: LIB3115-025-P1-K1-D3
cccacgcgtccgcccacgcgtccgggcgatgctggttttcctgggcttcctgatccagcagcgagcggaccggcaaggggcccgtcgacaacctgctgcaccacctgtctgacccatggcacaacaccatcatccagaccttctccggttgagtcgaggtcgaggagggatacgatccatcgctggtgagctgatatggactggaaggcaaacattgaaaccttaagttcctttctggatcagtttgtgtgtgttgttaatctatctggagggtacagattcgggccgtgttgcaatgcatgcatggtctgaagggagcgagggctgaagagtgacttgtatgtacattagctgaaggggatattaaaggtagagatcgtttgatca

SEQ ID NO: 1315 - DNA, 446 bp, Zea mays
  Clone ID: LIB3115-025-P1-K1-D4
gccccgagagcgggtttagttagaggctacgggcggtcgggcgcggcggcggcggcggccatgagcagcgggagcgagagcactaccgccagcaggtggctcgagctggccacgctgcgcgcgctggcgcgcgacgccgcggagcagcttcggctgccgcgggccggcacgtcggcgtcggcgtcgtcgtcgtcgccgtggcgcgggcgcgaggaccacctccacggccacggcaagacggccaaggtgatgcacctgctgctctggggacccaagtgaagcggcggcgagaggccaccgtaccgccgggctctcccgccggcgttgctcgttttgctctgcctgcaatccgccccgcacggactgtactgtacctatacacctatatactacgacgtgcacctgtactacgacgtgcttgtgtaccatactaatactagtgcgct

SEQ ID NO: 1316 - DNA, 445 bp, Zea mays
  Clone ID: LIB3115-025-P1-K1-D7
gataaaaggggttcaggaattgttaaatttagatataggaccctggaggaagaatgggggacccaagaggaagagtataggactcgagaggaagaatatcggactcgagaggaagactcagaagacgaatatgagagcccagagaacaaatataggacccgagagggagagggcgaatataaaatcctagaagacgaatataggactctagaggacgaatatgaaaccctagaagatgaatatgggatcctagaggacgaatataggactctagagaaagactcagaggaagaatatgggagcctagagaacaaatataggactcgagagggagagggcgaatatgaaatcctagaggaagaatcagaagaagaatatgggagctctgaagatggctcagagaaggaatatgggactttagaagaagactcagaagaagactcag

SEQ ID NO: 1317 - DNA, 304 bp, Zea mays
  Clone ID: LIB3115-025-P1-K1-D9
gctagctgaggacggtacagcggcacagaggtgcgacgtacgacgacgacgacgcaggcgcgacacatggcatcccagctctccgccgccgtgccccggttccacggcctccggggctacgccgcgcccaggtccgcggtggcagcgctgccgtccgtgagggtgggcaggaagaggtcgtcgtcgcagggcatccgctgcgactacatcggctccgtcaccaacctgatcatggtgacgacgacgacgctgatgctgttcgcggggcggttcgggctggcgctcgccgcgaaccgtaaggcga

SEQ ID NO: 1318 - DNA, 468 bp, Zea mays
  unsure at all n locations
  Clone ID: LIB3115-025-P1-K1-E10
ttttactcnntttctttctctttntcttacattttttcttatcttcaaacacatnctgtctgtttcttttaaaaagtgggggagatataatcattaattttattactattatatattttaatataattatctatcaatctattaattttttaattcctattatattcttttaaaactttataatatttatatttttatattaacatcatatttatcattacttattatctttttttttatcgatcttttttatttattattttttttttaaaaaaaatattatttttcctatcatatattttttttttttacaattttttatatttcctatctattctattttttattacaaatctaaaaatttatttatttaaaaaaatacaatataattttttctcatttatcaacatttatattttattctctcatattatataattttgtttatttattctaaattataatata

SEQ ID NO: 1319 - DNA, 176 bp, Zea mays
  Clone ID: LIB3115-025-P1-K1-E11
aaatgctattgtctgataccactggttggtaggctggttgagatagttttcttgtgatccagttttaacctttttctgtacttcaacatatgtggaaatttacttgattaatgtaccaagggaaaagacgcttaggcgcacaattaaaataggcggaactgtgcacttctgtagtc

SEQ ID NO: 1320 - DNA, 388 bp, Zea mays
  unsure at all n locations
  Clone ID: LIB3115-025-P1-K1-E3
cccacgcgtccggcttcttttgcaccacaaggtcgaggatgtcttgcaactgcggatcaagctgcggctgcggctcaagctgcaagtgcggcaagaagtaccctgacctggaggagacgagcaccgccgcgcaggccaccgtcgtcctcggcgtggccccggagaagaaggccgcgcccgagttcgtcgaggccgcggcggagtccggcgaggccgcccacggctgcagctgcggtggcaactgcaagtgcgacccctgcaactgctgatcacatcgatcgacgaccatggatatgattattatctatctagcttgtggtggtggttgaacaataataagcgaggccgagctggctgccatacataggtatngtgtggtgtgtgtgag

SEQ ID NO: 1321 - DNA, 316 bp, Zea mays
  unsure at all n locations
  Clone ID: LIB3115-025-P1-K1-E4
gccttcctctgtggccttcttcgcgaaggctgggctggattacgtttcttgctcccctttcagggggccgattgctaggctagctgcagctcangtgcttgtctgaggctgcctcctcattggcaaccggattgcctgctgctggtggatgtggtgatcaacagtattattacagagccatgctatgtgaacattactagtagcagtgctcataaaagctacaatcccatgtcctttttttccccagtcatgtaaaacttccaaactgctccatggttcaaaactctgttcttcaatacatcatcaattatcgatt

SEQ ID NO: 1322 - DNA, 166 bp, Zea mays
  Clone ID: LIB3115-025-P1-K1-E6
gctctaacaaagacgcccggactaacgcatttatgtacacttttactgatacatactctggtggagagaacccgagcggcgcggtagaaacccgactagatagctacactacacacttacagatggcctgcctcaggatgaagttcgacgacgtaaacgacatgag

SEQ ID NO: 1323 - DNA, 414 bp, Zea mays
  Clone ID: LIB3115-025-P1-K1-E7
aaaaaaaaaaaaaaaaaaaaaaaaaaaaaaattaaaaaaaaaaaaaaaaaaaaaaaaaaaaaaggaaaaaaaaaaaaaaaaaaaaaaaaaaaaaaaaaaaaaaaaaaaaaaaagtaaaaaaaaaaaaaaaaaaaaaaaggggggggcctttttaggggtccaaattttccttcccggggattgcaagttaaaattttttttttggggcccccaaatttaatttcctggcccgctttttaaaaccggtggtctgggaaaacccttgggtttcccaaattaaatggctttgaaaaaaatccccttttccccggtggggttaaaaccaaaagggccccaccaaatgccctttccaaaaatttgcccaccttaatgggaaatgggacccccccttttacgggccttttaagcgggggg

SEQ ID NO: 1324 - DNA, 357 bp, Zea mays
  Clone ID: LIB3115-025-P1-K1-E9
cggacgcgtgggcggacgcgtgggcggacgcgtgggctcatctgcgtacacggtctccctgttcctgtcagtagtagagtgagagtgaggcagcgagtgggagacaaggggaaatggggaagggagcgcaagggagcgatgcggcggcggcgggcggcgaggtggaggagaacatggcggcgtggctggttgccaagaacaccctcaagatcatgcccttcaagctcccgcccgtcggcccttatgatgtccgcgtgcgcatgaaggcagtggggatttgcggcagcgatgtgcactacctaagggagatgcgcatcgcgcacttcgtggtgaaggagccgatggtgatcgggcacg

SEQ ID NO: 1325 - DNA, 345 bp, Zea mays
  Clone ID: LIB3115-025-P1-K1-F1
cccacgcgtccgcccacgcgtccgcacaagcacttcgacgtcgcacgggcgctgcacacagacacaccaagcgtcggcaccaatggcttactaccaggaggtggactactgctcggaggaggtgaggtcggtggccccggccggcttcggccgccacggaggcggcgtccagcagcacgtcgtcaaggagaagttcgaggaggtcgacacggtctcacgcgccggcgccaaccaccaccaccaccaccatggtcaccacggcggccacggcttcgtggtgcgcgagaccagggtcgaggaggacatcaacacctgcaccggcgaggtccacgagcgcagggagag

SEQ ID NO: 1326 - DNA, 220 bp, Zea mays
  Clone ID: LIB3115-025-P1-K1-F3
ggctgggttaactaatttaggtttcgtttctgttgtttctttgttgggctttgagcatttcagcttctcttggtttcttattttagttacagaaaaaggaaaggcaatgggatattgacttgtatttatcactgatgtcgactgggtgactctggattatggagtattgctccattggatagttttctgcatttcgagacaggaaagtggttttttgcgg

SEQ ID NO: 1327 - DNA, 420 bp, Zea mays
  unsure at all n locations
  Clone ID: LIB3115-025-P1-K1-F6
cggacgcgtgggcggacgcgtgggcgtccccgttcgaaggcgcggcaagcgagcgattcaggcaggttcgattcgacatgaatgccgagtacgactaccttttcaaacttctgcttattgctgatgtagctgtccaaatatgaatcatccgcaaatctgagaagcaagcatgatttcccaacaccagaatcaccaataagcagaagtttgaaaaggtagtcgcggacgcgtggggggtttttgattttagccgccgccgctgctcatctcacatccctcgagaagacgcctgctcctcgccgatcgatacgatggccgtcttctccgacctccacaccgncgacggcctcaagtccctcgaggctcacctcgccggcaaaacctatgtgtctggtgactccattactaaggatgacatta

SEQ ID NO: 1328 - DNA, 336 bp, Zea mays
  Clone ID: LIB3115-025-P1-K1-F8
cggacgcgtggggtaacgacttaacgaacgacggcaggcggtagataaaggcgcgcgatgtgcgacgcggcgccgaggtacaggggcgtgcggaagcggccgtggggccggttcgcggcggagatccgggacccggcgaagcgcgcgcgcgtctggctcggcaccttcgactccgccgaggccgcggcgcgcgcctacgacgtggccgcgcgggccctgcgcggcccgctcgccaggaccaacttccccgcgctcgccaccacctcccgccgtcccgcgcccacgtgcagttccggctccaccgtcgagtcctccagcgggccccgcgccggggac

SEQ ID NO: 1329 - DNA, 441 bp, Zea mays
  Clone ID: LIB3115-025-P1-K1-F9
tagagttttaagaactagagacacaagggtgccaaaggttcaaatgcttagtgggaggcaggatgtttgggacacaccgaagggtctggccggcaagcagactattattgtaagtggccaccacgggaagctccacatcgacggcctccgatttataatcgacgaaggtggtggttatgaagacaaacctattgctgcgatagtttttccttcaaagacattgatcagaagtaccgaggaagcgggaaccacatcagagaggtgatctagagttctagacatcgtcaggagcagtgaacacggaggcacagttttttctctcttgaagttactgcttgtagtcatgtactcatgtcaaacgacaataggaataacgttcaaaggcaataagttggtgaacccgacctgcgttttctcaatttagtcactgttgactatatg

SEQ ID NO: 1330 - DNA, 414 bp, Zea mays
  unsure at all n locations
  Clone ID: LIB3115-025-P1-K1-G1
ggccatagatccttttatgtacatgcgaaatgtaaccaagggatatggaataagaacatgttcatcgtgttgtagacagcatggtggtacaggaattctttttatttttcatagttgattggtgatgaactggatcggtgccagcataagaattatgataaggtaccttttctgccgctgaattttttggtgtatgtcgatttgtcgagtggatttagtattgagatgaatgatatgacatcacatggattttaaaaaaaaaaaaaaaaaaaaaaaaaaaaaaaaaaaaaaaaaaattataaaaaaattaaaaaaaatttaataaaaaccctcttaaaaaaaaaaaaaaatttttttaatttaattatatttttaatttttaaatatattattttatttnggggggggcccttt

SEQ ID NO: 1331 - DNA, 386 bp, Zea mays
  Clone ID: LIB3115-025-P1-K1-G12
aactgactaggcacagggaggagagacgagatcatgaggaagcaagactcccatgtgctctgcttgttccaggggggcggtggggcagctgctatggcctgggtcatgcacaccatctgcggacacgcacgtaagacaggctacaactcgtgctaacctgatgcgaaggcgcggatacagagctttattctcatcaacggcgtaaggaagacactagctctggcttgggctcggagcctgtatcagaaatcgaaataatataagactgtcttcaacggatcgcactgccgctcccacacgctaaatttacgggctacagcgcacacgctagccgatcaactattcacgctaccaggcgctctacgcggatgtgccctctagacagc

SEQ ID NO: 1332 - DNA, 442 bp, Zea mays
  unsure at all n locations
  Clone ID: LIB3115-025-P1-K1-G3
cccacgcgtccgcggacgcgtgggtgtcgggctgtccacgcgccggaaggtgccgctattcgccgtggctgagcccaggctggcggtgcacctgtacagcgcgaccgactgatccaatttacgacatttttatccttagtcgtgttttgtgctcagttttaaactttcagtgctatagaacagaaagacaaaactgagaaaaaacacaactaaagttaaaaatgaacacaccagcaaaaccaaggacaccaccttaaaaaacccattgtatattaatgaaagccagagcctctatatacaaaactacttgtattatatatttgaaagtctatgttttgtatctcataatgttggatttctatatatcagatgagtaaactctattttaatttanaaataaatanntttttttanaatttattttttattttaaatatttttt

SEQ ID NO: 1333 - DNA, 441 bp, Zea mays
  Clone ID: LIB3115-025-P1-K1-G4
agcgccccagcgagccagctccggcgaagtcaatcctgcgctccgcaggcagcatcaagcatggcggacacgaaggcgtcacccgcggtgacgctccgcacgcgcaagttcatgaccaaccgcctcctctcccgcaagcagttcgtgctcgaggttctccacccgggccgcgccaacgtctctaaggcggagctcaaggagaggctggctaagatgtacgaggtgaaggatcccaactgcatcttcgtcttcaagttccgcacccacttcggaggcggcaagtctaccggattcggtctcatctacgacaacgtcgactcagccaagaagttcgagcccaagtacaggcttatcaggaacggacttgctaccaaagtggagaagtcgcgcaagcagatgaaggagaggaagaacagggcgaagaagatccgcggtgtgaag

SEQ ID NO: 1334 - DNA, 431 bp, Zea mays
  unsure at all n locations
  Clone ID: LIB3115-025-P1-K1-G5
cttcgtcggcggcctcgcctgggccacggacgaccactccctccacaacgccttcagcacgtacggggaggtcctcgagtccagagatcatcctcnatcgggagacgcagaggtcccgcggcttcggcttcgtcaccttctccacggaggaggcgatgcggaacgccatcgagggcatgaacggcaaggagctggacggccgcaacatcaccgtcaacgaggcccagtcccgcggcggccgtggaggcggcggcggtgggtacggtggtggccgtggaggcggcggctacggcggtggcgggcgccgtgatggcggcggcggctaccgcggtggcggccgctaccgtggcggcggcggctaccgtggtggtggcggcggctaccgcggtggcaaccgtggcgggggctacggcaactccgacgggactgga

SEQ ID NO: 1335 - DNA, 403 bp, Zea mays
  unsure at all n locations
  Clone ID: LIB3115-025-P1-K1-G9
cccggaacggtttgtgggacgtcaagcagttgtgacagcgcagtgcttaaatggatggtatgttgtgaagacttcagagaacgcanagagtgtgaagctgcaataccgttccttggcaaaggttgctgatggcaatgggccttctggtcttgtcccaagcaatgtccaaagtacaagctggctataggctacaacagtaccggtagtaggccccaagcccctcttcaacttcacgcatttgctgaggttctgcgatgacgtgagcatgccaaattcagattaggcttgctttgcctttgtcccctctttttgtatcctggggacgcggatcttgtgagtatggccaaagaaatgtttactactttagcaagtgtggaaacgcgtgacatcactggttacgagt

SEQ ID NO: 1336 - DNA, 436 bp, Zea mays
  unsure at all n locations
  Clone ID: LIB3115-025-P1-K1-H2
cggacgcgtgggcggacgcgtgggggaaaaggagttgctcaaaaggaaacccaaaacgtggagatgggcgtgccaggcaacggtgggcaacgcagattcgactggacagatgatcattcaacagttgccggagtggaagatacatgagtgggacaagtaggagttactgttttactggtcttgaagaatgctctcgtggccatactatagattacatgcagtggaaatggggaaaaaaaggaataagaagcagctgatcagtggaagagctggtgcagattgattgatgaagcttttcatactccaaacaaacaaacaaaaacctgngcatgttttttcaaccattgtagcaaccgaaaggagcatggatcaattagccccgttctgtaagccgntcacttatacacacacaaaaaaaagcgacttgttcatgatc

SEQ ID NO: 1337 - DNA, 363 bp, Zea mays
  Clone ID: LIB3115-025-P1-K1-H7
atttacacatacgaggaggcaaagaagctgacatccaagtcaaagttaccggttagcagtgacagcagcaagctgagcgctgcgaactcactgtctgaatgactatgaacaaaaactgcagagtgctaacgtccctctaattttgttatttccatcatttgattatgggggtgaatgctcacggttgctccgtgggctgaagttgtggttggcattcaactgccttgagttttggaggcttttggactgtcttgccagcatgagcctcctggaagaggcaccctggcatctgcgtgccattttccatatgttcgtgccgcttggtaggagtatccattggcttatttagcaagtccctggttt

SEQ ID NO: 1338 - DNA, 171 bp, Zea mays
  unsure at all n locations
  Clone ID: LIB3115-025-P1-K1-H8
aaacacatacttccaccaaanattttttttccaacncaaacttacctcctaacaatcggcttttctattaaaatcgcgtgtcaactcacaaccacaattacctttatcaaaaacttcttatttctaacattcctttaattttctcatcttcatctatttcaatatattttt

SEQ ID NO: 1339 - DNA, 372 bp, Zea mays
  Clone ID: LIB3115-026-P1-K1-A1
aaaaaaaaaaaaaaaaaaaaaaaaaaaaaaaaataaaaattaaaaaaaaaaaaaaaaaaaaaaagggaaaaaaaaaaaaaaaaaaaaggggagggggcgcccgttttaaagtacccaagcttacttccccttgtttgcaattttatattttttttttttggtcacctatattaatttttctgtccttcttttaacatcatctttcttgtatataacctttgtttttcctcaattattattttctttttataataactactcttttccgccagtttttttttatctccataattaggccccacacttaattttctcttttcacaaaaattttccccccccttttattggtctaaatggtaacccccccctttt

SEQ ID NO: 1340 - DNA, 407 bp, Zea mays
  Clone ID: LIB3115-026-P1-K1-A11
ccaacggcggcgactcgcgcgccgtcctctcccgcggcggcgtccccgttccgctctccgtcgaccacaagcctgaccgacctgacgagctggctcgcatcgaggcggcgggtggccgcgtcatttactgggatggtgcccgtgttctcggcgtcctcgccatgtctcgagccataggcgatagatacctaaagccgtttgtgtcgtcggagccggaggtaacggtgacggagcgcaccgacgacgacgagtgcctgatcctcgccagcgacggcctgtgggacgtcgtgaccaacgagatggcgtgcgaggtcgtccgggcgtgcttccgcagcaacggtccgccggcgccggccgctcgcccgaacggcgtggcccttccggcagccggcgcgggcgccgaggac

SEQ ID NO: 1341 - DNA, 417 bp, Zea mays
  Clone ID: LIB3115-026-P1-K1-A3
cgaattcccggtgcgcgagtgacatctaggtttccagacgccttcggtgagtacagggaatgaagtcgccatggctgacgactaacaggcggagaagaaggaggaggtccccgagcttgctccttttgacccaaccaagaaaaagaagaagaagaaggtggtaatacaagagccatcagatgaggtggataacttggcagagaagacagagagcttgactgtaaccgagtctagtgagccaagctttgcgggcatgaaaaagaagaagaagaaacatgtggaacttgattcttctcttaccgagaccggagatgttgatgacacaagagacgatcaagttagagaggatgaagaaggagaagggattgtgctcgctggtgccgctgccaccaaatacccttgggaaggtactgacag

SEQ ID NO: 1342 - DNA, 417 bp, Zea mays
  Clone ID: LIB3115-026-P1-K1-A4
tgtacttgtatgttgttagatgagaagattatgacacatctactgttggagtctttaagcaacaaaagtgccttatacgatgatgtcaaggttttctgcaatctcctcttttccagggagattcaatgggcagacagatgacggaagtggaaacaacaagtcagatcaccatgttagtggaaacaacaagtcagatcaccatgttatgtttggagggaatttattccagtcggtatcttgctctggttctggccatgaacagcctcgccacgccatctggttccatcagccctttccttattggatgagcaggctcgttcgctttcagaggtgacagcaggtttgctcctgtgaccctttccagaatatcatgactcgcggattgagatctcgtgatggttcatggttgcgagtact

SEQ ID NO: 1343 - DNA, 412 bp, Zea mays
  Clone ID: LIB3115-026-P1-K1-A5
cccacgcgtccgaaccgagaccaagaccaccagcaggactcgcgaggagagcgcgcccggaaagaaaaaaaaaccctagccccgcgcgggcgctccgcctcgcgatgtcttgcacggtggccatcccgagctcgccagtcttctcgccctcacgccgcccactctcctgcaaggccgcctccgcctcaccggagcccaccgtccccgcctctaccgcggcgcccgcgcccgccgccgccgccggctcgccgctccgccccttcgcgctccgcgcgctgctgcgggaggaggtctccccgtctccgccgccccagccgacctccgccgcagcggtggctttggtgccgagcggggccgcgctgaagcggcggcgaccgacgccgcttgtcgtgccggcgttcggcgccgcggc

SEQ ID NO: 1344 - DNA, 377 bp, Zea mays
  Clone ID: LIB3115-026-P1-K1-A8
cggacgcgtgggcgcctcccgtctttcctcaagaagtcgattcccttccccaagaacgcaaggccccaccatgacaaggtgctggtctccttcccgaaaggcgctgagcaagatcgcttgcaatcggctgcagaaggaactcgccgagtggcaactcagcccccctgctggattcaagcacaaggtctccgataacctacaaaggtgggtaattgagggcactggagcggcgggcaccctttacgccggcgagacctaccaattgcaaggtgacttccctgagcattatcctatggaggcacctcaaggcatttttcttaatccaacgccaatgcattcacacatttacagcaaccggcacatctggttaaatattt

SEQ ID NO: 1345 - DNA, 461 bp, Zea mays
  Clone ID: LIB3115-026-P1-K1-B11
ggtgcccggggaaaaggcggtaatgacgactccccccttccttgtggctgctgctggtaccatatcacagaggtgtttgtcagagttgtgaaggcccatccgcttgggcatcaaggaagagcttagctttactgccatttttgtaatctgatccggttggtgggccagggcaggcaaccggggggagttattggcatctgacaacgcccccccaatctttgccatatccttatacatataaaacgctctaactaacacttgtttagttcgtccagaatctctgtacacgcacgcacgcgtgtattattatgtgtataagtctcggccgttccttttccttggtgtggtgtagctccgcgacccagctgagatgatgcttctccgtgcctgctcaaaaggcagcaacacggttccagatgatcaaacgatctatcgaagcaatacaaaacgaggcgcaaaga

SEQ ID NO: 1346 - DNA, 294 bp, Zea mays
  unsure at all n locations
  Clone ID: LIB3115-026-P1-K1-B5
gcgccacggcggcgacgagaagtggcgagccccgagagcgggtttagttagaggctacnggcggtcgggcgcggcggcggcggcggccatgagcagcggtagcgagagcactaccgccagcaggtggcccgagctggccacgctgcgcgcgctggcgcgcgacgccgcggagcagcttcggctgccgcgggccggcacgtcggcgtcggcgtcgtcgccgtggcgcgggcgcgaggaccaccttcacggtcacgggaagacggccaaagtgatgcacctgctgctctggggacc

SEQ ID NO: 1347 - DNA, 410 bp, Zea mays
  Clone ID: LIB3115-026-P1-K1-B6
cccacgcgtccgcatcttccaccttaacccatccggccgctttgtcattggtggacctcacggcgatgctggtctcactggccgcaagatcatcattgacacctacggtggctggggagcccatggtggtggcgctttctccggcaaggacccaaccaaggttgaccgcagcggagcctatgtcgcgaggcaggctgccaagagcatcgtcgccagcggccttgctcgccgcgccatcgtccaggtgtcttacgccatcggcgtgcccgagcctctctccgtgttcgtcgacacgtacggcaccggcgcgatccccgacaaggagatcctcaagattgtcaaggagaacttcgatttcaggcctggcatgatcatcatcaaccttgacctcaagaaggggcaacgggcgc

SEQ ID NO: 1348 - DNA, 413 bp, Zea mays
  Clone ID: LIB3115-026-P1-K1-B7
gcgacccacgtccacacgacacgaaccaccaccaccaaccagcagccgcaccacgcacccagcgcaaagcgatggcgtcgctcacgcatgatggcgtccttcgccgccgtggcggtggccgcgccctcgcgccgcggcaccttcgccgtggtcaggtccgccaaggtcgaccgctgccaggagcccgccacgctagcagcaaccgaggccaggcccgccgccgacggacgccgcgccgtcatgctcgcggctgctgcggcggccgtggcagccatcggcggcgccggcgccgccatggcgggccccaagaacgggacccccgaggcgaagaagaagtacgcggccatctgcgtcaccatgcccaccgccaaggtctgccacaactgagcacgcccgcgttgcatgcagctgca

SEQ ID NO: 1349 - DNA, 137 bp, Zea mays
  Clone ID: LIB3115-026-P1-K1-B8
tgctagactgcaattgggcttatgtttgttcactcaattttgtagtaaacagaatttggtataccaaggggatctatataacaatgtatgccataaattttctgtctaccatttctcatgaaatgcttatattgttt

SEQ ID NO: 1350 - DNA, 356 bp, Zea mays
  Clone ID: LIB3115-026-P1-K1-B9
cccacgcgtccggacggctacccgccagcggggtacccgccggccggctaccccccgccggcgcagggctacccgccgcaggggtgacccgcagcagggttacccgcagcagggctacccgccgcagtacgcgcagccgcctccacagcagcagcagagcagcgggccttccttcatggaaggatgcttggctgccctctgctgctgctgcctcctggacgcctgcttctgacggaaccatccgtgccgggttcaacacggctgcaagtgaagcaaccagcttacggaagagctggaactgggccgggcctttctagctttgtgctgcgttatccgcctcttcttctttctttttt

SEQ ID NO: 1351 - DNA, 448 bp, Zea mays
  Clone ID: LIB3115-026-P1-K1-C1
gtatttccgtcacaactcacaacccgagccccccaaacccgaagcagcaggagctcccctgaccttgctccgcctccgatcaaggaaaaggaagatgagctactacggccagcagccccccgtcggcgtcccgccgcagcaaggctacccggggaaggacggctacccgccagcggggtacccgccggccggctaccccccgccggcgcagggctacccgcagcagggttacccacagcagggctacccgccgcagtacgcgcagccgcctccacagcagcagcagagcagcgggccttccttcatggaaggatgcttggctgccctctgctgctgctgcctcctggacgcctgcttctgacggatccatccgtgccgggttcaacacggctgcaagtgaagcaacaagcttacggatgagctggaactgggccgtgctattctagct

SEQ ID NO: 1352 - DNA, 193 bp, Zea mays
  Clone ID: LIB3115-026-P1-K1-C11
cccacgcgtccgacaactgcaacaattgctgccattcgaccaacttgctttgacaaacccagcggcgttctaccaacaacccatcattggtggtgccctcttttagattgcttatgagttatagttcaataataaagtttttttgctgatatttgtggcttcccagaaataagaaagtacatttctagattct

SEQ ID NO: 1353 - DNA, 268 bp, Zea mays
  unsure at all n locations
  Clone ID: LIB3115-026-P1-K1-C2
attccacctacgcgtacgctcttatcctctcaatttataacccaatcactttaaactcctatcaacatatgctcccctctcctatgtgtcatctccnatcaagggaaaggaatattatctacttcctccagcatccctccgtcaacataccgtcgaatcaaggctaccctcctaaggacagctatcccacaacgttttaccactcatccatctacccctcctctactcatttctaccctcatcatttttacccacaacaggtcttccc

SEQ ID NO: 1354 - DNA, 337 bp, Zea mays
  Clone ID: LIB3115-026-P1-K1-C3
catcaccttcaagaacaacgccggcttcccgcacaacgtcgtgttcgacgaagacgaggtgccgagcggcgtcgacgcctccaagatctcgcaggaggagtacctcaacgcgccaggcgagacctactccgtcaccctcaccgtgccgggcacctacggcttctactgcgagccgcaccaaggagcaggaatggtcggcaagatcacagtcaactaaagctagctatccattccatgcatctcgatctgtatgtactccgcccgtcgatggatgatgcatccatctctacttgttttcctcacatgtacaacaattaatgcaacaaattaagtacgt

SEQ ID NO: 1355 - DNA, 444 bp, Zea mays
  unsure at all n locations
  Clone ID: LIB3115-026-P1-K1-C4
atccaggacaaggagggcatcccaccggaccagcagcgtttgatcttcgctggcaagcagctggaggatggccgcacccttgcggattacaacatccagaaggagagcaccctccacctggtgctccgtctcaggggtggtatgcagatctttgtgaagacactcactggcaagacaatcacccttgaggtggagtcttcggataccattgacaatgtcaaggccaagatccaggacaaggagggcatcccacccgaccagcagcgcctcatcttcgccggcaagcagctggaggatggccgcaccctggcggattacaacatccagaaggagagcactctccacctggtgctccgcctcaggggtggcatgcagatntttgtgaagacattgactggcaagaccatcaccttggaggtggagagctctgacaccattgacaat

SEQ ID NO: 1356 - DNA, 431 bp, Zea mays
  Clone ID: LIB3115-026-P1-K1-C5
caccgaaccacaatggccacgttcctgggaagctcaccggcgctcctcgctcgtcccatcgccaagccgcacatctcctgcgcgcagaccccgcgcccggcaattgcccagaaccagacgccgtccagcgagcagccggaaccacagaaacagcggcactccgtgcaagcgcagccacagcaggcggcggcggcgaggccgaagcacgcgggcgtcgcggactccactgactggatagcctcgtcgttgacgcggcggtccggaatcggtgcggtgctggcgtgggccggcttcctggccgtcggcgtcgtgtcggagcagctcaagacacgcttcgaggtcgcgcagcagcaggccaacaccaaggacgtggagcaggagcacgaggtcgtgttgcccaacgggatccggtactacgagatgcgcgtcgg

SEQ ID NO: 1357 - DNA, 365 bp, Zea mays
  Clone ID: LIB3115-026-P1-K1-C7
ggcttgcaattctgagcaagcgcaccaaaggtggctgctcatgtatgtgcctgcttctatctgttgtcgccatcgtgattcttgcagtcatagtttggcttctcgtcaagtatctgtaaaggaaagaaagaagcagccggcctaccctgcagaccttactcgaaatgacccttatgtgtgtgcagccttcgcttaaaaagtcccttctgtgttactaccattgaaatgtgcatccctttgaaaataatatatatacggtggtttcatcttccctttcgtgagtggaatggttatggagtaatgtacattacatcgaatttgacacatacatgatcatcatctgcatcttgtgtatggtgtttggc

SEQ ID NO: 1358 - DNA, 379 bp, Zea mays
  Clone ID: LIB3115-026-P1-K1-C9
cccacgcgtccgggtcgacaccttcaccaagatcaactccatgccccgtgttggcagcgccggcaactgggccgcctgggacgaagccatatagtagatctagccatgccatgtccactgcgctgcctgcaacccgttcgccggtgcccctgcccgtggtctttatcatcttaccaaccacgagactttgcttctaaaccagaggctccatctgtgtgccgccttgttttactagaaatccttttttattttatcctttttcacttttcctgcctagtttttttccttatcctgccattgtacaaacaatttctccagtgcttgtagcttgtggacttgggttgtccaacatgtcatgaatacaaactgagtttgcttc

SEQ ID NO: 1359 - DNA, 469 bp, Zea mays
  Clone ID: LIB3115-026-P1-K1-D1
cccacgcgtccgatgaccaaggcccaggaagccggcaagctggtggtcattgacttcactgccgcctggtgcggtccatgccgcgccatcgccccactgttcgtcgaacacgccaagaagttcactcaggtcgtgttcctgaaggtggacgtggacgaagtgaaggaagtcaccgcggcctacgaggtcgaggcgatgccgaccttccacttcgtcaagaacggcaagacggtcgcgaccatcgtgggtgccaggaaggacgagctcctggcccagatcgagaagcatgctgcgcctgcgcctgcgtctgcgtctgcctaaaggagatcagatcagtcgtcgccgtcaataagggccagcacgtatggctgtaaatgttgtcgttatcagttctggctttgtcgtttgtgggcgattgtgaactagtagtatgttggtttctatccgagccggaggcgatacttaacca

SEQ ID NO: 1360 - DNA, 429 bp, Zea mays
  Clone ID: LIB3115-026-P1-K1-D11
gccaactacacctatgagatcacctgctagtaatgaagcccaagaatctttgaccattggtatagccgatgaacacattggtgctgttgtaggtcgagcaggaaggaacataacagagatcattcaggctagtggtgctcggatcaagatatcagataggggtgactatatatctgggacatctgacaggaaagtgacgattactggaacacccgaagctatccggaccgcggagtccatgatcatgcagagggtgtcagccagttcagagaggtgatgagccccttctgaaggaagggcgtaggccattgctgtgtccgagcacagcagcgtgtttgatgcaagttaggaggatgtgggaactgctttcctttttattttccccccttttttctttttccctagcaagctcgagcagaaaaaagaaac

SEQ ID NO: 1361 - DNA, 244 bp, Zea mays
  unsure at all n locations
  Clone ID: LIB3115-026-P1-K1-D12
ccacgcgtccgtccacgcttactttttctctttttcggacacgtattcccccacactggcgtttcccaaaaacagaaagaagccnctccacacattgcttctaataacaaaactctcataactcaaacttttcctactatcttcaaaatttcagatagaagtcactatttataagggaaaaaatatactaaaattatcatttactcatacaatagtaatttttctaaccataccatctattatc

SEQ ID NO: 1362 - DNA, 133 bp, Zea mays
  Clone ID: LIB3115-026-P1-K1-D2
aacctcctaacaccaagacccaataatttttcttttttaaggacattaacttcacttccatctagagcttttcatacaatgccaagaccccacctttcctcaaacacaccaagaaatacactcaattcatcct

SEQ ID NO: 1363 - DNA, 335 bp, Zea mays
  Clone ID: LIB3115-026-P1-K1-D3
gcattcacctttaaaaaaaaaaaaaaaaaaaataaaaataaaaaaaaaaaaaaaaaaaaaaaaaaaaaagaaaaaaaaaaaaaaaggggaagggaaaaaaaaaaaaaaaaaaaaaaaaaaaaaaaaaaaaaaaaaaaaaaaagggggggccgttttaaaggaccaaagtttacttccgggggcttgcaacgtaaaagtttttttttggggcccccaaaattaaattcatgggccgggttttaaaaacggggggacgggaaaaacccgggggttcccaaattaaatggcttggaaaaaaatccccttttccccagttggggtaaaaccaaaaaggc

SEQ ID NO: 1364 - DNA, 465 bp, Zea mays
  Clone ID: LIB3115-026-P1-K1-D4
cccacgcgtccgcctgagtccactgaaaggcatattttcttccatcgaaaatgcagcatcctcggttgcaaagaccatatctgagcagcctccgctcaaaataccgatcaggacaaacaatgctgaatcgtggttgcttacgacataccttgacgaagagctcaggatctccagaggcgatggcagcagcatctttgtgctgttcaaggagggaagtactcttctatactgagatccaaatcccgagtccatgatcgttgaagctgaaccgtgaagtagttatactgcttatgcttttctttcttatagtaatatgctccgtctcaaaataagtcaatttctagaatcacttaaagtcaaattatcttaagtttgaccaattttataggaaaggcaccatcgtctatgtctctatgacaccaaatgagtacattatgaaaaatatttatggtgcattagtgacac

SEQ ID NO: 1365 - DNA, 440 bp, Zea mays
  Clone ID: LIB3115-026-P1-K1-D5
cccacgcgtccggatctccaaaaggaagttaattctgtaaaccagagacttaatattgctatcgaaaaggttaaagaaccttatagacaacctaatattcttgcggaatatatagctttccaattaaaaaatagagtttcattccgaaaagcaatgaaaaaagctattgaattaactaaaaaagcggatataaagggaataaaaatccaaattgcgggtcgtctagcaggaaaagaaattgcacgtgccgaatgcatcaaaaagggtagactacccctccaaacaattcgcgctaaaattgattattgctgctatccaattcgaactatctatggagtattaggtgtcaaaatttggatattcgtagaagaagaataactaaccatgtcttcccattccgcccagtgatagaataaaaaagacaagaaccttgtttttcc

SEQ ID NO: 1366 - DNA, 410 bp, Zea mays
  Clone ID: LIB3115-026-P1-K1-D9
aattgtcaaggggaccatgacgacgacgcactcgtacaccggcgaccagaggctgctggacgcgtcccaccgcgacctccggcgggcccgcgcggcggcgctgaacatcgtgccgacgagcacgggcgccgccaaggccgtggcgctggtgctgccgcagctgaaggggaagctgaacggcatcgcgctgcgggtgccgaccccgaacgtgtccgtggtggacctggtgatcaacaccgtgaagactggcatcacggccgacgacgtgaacgcggcgttccgcaaggccgccgccggcccgctgcagggcatcctggatgtctgcgacgtgccgctcgtgtccgtcgactttaggtgctccgacgtgtcctgcaccatcgacgcgtcgctcaacatggtcatgggcgacg

SEQ ID NO: 1367 - DNA, 433 bp, Zea mays
  Clone ID: LIB3115-026-P1-K1-E10
gctggagctggagaagttcatcacgcacagcgtgcccttctcggagatcaacacggcgttcgagctgatgctcaagggggagagcctgcgctgcatcatgaggatggaggattagagcttcattgcaagcttgctcctcctgcagggcaggcatgtcgcacagcaaatgggcatgaaaagttgaaggcgctccagtcctccagcttgtgtagtacacagtagcaataaaacgttagtgtttgtcctgtgcccatcctgtattattctgttccagggtttcacctttatcgtcagtgtgtggtcaggtttcaacccttctcagaacaaccccctcccagaaaaaaaacaaaggaagaagtttgtgtccaggtttcagaatcccctgtctgtaattaccattttgcatgacaataatgagatactgtagatattt

SEQ ID NO: 1368 - DNA, 382 bp, Zea mays
  Clone ID: LIB3115-026-P1-K1-E12
gtcatatctagctagtagctccctgaaaagttcactagagaagcatttgagggaggagccatgtctgaggagaagcaccaccaccacctgttccaccaccgcaaggcagaggaggaggaaggcgcctccggcgaggtcgactacgagaagaaggagaagcaccacaagcacatggagcagctcggccagctcggcgccatcgccgccggcgcgtacgctctgcacgagaagcacaaggccaagaaggacccggagaacgagcacggccaccgggtcaaggaggaggtggccgccgtcgccgccgtgggctccgcgggttcgcctttcacgagcatcacgagaagaaggacgccaagaagcacgcccacaactgatccgtcgc

SEQ ID NO: 1369 - DNA, 381 bp, Zea mays
  Clone ID: LIB3115-026-P1-K1-E6
gtagaataagaggtgctaccccactgtttgctgtgtttctatggtcaaaaaaaaaaataaaaagaaaggaaaaaaaaaaagaaggagagaggaaaaaaaataaaaaaaaaaaaaaaaaaaaaaaaaaaaaaaaaaaaaaaaaaaaaaaaaaaaaaaaaaaaaaaaaaaaaaaaaaaaaaattggggcccccccttttaaaaaacccaatttttcttccccttctttccaaattaatatttttttttttttgccccctaatttaatttccctgccccttttttaacaccctttatcctgaaaaacccctggttttcccaaatttaattcctttgaaaaaaatcccctttttccaagttgggttatatacaaaaaaccccccc

SEQ ID NO: 1370 - DNA, 451 bp, Zea mays
  Clone ID: LIB3115-026-P1-K1-E7
tgaaagcctaccttatgttggcgcaatggcagtttccaatcttgaggctcggcagtctctcggacccctcgggagcgtggaggaggctgctagcatcatacgactcgaagcgcgatgagctccctccaccggtaatcgtgtgggagtggggctggacaaagagcgcggagacctggaatggtcgtgcggcgatgctggccgtgctggctctcctggtgctggaagtgaccaccggcgaagggttcctgcatcaatggggaatcctgcctctgttccgctgagccgacagttctgttcatgatggggtcataattttgctgcagccgaaggaagttttgaacttctgatgctgtatatgaatcaatttgccttaaatcgtcgatgggaaaagaggagaaaatggtaaaatatggacagaattcgacggtatatcatgttatattgtacctac

SEQ ID NO: 1371 - DNA, 419 bp, Zea mays
  Clone ID: LIB3115-026-P1-K1-F1
gtcaacggtaacaatgctgcgcccatctacaagttcctgaaatctagcaaaggtggccttttcggcgacagcatcaagtggaacttttccaaattcttggttgacaaggagggacgtgttgtggatcgctatgctccaaccacttcacctctgagcattgagaaggatatcaagaagctgcttgggagctcttaaacaatatctgggtgcaaaactgtagaaaaacatgtatcaacaatgccctgagcgataaaatatatgataagctgtattaataagtattgccgtacttgagaggttgcagtatctgctctatttcccttgcatacactctgtacttgtatatccccttccaatgaattccaatgctgtatcagtttgctaccccattttcgtgtgactgacctgataatagcata

SEQ ID NO: 1372 - DNA, 289 bp, Zea mays
  unsure at all n locations
  Clone ID: LIB3115-026-P1-K1-F10
tatcctatcattccanaanttattcttttttctaaaaatttacttcataaatcttnatgtctccatattactagaggataagtcccatcatatccctttcctcataacatctttttattttttctatttttcctattcctaactaatcttacactactactaatcattttttttccattcttattttatctattctatcccacaaatatcacaactattactaacatattacaccttatatatttttttcttatcattccaaaatatctcttatttttttccttatttt

SEQ ID NO: 1373 - DNA, 375 bp, Zea mays
  unsure at all n locations
  Clone ID: LIB3115-026-P1-K1-F11
ggcttctcctccccctccggttcgggttcgggttcgtgaggttctccggggttcggtttcgggggtgagcggatcgagatgggggcgtcngatgttgagtaccgctgcttcgtcggcggcctcgcctgggccacggacgaccactccctccacaacgccttcagcacctacggcgaggtcctcgagtccaagatcatcctcgatcgggagacgcagaggtcccgcggcttcggcttcgtcaccttctccacggaggaggcgatgcggaacgccatcgagggcatgaacggcaaggagctggacggccgcaacatcaccgtcaacgaggcccagtcccgcggcggccgtggaagcggcggcggtgggtacggtggt

SEQ ID NO: 1374 - DNA, 312 bp, Zea mays
  Clone ID: LIB3115-026-P1-K1-F12
cggacgcgtgggcttgtgaggctgttaccatcattgaaacccctcctcttgtcattgttgggctcgtggcatatgtgaagactcctcgtggcctccgcacactcaactctgtttgggcccaacatcttagtgaagaagtgaggagaaggttctacaagaactggtgcaagagcaagaagaaggctttcacaaagtatgctctcaaatatgaaaatgatgctggcaagaaggaaattcagctgcagcttgagaagatgaagaaatatgcttctgttatccgtgtcattgctcatacccagattaggaagatga

SEQ ID NO: 1375 - DNA, 374 bp, Zea mays
  unsure at all n locations
  Clone ID: LIB3115-026-P1-K1-F4
cccacgcgtccggcgggctggcgctactgtacatggaaagtgcttctgcttgcaggttgctactactcggtcgacatgggtatatgcttttcatgttactgtctttgatgtgtatcgatcaggtgccgaatgtgatactttggcttgtaaaaaaaaaaaaaaaaaaaaaaaaaaaaaaaaaaaaaaaaaaaaaaaaaaaaaaaaaaaaaaaaaaaaaaaaaaaaaaaaaaaaaaaaaaaaaaaaaaaaaaaaaaaaaaaaaaaaaaaaaaaaaaaaaaaaaaaaaaaannnggggggggccctttttaagggaccaaagttttcttcccgggttttgcgagaaaatatcttttttttggggccccttaatttaa

SEQ ID NO: 1376 - DNA, 398 bp, Zea mays
  Clone ID: LIB3115-026-P1-K1-F7
cccacgcgtccgctggacgaccatggcctcgccgctgctcaagtcgcactctcagctcgccggcgccgccgccctgcactccgtgaggagagccgaccgctgccctgcgacaatacacctgggcaagttccatgaccacgggctcaggtccggccgttctaagagatccggttcagcgaaggtgggcgccttcccgtcgctggacgtggtgccgctgatggtgacgatggtggagcacgtggacatgtcgcgggactacgtcgtgaccaagtccatctggcatctcagcgacgcagccctcaagagcgtctataccttctacgccatgttcaccgtctggggagtctgcttcttcgcgtccatgaaggatcccctctacgacagcgagacgtacagga

SEQ ID NO: 1377 - DNA, 316 bp, Zea mays
  Clone ID: LIB3115-026-P1-K1-F8
cccacgcgtccgggtagcggcgtggcagccgcggcggcgtacctgtcaaactccacgccgctcatcccatctaggatctgagaacaatgtaaggggaggatatcgcaaacaaggccagcgacaacgagtgggcagacgaacgaacaaagcgttgctacatagtactctctcagaatgtaaagttaaatttcacacccagctgttgctacatagtagtatagttttatgaattacgggtttgattaaacttcaaattaatctacatgtatagccctgcccagatttaactatattgggaccgtattacttaccgatc

SEQ ID NO: 1378 - DNA, 378 bp, Zea mays
  Clone ID: LIB3115-026-P1-K1-F9
ccactcgtcctgttagcgtcattgcatccttttcggcgaacctctcaaactccactccgcggatcccatctaagagctgagaagagtgtaatactactatatcgcaaacaaatccagccacaacgagtggacagacaaactaacaaagcgttcctacataatactctctcataatctaaagttaaattacacacccatcttttgctacatagcagtatacttttatgaatcaccgcttttattaaacttcaaattaatctacatgtatacccctgcccagatttaactatattgttaccgtattactcaccgatcattaaaaaacaaatcttacaatctttaaaaactaataaattaattcttattatatttacttaa

SEQ ID NO: 1379 - DNA, 271 bp, Zea mays
  Clone ID: LIB3115-026-P1-K1-G1
cggacgcgtgggcggacgcgtgggctccagttcgccagcaagatctgagacgctcccgttccatgtaaaattccgtgtcatcgtgaagggtcttctggagctctggtcatgattgagaaatgttctgctacagatgttatactacatacgtgactacactacatgatatattcggttttctgattgtgatatctgtacgtggctacactcacatgtgagatttgaataagtcctgcagcctcagggctcagctagcacaaaaaaaaaacaa

SEQ ID NO: 1380 - DNA, 150 bp, Zea mays
  Clone ID: LIB3115-026-P1-K1-G2
tcgaccacgcgtgcgcgggcccaggtaacgctttaacgccacgcacgcttgtttcccggcctgttaaacggccccaacggcctggtctttgccggccccaaggcgtggtcccccttccccttcaacggcggcggggtctttgcgggccgc

SEQ ID NO: 1381 - DNA, 336 bp, Zea mays
  Clone ID: LIB3115-026-P1-K1-G5
cccacacacatttgatcgacccagcgacgtacccgccaattttttttcttcttctttcctttgtgcccgcccccttttcttcaggctttgtcttctagttttgtccagaaattgaaagatgtgttaagatgtgttgatttgatttagttttttaattaccgtacccgtggtaattaaattatgtacctacttatatatacattacgccgaagaggaaggatcactttgtataagaaaagagagaaatgggggatgtaggagggggggctaggggcccggctttggggtggtattcttttagcatatggaacacaataaatttaatttcattcttgg

SEQ ID NO: 1382 - DNA, 356 bp, Zea mays
  Clone ID: LIB3115-026-P1-K1-G6
cccacgcgtccggagaaaggtgattaaattaagtatacaaaatggtgttccgtcggagtacacagatatgatctttcttcaaacagatgtggataaagtagaaggaacacaaaaggtcaagcaaaaactgaaaggacacaaaggcagagatgagcaacagatttatggcctgaaactgggattcggtaacaaagatgctacacgggaaaatctcatcacaggatttggagacatgaatccggcagagaaatctgtgatgctccaaaagggatcgggctgttgcagccgcgtcgcagactgcctctgctgcatgtgctgcatcaaggcgtgcaacaggatgaacgaccagtgcgccg

SEQ ID NO: 1383 - DNA, 437 bp, Zea mays
  Clone ID: LIB3115-026-P1-K1-G9
cccacgcgtccgagcttactcttcggtggatgtgaaacgtagcgtggatgatggtgagaaacgtttcaatcagctttcaattgaggagaggggcaagtttgatgaagagacacttgtcaacgtgaacagcatcaagaggaataaaggaggcagccaaagatcaagtggttttagcaacgagtacattgtgataaccatattggttgctgctgagggagtacataagctgccggttataaatagcagcaatgacttaaagacagctctacaaaagatgggtgccataccatcaagcaaaatactggcagtcgaggtcctgtggactccgcaaaatgagaatgacacattgtccgagcgagagctccttgaagattacccgctcttaaggcctctgtagaaagataaaagttacagattgcccgtgcaaaggaagaaca

SEQ ID NO: 1384 - DNA, 216 bp, Zea mays
  Clone ID: LIB3115-026-P1-K1-H10
ctagaatctactcgtcgagtcaccatttataatgctctatcggactcggagtctcggacagcagagcaaagcaagagccgctgcgcaagtatagtctctgacaccggccgaccctgccctgcaacccaagccatggctgacaacaacaaccggcggaaccacgggcagaccttgctcgccggcgcgggcctgggcctgctcgccgtgaactcgggc

SEQ ID NO: 1385 - DNA, 332 bp, Zea mays
  Clone ID: LIB3115-026-P1-K1-H11
cccacgcgtccggttttgtttctctctcacgcaagtcgcaaagcaaagcgtcccccaccatggcttccacgacgacgacggcatgcaacaacctggcgggcgtgtggctcggcgagctctcgtcggcgctgcatgggacgtggcaggcggtggccgtggccgccacccacgggctcggcgaggacgacgacccgcggctgccgtgccagcagcagcagaggccgtggcgaggcgacgacaggagcagcagcaacaacaaggcgttgcgaggagccgcggcggccgggacggacaggcgggagggggacgtctcgaggtgcggcggcgccatg

SEQ ID NO: 1386 - DNA, 170 bp, Zea mays
  Clone ID: LIB3115-026-P1-K1-H12
ctagcttttcactttcactacacgtgtacgagctcactgatctgatctcatctcaattctgacagcgccggtaggacggactccgactctccgagtgcgcgcgttgatcgcccatgggcaactacctgtcgtgcacgctggccaaggcgcccgggccgaggcccggcggc

SEQ ID NO: 1387 - DNA, 423 bp, Zea mays
  unsure at all n locations
  Clone ID: LIB3115-026-P1-K1-H3
cccacgcgtccgcccacgcgtccgcccacgcgttcgcgtacgcgtgggctcctcttgcgattcgctcggtcgatcctagcttctgttccaagaagcgcancgcccatggccatggccacgcaagcctccgccgtcacgcgccacctgctggccgtcgcctgggcgccggcggcgaagccgcggcagctgagctcgcagctcgcgctgccgtcgtcgtcctcccgcgggccggccccgctccgcgcgtccaccgaggaggcggtggaagcgcctaaggggttcgtggccccgcagctggaccccagcacgccgtccccgatcttcggcggcagcacgggcgggctgctccgcaaggcgcangtggaggagttctacgtcatcacgtggacgtcccccaaggagcaggtgttcgagatgcccacc

SEQ ID NO: 1388 - DNA, 322 bp, Zea mays
  unsure at all n locations
  Clone ID: LIB3115-026-P1-K1-H4
ccgggtcgaggccacgcgtcacggatgatactgcggtggcggcgtgaagttggcggcatcttgcatncgtcgagatannatcgatggaaaggagctccgtgannatgagaggacgaacgaccgagtatatcggtaccctgaagatagaataccagactcatgtgaggctagtcttggccagatctattgtagtgcatacataagagatnactctggcaaagggttggtcgtcccaaccgggctggccccaaagtggaaagagtatgacnncgtgcatgtggcagtggcagcacncnaacgttggtgggattgaaatcgatcg

SEQ ID NO: 1389 - DNA, 464 bp, Zea mays
  Clone ID: LIB3115-026-P1-K1-H5
acgcgtccgcccacgcgtccgacgacggcgatcgcggcggttttgatgaacacgggcaggccgacggcgagggtggacgtggaggtgaacgactaccagccgtccggccccaacaaccgccacgacccacccaagggacccggaagaccttgaacgggggcccggctcagctcagctggacgacgacccggccggccaataattcgtcgtcgtcgtcgtcgccgtcgtcttcacaccggtattacaaagtgcgtcgcttgtgctagctcctgtactctagttctagtagaaattaaggtcgtcgaaacaaagtcacctagctgcgtttgtatacatataccggccgcgcgtgtgtatggctgtgtgcaagcacatcggtgcagtggggtgtgttgttcttaggctggttggttgctgctcgtcggaaagaactgcactgcatgcagatcgatttcgtctcctgc

SEQ ID NO: 1390 - DNA, 280 bp, Zea mays
  Clone ID: LIB3115-026-P1-K1-H7
tagctcctgtcttctgatgtgtgctaacgcgaccattttcctatactcacagctctatagcgcccttttccccataccttccatcaatgaccgcttcagtatgtgaaaacccagcccttcaaccctacaggctccaacaagcaatcgcaacaagcaacttacctttatcacccctgttctttcaacaatcgccagccctatctttggtgcagtcattggtacaaaccatcaaggcacaacagctgcagcaactcgtgctaccagtgatcgccaagtgctt

SEQ ID NO: 1391 - DNA, 379 bp, Zea mays
  Clone ID: LIB3115-026-P1-K1-H9
cccacgcgtccgcatcttccaccttaacccattcggccgctttgtcattggtggacctcacggcgatgctggtctcactggccgcaagatcatcattgacacctacggtggctggggagcccatggtggtggcgctttctccggcaaggacccaaccaaggttgaccgcagcggagcctatgtcgcgaggcaggctgccaagagcatcgtcgccagcggccttgctcgccgcgccatcgtccaggtgtcttacgccatcggcgtgcccgagcctctctccgtgttcgtcgacacgtacggcaccggcgcgatccccgacaaggagatcctcaagattgtcaaggagaacttcgatttcaggcctggcatgatcatcatc

SEQ ID NO: 1392 - DNA, 451 bp, Zea mays
  Clone ID: LIB3115-028-P1-K1-A10
gaaaaacgggccgaccgacgcgtccgactttacttaaagttccttgacaagtttttttgttagcaagggacacaaggagcatgggccgctctgttcatcttccagtcactccatcttacatggacattgcttcagatcttccctcccgaacttctccaccgtattccagcatagaccttggaccagtactatagcagagatgcttcccactgaatcactgatcgttgatcagcgttccaatatttaggcaagtgcagctttgaataaattgaacagattggtctcgaggccatttttctgtatttatctgtaatcaggtccaattctttgttgttggcgagcgcaagttattcatagatgacttggtcatggaaatatctgcaatattatgtcatgtatacgaaaatttcaattgttttgattcttcttccagaactgttatcaagagtat

SEQ ID NO: 1393 - DNA, 253 bp, Zea mays
  Clone ID: LIB3115-028-P1-K1-A2
cgcgggcgaccacgtgcccggccaccatgctctcgcttttcttcttcgacctagaccccaacctcacccgtcgccgtgcgttatcgcgctctgggccaccacagccgcgccctcctattcctactcctcctcatcgcccgccgtcggacccacgccggccgacgcggtggtcgagcttctccgcctggtggctgacccaagcgcggacccctgacccctctttcggaagctttcacattatctttacgcctac

SEQ ID NO: 1394 - DNA, 354 bp, Zea mays
  unsure at all n locations
  Clone ID: LIB3115-028-P1-K1-A3
cggaanngggggacgacccacgcgtacgattgtgtctggcgtggtcaagaaccaaatcaatgttgtaccgaccgactgagagtttggagtgtgtatgttttgctattactcttatctctagtagagtgtgggtatacctgggcagaatgtgtccacaaaagttgggggcctgtctgtgtactgtgtgcgatggacgccctaagtaaaaaaagggcaggtgatggtcgtgctccaggtttgtgttttgtactctgttgtaccttgaacctcctttgcgttttgctaatcagagaatgaatgcaaaaaaaaaaaaaaaactgcccaaatgttggctcctggttcatgttatgcttg

SEQ ID NO: 1395 - DNA, 343 bp, Zea mays
  Clone ID: LIB3115-028-P1-K1-A4
gacccacgcggacgattgtgtctggcatcatcaaaaaccaaattattgtttttaccgaccgactgaaagttcggctgcggcgtgttatgctatcactctcatcactagtacagcgtggatatacctgcccagaatgtgtccctaaaagttgggggcctcgtctgtgtactgcgtgcaatggacgccctaagtaaaaaacggacaggcgatggtcgtgctcaaggtttgtgttctgtactctgttgtaccttgaacctcctttgcgttttgcctaatcagagaatgaatgcataaaaaaaaaaaaaactgtcatagtgtcggctcctggtacatgttatactgt

SEQ ID NO: 1396 - DNA, 485 bp, Zea mays
  unsure at all n locations
  Clone ID: LIB3115-028-P1-K1-A5
cgggtccgacccacgcgntccgcacaggtttggagttaaggtgacttcagggtgatagggatgatggctaccacgataataagctccttggtgagttccagcttgaaggcattccaccagccccaagaggcatgccccagatcgaggttacctttgacattgatgccaatggcattgtaaaggtgtcagctagggacaaagccacaggcaaagaacaagaaatcaccatcaagtcttctggtggtttgtcagaggtcgaaattgagaagatggtgaaggaggccgagctacattctcagaaggaccaggaaaggaagtctcttattgatctcaagaactctgcagataccacgatctacagcattgagaagagtgtcagcgagtacaaggacaaggtccctgctgaagtcaccaaagagatcgagtctgctgtctctgatctgagggcagctatggctgaggacgatctggacaagatcaagcag

SEQ ID NO: 1397 - DNA, 283 bp, Zea mays
  Clone ID: LIB3115-028-P1-K1-A6
gaccgcccttttttttttttcttcttctctttcggtctctctccgacttttccacgcgggcgtggagcgatggttgggttggggctaccgcggcggcggcggcggctggagggactgatgtgtgggcccatcctggcttcggccgagttatcttatctatctatagtatcgtgttaccgctcgctactggaaccgagttagagtccgttctacctttggactaagtgttggtacccctgttgttcccttgtgttgctcccgctatgaaacgaggccagagaag

SEQ ID NO: 1398 - DNA, 471 bp, Zea mays
  unsure at all n locations
  Clone ID: LIB3115-028-P1-K1-A8
acgaaaagcaactatccaaggattaatgggcatgggccagcgtcgtcctcttcaagaggagcttaagactaagatgattttgagtcacaatcatgggagtaacgtgacaagaagataccctactatatcacaattattccagtaatgcgtcgagaagataccgttgtttaagtgcacaaaccaatacagtgacgtgccaagaagttaccgtattttaaggatgtttaattttcagtattcgtcggggtagtactgtgtcagaaacttatttgtacctaaaaaggccaaatattgcccgtgccttggtgctttatgctatgttatcgncttttgtgagtctgtgtgctaaagttgttgctttaatgctttgtgactcgcaagctgctactcttgcaatttttgcaacgacgaaactttgatatggagtcctnaaaaaaaaaatagaattataatatatatttatttttattt

SEQ ID NO: 1399 - DNA, 415 bp, Zea mays
  Clone ID: LIB3115-028-P1-K1-A9
gctttacttagagttccttgacaagtttgataggaagtttgtgacacaaggagcatgatgagacacggaacatcttccagtcactcgatcttgcatggacattgcttcggatcttccctcgcgaacttctccaccgtattccagcaaagaccttggaccagtactatagcagagatgcttcccactgaatcactgatcgttgatcagtgttccaatattttggcaagtgcagctttgaataaattgaacagattggcctcgtggccattttcctgtatttatcttgagtcaggtccaattcttttctgttggtgagcgcaagttattcatagatgactcggtcatgggaatatttggaatattatggtatggatcggtaaaattccagtggtttggttcaactggcaaaactggt

SEQ ID NO: 1400 - DNA, 431 bp, Zea mays
  unsure at all n locations
  Clone ID: LIB3115-028-P1-K1-B2
gcgtccgcggacgcgtgggtgcacttgtatttcttgtgcctgcttattgctgggctagccgccgggcgcttgctctgatagcttgctccaggacgtacgtacgtacgtagatcgatccatcgatcgctagctagctgacgaccatggcgtccctctcctctgccgccatcaccgccccttccttcacggccgcgcccgctcgcgcagtggtcagcaggaggtccttcaccgtgcgtgcctctctccgcaaggccactgccaccgccgccgtggccgttgccgacagcgtcctgcttgccggcggcggcgccatggcccaggaggtgctgctgggctcangcgacggcgggctcgtctttgagcccagtcagttcaccgtcaaggccggcgacaccatcaccttcaagaacaacgccggctttccgcacaac

SEQ ID NO: 1401 - DNA, 380 bp, Zea mays
  Clone ID: LIB3115-028-P1-K1-B3
cccacgcgtccgacttcccttcgagtatcatatcctatattgaagacaggaactctggcgtgacaacccagacattgttgaaccatgcttgggcatctgcaaacaatcgtaaaaagaatagctctgaatctaacactgatgaaattcccaagatttatgttcctacaaacccaaaaggtgctgagagacttccaccaggcattgtagtgtctgaaacagatctttatccccgaagactatggggtgatcctagtgaggaccttactagcgagccgaggtatcttgttacatttactgttggtattgggcaaaaggcaaatattgatgcagcaatcaaaaagttttcagacaaattcactattatgctgttccattatgat

SEQ ID NO: 1402 - DNA, 421 bp, Zea mays
  unsure at all n locations
  Clone ID: LIB3115-028-P1-K1-B4
cggacgcgtgggtggatcccgacgcagaggttacgttcgagttcgtccccgtgatccggcggtacaggagcggccgtgtggagcgcctgctccccgtcaatccggtcccaccctccgtcgacgccgccaccggggtcgcctccaaggacgtcaccgttgacaaggccacaggcctatgggcgcgcctctacctcccagacccagatctatccgcgcgcccaggcggcgataggcgtctccccatcgtcctctacttccacggcggnggcctcgtggtcggatccgtggccgacgcccccgagcacgccttcgtgaaccgtctcgcagcgcgggccggcgcgctcgccgtgtacgtggagtaccggctggcgccggagcaccccgtccccgcctgctacgacgacgcctgggccgcgcttcg

SEQ ID NO: 1403 - DNA, 431 bp, Zea mays
  Clone ID: LIB3115-028-P1-K1-C11
gtgcgggccctgccgcttcatcgagccggccttcaaggagctggcctcccgcttcaccgatgccatcttcgtcaaggttgacgtcgacgagctcgcggaggtcgcaaggacatggaaggtagaggcgatgccaacgttcgtgctggtcaaggatgggaaggaggtaggccgtgtgattggggctaagaaggacgagcttgagaggaagatcaggatgttcgtcacgtcatcttcctcgtcctaacttagcagtgcatacactcccaccttcttactggtttctcgactccagtggttcacctgggacggggttgctgaaatggttcccttctctgaatactgaaaaatcaaaaaaagaagtatatgaaaaaatgatggtagacgtgtctgggtcaataagagtttctgaaacttggatttgtatgtgtcag

SEQ ID NO: 1404 - DNA, 282 bp, Zea mays
  unsure at all n locations
  Clone ID: LIB3115-028-P1-K1-C12
gaccgacttcaggaccggcgaggacccatgtgtggaaggcatgaggatgatccggagccagcggtgctcagtgctcacacatganacctatgtatgcctccgttccttgtgatgaggaaataggcttgcgttcgttctccgtgggcgttgttcctacaaattcacttgctctttgtctctctctatatatacacactgtataaaacaagaacacctgtttatcatctcttcttatataaccttatgaacactgtgaaaaaataaatatttattatttttttt

SEQ ID NO: 1405 - DNA, 415 bp, Zea mays
  Clone ID: LIB3115-028-P1-K1-C3
ccggggccgggctcagcctggcgtccgtccatacctaccgccgccgtctcggtcggatcctatccatcgtggagaagctggggcatgtggtccgcaccggcccgacaagcaccaagaaagacgcgctggccgcgctgctgtcgctggccggcgagagggagaacgtcggaaagctcgtgagcgccggcgtcgcgcaagtagccctgtctgcgatcagcgaagaggagaccgccgcggcagtgctggccgcattggcgaagcgcggcggcgcggatgcgatcgtgggcatcgatggcgccgtggcgcgtctggtggccgagatgcggcgcggcacggaatgggccagggagaacgcgacggcggcgctggtgctcctgtgccggcggatgggcgcgcgggtggtaatgcaagggat

SEQ ID NO: 1406 - DNA, 332 bp, Zea mays
  unsure at all n locations
  Clone ID: LIB3115-028-P1-K1-C4
cgaacgcgtggttcctccctctttggatacattcttttatcccattgggctaactacactgggtggtggcctaccactatatcagaagatacaaaatcttttcacgatactcaacactccttcattgacaactattcactcttttaagccaaagaactatcgcaccatcgcaatgatgttctccaagacttctgtccttctctaactgccctacaggccactctcgcagttgctggcaacgccatcgtcagcacccgttgctcttacgatatcntggtttggtctgtggaccagtcgcacacctcgggagcaattcgtgtgcctgcttcgtc

SEQ ID NO: 1407 - DNA, 376 bp, Zea mays
  Clone ID: LIB3115-028-P1-K1-C6
cgtccacccacgcgtccgaaaacagggagcggaaaattaactttaatccagccccttttccgcatcgtcggcgctgttgtcggccagatagtgatagacggcatcgacatccgcacggttgggctgcatgatctgaggtccaggctgagcatcattccacaggagccgacgatgttcgaaggaactgtcaggagcaaccttgaccctcttggggagtactccgacgatcagatctgggaggctttggattgctgtcagctaggggacgaagtcaggaagcaggagctgaagctcgactcaccagtggtagagaacggtgagaactggaacgtgggccagcgccagctcgtgtgccttggcagggtgatcctgaaac

SEQ ID NO: 1408 - DNA, 341 bp, Zea mays
  unsure at all n locations
  Clone ID: LIB3115-028-P1-K1-C7
ggaannacccgggctcgacgccagcgcgnntccggctanngcacctcatctnntgcagcaggcgtgagctcgttccgacccacgatccgtgcccgtgtgtgtggggtgggaggatgtgctacangnncagcttaccgcttcnnccatggcngnnagccaggtngnnatgaagaaagcagcncnncggtgcacctttcgagtgccgagnnngggccttgnntcaggcngctttngcgctcacngnncggcccnncggcccnncggttcaagcgnnntcgtcaagtgcccgcnccatccanngcctcgagaagtggcgaacgtacccccaggtggtgggcagc

SEQ ID NO: 1409 - DNA, 351 bp, Zea mays
  Clone ID: LIB3115-028-P1-K1-C8
cctccacggccttcgccggcaaggccgtgatcgtgccgtcgtcgtccgccttcggggaggggcgcgtgacgatgcgcaagacggcggcgaaggccaagccagcggcggcgtccgggagcccgtggtacggccccgaccgcgtgctgtacctgggcccactgtccggcgagccgccgagctacctgacgggcgagttcccgggcgactacggctgggacaccgcggggctgtcggcggacccggagacgttcgccaagaaccgggagctggaggtgatccactcccgcttggccatgctgggcgcgctcggctgcgtcttcccggagcttctcgcccgcaacggcgttaagt

SEQ ID NO: 1410 - DNA, 398 bp, Zea mays
  Clone ID: LIB3115-028-P1-K1-D10
gtagtagcagccgcagcccaaacggttggcttttctggcagctgcacagcagacccttggggaagcttttctggcagctgcagctacatgattttgtctcggtgtagtagcagccgcagcccaaacggttgtaggggtgaaaacgggtagggtacccgaaacgggtaccggatacggatactcattcgggaccatttttcggatacggatacgggtatttttatattcgggacggatacgggtaatacccggatagtacagcttcggattcgggtcggatatggaacgagtactacccggtaaatacccggatattcgggtcggatacgggtacccggaattcgggtacccgatttttctttttctgcataataatatagttataaaaacatgacttt

SEQ ID NO: 1411 - DNA, 229 bp, Zea mays
  unsure at all n locations
  Clone ID: LIB3115-028-P1-K1-D11
ggaanacccggggcgacgccgacgcgtccggcacgccccagcttggctggttatantattagtgttgttcgccgccaaagaaagaaacggcctgctggcttcactctcacgccttccaggttcaaatgttttgagacgtgtacctacacgtnngcatgtggtttcaaagaaatggcggacctngctggcgttgcccaatggaagatactggcccacctcttttgctttt

SEQ ID NO: 1412 - DNA, 179 bp, Zea mays
  unsure at all n locations
  Clone ID: LIB3115-028-P1-K1-D2
cgttttaccaacctgtcgctgacctgggggaaaaccacnttggcgttaccctcaacttaatgcgcctttgcanngcacatcctcccgtttcgcccagctgnngcgtaatagccgaagaggctccgcacctgatcggcccttcccaacaagttgcgcagacctgaatgtgcgaatgggac

SEQ ID NO: 1413 - DNA, 181 bp, Zea mays
  unsure at all n locations
  Clone ID: LIB3115-028-P1-K1-D4
cgcgctcttccgccgcaacgcaacctcgtcctttctcgttgtccgcggaccctcccggctccacgtngggcgcccaggcccagcacccgttcctcacgctcctgggcccgccgttgccgccggacaccgaggcggcggagccctccggggaggaggaggcgccgccggatgaggcgctcga

SEQ ID NO: 1414 - DNA, 301 bp, Zea mays
  Clone ID: LIB3115-028-P1-K1-D6
ggggggggcgcgcgaacaaaaatttttataaggtgtttttttattatagaaaaaattcacgacgcgggtcttacaaatccctatggatcgttttcatcaataagatatatcacccaaatgtcacaaaatgtctgttcagtctgtttggatgtcatcaacccacatggacccaatgtttgatcttgcaatgtgttcaggcttccttccacactttgtatatccaatcctctgaccattaaatgagatcagctgcgttgagatgcggatcgccctgttacaacaaaagtgaagagtctgtaaa

SEQ ID NO: 1415 - DNA, 406 bp, Zea mays
  unsure at all n locations
  Clone ID: LIB3115-028-P1-K1-D7
gaaagtctgcagagcaggctgtaaaggcgatcaagggcaaagagtccggtgaaccagttccggagtatgactacctgccatacttctactcccgatcattcgacctggcgtggcaattctacggcgacaacgtgggcgaaaccatcctgtttggcgacagtgaccccacctccagcaagcccaagttcggctcgtactggatcaaggacggcaaggtcttgggcgccttcctggagggcgggtcaccggacgagaacaaggccattgccaaggtggcgaaaacccanccgccggtcgctaacctcgaggagctcaagaaggatggcctccagttcgccagcaagatctgagacgctcccgttccatgtaaaaatccgtgtcatcgtgaaagttcttctggagctct

SEQ ID NO: 1416 - DNA, 465 bp, Zea mays
  Clone ID: LIB3115-028-P1-K1-D8
gcaagaacttgtagcttcagtctccggtcccgacggttaaatcgattgaactcctggtcctgcaaatcaccaaaccacaatcacaatgaagcacctcgcggcatacctcctcctcggccttggtggcaacacctcgccctccgctgccgacgtcaaggccgtccttgagtccgttggtatcgaggctgactccgaccgtcttgacaagctgatctccgagcttgagggcaaggacatcaacgagctcatcgcttccggttccgagaagcttgcttccgttccctccggcggtgccggtggtgctgccgcttccggtggtgctgctgccgctggtggctccgctgaggctgaggccgctcctgaggccgccaaggaggaggagaaggaggagtctgacgaggacatgggtttcggtctcttcgactaagcgcattaccatcggcaaaacaacaccttcacctacct

SEQ ID NO: 1417 - DNA, 395 bp, Zea mays
  Clone ID: LIB3115-028-P1-K1-D9
gctttatttcccttgcccttttccagagcacctccgccgtcggccatgggtcaagcctggggtaatctccaagataggctccaagggcggcggtggaaggagcaccaggtgaggaagatcaccgacaaggtgttcgaccgcctcacggaggacgcccagaagcgcgacaaggaggccctcagattcgaggaggtctacatcgccgtcctctgcgtctacaatgacatcaacaagtacttgccggggccgcaccacgaccccccgtccaaggagaagctcaaggccatgatggaggagtacgacgtgaacctggacgggctcctggaccgcgaggagttcgcggagttcatccggaagctgaccgtagactcgctgtgctcgatcagcgtgaagct

SEQ ID NO: 1418 - DNA, 196 bp, Zea mays
  Clone ID: LIB3115-028-P1-K1-E1
gcgtccgatcagtatggatgttcttagtgccatacaattagcgggagctgcattcagttgggtgcctaaggaaccttataacgaggatgcatgcctacttgattttgacgtgctattgatggagcctcgcaggctggagaaaaccctgattacttccatcaggtggggggctgatgccattcgtttagccaatcaa

SEQ ID NO: 1419 - DNA, 143 bp, Zea mays
  Clone ID: LIB3115-028-P1-K1-E10
atctccgccgcctcggggaaggccggggccatcatcggcgcgttcggcttcctgtacgcggcgcagaaccaggacaagagcaagacggacgccggctaccccgcgggcatcggcgtgcgcaaactcgctctttcgtccctcgc

SEQ ID NO: 1420 - DNA, 432 bp, Zea mays
  Clone ID: LIB3115-028-P1-K1-E2
cccacgcgtccgggcccagtgccagtggccattgttggctacagcaattccaaccaaatgggcaggcaccgatctttagcacggacaagcaaatcccagcacaggtgaaccattccggtgacgtcaacacgttcgcggtgcctcggagactagagacagaggagataccacacgtcgtcaatgacttccgggttgccgccagaaacgccatcaaagcaggctttgatggagtggagatccacgcggcaaacgggtacctgttcgatcagttcatgaaagacagcaccaatgaccgagacgactcctacgggggcagcttggagaaccggtgccgtttcacagccgaagtgatggcagccgtcgcggacgaagtcggtgccaaccgcctcggtgtgcgcctctctccgttcgcggattatatggactgccacg

SEQ ID NO: 1421 - DNA, 410 bp, Zea mays
  Clone ID: LIB3115-028-P1-K1-E3
gattaccaaacgaattttatattgggttattgctcaatatacatcttcatgcaaacattcatgatgcctgggacaatattcatgtctttacttgctggggctctttttggagtgattaaaggtggcattttggtagttttcactgccacagccggtggatcttcttgctattttgtctccaagctgattggcaggcccttggttagttggttgtggcctgaaaaactgagatatttccaatcagagattgctaagaggaaagaaaagctgctgaattatatgctttttctgagaataactccaactttgcccaatacattcataaatatggcgtcaccgattggtgacatacctttccatattttctttgctgcaacactagttggtcttattccagcatcttatattac

SEQ ID NO: 1422 - DNA, 173 bp, Zea mays
  Clone ID: LIB3115-028-P1-K1-E4
ccgcgcgtccgacaggatcttgcaaggttagggacccaggggttacacattttataactgaaaaacacatgggcggtttttgaggttgccaagttttaatttaaatgcaaatccacttggccaccaccatgtaccaaagcaggcttttaacattaaaggagaatgtttttttt

SEQ ID NO: 1423 - DNA, 355 bp, Zea mays
  Clone ID: LIB3115-028-P1-K1-E5
gacagctcatgcaaaggaatcttgtgggcggtccttttgcccactcattaatctgaatgggggggggactaattatgtgggataccatcacactgttcatccggtctgctgggtaaccatgacaggaaaaatgaagcagcgggcgtgttaccttatatatgttctctggaagcagctgacatatgttatctggatcatattcataatactatgtaggctgtgacaggaatctctatagtagagccatgattgttttttggatgggttacaggctgcgcaggagaatatgcccaaagatgatgtgtggggaggaggccttatctggttggaaaaggcactaaacacttgatgatta

SEQ ID NO: 1424 - DNA, 382 bp, Zea mays
  unsure at all n locations
  Clone ID: LIB3115-028-P1-K1-E6
cggggcggccgccggcggcggcacaagggaagcgaagaggattcatttcgatgtctgcgaccacggcaacggggcgggtctggcggacggccggnatgacctacatcggctactccaacatctgcgctgcgctggtacggaactgcctcaaggagcccttcaagtccgaggccgcgtcccgcgagaaggtccatttctccatctccaagtggacggatggcaaacaggagaagcccactgtccgcacagaatccgatgaataaagctctggtgccatagtggcatagtccttgctacagatgatttgaagtgttgggcgagttggcggaacatgctatttaactggcttgattttatagtcaatgctgaataataaatactt

SEQ ID NO: 1425 - DNA, 448 bp, Zea mays
  Clone ID: LIB3115-028-P1-K1-E8
aggggatcgaactcgaaggagaattttcatttaccccatccacttctcacctcaatctcgcgagaagcgaagccggaggaggagggtgcgaggagatcgcgagcagccggagccggagccggagccggaggcctagtagatgaagacgttcgatccgtggccggtcttcttccgccgggagtggaagcgcaattggcccttcctcacggggttcgccatcaccggcttcatcatcactaagatgacggccaacttcaccgaggaggacctcaagaactccaagttcgtccaggagcacaagaagcgctgaccaaccagtaatctatgacatggacgccggatggcactggcagagggatggtgtacggtgttgtccgaattgcctgtctggacagccagttatgttattcttgttgaatgataaattagttttcttttcttcatttaa

SEQ ID NO: 1426 - DNA, 231 bp, Zea mays
  unsure at all n locations
  Clone ID: LIB3115-028-P1-K1-F1
aaaaaccgggncggcccaagccgtccgaagggttctttccatagagaataatatacagtttattcgacgaaagaaacgaatgtaatatagagatatgagtggaatgcagcaaccgaactggcggaacaggcttccgttttcaatttcctgtgggaagtcgggtagggaaatcctggggggtgatttggtttaataaaccttgcctgccgatttgaatctcgtttaaccagc

SEQ ID NO: 1427 - DNA, 171 bp, Zea mays
  Clone ID: LIB3115-028-P1-K1-F10
aacccggcgactgtgagtctaaaaaagccacagcatttcggtttcactcattttgcgatacagatcgacacctacctgaggcgtctcgttaccgtcctcggcagcatggaggaagccaagaagaacatgttcgccttcagcacgaccacctacaccgggttccagtgcacc

SEQ ID NO: 1428 - DNA, 405 bp, Zea mays
  unsure at all n locations
  Clone ID: LIB3115-028-P1-K1-F11
cccacgcgtccggatgatgcttgcagaatgtttccgcacaatggttctgccccatctcatggacaagcaaaatgacagctttttcagagagcttgtgaaaatgtggtcaaactattgcatcatgattagatgtgtaattggcttcttcagctatttggaccgctgctatgtgaagcagtacaaactaccatcgcttagcaacactgctgctacctctttctttgatccagtcttttcctacttcaatgatgaagcaagaacggctcttcttactatgatccaacaagaacgtgatgggatcaggatggattcgagccttcnggatgttatgcatggcatatgttgttctgaagcaaaatccataatgcaaaatgcttttcttgatgaaatatatggctactactc

SEQ ID NO: 1429 - DNA, 265 bp, Zea mays
  Clone ID: LIB3115-028-P1-K1-F12
aaagggaaaagcggggcggggccgcacgcgtccacacacgcttccaaaagtggctcttttatggttctgtagatgtgcacattggcggcaatctgtccaccgagggtggcgcgcaccaaagcgtttatgacacacttgtgaaggtggttgatattgttgacacattccgtctacagtgccaacctccttttgacaggaaattatttgtgtattacataaaaaaatacatcaagaatctcactgctgcgttgtaccctgagaaagc

SEQ ID NO: 1430 - DNA, 108 bp, Zea mays
  unsure at all n locations
  Clone ID: LIB3115-028-P1-K1-F3
accggancggaaaaaccggggccgaccgacgcgtccgcccacgcgtccgcaattcttctaatgaaaatattattaaaaaaaaaaaaaaaaaaaaaaagggggggggtt

SEQ ID NO: 1431 - DNA, 399 bp, Zea mays
  Clone ID: LIB3115-028-P1-K1-F4
tccgaggatccacatcttcccgagcgagttcttgttggtcctcttcctcttcggaccacctccagggctgttggtgtagcttgccactctcaccaatcaagttttcatgtctgatctcgacattcagatcccaactgccttcgatcccttcgctgaggccaatgctggggactctggtgcggcagcagggtcaaaggactacgtacacgtgcgcatccagcagcgtaatggtcgcaagagcctgaccaccgtccagggattgaagaaggagttcagctacagcaagatcctcaaagatctcaagaaagagttctgctgcaatggtacagtggtccaagacccaaaacttggacaggtcattcagctccagggtgatcagaggaagaacgtctcgaattt

SEQ ID NO: 1432 - DNA, 465 bp, Zea mays
  Clone ID: LIB3115-028-P1-K1-F7
ggattctcatggtcgggctcgatgccttcgttaagaccaccatcctctacaagctcaagctgggcgagatcgtcaccaccatccccaccattggattcaatgttgaaactgttgagtacaagaacattagcttcaccgtttgggatgttggtggccaggacaagatcaggcccctgtggaggcactactttcagaacacgcagggacttatttttgttgtagacagcaatgatagggaacgtgttgttgaggctagagatgagctccacaggatgctgaatgaggatgagctgcgtgatgccgtgctgcttgtatttgcaaacaaacaagatcttcccaatgctatgaatgctgctgaaattactgacaagcttggtctgcattctcttcgccagcggcactggtacatccagagcacttgtgctacatctggtgaaaggttgtatgaggggcttgattggcttt

SEQ ID NO: 1433 - DNA, 207 bp, Zea mays
  Clone ID: LIB3115-028-P1-K1-F8
cccacgcgtccgctcttggatgccccttcttttccatcttcttcctcctcaaacctgggcgggcgctcaccatacaaaaccctagccacccccctacccatttctccccctcctccaaggtgcaaccctcccgcgtggttctccgacgtgtggctgcgatctcaattggagtttggagggaggaacgacgaagggaacaacccaagg

SEQ ID NO: 1434 - DNA, 93 bp, Zea mays
  Clone ID: LIB3115-028-P1-K1-G10
ccccatcctctcaacaaacaaacaaacaacccaaaaactctctctccatctaacctaccattctctcacttcatcctactaccaatcaaccaa

SEQ ID NO: 1435 - DNA, 367 bp, Zea mays
  unsure at all n locations
  Clone ID: LIB3115-028-P1-K1-G12
aaaaacggggcggacccacgcgtccgcccacgcgtccgnggacgcgtgttcacactttcagatccgagctaaccaccgtggacgtgggccagccgccagcagccgagccggancgaccttttcttttttcttttacacagcgggacggagaaaggagtcaatcagccaaagccacccaccgcttttacccaccgatcggcgttgccgccgctagcattgtcggcttcagctccatccaaatccaccgccagcaagcaagcaagcaagccggcgccatgggtctgccgatgaggagggagagggacgcggaggctgagctgaacctgccgtcggggttccggttccaccctaccgacgacgagctggt

SEQ ID NO: 1436 - DNA, 441 bp, Zea mays
  unsure at all n locations
  Clone ID: LIB3115-028-P1-K1-G2
cgtccgcccacgcgtccggcggcagatggcggcgtgctggggtttcttcgagtgcctgctcaggctggtgaggttaatcctaaccggcgccggcctcgccatggtcggttacgggatctacctgctcgtcgagtggatgaagatatctgaggacggcagcagcggggggttgacggcggaggtgctggtctccggccggccgttgttgggggctgtcgctctcggtgacagcttcctcgacatgctacccaaagcatggtttatttatttgttcattggggttggtgctactggctttccttccgtctctggttggctgcattggancaaggacaagaaacacctgcttgttgggtttctatgccttcttggtcaatatggtgaaccttgcttaagctggagctgctgcattcattttctttggccataacttggaaagat

SEQ ID NO: 1437 - DNA, 309 bp, Zea mays
  Clone ID: LIB3115-028-P1-K1-G3
gcacagcccattattgccgtttcctttttgcttgagcaaagaaggagaccaagaaaagcgggggccttgtttgccatcatccacaaaaccaagaaaaacctccacatggggggcgaccacaggattaaggaggaggagcaccacaggaaggccgaggagcaccacaggaaggaggagggggagcaccacaagaaggacggcgggaagcacaaggaaggcatcgtggagaaaatcaaggacaggaccaccggcgagcacggcgacaggtccggcgaccacaaggaaaagaaggccaggaaaaagaagaag

SEQ ID NO: 1438 - DNA, 434 bp, Zea mays
  Clone ID: LIB3115-028-P1-K1-G4
agcagatcaaacaagtggcgacagctctacatagatttgtgagagtgatccggcgctgaggggagatggctaagatcgccgcagccgcggcggcggcactgtgcttcgcggccctggtggccgtggccgtctgccaaggcgaggtcgagcggcagaggctcagggacctgcagtgctggcaggaggtccaggagagcccgctcgacgcgtgccgccaggtcctcgaccggcagctaaccggcggcggcgtcggcggcccgttccggtggggcaccgggctccggatgcggtgctgacagcaactacaggacgtgagccgagagtgccgatgcgcccccattcggagcatggtcaggggctaccaggaggtcatgccgccggcggagaaaggctggtggcccttggggggatggaagaatcattccagttgatgc

SEQ ID NO: 1439 - DNA, 102 bp, Zea mays
  Clone ID: LIB3115-028-P1-K1-G5
ggacgaccacgcgtgcgacaatagttattgggggtgtatgtttgtgattataatttgttcaaaatatataatctaacggatgtgaaattaaagtgtcaggtc

SEQ ID NO: 1440 - DNA, 432 bp, Zea mays
  Clone ID: LIB3115-028-P1-K1-G7
cccacgcgtccgcttttgctgcaaatctttctctgaattgtgggtctccgacaatggcggggctcgctccatccaagattctgggcacccagctcaacttcgcgggctcctcccgctacgccaccgcagcgcccaccgcgggggctcagaagattgtctcccttttcagcaagaagcctgcccagaagcccaagcccgctgcggtatcgtcgtcttctccagacatcagcgacgagctcgccaagtggtatggtcctgacaggaggatctacctgccggatgggctgttggaccggtcggaggtgccggagtacctcaccggagaggtccctggagactatggctacgacccttttggcctgggcaagaagccagaagacttcgccaagtaccaggcctaccagctgatccatgccagatgggccatgctcg

SEQ ID NO: 1441 - DNA, 416 bp, Zea mays
  Clone ID: LIB3115-028-P1-K1-G9
ttccaggtttcgacgctagccagtcactctctatacacagtcacttctgacacccacgttgtgtaccgcccttcggcatcaatcgttcattctctcagcaaacaaacaaacaacccgaaaactctctctccgtcgaacctaccagtctctcacttcatccgactaccaatcaaccaaaatgcgtttcgctatctccgtcgctgcccttgctggcgccgccatggccgctcctagcgctggctaccccgagggcaagcccgccgacaacgtcgtggttgagtggaccaccgtcgtcaagaccgtttacgtcaccgagggttaccgatacgaggctcctaccttcactgccgtctacgaggccccagcagtcaccaccacccctgtctatgaagctcccgcttaatccactggcaagc

SEQ ID NO: 1442 - DNA, 207 bp, Zea mays
  unsure at all n locations
  Clone ID: LIB3115-028-P1-K1-H11
gnctacggcaacaagaagttcgagacgctgttttacctgccgccgctgtcgacggacgacgtgctgaagcaagtggactacctgctgcgcaacggctgaataccctgcctcgagttcagcaagggcggcttcgtgtaccgagagaactccacctnctcgtgctactacgacggccgctactggaccatgtggaagctgcccatgttc

SEQ ID NO: 1443 - DNA, 144 bp, Zea mays
  unsure at all n locations
  Clone ID: LIB3115-028-P1-K1-H12
ccggggtcgacgccaacgcgtccggtacatgctcaaaccacagngactgactttactcttggaacaangcnnttggtgcaactccaagcgaaacgagcgatccatgagtggctgatgcacatattcggctgtatcaaagcaggc

SEQ ID NO: 1444 - DNA, 247 bp, Zea mays
  Clone ID: LIB3115-028-P1-K1-H3
gcatgcgcttagtctttatcggcacactataataagtacatcgatggagtagtgatcgagcaacacacacgtgacgacgtttgcttttatttacttacacgcacgcacgtgtacggcgctaggggccgtatatatatcgagttctgcatgcatatctcgatcgatgggatgatcagtcgtttcagtcgcagtagtaggagtagccgtgcccgtgcccgtgcccgtgcggaaccctgtgctcctgctg

SEQ ID NO: 1445 - DNA, 333 bp, Zea mays
  Clone ID: LIB3115-028-P1-K1-H4
gtgatccactcccgctgggccatgctcggcgcgctcggctgcgtcttacccgagctgctcgcccgcaacggcgtcaagttcggcgaggccgtctggttcaaggccggctcccagatcttcagcgagggcgggctggactacctcggcaaccccagcctgatccacgcgcagagcatcctcgccatctgggcctgccaggtcgtgctcatgggtgccgtcgagggctaccgcattgccggcgggccgcttggcgaggtcgtcgacccgctgtaccctggcggcagctttgaccccctcggcctggccgacgaccccgaggccttcgccgagctc

SEQ ID NO: 1446 - DNA, 77 bp, Zea mays
  Clone ID: LIB3115-028-P1-K1-H5
gtacatcaatcatcttcaggcatacgagctgtgttctctttaggcgctcgagacctgctggggggcgttcgtttcaa

SEQ ID NO: 1447 - DNA, 355 bp, Zea mays
  Clone ID: LIB3115-028-P1-K1-H8
gcgtccgatctagaccaactagcaacataaaacgctcttgattgtaccaacaatgacaaccaaaggtgtggccttcttatgctccttggtattactccaagtgctgctacgccgaccattttcccgcaatgctcacaagctcctatagactaccttcttcccccgtacctctcaccagcggtgtattcggcatgtgaaaacccaattcttcaaccctacaagatccaacaagcaatcgcagctggcatcttacctttatcacccttgttccttcaacaattatcaaccctattacagcaagtacctttggtgcatttattggcacaaaacatcatggcacaacaacttcaacaac

SEQ ID NO: 1448 - DNA, 199 bp, Zea mays
  Clone ID: LIB3115-028-P1-K1-H9
atcgtattttacacgccgagctatatctactttgagagaatccccttctcccacaaggagcgagtaatttgaggcagagaccgacacagatggcagcggttatggtgtctcgccaaggccgggagctgcaacggtacagcgcgagcacgggcgggcgcgtggtggtgggctgcgtaccgtaccgggtgcgcgggggcga

SEQ ID NO: 1449 - DNA, 445 bp, Zea mays
  Clone ID: LIB3115-029-P1-K1-A11
gggaagcagagtcgagtggaggtctcacgttgtttcccgagtgagttgcacgcgtacgcccttgcgtttctagtggtggggttggacagcttggagtgaaattacttctagcatctgcatgtgccgtcttctaacatctatgatgacagttctctggcatggcatcataggctcacagttcatccccagaagttagtgctgcgacttcgttgctcttgccttgtgtatatacagtatattgttacctccaccggagtttttcctttcctgctgtatcgcattcagtgctgagtgcattattagatttggaacccgttttctgttatgaattagtgataatggaagtcaggaagtgtcgcgttatgaattagtgcagggggcaagaaagccagaggattatttccgtattatgtatgggacgtgaacttaacttaatagatagatt

SEQ ID NO: 1450 - DNA, 369 bp, Zea mays
  unsure at all n locations
  Clone ID: LIB3115-029-P1-K1-A12
aagactacaaagccaagggcaaaggcgattaggaagtatgtcgagaagatgatcacnttggcgaaggatggggctcttcacaagatganacaggctctggcatttatttatgagaagcatatcgtccatgccttgtttgctgaggttgcagacaggtatggagaccgagaaggtggctacacaaggatcatcccgacgttcccgaggcggggagataatgcacctatggcgtacattgagcttgtttaggtaattgaatatcttgctatgtgattcctgaaatctgaacttccaaggtcactaaaccgcacttattattccatgtgttgacctagactgtcaacaagacaaactagtattcttatcgtt

SEQ ID NO: 1451 - DNA, 401 bp, Zea mays
  Clone ID: LIB3115-029-P1-K1-A2
ctcgcggcctcaccttatcctctccgtcactcacctcgaccaccgccatgggcatttcgatggccttggccgccgcgacgcgcctccacactcttccgctccgccctgtccgcgccacacggcgccggcgcgcgcgtccggccgcagcgccggcagccgttcttggctccgctccacgcggcgaagggccccggctcggcgccggtggtgctggagggcaaggccaagggaaagaagaagaaggggcccagctccgggaaccttcccgcagccctcaacatctagatcagggaggcgcaggagtacctctacagctaccagcatgaacctgttccagacaaccttccatttgaattaatcgaccaaaagggcattagccttgttatttttagaagggactt

SEQ ID NO: 1452 - DNA, 472 bp, Zea mays
  Clone ID: LIB3115-029-P1-K1-A4
cccacgcgtccgcccacgcgtccgcccacgcgtccgggagcaacctccttttgacaagaaatcatttgtctcttacataaaaaaatacatcaagaatctcactgctgtgttggagccagagaaagcggatgagttcaaaaagggtgtcgagggtgcaaccaagtttctccttagcaagctgaaggaccttcaattttttgttggtgagagcatgaaggacgaagcgtccgtggtattcgcctattacaaggatggtgccactaatccgacattcctctatttctctcatggtcttaaggagatcaagtgctagattagttacccatgttgggtactatatatgttctattgttatagccacaactatagctgccctgcctgaactgaactcaggtttttttaagaaaaaactgtccaagattggattgcttgttaaagctaaatattgttattgacgtgttattgcttaaaa

SEQ ID NO: 1453 - DNA, 327 bp, Zea mays
  unsure at all n locations
  Clone ID: LIB3115-029-P1-K1-A5
cggggcgaccgcacgcgtacgccccccagtccggaccccggaggagccatatcatggcgtccacctcctgctgcctactggaccattcaaccgtccgcctcgaggcgtcatcacncctttcactcctcaagccgacgcagcggaagttccgcgccctgcactccctcgctacgctcgtctgcagtccacgcgtacgaccacgcgtgcgcccacgcgttcgcccactcgtacgaaccaccatccacgcactgctagtaagcgagcttagctactgatcgtcgttaagcactctttagcttgatctttctaagcggttagctggtagca

SEQ ID NO: 1454 - DNA, 119 bp, Zea mays
  unsure at all n locations
  Clone ID: LIB3115-029-P1-K1-A8
cccacgcgtccgagccaagggtgtgtatataataggcatgccttgggttgtgtcagctgcgactgtatgtgtagtttaaaccaanatgaaatggtactgatggtgatattccgtgtttt

SEQ ID NO: 1455 - DNA, 415 bp, Zea mays
  Clone ID: LIB3115-029-P1-K1-B1
ttaaaaaaatatttttttttttttatttatattttttatatttttaaataattaatataatttttttttttttattatatttttttttttttttttagttttaataaaatatattttttttttttttttatatttaaatttttttaatttttatttttttattttttgttttttaatttttaaattattttttttttaattttattttattatttttttatattaaattatttgttttggatggagtttatttttttttttttataatttatttttattttttttaattaattttttattaatttaatttttttttttttatatattattatttttatttttttttttttatatttatttttttttttatttttaattttttatttttattattatatattatattttttatttt

SEQ ID NO: 1456 - DNA, 401 bp, Zea mays
  unsure at all n locations
  Clone ID: LIB3115-029-P1-K1-B10
ccttgctcaactgcgatcaattaattcattaacaagcagaacaaatgcaggggagaaatgcattcaggtggggtctgggggtaaccattagttttggtttatgggcttcgtttactatgacagtgcggtgaagaatctgcaggaagcacttcaggaggctcagaatttacgtgcttagtgatgttcatggattggaactagcatgtcttatacattacagttgtgatatactgttttcccgtcagtttcgactgtttgtccagatttattttgcgtacgtatcaactgtttctgtgttttgtactgacttaaaccgatgcggttcaatatgtgacgtgcatcctttcatggntgttctctgctatgatgagcccatttgcttttagcagtaacaatgggtg

SEQ ID NO: 1457 - DNA, 467 bp, Zea mays
  Clone ID: LIB3115-029-P1-K1-B2
cgagctggtagatgacggagcccgccacgatagtccataagcggccggcgaaggagtcggcgactaggccgccaattataggggtgaggttgggagaagccatggaagttgttgagcgtgttggaggcgtcgacgagcgtcaactgcagctgctgcgtcaggtaggtgatcaggttggcgttgaacccgatcgttgcgaaccggtcgcagaaatcgtttgatgcaccaccacggacatcttagctcttgtttagcttttacactggctacaatatatgatagacgcgttgggtagtagagactagagaaacacttcatctaggatgaacggcacggtcttgaagccgccctgcttcctcttgtcgcccagatccccttcgccatgccatcgcctgctggcgtctttctccaacatgcctgcaaggtgtgcagcagcacgggaaccagagatccctccctaggagttg

SEQ ID NO: 1458 - DNA, 206 bp, Zea mays
  unsure at all n locations
  Clone ID: LIB3115-029-P1-K1-B4
cccactcattcgcggacgcgtgggcggactcgtgggctttccacctgctggccgacccggggtctccggcggctaagccggcgcagcggatctcacaattcnctctgccttcgtcgtcctcccgcggtccggccccgctcctcgcgttcacctaggaggcggtttatgctctcaatgtgttcgtggccccgcatcttgaccccatc

SEQ ID NO: 1459 - DNA, 98 bp, Zea mays
  Clone ID: LIB3115-029-P1-K1-C1
acagaaacgaagattcgcagcctgggtatcgttatggcacaaatattaatcgagattgaaaagccacaaagttggaattaaaatgggaatttagctgg

SEQ ID NO: 1460 - DNA, 407 bp, Zea mays
  unsure at all n locations
  Clone ID: LIB3115-029-P1-K1-C12
ggtcaaatcccagtaacactggagaatacaatactgcncatcacgagaattaaacaaaatccaaaatccagaccctatgtgtcagcggtgaagtataaaccccaaccaatatagtagccgccgcaaaatggagaggaaaaaaaggcatagatctccatgcaccaatgatgcaaaaaccgctccatgctttccctgatttctacacatactagcagtgtgcatagatgccatgaggtatgtaggtgcagttcctaaggctaaatcatccctaacatactccctccgttcttttttatttgtcgcggtttagtttaaaaataaactagtcaacgacaaatattcgagaacggaggtagtacaagctacaacaagatatttaaacctacataccactaaaccttccatat

SEQ ID NO: 1461 - DNA, 446 bp, Zea mays
  unsure at all n locations
  Clone ID: LIB3115-029-P1-K1-C5
caaacagcagtagccatgcgtgtttccgttctcgccgattgcctcaacaacatccacagcgctnataagcgtggaaagcggcaagtgcttatccntccttcctccaaggttatcgtccgattccttaccgtcatgcaaaagcacggctacgttgaggagttcgaggagatcgacgaccaccgatccggcaagatcgtcgtccaactcaacggtcgcatcaacaagaccggagtcatctctccccgattcaacattcaattgtctcaaattgaaaactgggtcaacttgttgctccccgcccgttcgttcggttacatcatcttgaccacctcggctggtatcatggaccacgaggaggctcgtcgcaagcacgttgccggaaagatcctcggattcgtctactaaactagtcaaataccgttctgggttcctttcttgggtttatc

SEQ ID NO: 1462 - DNA, 374 bp, Zea mays
  Clone ID: LIB3115-029-P1-K1-C6
cccacgccgtccggatggcctaaactagacatcctggagtcgcgtatgctaggattccaggaacaagctgaggtctgtacgggcacaagagtttagagtagccgatattgtcaggcgttagctgccaaaggctaatatcacgatcgaggtgtaccgtgtacgagaccattcctgagttgcgcagctggcagctaaactgcggtcgcgccttctccgagggaatcgagaaaaaggaaattataaagtgtatttggtttcaggtaaagtgaagagcgaagggcacccttaacaaggacgggtgtatgttggttgatatattatattcttgctaggaattaattattttcatgttaagtatgtttaattcaatttgc

SEQ ID NO: 1463 - DNA, 291 bp, Zea mays
  unsure at all n locations
  Clone ID: LIB3115-029-P1-K1-D10
ccggnnnccggaaggcccgggtgcgacgccacgtcgtctcgctccacgacgtctcgtcggacgtcgtgtggcggctatcgcatctcgttccgcttccttctgtgtggacagagtgttcttcgagcgagcgacggaggacgtacaagatactaccgggcttggctgtggcttgttctctgggacgtcctcgactcagcagacactcctcgctgtactaaggagggagctaggagaaagatgatagcgtagatggcgctcggacaaacttctcggctcggacattcgcaggtg

SEQ ID NO: 1464 - DNA, 447 bp, Zea mays
  Clone ID: LIB3115-029-P1-K1-D11
caagaaacagagctggtgaaattgcattgtcgcaacaggcaagccaagaggagaagaaagaaatggctgcgggacctgcggcgatcccgggctgctgctcttcgtctcgcctgtctcagcttgctggcctccctgcctccacaagcagaaggcgcttcaaggtcacggccatggcgccccaaaagaaggtgaaccgctacgacgagaactggtcgaagcagtggttcggcgcgggcatcttcgcggagggcagcgaggtggtgtccgtggacgtgttcaagaagctggagcggcgcaaggtgctgagcaccgtggagaaggccggcctgctgtccaaggccgaggagctgggcctgacgctctcctcgctggagaagctgggcctgctctccaaggccgaggacctgggcctgctcagcctcgtcgagaccgcggcggggacgtacc

SEQ ID NO: 1465 - DNA, 421 bp, Zea mays
  Clone ID: LIB3115-029-P1-K1-D12
cccacgcgtccgccgccgcgacgacgatggcagcctcgctccaagccgcggccaccctgatgcagccggccgagatcggcggccgggcgccctttgcctcgctgccgtcccgcccgtcgtcgcaactcgcctgcagggcgttcggcgtcgacgccggcgccgccaggatcacgtgctccctgcaggacgtcgccagcaggtgcgtcgacgccgcgaagctcgccggcttcgcgctcgccacctcggcgctcctcgtctcgggcgcgagcgcggagggcacgcccaagaggctgacctacgacgagatccagagcaaaacgtacatggaggtgaagggcacgggcacggcgaaccagtgcccgaccatcgacggcggcgtggagtcgttcccgttcaaggccggctagtaccagtatgaaaa

SEQ ID NO: 1466 - DNA, 480 bp, Zea mays
  unsure at all n locations
  Clone ID: LIB3115-029-P1-K1-D2
acccacgcgtgcgggacgcgtgggcggacgcgtgggcggactcgtgggcttttccggtcttcccgaccgagcgatccaggcagcgataggtggcgagaaggagcctccatatgagcacgccaaggccgccgcctacgaggacggccatggggttctgggtgaccacgctcatctttctcctcgccggcgtcgccgcatccctcttcacgctcctctgctgcaaccgcgggccctccacaaacctattccatttgaccttggtgactacagctgtaatttgttgttggatgatgtatgctatcgtttaccttgctcagatgaagccattgatcaaccccatcctgagcggggagtgatctctcctttgcattaaaaagaatgaaagctagatctgctgtaccattattcaatctgtgaacttcctattcatttggccccacctgatgaaataaataaactgccatgagttttntttttttt

SEQ ID NO: 1467 - DNA, 438 bp, Zea mays
  unsure at all n locations
  Clone ID: LIB3115-029-P1-K1-D3
cggacgcgtgggcggacccgtggggtgcaacaaggactacaccatcgggacctaaaaaggctggtggcggcccaaacggggacgcgccccnagaagatccgcattcagaagtggtacaacatctacaaggaccacatcacgctcaaggactacgagatccacgacgggatggggctcgagctctactacaactaggcgccctgaccccaaccgtgccctgatgtaaggttaatccgaattctgaagtcatgggtgcgcttccagtcacagcgtctttagctaacaagctcgcatacatataggcaacttgagtgagctatgtagtacggatatggttgtgtggcaaactgccaatgactattgacatccttgcatatattgacatgtgacaaggatcaacctgcaaaactggtgccctgctactcgcagaccttatta

SEQ ID NO: 1468 - DNA, 369 bp, Zea mays
  Clone ID: LIB3115-029-P1-K1-D4
tagggaccctataatgtgcaatggtgaatatggtgactagctcactggtaagatcatcgattctgatgtgcatgatgtgggccgtttgcttaatcttattctgggattgctttcagacattcataatagatcatttgaccttttcacaagcatacttgatatagtcattcagaatgcacgaattgaaagacaacttgaatctggtattgtcgatatcaaagctaaaagtgtcgaaatgaaagaatcaccaaagactgttcatgttgatactgtgtctggtgctagtacaatattatatacttttacagttgaccgcggagtttcttgggagttcgcacattcaatacttgaagaaaggctgaaagataa

SEQ ID NO: 1469 - DNA, 453 bp, Zea mays
  unsure at all n locations
  Clone ID: LIB3115-029-P1-K1-D5
acccacgcgtacatatatacactataatgttcattggnaaattttttgattatttcactggtaacattaacgggttttctgtaaattatcaggcccttcggcttaataatatttttttattattttcaatcatttataatacatcatttaaacttttcacaaccatactatatatatttattcataattcactaattataacacaacttaatttttccattattcatatcaaaactaaaattatccaaataaatgaatcaccaaaaactcttcatgttcatactatatttaatactaatacaatattatatactcttacattttacctcttactttcttactatatagcaaattcaatactataaaaaatccttaaagataaatcatttactttctattgatcaattctataaccttcagaaactaatcaatccttataatacactttcttat

SEQ ID NO: 1470 - DNA, 197 bp, Zea mays
  Clone ID: LIB3115-029-P1-K1-D7
ggaccgggcgcctggtaataaaaaaaaaaaggggcggttaagacaagctggtacctcatgcatatattttatggataacaatatgccggtacaaccgactggaaccgcgtccaataatgctgacaatcctttgcgctggcgtaacaaaggccgacacgcttcaacatgcacctgagcaaggacccccgacggcataa

SEQ ID NO: 1471 - DNA, 428 bp, Zea mays
  unsure at all n locations
  Clone ID: LIB3115-029-P1-K1-D8
gatcatctcgggggcgtggcccgggaactgctccctcctcagctacgacgacctccgcgcgctacctcgagtcgcaggaggcggcggcccangcagacggtcagcgcggcgtggcgctcctgagcgagaccatgtccacacccgtgctggtggccacagcagaccagaccctggaggacgtcgagtgccacttcgaggccgtgtcggggcttccggtcgtcgacagcggcctcagatgcgtcggggtgatcgtcaagaacgaccgggcaagagcctctcatgggtccaagacgaagatatcggaagtgatgacatctccagctatcacactatcgtctgacaaaaccgtgatggatgctgtgtgttctcatgctcaagaagaagatccacagattaccagttggtaaaccaggacgaaaaagtaatag

SEQ ID NO: 1472 - DNA, 78 bp, Zea mays
  unsure at all n locations
  Clone ID: LIB3115-029-P1-K1-D9
ggccgaacccgtcgacccactcgtcaccngagtattgaatggaaactttcggcggcagaacgggtatgaactgtaaga

SEQ ID NO: 1473 - DNA, 422 bp, Zea mays
  Clone ID: LIB3115-029-P1-K1-E1
cccataccttccatcaatgatagcttcagtatgtgaaaacccagctcttcaaccctataggctccaacaagcaatcgcagcaagcagcatacctttatcacccttgtttcaacaatcgccagccctatctttggtgcagtcattggtacaaaccatcagggcacagcagctgcagcaactcgtgctacctgtgatcaaccaagtagctctggcaaacctttctccctactctcagcaacaacaatttcttccattcaaccaactgtctacattgaaccgtgctgcttatttgcagcaacaactattaccattcagccagctagctactgcctactctcagcaacaacaacttcttccatttaaccaattggccgcactgaaccccgctgcttatttgcagcagcaaatactactaccattta

SEQ ID NO: 1474 - DNA, 442 bp, Zea mays
  Clone ID: LIB3115-029-P1-K1-E11
cggacgcgtgggcggacacagcaaccaacaagtcgtccaacgtccaggctggtctgttgtgtttctctctcgcgcaaggggcaaagcaaagcgtcccccaccatggcttccacgacgacgacggcatccaacaacctggcgggcgtgtggctcggcgagctctcgtcggcgctgcatgggacgtggcaggcggtggccgtggccgccacccacgggctcggcgaggacgacgacccgcggctgccgtgccagcagcagcagaggccgtggcgaggcgacgacaggagcagcagcaacaacaaggcgttgcgaggagccgcggcggccgggacggacaggcgggagggggacgtcgcgaggtgcggcggcgccatgtccgacaccacgctctacctcctcctcgaccggttcgcgcccagctgagcgggccccttgctcaccc

SEQ ID NO: 1475 - DNA, 460 bp, Zea mays
  Clone ID: LIB3115-029-P1-K1-E12
cccacgcgtccgggtcgatcctagcctcgctcagcactttccaacagatgtggatatcgaaggaggagtacgacgagtgtggcccggcaattgttcaccggaagtgcttctagggtttcacaagttcctcgtcgttacctagtctcaaattatgtcccctccatttctcgagatatgtgtggcagatttgcatgatacgtttgtttgtttccatcggacctgaagtcttcttggggataggctcccccctttgtatgttgtggctccaatccatgtgcgagcacgctgtgtctgtcgtgacacctggttcgtgagatgggttgtcaaacttgattggtttgttgtgcgtggctggaagagctgatagttatatatttggcttggactgtgccgcttgtatgtatctgaattctgaaagcgttgtaatctgagcatccgtgcaaagtatgaatggcccttt

SEQ ID NO: 1476 - DNA, 398 bp, Zea mays
  Clone ID: LIB3115-029-P1-K1-E4
cacccacgcacactcttctccccccagtccggaccccggaggagccaagccatggcgtccacctcctgctgcctcctccaccagtcaggcgcccgcctcggcgcgtcgccgcgcctggccgccgccccgccgcgcagcgcccagctgctcgtctgcaaggctcgtaagcaggaagccgccgcggaccagagcgacgtctcgcgccgcgccgcgctcgcgctcctcgccggcgtcacggccgccgccggcgccaaggtgggtcccgccgccgcggcatacggagaagcagccaacgtgttcggcaagcccaaggcgagcacggagtacatcgcgtacagcggcgacggcttcaagctgctgatcccgtccaagtggaaccccagcaaggagcgggagtt

SEQ ID NO: 1477 - DNA, 328 bp, Zea mays
  Clone ID: LIB3115-029-P1-K1-E5
aaaaaaaaaaaaaaaaaaaaaaaaaaaatttataaaaatataaaaaaaaaaaaaaaaaagcggaattttgaaaaattttaggaaattgaggaaaatattattaaaaaaaaaattaaattaaaaaaaaaaaattattgtcttccctcttttttaaaattcaaaatcttttttcccctttaattaaattataattttttttatttgtgccataaaaataaaatcttttcccgatttttataaaaactaattacttataaaatttttgcatttccaaaattattttttttataaataattcttttttggcatgtttgttattaattaaaaa

SEQ ID NO: 1478 - DNA, 211 bp, Zea mays
  Clone ID: LIB3115-029-P1-K1-E7
cggccgacccacgctttctaaacaaaatacaattacttttttttaatttttacaaccaaaaacaaccgacattacgcaaatcttacccggtaaacgcaattttataaactttttacacatatacaaaccaacccacacaacctttacatcattcttttatcaatgatcattaatgtacatctcccaacttctttctcatctccaacttatc

SEQ ID NO: 1479 - DNA, 426 bp, Zea mays
  Clone ID: LIB3115-029-P1-K1-E8
gaacataagaggagagaccgtactacacacctcacgcctgaaggccagatctaagccttgtcgtcctcgcccgaggacagcgataaacatctaagaaccaaacaaaacagagcacgaccatcggtctctaagcaaaacgcgcagcacgccgggcgctccacgcacgtaggctagcagagcgcgcatggggcttctggaccagctgtgggacgacacggtggccgggccgcgcccggactccggcctcggcaagctccgcaagcacgcgtccttctccccctcgtcggccgcgccgtcgccgaccgcggaggtcgcggcgccgcccgccgtgacgcggagcatcaccatgctgcggccggcggcgctgtccgtcgtcacgtcgccgcgcagcgagtccagctccgcgccgtcgtcgccgtcgcccgg

SEQ ID NO: 1480 - DNA, 434 bp, Zea mays
  unsure at all n locations
  Clone ID: LIB3115-029-P1-K1-F1
cggaaaaccgggccgacccacgcgtacggcaaccggtccagcactttcacgctcagctctagcaatggctgnctccaccatggcgagctcctccacggcgatggccggcacccccatcaaggtgggctccttcggcgagggccgcatcaccatgcgcaagaccgtgggcaagcccaaggtggcggcgtccggcagcccctggtacggccccgaccgcgtcaagtacctcggccccttctccggcgagcccccgagctacctcaccggcgagttccccggcgactacggctgggacaccgccgggctgtccgccgaccccgagaccttcgccaagaaccgcgagctggaggtgatccactcccgctgggccatgctcggcgcgctcggctgcgtctttcccgagctgctctcccgcaacggcgtcaagttcggcg

SEQ ID NO: 1481 - DNA, 461 bp, Zea mays
  Clone ID: LIB3115-029-P1-K1-F11
agcaaggcaaggcaaggcaaggcaaggcaacgcgccgtcatctcattctccctcgcaccgacgaggtcagggcagagaccttcgagtactactagtcatggcccgcatctagaaggcagcaagaaagggggcggatggggcgcgcgttcgtgtacgtgatcctgggcggcggcgtggccgcgggctacgccgcgctcgagttcgcccgccgcggtgggtactcccgcggagagctctgcatcatctccgaagaggccgttgctccttatgaacgtcctgcactaagcaaaggctatttactcccagaaggtgctgctcgtcttccaggatttcatacttgtgttggtgctaatgatgagttactgacaccgaaatggtacaaagaacaaggcattgaacttgttcttggaacaaaagtgatatctgctgatgtgaggcgcatgacattgcttacaggcact

SEQ ID NO: 1482 - DNA, 460 bp, Zea mays
  unsure at all n locations
  Clone ID: LIB3115-029-P1-K1-F3
gggttggcttctcctccccctccggttcgggttcgggttcgtgaggttctccggggttcggtttcgtgggtgagcggatcgagatggcggcntcngatgttgagtaccgctgcttcgtcggcggcctcgcctgggccacggacgaccactccctccacaacgccttcagcacctacggcgaggtcctcgagtccaagatcatcctcgatcgggagacgcagaggtcccgcggcttcggcttcgtcaccttctccacggaggaggcgatgcggaacgccatcgagggcatgaacggcaaggagctggacggccgcaacatcaccgtcaacgaggcccagtcccgcggcggccgtggaggcggcggcggtgggtacggtggtggccgtggaggcggcggctactgcggtggcgggcgccgtgatggcggcggcggctactgcggtggcggcggctactgtgg

SEQ ID NO: 1483 - DNA, 444 bp, Zea mays
  Clone ID: LIB3115-029-P1-K1-F4
ccggactggccaaccgcgttcttcatgcatgctgtcgcgctcgcgaagctgaacatgcagagcgatgccacggacatgttgaacgaggcatcgcatctcgaagagaagcggcagaagaacacaaaaccctgatgatggcttgttcctggtccaggggttgggaatgtagctgggggagtgtgctgcagagtcctgcgattgtaactacctggtttcgcatttctgtcatgcagttttttttggggcccgtgtacatgttacatcgacgaaagtcgaaacaggcagaatgcaaggggatttttttttaaaaaaaaaaaaaaaaaaatataataaaaaaaataaaaatatatttaaaaaaaaaaaaaattaaaaatataaaatatttaaaataatagtttttatatataaaatttatattattaaaaatatttttttattataatt

SEQ ID NO: 1484 - DNA, 392 bp, Zea mays
  unsure at all n locations
  Clone ID: LIB3115-029-P1-K1-F7
ggggctggcagggttcggcgagcaggagcgctacttcttcacgtgcaaggaggccaagtacgtgaagggccggcgcgcgaaccgcgccacgggggccgggtactggaaggcgacgggcaaggagaagccggtggccgtggcggtccggggcgtgcaggggcagagccagagccagagccaggccgtgctggtgggcatgaagcgctcgctggtgttctaccgcggcaagccgccgacgggaagcaagacggagtgggtgatgcacgagtaccggctggcgggcgccgggctcgcgccgtgccgtcgccgtcacnccnactccgactgagactgtgtggcgcgggcgccggccgagggctgtgtgctgtgcttgcgtgtttcggtagaagggt

SEQ ID NO: 1485 - DNA, 448 bp, Zea mays
  Clone ID: LIB3115-029-P1-K1-F9
cacgcatttgacgcggacgcgcgaggaagcaagcaccgccagagtcggagggaaaaagaaaaaagagcacggacgattcgcagctgcagcctgcacaggcggaggcgaggaggaagagagagccccccacgatcggctcgccgggacggccgagggtgcggtggtagtgcgggcgcgtggccccgcgcgtggagtcgggatccgtattgctctctagcagccggccggtggcggcgctcggcgtccgaggccagagcccagagggtgactgacagagagagaatcgtccatccatgggaggatccgggcgcggcgcgcatttcttggacgcgtgcttcctctgccggaagccgctcgccggcaaccgcgacatcttcatgtacaggggcgacacggcgttctgcagcgactagtgcaggagcgcgcaaattgcggtggacgaggcggc

SEQ ID NO: 1486 - DNA, 452 bp, Zea mays
  Clone ID: LIB3115-029-P1-K1-G11
ctcgagtctcgtccacccgtcttcctcctagctcctctactcgccagtcggcgatgggcaagattaagatcggggtcaacggcttctgaaggatcggcaggctcgtggccagggtcgccctccagagcgaggatgtcgagctcgtcgccgtcaacgaccccttcatcaccacggactacatgacctacatgttcaagtacgacaccgtccacggccactggaagcacagcgacatcacactcaaggactccaagacccttctcttcggtgacaagccggtcaccgtctttggcatgaggaaccctgaggaaatcccgtggggtgaggctggcgctgagtacgtcgtggagtccaccggcgtcttcactgacaaggacaaggctgctgcacatctcaagggtggtgccaagaacgttgttatctttgtctaagcatagacgcactcatgtttg

SEQ ID NO: 1487 - DNA, 458 bp, Zea mays
  Clone ID: LIB3115-029-P1-K1-G12
ggctgttcggcgtggacgttcgccgggttggcgccagcggggagccggaggagtcgccgatggacctgaggaagagctccagcatgcccgacctcaccatcaacccgctgctgacgccggaggagaaagagggctgcaaggggtacgcctccgacgacgcggagctggcgtccggccagcagaagcgccgccgtcgcaaggcacaggacaggaagaaaggaattccatggaccgaggaggagcacaggaagttcctggacgggctaaggcagctgggcaagggggactggaggggcatctccaagggcttcgtcaccaccaggacggcgacgcaggtggccagccacgcccagaagtactttctccggcagaccaaccccgggatgaagaagcgccgggcgagccttttcgacgtcggtatcgcggactacaaggacaaccaagtgccaggccctcag

SEQ ID NO: 1488 - DNA, 187 bp, Zea mays
  Clone ID: LIB3115-029-P1-K1-G6
cgtggcggcgcggcgcgcccatgcccggttcgcgcatgttcttcttcgcctgcgcgggggtggacggggccgtgtacgcgaccggcggccactacacctataagaacgcgctgcgctcggtgctggcctacgacccgggcgcctacgcgtgggcggggcttcttttctattttgaggatcgctacta

SEQ ID NO: 1489 - DNA, 378 bp, Zea mays
  Clone ID: LIB3115-029-P1-K1-G7
gccagagcgagacgcgactgcttttctgcttcatccacattggtagctagctagcttagcgggttcacgcatgcgctttccgggccgtctccggtggtttagctcagcagagcggggaaggaagaagatgacctccgtgagcgcgaggcccgttggcgtggggtactgcttcggcggggcgaggtgccagccacggtcgcgggtgcgggtttcggccgcggcctcggcagtggccgcgcccgcgcccgcgatggcggcgacgatgtacgagctgctcgccgtctaggagacggcggggcccgacgagatcaaggcggtttaccggcgcgccgcgcggttgtggcacccgtactcttgtcccggttgtgccaaccgctt

SEQ ID NO: 1490 - DNA, 390 bp, Zea mays
  unsure at all n locations
  Clone ID: LIB3115-029-P1-K1-G8
aagagaaaaaaaaaaaaaaaaaaaaaaaaatataaaaaaaaaaaaaaaaaaaggaaaaaaggggaaaaaaaaaaggggaaaaaggacaaaaaaaaaaaaaaaaaagggggggggccgccaaaaggaacaaaagcaaacaaccgggggcggggaaggaaaaagccgnaaaaaggggcaacaaaaaaaaaaaaaaggggcggggngaaaaaaaagcgggaaggggaaaaaccggggggaaccaaaaaaaaaggcgggggaaaaaaaaccccnnnncccaagggggcaaaaaaaaaaaaaggccagaacaaagggaccncccaaaaaggggccaacccaaaagggaaaagggaacgcccccnaaaccgggaaaaaaagggggggggggggggg

SEQ ID NO: 1491 - DNA, 429 bp, Zea mays
  Clone ID: LIB3115-029-P1-K1-G9
cggacgcgtgggcggacgcgtgggcggacgcgtggggcgtcagcaccttccagagctgccccattgccagaagagcaaagatcaacacgaggtccaggggctgcagcagtagcgtggcgaaggggtcaccaccaccagccttccagttccagtgcagggcgtcgactttcgcggcggacaccagcctccggctcgagctggacgagaaccccgaggcgatcatctcgggggcgtggcccgggaactgctccctcctcagctacgacgacctccgcgcctacctcgagtcgcaggagacggcggcccaggcagacggtcagcagcgcggcgtggcgctcctgagcgagaccatgtccacacccgtgctggtggccacagcagaccagaccctggaggacgtcgagtgccacttcgaggccgtgtcggggc

SEQ ID NO: 1492 - DNA, 325 bp, Zea mays
  Clone ID: LIB3115-029-P1-K1-H11
cccacgcgtccgggaagcagtcgccgcgctaccaaccgtgaacatcaaggaagcgttgggctgttcagtctggcttgaggatttctagatgggaggagaagcgaagcagatgccctgtcagcataagttccactctcactgcatactcccgtggctggagctccacagctcttgcccaatctgccggtttcagttgcctactgaggagacgaagaacaacccatgcgaatcagccagcaccgcaggggccatgaacggcgatggagacaacgctgcttgaagcggcagtgatacagaaagttctaactacaacgaagatgaccat

SEQ ID NO: 1493 - DNA, 301 bp, Zea mays
  Clone ID: LIB3115-029-P1-K1-H2
gcttctgcttgctttcgagaaccggtgagtggctgcctcgaggccatctgctgctgctgctagttctgcttggagggcatgggcgtccatcatcgtggagatgtggccatgcgggacacccaccgccgaataaaatgctgtacttatatgcacgcacgttagaaatgcattagtgtctgtttgatgtgatcttgtgtgtgtgcgcgcgcatcttcatttgcactggaaaatgctttattatttgtgaaggtctgtaaatctgttgtatgtatcttggtcagatgaactctattattgtgcc

SEQ ID NO: 1494 - DNA, 312 bp, Zea mays
  Clone ID: LIB3115-029-P1-K1-H3
tttaaattttttcattctttacacccaccgtcgaataaaatgctgtacttatatgcacacacgtttgaaatgcattaatttctgtttgatttgatcttgtatcattacgctctcatcttcatttgctctgttaaattctctattattttttcatagtctgtaaattttatgtatgatatcttttctagattatactctatttttttcctaaaataaaaattaaatctgtttcctttctaatttatccatacttactttcctctattattttacatcataatcttttctatagttttattcctaaattttatt

SEQ ID NO: 1495 - DNA, 261 bp, Zea mays
  Clone ID: LIB3115-029-P1-K1-H4
aaaaaaaaaaaaaaaaaaaaaaaaaaaaaagagagaaaaaaaaaaaaaaaaaagaaaaaaaaaaaaaaaaaaaaaaaaaaagaaaaaaaaaaaaaaaaaagaaaaaaaaaaaaaaaaaaaaaaaaaaaaaagaaaaaaagaaaaaaaaaaagaaaaaaagaaaaaaaaaaaaaaaagaaaaaaaaaaaaaaaaaaaaaaaaaaaaaaaaaaaagaaaaaaaaaaaaaaaaggaaaaagaaaaaaaaaaaaaggaaagaaaa

SEQ ID NO: 1496 - DNA, 422 bp, Zea mays
  Clone ID: LIB3115-029-P1-K1-H6
cctggtgctgattatgtctgtgaatcctgggtttggtggccagagctttatcgagagtcaagtaaagaaaattgcagaactgagaaggttatgtgctgagaagggagtgaacccctggattgaggttgatggtggtgttggtccgaaaaatgcctacaaggttattgaagctggcgcaaatgccattgtcgcaggttctgcagtttttggggctccagactacgctgaagctatcaaaggaataaagaccagccaaagacctctagctgtagccgcataaggagctggacgtgtaatcatttactctgtgcaagtttaccagtgatgcgatctgtatagatgtgtgtcttgtccaaccatacgtataccggaaatgaaggagacggaggcagtgaagaaatatcctttttttttttttggtt

SEQ ID NO: 1497 - DNA, 173 bp, Zea mays
  Clone ID: LIB3115-029-P1-K1-H7
ctggtgctgattatgtcttttaatcctgtgtttgccggccaaaactttatcgacaggcgggtaattaaaagggcggacgcgataattatattttcttataatgctatgaacccctgtattgaggtttacacttttctttgtcctaaatatgcctacaatgttatttaagcttt

SEQ ID NO: 1498 - DNA, 461 bp, Zea mays
  Clone ID: LIB3115-029-P1-K1-H9
ctgtacattcctggagaaggttctgatcgtgatttggctgaaacaaaggctgcaaaacagaaagttgcagatatggctgctaaattagcctcagagcttatgccgtctgatgttgccaaggcattatggggtacagccaagagttcttcaaagataaataaagaagttcaggagcttttaaggcttacgttaagcaaggcccgagtcaagctgaccgaaaataccatttttaaacgaatcattatggacactaacagcacagatccatttaatggtctctatgtgggagcatttagtccatatggaccagaaattgtgcagcttcgtcggaagttcggccactggaacagtactgatgacgttgagtttttcgagtatgtcgaagcagtaaagttgactggtgatctgagtgtcctgctggccagataacgttccgtgctaagattgggaagggcaagcga

SEQ ID NO: 1499 - DNA, 454 bp, Zea mays
  unsure at all n locations
  Clone ID: LIB3115-030-P1-K1-A10
cgggnccggaatcccggggcggacccacccgtccgttggagaccaatgagaccaggcttgtaacaatcagccgcgccactaaggaaatccgcctggaccagggccttaaaatgctaaggatattaagggatcatgtaagcaggacttcaatcctggacaacttggccttttacaagggccgccagaagtggatgcaggataggaggtcgaaccagcaccagttccaaaggcaggtttgggccactaggacccccgtttttgtaaccggggggcgaccgaaggaccctgttaaggggaagcccaatccgcccgaaccagagggggtaacggcaaaggtgaaggcggtaaaggttcccgcaaagaacggcttaactgctccggtggtttccaatgcagaaaagggggcccaaccggaaccagaaaaacccgtcttttccaacggagtcgccaggac

SEQ ID NO: 1500 - DNA, 392 bp, Zea mays
  Clone ID: LIB3115-030-P1-K1-A3
aaaaaatttttaaattttaaaaaaaaaaaaaaaaaaaaaaaaaaaataaaaataaaaaaaaaaaaaaaaggggggggcctttttaaaggaccaaagtttactaccccggcctggcaaggaaaaatttttttaatggggaccccaaaattaaattaatggcccgggttttaaaaccgtgggaatgggaaaaacccgggggtccccaaattaaatgccttggaaaaaaacccccttttccccagtggggtaaaaaggaaaaaggcccgaaccatcgcccttttcaaaaatttgccaacccgaaagggaaaagggacccccccctgaaccggccaataaagcccggggggggggggggttccccccagtggaccccttaaaatttgcaaggccct

SEQ ID NO: 1501 - DNA, 446 bp, Zea mays
  Clone ID: LIB3115-030-P1-K1-A4
ggggcggaccacacccgtccgggtggatttcatggaccaggaccggccacgtttatttgttcttgggaggctgcactgcaggatggatagggttgttgtggttttggagactaaccgacctgttagggggaatgttttttaccaggccaccatcaagcagggggcctttttgttgaaccgattccagaagctttaacgggtcatggaccttaaaggcctgtctgggtgggagcttttcttgcattcggggcctgcaaatgtttccaaccctacggtttcaacaggacttgaccatttttctcgggcggggaacaggttttaagaccattttggttttaagtgcagaatatttgggttttatatagtaaaccctgtcctgtcttttaaggtttcctatttggggttttgccggggaattcttaacttaagtggctggctggccaatc

SEQ ID NO: 1502 - DNA, 319 bp, Zea mays
  Clone ID: LIB3115-030-P1-K1-A7
accgggagagcacccctcctagggcctttgatccatggccctaaaagattcggccgtggccactcgggggccaaaaaaggctcctccggctttttttttttgccctggccgccgtggccgccttcctctttttaaagttggccaccgccgtcaatggggactggaccctcgattcccggggtccgccgttgcggaagagggtcaacggcaaggccgggtggataactggagctagccgcgggattgggaaggttcttgcaatgccactttccaaatttaggggcaaagctgttcctttttgcccgtaacaaggaccccc

SEQ ID NO: 1503 - DNA, 426 bp, Zea mays
  Clone ID: LIB3115-030-P1-K1-B11
cgggcccggaattccggggcggaccacagccgtccggggcgccgccaccgccggggaatttttggttgttgttaaggcctgggcgtgcccacaaacccatgcccctggctgtggattaacgtgccccgaaaaaggggacctgtttgtttagattaagggccttgcaggtggcaaagttttataggttgaaatcaaccaggtcggtaaggaggcaggcatgtaaaaactaaggctgttttaagttaattggtccaattgggacctgaatggtattaagctaaacttttgtgaagggatttttttaaaaaaaaaaaaaaggggtggccgttttagaggtaccatgttttcttccccgtgcatgctacgttttaattttttttatggggtccccaaaatttaattaaatggccttggttttaaaacctt

SEQ ID NO: 1504 - DNA, 487 bp, Zea mays
  unsure at all n locations
  Clone ID: LIB3115-030-P1-K1-B2
cgggccggaaatnccggggcggcccaacccgtccaacaatttaattggtttttttaaggaaaaattttttattttaaaaaaaaaaaaaaaaaaaaaaaaaaaaaaaaaaaaaaaaaaaaaaaaaaaaaaaaaaaaaaaaaaaaaaaaaaaggggggggccctttaaaggaaccaaagttaactacccctgcatggcaacgaaaaagttttttaatagggcccctaaaataaaataaatgggccgtgttttaaaaacgtgggaccgggaaaaacccggggttacccaaattaaaagccttggaaaaaaatccccttttcccaagtggggaaaaaaccaaaaaggccccacccattcccctttccaaaaattggccaaccctaaagggcaaagggaccccccctctaaccggccaataaaccccggggggggtgggggtaaccccaaggggacccgtaaaatttgcaaggccctaaggccccgttcttt

SEQ ID NO: 1505 - DNA, 214 bp, Zea mays
  Clone ID: LIB3115-030-P1-K1-B3
aaaggggaccccccctgtaccggcccattaagcccgggggtggggggggttccccccagggggcccgttccatttgccggggccttagggcccgttcctttggtttttttcccttcttttttggcaacgttggccggttttccccgtcaggttttaaatggggggctcctttaagggttccgtttaagggttttacggaaccttgaccccaaaa

SEQ ID NO: 1506 - DNA, 282 bp, Zea mays
  Clone ID: LIB3115-030-P1-K1-B4
gccccaggacctggggaaagaacggaaactcccggaggcccggaaaaccccaagacccgtgggcctaagggaccaaaggaaacctaagctctcaaaagggcccaaaaccaactgggacctccgggagaccatggccaaggaggcccgggaaccttgggcggaagcggcccaggaagtcggggaaaacctggaggggggcccggccccggggcacggaaagggggtccaacccaaggaagaggaactgggaatcccggcgacggacaccggaccgggaaacca

SEQ ID NO: 1507 - DNA, 227 bp, Zea mays
  Clone ID: LIB3115-030-P1-K1-B6
ccaaccggccgggccccccggcggaccagggggggaacaaaaattggccttacccgccggcggggggggggcggacaccgcaacaggcaaaaaactccgggcaacctggcaaaggaaaaaacaccaggaaatcggccaaccaaccaacccccggaacggtttaagtggaaggcggaaggcaaaacggtcaacccaatggaccaaaggaaactaatttttccccaagc

SEQ ID NO: 1508 - DNA, 444 bp, Zea mays
  Clone ID: LIB3115-030-P1-K1-B7
ccggcccggaattccggggcggccccacccgtccggaaggacctttttgggcaaccggagaacagggttttttttgcctcccaagttccggatgatccgaaggccaccaacaagaaaaccctgccaaaaaaaaaccagaagctgaaagagcttttgcaaaagcttttggcgtccggcaccaatcaaaggggggtaataacggccctaagggagaaggtaaaggtgctggaccggaggttgccccccaggaagagaccaaaggggggggggcccaagccatccaggcatgcttcttgggtccactgaagggataagtttgtagggtttggaggtttaatgtggtttggatcccaaggtggcttcctgggtccagttatggggcactgggtaggaatagccatgctggggaactgggcttggttttgaccaccacaagggggggca

SEQ ID NO: 1509 - DNA, 453 bp, Zea mays
  Clone ID: LIB3115-030-P1-K1-C1
aaaaaaaatatataaaaatataaaaactaatttttaattttttaaaaaaaaaaaaaaaaaaagaaataaaagaaataaaaaaaaaaaaaaaaaaaaaaaaaaaaaaaagggggggccctttttaaggatccaaagcttcctaccccggcctgccaacgtaaaattttttttttggggcccccaaattaaaattaacggcccgtgttttaaaaaccttggactgggaaaaacctggggttacccaaataaaatgcctgtgaaaaaaatccccttttcccaaggggggaaaaaaaaaaaagggccctaccaattcccctttccaaaaattggcccatcctaaagggcaatgggaacccccctttaacgggccaataaatcccggggggggggggggttccccccaggggaccctttacatttgcaaggccctaagcccccgttcttttgtttttt

SEQ ID NO: 1510 - DNA, 245 bp, Zea mays
  Clone ID: LIB3115-030-P1-K1-C3
gcaaaacatcctaactatagtggaaggggttaaacctataatcaggggccccgaggggacccagctttggaccaagtccttggctagccagggataatatcgaatctgaaagcatggcatggcaatccataattggtttactggaccacataatgcatgggtaacttatggatgtcttttggggtttaagtatggtgggaataccttctttgccattaaaaaaaatgttaattccttttcaaaaa

SEQ ID NO: 1511 - DNA, 308 bp, Zea mays
  Clone ID: LIB3115-030-P1-K1-C5
cgggtctggaattccgggtcggaccacagccgtccgccaacgcttccggggccccttggccacagattaaagtttagggaggagtttggaatcaagccatggacttttgtccaaagactgggaaatccggttttaatacctgttgggggtcctaataaagaccggaatctaagagtttgcaccaagatagttttggattttgtttaaccagaaaacattcataaatgttttactttaaccgaggttttccggagacttcaagggggccccagggcaaaaaaggaaaaactagaggtgataaaaataat

SEQ ID NO: 1512 - DNA, 456 bp, Zea mays
  Clone ID: LIB3115-030-P1-K1-C7
cccacacccgtccggaaggggcacctgaggatttaggtaagtttttggcaccggggggggaagtcaacatgggggatcctgaaggtggaactccgttgaattgggttgttgaccggggccatttaagtgttgtgggggttttggcaaaactaaatgcggccctgattgccaaggccaccgaagggcaaacggaactccactccgctgttgttggggaaagagaaaacatttaaaaattgctggtgaagcatcatgcctcctttaaaatcagggatgaggttgggaccacggaacaggacttgtgccttccaagttgtgttttattgaaccggccaaattgacatccaaaatgctccttatcattagcgtgcctttaagttgtgcccgaccttggccaatggtgtttttatttatgggggacatatggtgtgccttgtgtgaatggccgttcttggt

SEQ ID NO: 1513 - DNA, 409 bp, Zea mays
  Clone ID: LIB3115-030-P1-K1-D1
aaattaaaacaaataaatggaattattataattattaaattaaaaaaataagggccgctctttttaaaggaccaaagttaacaacccctgtgctagcaagataaaattttttttttggggtaactaaatttaaattaattggccgtggtttaaaaacgctgtgactggaaaaaccttgggtttcccaattttaatcttttggagaaataatccccttttctccggatgtcttaataccaaaaaggcccacaccattctgcctttccaaaaatttgcccaccttaattggaaatgggaactccccctgatcgggcctattaagcccggggggtggggggtttcccccaatgttactctttatattttgcaaggatcatagtgcccgttctttaggatttatacctttctt

SEQ ID NO: 1514 - DNA, 360 bp, Zea mays
  unsure at all n locations
  Clone ID: LIB3115-030-P1-K1-D2
acccggggcggaccaaggcgnccgccaacccggccgggacccgggaaggcggcaataaagaagaaggcggggccaaggggcaagcgaacgaggggccgccaggaggcagaaaacaggctcccgaaagaaggacccaaaaggggaggcccagaaaccagaacggcggaaaaaggggggggccaaaaggaaacacccggggaaaaacgagggccaagcaaaaaaacaacgaaggcccaaaaccgccaaaaaccgccggagggaagcccaaagccaggggccacaaaaagccggcggagaaggaggccaaaaagaaaggcaccgggggaaaacggaggcggaccggaagggaaacggaccccc

SEQ ID NO: 1515 - DNA, 258 bp, Zea mays
  Clone ID: LIB3115-030-P1-K1-D3
aaaaaccggggaaacggaacaatgaaccggggggaggcaacaacaggccgaagggcaaaccaaaaaaccctggggcggcagggcatccaaaaaaatattccgccggggaagcaaaccagggacctcccttggaggaaaaaaaaaaaaaaaaaaaaaaaaaaaaaagaaaaaaaaaacagaaaaaaaaaaaaaaaaaaaagaatagaaaacgacaaaaaaaaaaaaaaaaaggaaaacaaagaataaataactaaaaga

SEQ ID NO: 1516 - DNA, 294 bp, Zea mays
  unsure at all n locations
  Clone ID: LIB3115-030-P1-K1-D5
gggcccggaannccggggcggacccacccgtccgagagaatgttaaattcgccaaaacctaggatttttttttttaaacaccatccctggggccggttctgccatattaccagaccaccccaccgggaatggggaagggctaaacttgatgtttccgatgcgcaccggcaaagaaggcaccggtgcctggattaacttgttggcctgggaccgggaaaattaacctgttggtttttgtttggccctgaaccggggggggctgtggccaaaaagactctgtccaaattttgattt

SEQ ID NO: 1517 - DNA, 236 bp, Zea mays
  unsure at all n locations
  Clone ID: LIB3115-030-P1-K1-E2
cgggccggaaanccggggcgggccaacccgcccgggggggccaaccaacccccnccaaaaacaacataaaagtcggaaccacccaaagggcggggggccaggaggggggcggccagggcaaggcagggcaaggaacagcaggggggccgcggagcaagggggggcccgccagcaggaaccaggagcaggcgggacaaggccccacccaaggcaccgggaaagggcgaaggcaggaa

SEQ ID NO: 1518 - DNA, 348 bp, Zea mays
  unsure at all n locations
  Clone ID: LIB3115-030-P1-K1-E4
aacgggccnnggaannccggggaggaccaacggggcggaaaaaaaagaaaacgaaaaacaagaaaacaattaaaaaatttaataaaaaaaaaaaaaaaaaagggaaaggggaaaaaaaaaaaaaaaaaaaggaaaaaaaaaaaaaaaagggggggggggcaaaaagggaaaaagagaaaaaaaagggggaggggaagaaaaagaacaaaaaaaggggaaaaaaaaaaaaaaagaagggggggaggaaaagaaaaggagagaggggaaaaaccggggagtaacaaaaaaaaaaagaaggaaagaaaaacccataaagaagagaggggaaaaaaagaaaagggcaggaac

SEQ ID NO: 1519 - DNA, 178 bp, Zea mays
  Clone ID: LIB3115-030-P1-K1-E9
ccggcccggaatccccgggccgaccacacccttccgccacacccgtccgcggcccctgggttttaatttatttttacagaccggtacacccagcctcatggaattttaaaaaagggcggcgctttacttcccttttaaaaaaaaaaaattcaataaatatttaaatcaaataaaataa

SEQ ID NO: 1520 - DNA, 416 bp, Zea mays
  unsure at all n locations
  Clone ID: LIB3115-030-P1-K1-F2
cggccggaaacccgggcggcccacgcggcccaaggccaagggggggacccaaagaaaacccccggacctcaagacccggaanaaccnggcggggangggccaaccaaggccgggcgaaggaaccacccaacggggaacggccaacaacgggaccccngccccaccaanagccaaagggggccnaaacgggccccnnaggacggacgacccccaacaaancaaccggccaaaggacccnngggaggaagaaaccagggcggcggcccaacnagggaggcggggccaaggggaccggggggaaaccgcaggaaaaccggccaaccagcccggagcccccacacaggccaaaggccaacgggacggggggaaccaccaccagaaggggcccggggggcaaggccacccaccagacaaag

SEQ ID NO: 1521 - DNA, 418 bp, Zea mays
  Clone ID: LIB3115-030-P1-K1-F9
acccggccttgaatacccggtccgccccacccttccgaaaaaaaaaaaataaaaaaaaaatttataatttttaaaaaaaaaaaaaaaaaaaaaaaaataaataaaataaaaaaaaaaatcaaaaaaaaaaaaaataaaaaaaaaaaaaaaaaaaaaaaaaaatgggggggccttttttaaggatccaaattttcctaccccttctttccaccttaaatttttttttatggggcccccaaaatcaatttcttggccctttttttacaacctttggttttggaaaaccctggtgtatcccaaatttatatttttggaataaattcccttttcccccattgggtatataatcaaaaagcccccccctattccctttccaaaaattttgctaactcttaatggtaaaagggccccccctttt

SEQ ID NO: 1522 - DNA, 394 bp, Zea mays
  unsure at all n locations
  Clone ID: LIB3115-030-P1-K1-G1
aaacaagggncccgccggaggggacccaaaggcagagggggcggaaaaagaagtccaaaaaaaaggagggcccaaaccggaaaaaaccggcggnggcccccggaggaagnnnngggncaaaccataaataagtttaagcaccacacaagttggaggccccaaattcccccaacaccccaaaaggggcggaaggcaccaaaggctaatggaaccattggaccctaaaaaagaaccaaccaagggggaaacgaaaacataacccccaaaataatggaccaatttccgattccaaaacaaaaaaagaagggggggtggcctcaaccctcaagaaccatcctttggggggggggaggggggccaagaaggaaaaggggggaattggccaggaaaaagg

SEQ ID NO: 1523 - DNA, 411 bp, Zea mays
  unsure at all n locations
  Clone ID: LIB3115-030-P1-K1-G3
acgggccgggaaanccggggaggaccaacgcgtccgccaacgcgacggcaacccgccaggacaacaagacaactggttacccggaagctcaagctcggggctcccaggtacaggcaggccagcctcaacaaggagcgagcgagcgggggcaacgggaagggggggggcggggccctccaccggggggcaggcacaccggacggggccaagcaccgggcccggggacaacaacaacggctccaactcgggggggcgggcaaggcgggggggggggcggccccggggacggccgcggccgccgacccgaataaggggcaacgggaaacccggaagggggcgagagcggccaacggggggggagccccgcaacaaaaaaggcggaaggcggcaaaacaagcaaagggggaggga

SEQ ID NO: 1524 - DNA, 336 bp, Zea mays
  Clone ID: LIB3115-030-P1-K1-G9
ggaaccccggggcggacccacccgtccaagagtccttggcaaacggcaagcttttttttttggtcctggtggccaggaggtagggcctgaacctgaaaacccaccttttggtttgggttccaactaaggatcactaaaaagaatggcttttggtaggagggctcacagtaccagggatatggcatgcagattgcttggtcaaaatggcccaagttccaacacctcccccggcaaattgaaaatccaagccgacctggatttgtccagcgatgccaagaatcatctttttaaaaacttggtcggtttatcaggcctatttttgggcctagtttggtg

SEQ ID NO: 1525 - DNA, 297 bp, Zea mays
  Clone ID: LIB3115-030-P1-K1-H10
ggaagccgggcggaccaaggcttctacccattgttaccaaaagcatttagaattttaatggggaaataacaataaggtgggcgagtttaaaaaggtgtccggcgacttccatagtattaaacttaggagttatttcgagggcacatctggagaaatttgtttcttgcaaaactaagttgcttgggttttgaaccatattgaaattggtaaaatatttaattccctttaagcaagaaaaggtttaatgaaattttctaagtttcttataatgagccccctaacttttgcccttacaat

SEQ ID NO: 1526 - DNA, 334 bp, Zea mays
  Clone ID: LIB3115-030-P1-K1-H2
ctttgccgggcacctacggttttaactgcaagccgaaccaaggagcaggaatggccggcaggaccacagtcaattaaagttggctttccattcaaggcatctggacctgtttgtcctccgcccgtcaatggatgatccatccatctttactggtttccctaacatgtccaccatttaaggcaccaaataaagtccgtcctggggggaaaaaataaaaaaaaaataaaattaaaaaaaaaaaaataaaaattaatagggggcgcccgttttaaaggaccaaggttacctacccctgccttccaaggtaaaagttttttttaagtgtacctaaaat

SEQ ID NO: 1527 - DNA, 405 bp, Zea mays
  Clone ID: LIB3115-030-P1-K1-H4
cgtccgtcctccttccgtggacccttgggcggttctttagaattgttggttcccaccaggaacatgctggaggacggggggttcaaaatttcaaccaatcgacacccaaaaaaaactgttggatttaatggagcccacgtctttggtaaccggccacgtcctaaaggagcctggttgggcgatattagctaggttcattggacccaatcctgtttttggtttggccgaaccagcttaaaaatgaccccccccctagaaatggtccactccgtcttattcggggatggagcgttttttcttcctatatggtaccaggtaaaggttgtttcccacccccaaagtaatatttaaatgacctgctttggttcaattttttttcttggtcctagtgccgtgaatttggtt

SEQ ID NO: 1528 - DNA, 269 bp, Zea mays
  Clone ID: LIB3115-030-P1-K1-H5
gggaaggaccgggccgaccacagccttttcgggccacggtttaccaaactgcattttccatttcttgaaggcggcacgttccggggacgccgggcaggaagctggggcccctccggcctccacccttgttgtttgccttgctgggtcgttcgcggcctcggttggccgacctgggctttggtccaggtttcctgggtggcccgccggaaactcagtagggctgtctcgccggataccgtcccgtcctctaggaggggggctcccggaat

SEQ ID NO: 1529 - DNA, 370 bp, Zea mays
  Clone ID: LIB3115-031-P1-K1-A10
agcagctcacttgagttcaattcagccatgaggagccaggtcgcagcagtagccatgtttttgctcctcctggcctggggtgctgaggccgacctctgcgtcacgcgtagcaggaccttcaaagggtggtgccaccagagcgagaactgcatcaccgtctgcaagagcgagggcaataccggcgggttctgcaagctcggggcttgcatgtgcaccaaagagtgtgtccgaagtactgacgctgctggtgctaataaagccccacagcagcatttgagttgatgagtagtaaagaagaacgcttttgttatgccagcgcaagctctagaattcgaggccgagatgaccaaaaataaatgattttgttact

SEQ ID NO: 1530 - DNA, 423 bp, Zea mays
  Clone ID: LIB3115-031-P1-K1-A12
cccacgcgtccggtacactgatgactggtcgagagagccagctgatcgatcgagtgacccttagttattagacagggatggcttcgttccggaccagctggcattgcttgctcgccgcctgcctgttcctgctcgcttcggcggcgcacgggcagcagctctcgtcgtccttctacgcggcgacatgcccgacgctggagctcatcgtgcggaccaccatgctcacggcgctcctcgccgagcgtcggatgggcgcgtccctcgtcaggctcttcttccacgactgctttgtccaaggctgcgacggctccattcttctggacgacgtcggcagcttcgtcggcgagaagggcgccggccccaacgtcaactctctccgcggcttcgacgtgatcgaccagatcaaggccaacgtcgagctca

SEQ ID NO: 1531 - DNA, 460 bp, Zea mays
  Clone ID: LIB3115-031-P1-K1-A2
cggacgcgtgggctgcctcgcgccattcgtcaaggtgctcgaccaaaagttcggcatcatcaagggcaccatgaccaccaggcaggcctacaccggcgaccagaggctgctggacgcgagccaccgcgacctgcgccgcgcccgcgccgccgcgctcaacatcgtgcccacgtccaccggcgccgccaaggccgtctcgctggtgctccccaacctcaagggcaagctcaacgggatcgcgctccgggtgcccaccccgaacgtctccgtcgtcgacctcgtcgtgcaggtctccaagaagaccctcgccgaggaggtgaaccaggcgttccgcgacgccgcggccaacgagctcacgggcatcctcgaggtctgcgacgtgccgctcgtgtccgtcgacttcaggtgctccgacgtcttcttcaccatcgacgccttcctcaccatggtcatgggcgac

SEQ ID NO: 1532 - DNA, 387 bp, Zea mays
  Clone ID: LIB3115-031-P1-K1-A5
gagcgggacgccaagatccgcggtgagctcggctatgtcaagggcgcctccgaggaggtgaagcagctggaggaccaggcggcggccatcatgaaggcggcgcgcgccgagatcgcggcggcgcttaacaagatgaagaaggagaccaccgcggagctggaggccaagctggacgaggggcgcagccgtgtggaggccgagctcgtagaggcgctcgccaaccttgaggcgcagaaggaggaggctgttaaggcgctcgacgcccagatcgccttgttcagtgatgagatcgttaagaaggtgctcccattcgtgtgatgaaaccaaaccggtcttgtctttatctacgactatagttacatgtacattaataattaatgattattt

SEQ ID NO: 1533 - DNA, 454 bp, Zea mays
  Clone ID: LIB3115-031-P1-K1-A6
cccacgcgtccgccaacaagcaacatagaaagtggaatacagtagcaacaatagagcagcgatggcggccaagatattggggatccttatgctccttgctctttctgcatgtgttgctaacgcgaccatttttcctcaatactcacaagctcctatagctgcccttcttcccccataccttccatcaatgaccgcttcagtatgtgaaaacccagcccttcaaccctacaggctccaacaagcaatcgcaacaagcaacttacctttatcacccctgttctttcaacaatcgccagccctatctttggtgcagtcattggtacaaaccatcagggcacaacagctgcagcaactcgtgctaccagtgatcagccaagtagctctggcaaacctttctccctactctcagcaacaacaatttttttcattcaaccaactgtctacactgaaccct

SEQ ID NO: 1534 - DNA, 421 bp, Zea mays
  unsure at all n locations
  Clone ID: LIB3115-031-P1-K1-A7
gagcgggacgccaagatccgcggtgagctctgcgatgtcaagggcgcctccnaggagggggagcaactggaggaccggggggcggccatcatgaatgcggcgcgcgccgagatcgcggcggcgcttaacaagatgaagaaggagaccaccgcggagctggaggccaagctggacgaggggcgcagccgtgtggaggccgagctcgtagaggcgctcgccaacctcgaggcgcagaaggaggaggctgttaaggcgctcgacgcccagatcgcctcgctcagtgatgagatcgtcaagaaggtgctcccatcctcgtgatgaaaccaaaccgtccctgccttatcctacgactatagttacatgaacattataaatttatgataattttgaagaaattggccgttgactccgacactttact

SEQ ID NO: 1535 - DNA, 324 bp, Zea mays
  Clone ID: LIB3115-031-P1-K1-B4
gcgaccgtcgctcaccgggaagctacgctactactatagcatggcgtccgtcacctcccgggccccggtctcagccctgcgcgctgcgtcatcatcagccttccttggccactctagccgcctcggccgcactgctaccgcgtcgccgacgaggcggagcctcaaggcttatgccaagggcgagtggctcccgggccttccctcccccgcctacctcgacggcagcctgccgggtgacaatggcttcgacccgttgggcctggcggaggacccggagaaccttaggtggtacatgcaggcggagctggtgaacaggctgtggtc

SEQ ID NO: 1536 - DNA, 454 bp, Zea mays
  Clone ID: LIB3115-031-P1-K1-B8
ctcctatcagagtatgaagctgctaagagcaaagttgacccaatggatatcacaccggcgctaccacaacaagcacggggggccaatgccaacgtggtcacctcgtagctgcaccagttccgttgatagttccgttgctggcgacttactgacctctcggtaagtatgataggatagcaatcttggtaagtccttatatgaaccaatcaattagttgtgcttgtaactggtagattgtttagcgagggaggcgacctcaggcaaacattgatattgaacccgttagctgtaactctgtgtaacagtataagaaagaagctgaggtcgccaggtaatttattgttaaactgtaggaggccgggtaaactcatgcccttcttgttccaagctaccgtatgcagtggtggcccactggccgtgtgtattttggcgaaaaccttcgtctgcaaaaact

SEQ ID NO: 1537 - DNA, 441 bp, Zea mays
  Clone ID: LIB3115-031-P1-K1-C10
cggacgcgtgggtcaggctgcctctggtgaagagcatcaatgtcagcgggcacaaggacggcctcgtctaccctgggggtggctgggtcatctggcggagcaaggatgatctgcctgaggagctcatcttccatatcaactacctggggacggaccagcctacgttcacgctcaacttctccaaaggttcctgtcagatcattgcgcagtactatcaactcattcgcctaggcttcgaggggtacagaaacatcatggagaactgccaggagaacgcggcgatactgcgggagggcatcgcggcgacgggccggttcgacgtcctgtccaaggacgccggggtgccgctggtggccttctcgctcagggacagcagccggttcagcgtgttcgacgtctccgagaacctgcggcggttcggctggatcgtgccggcgtaca

SEQ ID NO: 1538 - DNA, 462 bp, Zea mays
  Clone ID: LIB3115-031-P1-K1-C2
cccacgcgtccgaccagcagtgcaacaagcaagatttacctgcccatcgatcatatcgtcaactggtccggcagttcgcggcgaccatgagctccacggagtgcggcggcggcggcggcggcgccaagacgtcgtggcctgaggtggtcgggctgagcgtggaggacgccaagaaggtgatcctcaaggacaagccggacgccgacatcgtggtgctgcccgtcggctccgtggtgaccgcggattatcgccctaaccgtgtccgcatcttcgtcgacatcgtcgcccagacgccccacatcggctgataatatataagctagccgctatttcctttccttgccccagaacttgaaataaatatatatacgatgaaataacgcgggcatgccgaataatggatgtgtgaattctcactaattaagtaatgcataaataaacgtattcaaatgtcgccccttc

SEQ ID NO: 1539 - DNA, 457 bp, Zea mays
  unsure at all n locations
  Clone ID: LIB3115-031-P1-K1-C5
ctcaggagcattcgagaagccgaagaaaattcgaagacgaggagcagctacactgcggagggacttctggcatggagggcgagttccaggttggcaaggaggaggtcatccaagcatggtacatggatgacagtgaagaggaccagaggcttcctcatcatcgcgagcccaaagaattcattcctctcgacaaactttccgaactaggaatattaagctggcgcctaaatgctgatgattgggagaatgatgagaacctcaagaaaattcgtgaagccaggggttactcttacatggacatttgtgatgtgtgcccagagaagttgccaaattacgaggctaagataaagaatttctntgaagaacacttgcatactgatgaagagatacgctattgccttgagggcagcggctactttgatgtgagggaccaagatgatcagtggatccgtgtagc

SEQ ID NO: 1540 - DNA, 488 bp, Zea mays
  unsure at all n locations
  Clone ID: LIB3115-031-P1-K1-C7
gggnggacccactcatacatccactcattcatattttctcaactatacttttctttattcactaactctattattctagggactttctaaaatctgggcgggcacaaaaatttatattatcctatattatcaatctttatcttccaaattctaatattactaacatatagttccatatactatacctttctttatatcttcatctatcattttaactactttctttcctttttctatacaatctataaaaataaaatatattaatttaatttatatttatattaaattaatatcttataatatttcttaacaaataactatttttattttctaataattaataataataactttctcttaaattaattttatttattttttaatttttttatttttattattctttattcaaattattattatattttatttttcattatatatttcctaattatctttcttttataataatatctataataattttt

SEQ ID NO: 1541 - DNA, 455 bp, Zea mays
  Clone ID: LIB3115-031-P1-K1-C8
gttgattgataaaaccattcctgcattaccttccttgaacttgattaccttccttgatcacccgttttacaaaaggagtgtgatgcttagccttgctttagaaaacaaaatgttttgtttttacaaaatatgatatggcaaaggtgggtgggatgttttcgaaaataaaacttgatggtgaatccatcacggccgtgatggattcaacatcggaaaagatgtacctctgccaggtaccaagtttttgggttgaaaagattaagctgagaccgggcgggtgacttgcacgagaagagagtctcggtgtagtgtctccgtctgagtcgattaaggaccttgtcgatgtaggcctgctgaccgaggaccctttaactggtcacatgcctcgtcatgggtaagctttgcctcgggcggactaaggccagaataagataacacgaaatgggcgtggagcg

SEQ ID NO: 1542 - DNA, 429 bp, Zea mays
  Clone ID: LIB3115-031-P1-K1-D1
ctccttcctatcaccagaatggaaaggcccctgattttcaagcggatgaacctaggcctttgacttacaacactggggttgaggaaagaccgccaccgcagcgccgctgggtgccccctcagcctccaggtgttgcgatgccagaagcagcagctgccatacgtcaaccaaaggcccttccaaagcagccctccagcgatgcctctgaggcagctggtgagatgcaggtgaatggttcaagtgcatcggatgctgtgactgaggttcctgttaatggtgctactgcaagcgatgctggacgcagtgagatccaagaacaatcagtgtgcggcctaagtgaaaccaagaccagctaagaactgggaagcaatctaagagagattcaggatctctagtacatttggggggtttgtcatacatttctgaata

SEQ ID NO: 1543 - DNA, 100 bp, Zea mays
  Clone ID: LIB3115-031-P1-K1-D10
gccgaacccggcgacccacactctcctgaacctttacccacttactatcacgcaccaacaggtgtactacagggagtgacgttgctattgacgagccatg

SEQ ID NO: 1544 - DNA, 304 bp, Zea mays
  Clone ID: LIB3115-031-P1-K1-D11
gtcagcaggagcagcagcggcggcggcggttagaaggctgctaactggtggccgggcggtcgcctcgagctccggggcgcctccggtccggcggacggcagcagcagcatgtcttcggccgccccgctgctaggcgacgaggccggcggtggcgagcccgctctttggacgccgccgccgccgtactcgtgggtggggcgcgtggtggacgcggccgatgctcgcgcgcagtatgggatcgcggcgccgttggtgctgaccagcatggtctactactgcatcctgctattgtcggtgttgttct

SEQ ID NO: 1545 - DNA, 429 bp, Zea mays
  Clone ID: LIB3115-031-P1-K1-D12
gctgcctgcgcagacgctaacacacacgtttcccatggcagcgtccacggcctcgcgcatcttcacgcccttcctccaccggcaccagcggcgcacgaaggcagtcgtggtcgcagccgcgagcccgcccgacgccgaaccgactcctgcgacggcggacggtgcagggccggggaagaagaagacggtggacaccaggatacactggtccaaccccgacgaagggtgggtaggaggcaaggccaagaaggaaggcgacggccgcggcagcagcaagaacgagccgttgggagggaggttcgcggacctcatcaacaacgcggccgagtctcactaccagttccttggcatagcgccagaggcggacattgaggagatcaagacggcgtaccggcggcttgtcaaggagtaccacccggacacgacgac

SEQ ID NO: 1546 - DNA, 451 bp, Zea mays
  Clone ID: LIB3115-031-P1-K1-D2
cccacgcgtccgcccacgcgtccgcccacgcgtccggcggcgacgccttcccctccctgcgttcctccgtcccatgctccggcgctgacacgttcgcccgacttaaccttacgatggccgccgccgcctccgccatcaccgccgtctccggcgttgtgcttccccaaaccttcctatcccaccgattgccgccgccgcaggtcctagccgtggcctcctcattccgccggctctccttgtgcgcttctcctcaccggatcactcacataatcccccgcgctgatgcaagtgccgaagctggagaaccggagcctgccactgcttcagctgaatccgaagaggaggtggccgagggatctgtcgctgtggcggaggcggaggaaccgacgccgccgagcaagccgaaggttaagttcggcgaaataattgggattctgaataagcagttcat

SEQ ID NO: 1547 - DNA, 439 bp, Zea mays
  Clone ID: LIB3115-031-P1-K1-D3
cggacaaggcagagcgccatcgttcggtttccttgctgaattcccgatcgatcgctcgctcgaaaagaaagaagctagcttttagcatggcgtctctggcgttcggcagcaccgtagcggcggccgtggcggcgacctcagggaggacgcggccggcgcgccggtccgtgctggtcgtgccgcccgctgccagcaggggcggcccggcgccggccaaggaggagaagggcctcggcgagaccatcttcggcttcatcttcaagaaggaccagctggtggagacggacccgctcctcaacaaggtcggcgccgcgccggccgtcgtctcccgtgccaagacgaccggcggcaagaaggctaccggcggcgacgacagcggcagcggcggggggttcaacctcggcggccttggcgggctcttcgccaagaaaagcagctg

SEQ ID NO: 1548 - DNA, 366 bp, Zea mays
  Clone ID: LIB3115-031-P1-K1-D6
cccacgcgtccgggcagatctgagttagccggcggatccgatccgtgcgcgtgctgctgtgtgtgtgtcggtggagatggccacagcttacgctcccatggcgagccaggtgatgaagagcagcctcgtcgtgcactcgaggccgaggggcctgtcaggcgctgctgcgctcacgaggcggcccggccggttcaccgtcaaggccatccagcccgagaaggcaacgtaccaggtggtgcagcccatcaacggcgacccgttcatcggcagcctggagacgccggtcacctacagcccgctcgtggcgtggttccttttcaacctcccggtctaccgcaccgtcgtgagcccgctgttgcggtgcgt

SEQ ID NO: 1549 - DNA, 438 bp, Zea mays
  Clone ID: LIB3115-031-P1-K1-D8
cccacgcgtccgcatcagggttggcaggcaaattgtcaacgtcccatcattcatggtgagggtggagtctgagaagcacattgacttttcactgtcaagcccattcggtggaggccccgcaggaagggtgaagagaaagaatcagaagaaggcaagcggtggcggcgatgctggcgatgaggatgaggagtgaggatggacaagtagcgttacccaatataataatattatctagttttcttgaacttgttcgaatgatgagtgcttagctgtgtgatctgacgcagagttccctgtgctgactctgtgtcatggatggtccattttatcttgtggtattatcagtctttacataactgctatgtttggatttgttcaattctgttgcaattttatgagagtgtttttattaaaataaatatattatttttattttta

SEQ ID NO: 1550 - DNA, 177 bp, Zea mays
  Clone ID: LIB3115-031-P1-K1-E12
gaaaacccggccgacccactcttccgtcaaacctttcaccaataatcgcttttttttttgaaaacccacctcattaaccgtatgggctatcaacaaacaaggggggggagcaacatacctttatcatccttctttcaacattatacatccttatttttaattctatttattatacaa

SEQ ID NO: 1551 - DNA, 189 bp, Zea mays
  Clone ID: LIB3115-031-P1-K1-E2
gtcacgtatgtagtataacatctgtgactacactacagatgttatatatcatgtagtgtagtcacgtatgtagtataacatctgtagcagaacatgatatattcggttttctgattgtgatatctgtacgtggctacactcacatgtgagatttgaataagtcctgcagcctcagggctcagctagcac

SEQ ID NO: 1552 - DNA, 456 bp, Zea mays
  Clone ID: LIB3115-031-P1-K1-E3
gagatccggagcagccgcagtcccaccgaccccgccgccggtcgccctccatctcctcgccgctgcctctcgtttctcttttcaataatcaagatgagccgtggtggtagtgccggtggtggtcaaagttctctgggttatctctttggaagcggtgagccccccaaaccagcagtggcaccagctgcaagtgctccacctgttgagaaaccatctgctgcaaagactgatgcggccaagcaggttgctgctggggttaccagccaaaccaataactaccacagggctgatggtcagaacactggcaacttccttacggaccgtccttcaaccaaggtccacgctgctcctggcggtggctcttccctgggctacctgttcggtggcaactgatgcccgtgctggtgcgctcaccaaagttatcctcccctgcctgctgcgtgctatgtctgaatc

SEQ ID NO: 1553 - DNA, 412 bp, Zea mays
  Clone ID: LIB3115-031-P1-K1-E6
cggacgcgtggggtttcttctgattgacaactatgatgtgcagaggaaggaggcgattgcacgctgtgtgaggagtgcgtttggggtgctggtgaagaaaggagtggttccgtcattggagccattgacaggttgtgacaagttatcaccactgctgaggcaaaagcttctggcatttttatctgatacttgtgaggcagctgaagaagcttgtgggaagacaatcaatggggtttctaaaggaacagagttgaacaagagaatttgctgaagcatgcacacaatttatggttgtcacaaccatctctactaggaatgaatttagcacctattcgtcgggatttccttgttttggaaactttcgtagacctgttaagaggaaacagatggtgctttgggtattatataatga

SEQ ID NO: 1554 - DNA, 454 bp, Zea mays
  unsure at all n locations
  Clone ID: LIB3115-031-P1-K1-F10
cccggcccactcacaccgaactcgtgaagcacagtttccatcgtatgatgtcnaggaaggggaaaaagaggggcagggagggggaaggtgctgtgagcgaagcactggtcgtcgcaccgccatcatcggcggtgtgagtgcatgcagcaaggaagcatgcttgccatgccgtccgcccggagcttcggcgccgcgggctggtggcgtgtgagcagggatgcttcggcggtgcacaagaaagaaggcaagtcttatcggcaagggaaggctaagcctttcttccaggtctccctctctccatctaaatcattctatgtgtttggaggagggggcaatcgatcgttacttactggtctcctgatccttagcggtcatgtctctgtgtgagtgtgtgactgtgtgctccatctccgtgttgatttacagctagaataatgaccagttcatagtgaat

SEQ ID NO: 1555 - DNA, 455 bp, Zea mays
  Clone ID: LIB3115-031-P1-K1-F11
tgcttctggtgcctggactcgatccttattgcatagtttcgtagaaccagctttggcggtggatattcctggcaaggcaggaaagggtcatcttcttgtgttggagaaattcgacaaggttaagttaaatcatgccctaatggaggttggatatgttgaccatcatattacaaagtcaaatagcacacacatagcttcagaatctagtgaagatgagcttggtgctttatcagtatcaatgactgcaaccttagatacaaagggaaatttagttctaggaagcatccgggagttcaaaggtttttcgagggaggttgatagatccgttgttcagtgtatatgggaacgtgcaggagagttttttcctgcaatgaagaatgtttcttttgatattgatcagaatactcaaatcagaatagggcatcttccatacatgcctgatggaaagccagtta

SEQ ID NO: 1556 - DNA, 460 bp, Zea mays
  Clone ID: LIB3115-031-P1-K1-F12
agaagggatgagaagaagaagagggttgataagcaagaaaaaaacagactggataacttaaagaaagctgcaaagggtggcgctttgccaagtcatatacagcttgctgcgaaggcgttgcccatcacaggaacaaaagctgaccttccaaaaaaatctagaaaagaggatcttgagagtgttgtcggcatggcttcatcagcaacagcaagtggtgggaagtttgatgagaagttgcctggcgagaaacctccaaagcaccctggcaaacacagaaagttcctcccagttgccgaagggaagggaatgggcagcctggagaaacagcagaatgacaaaatcctgaactctctacttgccagaaactctgatgaaccacttgatgtcggcaaggcaattacaatgtacaaggtgaaaaaggagaagcagagaaagaaagagaaaggcatgtcatcgaaat

SEQ ID NO: 1557 - DNA, 422 bp, Zea mays
  Clone ID: LIB3115-031-P1-K1-F4
aatttactacgagggaggatattgctattgtgctcatcagtcagtatattgccaacatgataaggtttctggtggatagctacaacaagcccgtccctgctattctggagatcccatccaaggaccatccatatgatccagcgcacgactcggtgctctctcgagtgaaatatctgttctctgcagaatcggtggcgtctgataggcgatgaaggcatccttgcgtagcagtacccttcgatgcatctattttgttatggtattgaaaagaagatggcacgtaccattgggtgcgagcgagccagcatgaacaataatgagcttgcaaacaataattggttgaactaaaccaacaccctttttttcataaatggttcgaatgataaaaaaaaaaaaatatgaataaatataaatataaaaag

SEQ ID NO: 1558 - DNA, 456 bp, Zea mays
  Clone ID: LIB3115-031-P1-K1-F7
cgctccccagtccccacccccctctcgtgtcgtggcgacgactggggggctgtcgctggcgccctacgtcaggtgggcagggcgtattagggcacttcgccggcgacgagtaccacaaggcagtggacactttctctggtatcagaggatcaatgtccaattattatgatgactacgatgacattgacgggatggaggatgattatgatatggatgatcccattgatgacatggtagacgagcagcaagggattagggattctgatgtggaagataatgattatggacaaccaaatgataagatcccagatacttcatcagcagatgcaagaaaaggaagggacattcaaggaataccctgggagcagataaacataacccgtaaaaaatacagacagtccagattagaacagtacaaaaattatgagaatgtacctaactctggagaagaagcta

SEQ ID NO: 1559 - DNA, 411 bp, Zea mays
  Clone ID: LIB3115-031-P1-K1-G1
cccacgcgtccgccccttccttatagaggttacagccgtggttggtgttcctggtgtgaagtgtgcagtcaaaacaccaaagtagggagatggttcctctcttctttgaagctatggaggctctcaccaagtgacgacaaacttaatggatctggatcggtggttctacaaaaaaaataccagtcgatgagctgctataggtgtttggacgtggcattttatttttcacggaagctggtgtgaattgtagtttttttggtattagattacagtatttaaactgctagtttcctggttccaaagttttttcaccagaaatactggaggtgttcatgccttgcatgatttgtacatcttaccatgttgtatgaagcgatgaaattgtaggtgacgaaaaagtagaataagcat

SEQ ID NO: 1560 - DNA, 449 bp, Zea mays
  Clone ID: LIB3115-031-P1-K1-G12
cccacgcgtccgcagctaagaacagggcttcttctcaatggaaggcaaaacagggcagctcaggtgctgtttcgtcgccatcgtgctcgtcctgggtcttgtccttgagtcccaccaggctgaagctggaggcaaatggtgctgcgaaaccgccaccggaaaataccattttaatcgctgcgttgactcgggtttggtcgacaatattgggttctgtgcgggtaatgccggttgcatcattatggaagacagatgtggaggccgttggccggtgcctgctcgtgatgcgctttccctggatgtcatttgattaattataagcaagtacgtgaagaaacgagggccagacgactgtcgtccagcgattggttatttgtgaacttgtcgtttgtcttcttatttcaactttccaataagccccttcgtgaagtgtcatccccttcaaagtc

SEQ ID NO: 1561 - DNA, 347 bp, Zea mays
  Clone ID: LIB3115-031-P1-K1-G2
cggacgcgtgggcggacgcgtgggcggacgcgtgggtttgaccttgagctagtagaagccatgcgcaaatcatgctatacccacggttgcaccatactagtgcactaggcgagggaaaccctatcgaccgaccatggtgttgctcccgcgcaccgggcggatggcccttctttgcaccccgcgggcgtactccgctgtcgctgatgcgggcgcctacccggcgtccccagagccatacgggggcgcccccccaccggcgatgtcgaagacggccgacttcggggtctttaaggtggacgacctgatgaactgggcgcggtagggctcgatctggcccatgacctttg

SEQ ID NO: 1562 - DNA, 410 bp, Zea mays
  Clone ID: LIB3115-031-P1-K1-G4
aaaaaaataatataatttaaaaataaaaaattatttattatataaaaaaaaatataaaaaaaaagagggttaaataaaaaatgggggaaggtataaaaaatattaaactaattatttaataatttaaaaaattataaaaaataaaaaatatattactggggcccttttttaatttttttttttattttttcttttttttctattatcttttttttttttttgttttatttattttaattttttcctccttttttttattctcttttattttttaaaatcttattcttaactttaatttatatttttttaattaatatttttttttttataatttttatttataattattactttctctttctttttttttttaaccaaacattttcttatttttattttttatttaattt

SEQ ID NO: 1563 - DNA, 452 bp, Zea mays
  unsure at all n locations
  Clone ID: LIB3115-031-P1-K1-G5
gtttaagtaaggaaaaacactcaacccaagaggagagacatccagaaggcagtgcatggaagggctagaaaagttacccagaagggagctcttacctgtatgggcactgctgtcagcatgtcagagtccttatcttaacccatacctttggggaacatagcggggcctttttttgtgcaagaaccatgtatcgggcctttgttagtagcgtcacaactgcaggacttaccaccatgctacaaacatgttctcttggttctggacaacatgatactaaagttctagaggcactaaaagattcgtcctcgtcaaggccagcaatttttgcaatgtccaatccaactaagaatgctgagtgtacacctggggaagcattttcaattctaggtgaaaaggtcatctttgctagtgggagcccatntcatgatgtggatcttggtgatgggaagatt

SEQ ID NO: 1564 - DNA, 446 bp, Zea mays
  Clone ID: LIB3115-031-P1-K1-G7
cccacgcgtccgatcggctcagaaacgcaggcagcccagcccacgccgcgaggaagcctgaggccgagagaggactgagcaagcgtcccgcgagaaactggtgttccggaccaccacgcggatgggctcgggcgacccggcggccgaccccctttcttccttcctccgccaccccggcgcgttctccttctcccgtcgcgtcgccatggcgcgcgacgccaccgccacattcgtgccagcgctccgcccctggatcgttgacctcctcccgctcctcgtcgtcctcctcatcgccgcccacgtcctcgccctcggttactggatctacaggctcgccacggacgggtccaggcagtccgcgcggagcaagaagcactaaggggacggcgcccgcggccggatgcttgaaaccagtttgtatttcagtcctgcatccttggcttgtt

SEQ ID NO: 1565 - DNA, 203 bp, Zea mays
  Clone ID: LIB3115-031-P1-K1-H11
cacatatttgatctgtataagtgttacttgttatagctgatgtagaacaacattagcagccatcggtagcacacatgcaatgaaatctaaccccctcacctttcctctgaaaaaaaaaaaaaaaaaaaaaaaaaaaaaaaaaaaaaaaaaaaaaaaaaaaaaatatataataaaaaaaataaaaaaaaattatatattatata

SEQ ID NO: 1566 - DNA, 139 bp, Zea mays
  Clone ID: LIB3115-031-P1-K1-H2
gagctgagcaactgttgtagtgtagtctcaaactcaaagcgtttaggtcttgacatttggcaaactaaaactcagaaactgttgatgagtagtgtttttttttcgtttctctttcctggatttaactattgttattgct

SEQ ID NO: 1567 - DNA, 369 bp, Zea mays
  Clone ID: LIB3115-031-P1-K1-H4
accaatataggcagttagatgggagcggacatgatccttgagaaaccaggggcggtgtgtgattgagaagaccatctagggacaggaccgctcaaacattttattgatgtgcagggtttgggctgtagagaaataatgtaatgtagcctgaaatattatctcgctgcattgtgtaaaaagagaagagagatgtcgttttccataaaagttgaatccccaacttggtgatataatcccgtagaacttgtaacaaaatgttatgtattccacggggatcgaccttgggacttttatgagtttatcataatgatttatgtaaatagtttatttgaaccaaatattttaaaaataacatgagtttcttattta

SEQ ID NO: 1568 - DNA, 463 bp, Zea mays
  unsure at all n locations
  Clone ID: LIB3115-031-P1-K1-H6
ccgggctgaagaggacccaatctaacnttctcttgcattctactacatatttcttctatattttcacctatattcaattcgggggtcctacaaataacaatcggggggacataaaaaaccctttcataacccatcttaatctaattacattacatccacctttcactattttatcttaatatcaaatttttctttaccattcttcttttccaacaatatctcattctatatatctaatattaccctcccttttattatccattatatctctctcttatttttatttactactcatatttaccatttctactttctaatcttcctattaatttatttttttattattatctttttcatattttaatacttattacttttttaatcttaaaatatcttataatatatatattactttattttatatattaatatttttaatttttctttaacatttatatatttt

SEQ ID NO: 1569 - DNA, 359 bp, Zea mays
  Clone ID: LIB3115-031-P1-K1-H9
cccacgcgtccgaaaaaataataataatgactagaaattggattaagccctaaattaaacgcagttgctttcaaaggggggggaaaaaaaaaaaaaaaaaaaaaaaaaaaaaaaaaaaaaaaaaaaaaaaaaaaaaaaaaaaaaaaaaaaaaaaaaaaaaaaaaaaaaaaaaaaaaaaaaaaaaaaaaaaaaaaaaaaaaaaaaggggggggcccttttaaaggatcaaagtttacttccccgggtatgcgataaaaaattttttttatggggcccccaaaataaaaaaaatggccccgtttttaaaaactgtgggaggggaaaaacctgggttttccaaaaaaaatatttttggaaaa

SEQ ID NO: 1570 - DNA, 426 bp, Zea mays
  Clone ID: LIB3115-032-P1-K1-A1
cggacgcgtgggcggacgcgtgggtttgaggactttgccaatcataatgcctttgatttgcttgaaaaatatagcaagagccatcttgttttcaatgatgatatccagggcacagcatcagtggtccttgcaggtttgttagcagcactcaagatggttggtgggaccctggcagagcagacttatttgttccttggtgctggggaggctggaactggtattgcagaacttattgctcttgagatttcgaaacagacgaatgctccaattgaagagtgccgcaagaaggtttggctggtggactcaaagggtttgattgttgactctcgtaaaggctctcttcagccattcaagaaaccttgggcgcatgagcacgagccctttgaaaccttgtatgatgctgttcagtccatcaaacctacagtt

SEQ ID NO: 1571 - DNA, 423 bp, Zea mays
  Clone ID: LIB3115-032-P1-K1-A11
ctagaactagtccggacgcgtgggcggacgcgtgggcggacgcgtgggcggacgcgtgggctcgaagcttgcgttcttgtagtagaggtcggcagcaagcggtagagcgagaggtcgagaagatgaagagcagcactctgttggcgatcctagttctccaggcccttctggtctctgcggccgtggccaaaggacctgcagggccgacgacgaagaagcagtgctggtgcggcgagtgcaccagctggtcgggcgtgtggacctgcgacgacctcctcaccaagtgcgccgccacctgcaagaactgcgtccccgtgtccacggacaagggcgccaccaagtacaggtgccgcgacttcctccccgaaaactgcggctgcaagatccactagactcattcacagcggcacagccgatggatcc

SEQ ID NO: 1572 - DNA, 418 bp, Zea mays
  Clone ID: LIB3115-032-P1-K1-A12
gcccacgcgttcgccacgcgtcgcccactcgtcgccacgcgtccggattaatgagagagtttactaggaagggttatcaaggagaggcagcggaaggagcaggtggacgtggctgtcgcgaccaagttcgcagctcttccatggaggttcggtcgtgggagcgtcatctgcgcgctcaaggcctcgctggatcgccttggcgtctcttcggttgagctctaccaactccattggttggctcatcagccttttctcaaccgatttctcaatctctctctctctctttctatgtgtgtgtggactgtggacactgtcggttaactcttggcatatcctttttaggccagggatatggggcaacgaagactacctggacggccttggagacgctgtggagcaagggcttgtgaaggcagtc

SEQ ID NO: 1573 - DNA, 219 bp, Zea mays
  Clone ID: LIB3115-032-P1-K1-A2
cccacgcgttcggaaaaggcagttgctgcaccttcaaaatcaagtccggattccaagaagagcaaggatgacgacgattctgatgaggacgagactgatgattctgatgaggatgagacggacgattctgatgagggtttgtctcctgaagaaggcgatgatgattcaagtgatgaagatgataccagtgacgatgaagaaggagacacttcaacttct

SEQ ID NO: 1574 - DNA, 433 bp, Zea mays
  Clone ID: LIB3115-032-P1-K1-A4
ctcgctctcgctgctccgttcctgttcttccgctccttctccccacctcgttttggctgatcaaagttcttgttcgcgaacactttcctctgcctgacactctgagttcttggttaatgagcctgtatagacccatcggccatcaccagttcactactcgccaatcgacatgtcaggacagagctcaagctcctatggtgacactgatcctggcacagacagggcatacagcaccacctccagcagcatccggtggggtccgcacggccgcggcatgacggcctgcctcgtcgtcgtcaatgtcgtgctcgtcgccctcgtctacctctacttctggagggtgttctcccgcagaagcgccgcgtccccctcagcagctaaccccacggaccacgacgacgatgcgtcttccacatcgacgccgccgtcgccg

SEQ ID NO: 1575 - DNA, 430 bp, Zea mays
  Clone ID: LIB3115-032-P1-K1-A5
cggacgcgtgggccgggctccggcaccggcgccaccaaagctctggcagcagcagattcaccgtcctacaaggagctacagaagaagtttggcagttcgaaagaactgatcgagtcggcgaggagcatcatcacgtcgaaagaagcgccagctgcggtggcagatctaacgagccgcgtcgaagtggcgaagcaagtctctgcctgcagctacgagacgggcacgagctggggtcaggaggttggctgggtgtacgggtccatgaccgaggacgtcctgacggggcatcgcatccacgccgccggctggaggtcggcgctcctgagcccggacccaccggcgttcctcggcggcgcgcccaccggcgggcccgccagcctcacccagtacaagagatgggcgacgggcctgctggagatcgtcctcagcc

SEQ ID NO: 1576 - DNA, 344 bp, Zea mays
  Clone ID: LIB3115-032-P1-K1-A7
cccacgcgtgcgcgctgggatctagcacgcaagcgagcgagagagccaaccacctatgtgttaagcgactccgcgttcttgaacggagtccgaggccaacactacctatggcggctggtggcgggggtgtcatgtggatagcggtgctttaagatcatgtctcagtgttcgaccccgcgctccttttacaagcgtgcagggcgcctaaggcacagcgctttaccgagcggcttaagtactccgtgtatgacttcaaggttcagtgctagaccagttcaattatcacaaactatggattggtggtcaaccctgagcagagtgcaggcaacgagctttttgaaaca

SEQ ID NO: 1577 - DNA, 327 bp, Zea mays
  Clone ID: LIB3115-032-P1-K1-A8
cccacgcgtccggccctcggagggctcatgtgctacgagaaccccaagcacaaggtcaccgctgtccccgccgacgaagaagagatctgcggtgccactttcaaggtggtggaagggtctactgtcctgacggcgctgcactgatctatcattatcaggcggaggcgatgcgatgatgattcataactttttacatgcgttggtggatggcggttttacattatggctgtcaacaagttttgctcatgcaaacctttttatctatcttttgtttattcatcttttttgcttgctttgtccttactccattcacggctttttatatat

SEQ ID NO: 1578 - DNA, 159 bp, Zea mays
  Clone ID: LIB3115-032-P1-K1-A9
cggacgcgtgggaattttgaaaggtgatgtttttattgttgaactcgatgcttcattaggggacttgtacatgggcggtgcagtaaaggtttggagagagaaaaacgtcataaagccagcaccaggaaagaggcgctgcaactgtaggaacgaaattta

SEQ ID NO: 1579 - DNA, 130 bp, Zea mays
  Clone ID: LIB3115-032-P1-K1-B1
cccacgcgtccgcggacgcgtgggaaaaacggctttaaagtctattttgtgcggtagttggtgtaggccgcttcgtcccgaagcgatcttggtaaaagacttattcgtgttgccaaacgacacaattcgt

SEQ ID NO: 1580 - DNA, 380 bp, Zea mays
  Clone ID: LIB3115-032-P1-K1-B11
tgaactggtttatgctaccgtcatatttttagcgttagcttatgcccgaggtcgtgggtgcccgcgcgcggtatgacgagcgccaccgccatcgtcgcctggcatggacttgtgctgcgtactagcctcccccttcccaacccgacagggcgagccaccacgtcggtctcactttccgcgcgccccgacactccaacccgtctaatgattgacccgtctagcccgatgccgcggactcctggtcggagcccagtcatgctcatctagagctctacctaggcattcgttgcgggtggcattagcgaccaaaaactgctggtcgagaacaaggcgtacccgcaggcggtggtgtgctacactggaccctgacgcgcaccctg

SEQ ID NO: 1581 - DNA, 434 bp, Zea mays
  Clone ID: LIB3115-032-P1-K1-B4
cccacgcgtccgcggacgcgtgggctcactcagcgtgcttcccttcagaaactcgatgggctgccacctcgccatcgccggcgccaccgccgccgccgcccgcgctcctcgtatctccgtgctcgccgccgcctctgcttcctccgcaggggaacccgcgcgccgcatcatccgccgccgcgcgccgccgggtcagcagggctctgccacagcggcccccgcgcctcccgcccagccgtccgtggcggaggtgcgccgcgccatcggcgtctccgacgacgctgcgtcggccgccgcatccatggagaagaagaacaccgcgttcatggacctcatctctaccacgcccatcggccagccggagagcgagcccgagcgccgcctccgcgaggccgccgagtgggtagtcgacaccactgagacgcgcgcttgcg

SEQ ID NO: 1582 - DNA, 433 bp, Zea mays
  Clone ID: LIB3115-032-P1-K1-B6
gaataactttccggatcatgtatttcaagttattgactctcacctcctggaagaatgcaggagttcaattcaaggaaataattcaatacatgaaaatgagatcaaccagtgcttggttgatctactacaagtggggctttcatgccttcgttcattaccatctgaacgatcgaacatgaagcaagtggctagcagaatgcatgcaatccaaacatcacatattgggtggaagcacaagtaataagagcaagggtgttccctgaattgtacaataacatatatacttggacatccactcgcgcttattgttgattatcatctagaatatacaagaataaaaatcttgcaatagaaattcgttaaacatcgtgatagtctcaaaatatggaggaaatgtgaggacttgaaggtagtgatgtcataaggttcacgg

SEQ ID NO: 1583 - DNA, 419 bp, Zea mays
  Clone ID: LIB3115-032-P1-K1-B9
catgcggatctctcccgccatcttgcattgtcctctgtgcccttactctgcccatgggcaaaacggtcgtggactacgtgctgaaacatcacgaggacaacgcgaagatattcatggcgaagtactactgcgtgcggctgcacgcgctgtttgggatggcactggcctctggtttggtcttggcccgaaatggtatattagcctgacagacaggctcatagtcataggcggcgctgaaatccaggagagggtccagagcaccctggagtttcagaatcagcgagcaccctgttcctcaatttatgttctgaatctgaactacttctgattcgactatcgaacaggccgatgagaatggggcgcagtactgagcagcttgcagtttgccaagaaacgggggagggaatggccctaggaga

SEQ ID NO: 1584 - DNA, 426 bp, Zea mays
  Clone ID: LIB3115-032-P1-K1-C11
gaattcttggcagttcttgatggcaactgccgaactccaattgccgcctatgcttaccgtgacaaggacgggaactgctcattccggggtctactggcttcaccagacggatctaaagtatttgagacggcaagaagtggaccgtactctatcgacgacatggtcgagatgggcaaagacgctggccacgagctgaaggcgaaggctgggcctggcttctttgatagccttcaatgaacagaatgtgcggccatgcgcgatttcagttggcaccctttcggttgaaaacgagggccaaagtaggttgttgaggggtttgtttttgtttcttctttttttctcctactactagttcctgctagagccttgtactcatgttgagcagccccattcagcttttgttgtatctcatgttcttttagcact

SEQ ID NO: 1585 - DNA, 412 bp, Zea mays
  Clone ID: LIB3115-032-P1-K1-C2
cccacgcgtccgcggacgcgtgggtactgctgctgctagagaggcacccggctaccaggccggctcgtcgcttaactcggacagctgctgatgccttggcagctagctggtcgtcccaagtagtagagaacaaggcaaatgtatccatagatctccttgtagcggagcttaatgccttttttttcccctttctaatatgcattggatgagcccgtagcgcaccgtagtagtatctaaagctggtgttctgagttggttggaccttcctgcagttttggtttctccttctgatgtggcaagttttagctggtcgcacctacctaatgtatgcttagcaaacgaagtcccactaagcgctgtacataactgcccctccctgcatcaactctaatatatcatctgcttaatcgtc

SEQ ID NO: 1586 - DNA, 267 bp, Zea mays
  Clone ID: LIB3115-032-P1-K1-C4
ctgtgagatctggaagagtgtttgctgtttccttctcgatcgcatcttgtgctgtaatgagagaagaacatgagctcttgtcacggaccgagcgccttcgtttctcaaaaaacattttggtttggatcagagtatgtatgtgtttgcttgcttgcttggtgcccagtgccaatgaacaacaaccttgaccgtgcgtggtttgcttaaattaaattgcttattaataaatgaggcggcactgtgattgatgctgtcggttattgtgct

SEQ ID NO: 1587 - DNA, 432 bp, Zea mays
  Clone ID: LIB3115-032-P1-K1-C5
gggcgccgacgaatccgacgtccctgacgcacagcgacgtcgtcggcacattcgggtacctggcgccggagtacttcatgtacgggaaggtgaccgacagggtggacgtgtacgcgttgggcgtcgtcctgctggagctcctgtccggccggaagtccatcagcagcgacgggtcgtcacccaagggccaggagagtctcgtcatgtgggcaactccggtgcttagcagcggcaacatctgtgacctgctggacccgaggctggacgtgaagcacgacgaggtggaggtcaggcggatggcctctgccgcgtcgctctgcctccggaggtcggctcgactcaggccgccgatatcgcagatactgagcatactacgaggagaaagcgcggcgagcatcgccgaccagggcgcgacggagccggactgcgtgg

SEQ ID NO: 1588 - DNA, 307 bp, Zea mays
  Clone ID: LIB3115-032-P1-K1-C6
tttagtgccaagtatacgagtttgtggtgtcagactttcaatatggattgtatcttcaggcgcaagcattgatgatacggtaatatgcttcattcgttcaatgttcgattagtatttctttttgctatacttggtatatgtttgtggaaactcatgataatttctgaccatgagttctgaggggtggcttgcgatgatgcattgattttacctcatacatgttgttagatggtgtatgtcttctctttaaaatcaaaaaaaaaaaaaaaaaaaaaaaaaaatataaaaaaaaaagaggaaaaataaa

SEQ ID NO: 1589 - DNA, 431 bp, Zea mays
  Clone ID: LIB3115-032-P1-K1-D4
cccacgcgtccgctcgactccaaggtcatcaccgaccgggagacggggaggtctcgcgggttgggcttcgttaccttctgctgcgagaactccatgctcgacgctatcgagaacatgaacggcaaggagctcgacggccgtaacatcaccgttaaccaggcccagtcccgtggcggtggcggtggcggcggtggctacggcggcggtcgcggcggcggcggctatggtggcgggcgccgtgacggcggttatggcggcggtggcggctacggcggtcggcgcgagggtggtggcggcggctacggaggcggtggcggctaccgcggtcggcgcgagggtggtggtggcggctaccgcggcggcggctgcggctggagggactgatgtgtgggcccatcctggcttctgccgagttatcttatctatctata

SEQ ID NO: 1590 - DNA, 417 bp, Zea mays
  Clone ID: LIB3115-032-P1-K1-D5
ccaacacacactgtcattgacctcatagtaaattatgccgaacactagctatacatagaggaggtgttatttcaaggagagggacaaaacatcatccatcaagatacagcagctgacgaggaggccgagtctgcgctgttgcgcaagatctccggcctggccgcctccatctccaggctgccgtcgctgagcccgtcgccggaggtgaacgcgctcttcaccgacctcgttacggcctgcatcccacgcatcaccgtggacttggagcgcctgggccctgagcttcatcgcatgcgcgcgggcctcatccttcttttcactaacaccaatgctctgcttgaggcgcactacttcgacattctgtcctccttcgacaacccgctggaccacctgcctttctatctctactttaccaac

SEQ ID NO: 1591 - DNA, 428 bp, Zea mays
  Clone ID: LIB3115-032-P1-K1-D8
agagaatgctggcctcatgaaaaggtgctttcttagctgccagcctcatgaaaaggtgcaataagtaacttggatgatgtgtacaccactgcccagatgatctcttagtagtgttaaggggcgcatcacgacatcacgtagctacttcaaaaggaggaggatatgtaagcttcataggagatgatcgcatgcaaaccagtgtatgtatatggagtatatcgatctaatgctttagggctcgttcgttggcggttccagctaaattttgtattaacattgattagctagaacagtttctagcctcagcccaagctaaatttgaagtgaagactttaggtaaaacagaaatgcaactataacacaactgggttaattttacattcgctcggatgctgagatgtccaattttcaatagtgatgtaagtaaa

SEQ ID NO: 1592 - DNA, 430 bp, Zea mays
  Clone ID: LIB3115-032-P1-K1-E1
gtctttcagcaatgtgcacccaattgggacagggatgccttgctgcgtgagcttgactatgtttgcaagatattccgtctaagtgaggactcaaaggggaggaaattgttcagaaaatgtgctgagctagttgaaagattgaggggtggttctgctgaatcaatgactcctagaattctgctacaagcgctgcaagagctggacattgattcctccaagaactttgagcaccaagagccagggcggctgatcactccccaggaggcctgcaaccggatcgctgaggtcgtccaggaagcagtgaggaagatggagatggtggccgaagagaaattgcggacgtacaaacgcgcccgcctcgctgtggaggcgtgcgacagggagctggaggagaaggcccgggaggcccaggagctgaaggtggagcggc

SEQ ID NO: 1593 - DNA, 429 bp, Zea mays
  Clone ID: LIB3115-032-P1-K1-E6
gttggcttctcctccccctccggttcgggttcgggttcgtgaggttctccggggttcgggttcgtgggtgagcggatcgagatggcggcgtcggatgttgagtaccgctgcttcgtcggcggcctcgcctgggccacggacgaccactccctccacaacgccttcagcacctacggcgaggtcctcgagtccaagatcatcctcgatcgggagacgcagaggtcccgcggcttcggcttcgtcaccttctccacggaggaggcgatgcggaacgccatcgagggcatgaacggcaaggagctggacggccgcaacatcaccgtcaacgaggcccagtcccgcggcggccgtggaggcggcggcggtgggtacggtggtggccgtggaggcggcggctactgcggtggcgggcgccgtgatggcggtggc

SEQ ID NO: 1594 - DNA, 412 bp, Zea mays
  Clone ID: LIB3115-032-P1-K1-E8
gaaacctccaaacacctacctctctacgaactacctgccgccggaaaaccctagagcgcgcgaccatggatccgcagcgggcggagcctgtcagttacctctgcggagattgcggagctgagaacaccctgaagcccggagatgtcatccagtgccgtgaatgtggctaccgcatcctctacaagaagcggacccgccggattgtccaatatgaagcgcgctgaagagtgaagacaagggaaaacactgaagatggttgatctattactcgccacattacctatgtaaacagtcttctgggggaaatgaaaatgtcagacttaacgtttgtatgtcgtgtgcctcctttgaacctgagctgtataatttgtaacgcttgaactggggactgatttgagaactgagacactgc

SEQ ID NO: 1595 - DNA, 401 bp, Zea mays
  Clone ID: LIB3115-032-P1-K1-E9
cggacgcgtgggcggacgcgtgggagctgaagaagccggggctgctgtcgagcgggtcaacggttatacatttcagggaggacctctgagggtgaactgcgggccaccgccacctagagatggatccgcaccaagagcaccaaggggtggtggtggtggtggcggcggcggcagctttgtcgattcagggaacaaggtatacgtggggaaccttgcatggggcgttgacaactcgactctggagaacctattcagtgagcaaggacaggtgctggatgctaaggtcatctacgacagggatggcggcaggtcaagggggtttggtttcgtcacctatggctctgccgaggaggtcaacaatgtcttatcaaaccttgatggcatttactcggttggtagac

SEQ ID NO: 1596 - DNA, 423 bp, Zea mays
  Clone ID: LIB3115-032-P1-K1-F10
cccacgcgtccgaaggacgcttggaggagcgctctcagctgttggaggacattagaaaggtgaagccaactcaagtgtggaatgctgccggagtcactgggagaccaaatgttgattggtgtgagacccataaacaggacaccatccgcaccaatgttgtaggcatattgaatcttgctgatgtctgtcgcgagcagggtctgctaatgattaattatgctacaggttgtatatttgagtatgatgccaagcaccccgaagggtctggtattggctttaaagaggaagacacacccaactttaccggttccttttattccaaaacaaaagcaatggtggaagagctgttgaaggagtatgataatgtctgtactcttagggtcaggatgcctatattatcagatctaaacaattcttgtaact

SEQ ID NO: 1597 - DNA, 432 bp, Zea mays
  Clone ID: LIB3115-032-P1-K1-F11
cgaagcggaaaagaagatcaaaaaatcggggagaaaccagaactggagagaagaaaatggataaatttatggccagagccggagccgagacccgccccgcttgcgctctccgccgagcgccccaccccctctccgtccgcgatgcgccgggcgaagccgccgccgcagcagccctcgccgtcgccggagattcggtaccgcggcgtgcggaggcggccgtcggggcgctacgccgccgagatccgggacccggccaagaagaccccgatctggctcggcacctacgactgcgccgaggccgccgcgcacgcctacgacgccgctgcccgatctctccgcgggcccaccgcccgcaccaacttccccagcgctgcggtccgtgcgccgcggcacagggctccctccgcctccgccgcagctcccacggcgccg

SEQ ID NO: 1598 - DNA, 491 bp, Zea mays
  Clone ID: LIB3115-032-P1-K1-F12
cccacgcgttcggcttgaccggcttttttttgttgatgtcgattgaccctaacgcggtggctaatttattgttggggcggttttacttaacttttttattttaactttttcattattttttattaatttttaatttatttctttttttttaatttttatttttttttttatttatttttctttatatattttatatttttttttaacattttttttttttttaatttttttttctttttattttttttttaatttttatttttaattttattatttatttattattaattatattttatatatttatattatttatatttttatttggtttttatatatttttttctttatattattttttatatttttactattatttatattttttttttttatataatttttaattttattttttattttaattttttttttttaatttttttatacttatttttttatttatttatttaaaattattattatttttt

SEQ ID NO: 1599 - DNA, 406 bp, Zea mays
  unsure at all n locations
  Clone ID: LIB3115-032-P1-K1-F2
ggagctcgccaacgggaggctggccatgctggcgttcctggccttcctgatccagcacaacgtcaccggcaaggggcccttcgacaacctgctgcagcacctgtccgacccatggcacaacaccatcatccagaccctgtcgggttgagtcgacggtccatcaggtcatgtggtccgagctgaaaggccgagactcgaagacagttcgtgtgatgcgttcttaatcgactgagggctaaggaatgtgacgtactggtatatgtacattagttgaagcggaggctataaagggtgtagagattgtttcatcagtgtatatcatctgtcccgatgggttttgttttgtgcttttcacgattcattgtggaagcacatgtattattnatnaaaaaaataataataaaaa

SEQ ID NO: 1600 - DNA, 431 bp, Zea mays
  Clone ID: LIB3115-032-P1-K1-F3
gtatattttcgattatcagagttacataatatcaaattatgcactgagtcatttaaacgagagcggccacagatgcatggcatgaactactacagaactcagcgtcgttaggacaacagagagtgtatgcaagctggtgatggattaatctctgttggttgtcaaaaaagagctatctgtatgggggctaagcgggaccgaatcatactgtctttttaactacactgcccaagagatggcacatctacttggccttgccatttgcggcggcaggggtcgacgggttcagctcatcccaggcctcgatccaggtgaccatggtgttaccgagcttgacaaagtaggggtcaatcgtgcccagcttctccttcacttgtgcagagaggtagatgtagcactattggacggtgtcgcagcacttggggatggtc

SEQ ID NO: 1601 - DNA, 438 bp, Zea mays
  Clone ID: LIB3115-032-P1-K1-F6
ggttcaaaaaaggctataaaccaccacattttgaacaaggcgaagatgttaaccttgacgacggtgatgctgcattcaatgatgtgagaggaccgtcttgtggcagagaaaagagaaaagccagaatccatgaatgcatttgctcttatttcgaggtcacagggcttcaaccttggaaatttgtttgagaaggagatgatgggaatggtaaagagggaaacatctttcacgtctcaatgtacagcacaggagatcatgtcaaaaatagaggatgcatgtgggccacttggtttcaacgtgcggaaacaaaattacaagatgaaattgaaaggtgacaaatccggaagaaaaggtcacttatctgttgcaactgaggtttttgaggttgctccttcacttcacatggttgagcttcgtaaaaccggaggagacacattg

SEQ ID NO: 1602 - DNA, 430 bp, Zea mays
  Clone ID: LIB3115-032-P1-K1-F8
ctcctcttgcgattcgctcgctcgatcctagcttcccttccaagaagcgcagcgcccatggccatggccacgcaagcctgcgccgccacgcgccacctgctggccgccgcctgggcgccggcggcgaagccgcggcagctgagctcgcagctcgcgctgccgtcgtcgtcctcccgcgggccggccccgctccgcgcgtccaccgaggaggcggtggaggcgcccaaggggttcgtggccccgcagctggaccccagcacgccgtccccgatcttcggcggcagcacgggcgggctgctccgcaaggcgcatgtggaggagttctacgtcatcacgtggacgtcccccaaggagcaggtgttcgagatgcccaccggcggcgccgccatcatgcgggagggccccaacctcttgaagctggcgcgcaagg

SEQ ID NO: 1603 - DNA, 430 bp, Zea mays
  Clone ID: LIB3115-032-P1-K1-G10
gtgctttctagccaagtgctcgtttttcacagatcacctctggggaggtttatgtgtggtttgagccttggctggcatgactggcatcctgcccctcgatccagacactggtccttgccttatagtcatataaggttttttaggttgccatagtgtccaagtcccttttcgttttactgcttcctggttatgaagttgcaggcgtccgagatccattggcagctctggactatcacaattctaactcaagaaccagatgctggtgtcatctttccagggctgctgatgctggagcgtctgtggacttgtgcagtgtgtttggttgtcgagttttgagtttgtttttagtcttgatgtgttgtgtgctgttcatgttctccatggtgtgtaagggtcatgtagggttgcatcttttttacagtctctctgg

SEQ ID NO: 1604 - DNA, 409 bp, Zea mays
  unsure at all n locations
  Clone ID: LIB3115-032-P1-K1-G11
gaataatcaagaagggggtcgtaagtcaaggcgcgctcatggaatcctcantaacgtaaggacgcggttaggaatggtgggtagagtgaggatgcaggtagctggaaagtatcaagattgtacatgggattggagcaacgtgcagattcacataactgccacatcacatgctctttgatttggtaccttccggtcctccacagctactgtctgttcttcacctactctgatcggaacaaacaaagaccatagcatgcatgcgctgtagaaagcatccacctggaattaaggtattaatttatcctttgaagtgtggacagcacattgacaaaggctaaaatgtttagtatctgaaaaggattgcctcgtcagggtgagatttttcttcttcttctttcccngttctttc

SEQ ID NO: 1605 - DNA, 450 bp, Zea mays
  Clone ID: LIB3115-032-P1-K1-G12
catacttttctaccaaaaaaaaatttttttttaaaaaaaaaaaaaaaaaaaaatagggaagattattaataaagtagggggggaataaaattttcccccatatcttaaattaccaaacttactatctcttccattctatatttattcctttttttttattttctcctaatttttattctttttcctcttttttacaacctcttttctgtttaatctctttattttactcaatcttatttcttttcaatattttccttttataccttcttcttttttttcatatattccctcttaattcacctttcctttattttcctttttttttaatttcttatatttttatcccctttttttttttcttatttattctctttatttttttttcttatcatacatctttcttatttttatatttaataattcctttatctttttttcatttttttattt

SEQ ID NO: 1606 - DNA, 422 bp, Zea mays
  Clone ID: LIB3115-032-P1-K1-G7
gcagagaaattttctcatcacaggggactttcttctggaacgacagcacttacagcaatgatttttggaaggtccgttgtggttgcgaatgccggtgactgcagagcggtgctctcgcggcgtggcactgccattgagatgtccaaggaccacaggccttgctgcatgaacgaaaggaagcgcgtagagtcacttggcggctacgttgacgacggttacctgaacggtcagctggcagtgaccagagcgctcggtgattggcatctggatggcatgaaagaggtgggcgagccaggagggcccctgagcgccgaaccagagctgaagatggtcacgctgaccaaggacgacgagttcctgataatcggcagcgacggcatctgggacttcttcttgagccagaacgccgtggacttcgcgcg

SEQ ID NO: 1607 - DNA, 390 bp, Zea mays
  Clone ID: LIB3115-032-P1-K1-G8
ggtggtggtggtggtcgtgcttcctatatttgtgaggctgatggcttggctgccgtttatacaatctttaagggggtggggttgagctttattatatggttttgtttgagagttcatggctctgcatcctgttcctactggatgctggtcagcttttcttctatcaagtacattctggtttaaaaaaataataatataattatttaataacaacaatttcttttaaatattattttttaaataataatatttttaaaaaattttcaataatttttaaaataaataaatatattttatttatttagggggggtcgccctttttatataccaatttttatttttcctctttcgccaaaattatttttttttttttttctctcaaattaaata

SEQ ID NO: 1608 - DNA, 242 bp, Zea mays
  Clone ID: LIB3115-032-P1-K1-G9
cgcgcgggtgagccggtgaccctcctacttttcgccaccctgctggtatatcccgcctgtcgtccacgccatggccgccgaatatacactgctctccctgccatgccgcctgccctcgccgttccctccgccggtgcctactacaacccgccggctgcctttctcctcttcggctgcagcatccaccttccctctgagcccactcttctggggctctttatccacgctcactttttttcttt

SEQ ID NO: 1609 - DNA, 115 bp, Zea mays
  Clone ID: LIB3115-032-P1-K1-H1
aaaaaaaggggggggatataaaaaatataataataattaaaattttttatttatataaaattattaataatataaatattatttaaaaaataaattattaatttttttttaatat

SEQ ID NO: 1610 - DNA, 360 bp, Zea mays
  Clone ID: LIB3115-032-P1-K1-H10
agcgtagtctctgaagcagctccggcgcttatagtgcgagggcgccatctgtttcttccgctcgtccctgatcatggccgggttctgcgtcgtcgcgttcggcttgagcttgatcctggtctatcggacgaaggtcgtgtacgcaggtctgtatgggaagccgcgtacttgaaagatctaaaccctcaagggccagatggcgtggatgtacaggcagtgttgtgtcttcccttcgttctgcacaagttctttgagagtagaacatgctgctgaatgctgatgcacctgagccatagaaggtgcagatgggaggttcattgtaaagtttacaacgaacgaaatatacggaggtcgaaagtt

SEQ ID NO: 1611 - DNA, 118 bp, Zea mays
  Clone ID: LIB3115-032-P1-K1-H11
cccacgcgtccggctagaattaatattgtcaccaacgaaatatctataatgttattctgcagtgtaatgctgccggcatgttcggttttagtttaactaaatatctatctttcccccc

SEQ ID NO: 1612 - DNA, 274 bp, Zea mays
  Clone ID: LIB3115-032-P1-K1-H12
cggacgcgtggggtctttctgcatgtgctgctaccgcgaccattttcccgcaatgctcacaagctcctatagctgggcgtcttcccccgtacctctcaccagcggtgtcttcggtatgtgaaaacccaattcttcaaccctataggatccaacaggcaatcgcagctggcatcttacctttatcacccttgttccttcaacaatcatcagccctattacagcatttaccttttggtgcatttattggcacaatacaattatggcacatcaacta

SEQ ID NO: 1613 - DNA, 432 bp, Zea mays
  Clone ID: LIB3115-032-P1-K1-H3
gcacacggccaccgaaccgagcagcatcggaccagcgggcgcaccgagccagtagtcctcgaccggccatagaagcataacactacggtctacgggggtggagcggagaggtagatggcgagcgggagcggcaaggcgaaggcgtcgtcgtgggcggcggcgatgagcgtcggcaccgtggaggcgctcaaggaccaggccggcctgtgccgctggaactacgcgttccggcaggcggcgcagcagcgcgccaggaggccagcggcaggcgcgagcggctcagtcggccccggcagcgcgcacgcgccgcctgcttctgctccctcgggctgcgccgcggcggctaggaggagagccaggcagcatcatgaggaggagcttcggacggttatgtaccttagcaactggggtcccaacaacttgctactaact

SEQ ID NO: 1614 - DNA, 402 bp, Zea mays
  Clone ID: LIB3115-032-P1-K1-H4
ccgacaccgaggaagaagagatcaatggcgtcctatcagggagtcgtgatcgcgtgccacagcaaggctgagtttgacgcccacatgaccaaagcccaggaagccggcaagctggtggtcattgacttcactgccgcctggtgcggtccatgccgcgccatctccccactgttcgtcgaacacgccaagaagatcactcacgtcgtgttcctgaaggtggacgtggaccaagtgaaggaagtcaccgcggcctacaaggtcgaggcgatgccgacctttcactttttcaagaacagcaagagcagggcgaccatcttgggtgccaggaaggacgagctcttggcccagatcgagaagcatgccgcgcctgcgcctgcgtctgtgtttgtctaaaggagatca

SEQ ID NO: 1615 - DNA, 318 bp, Zea mays
  Clone ID: LIB3115-032-P1-K1-H5
ggcaaaagccaaaaggcatcaccgccgcgacgactacgacgatggcagcctcgctccaagccgcggccaccctgatgcaggcgggcaagatcggcggccgggcgccctttgcctcgctgccgtcccgcccgtcgtcgcaactcgcctgcagggcgttcggcgttgacaccggcgccgccaggatcacgtgctccctgcaggacgttgtcagcaggtgcgtctacgccgcgaagctcgccggcttcgcgctcgccacctcggcgctcctcgtcttgggcgcgatctctgagggtacgcccaataggctggcctactacg

SEQ ID NO: 1616 - DNA, 403 bp, Zea mays
  Clone ID: LIB3115-032-P1-K1-H6
gccaaacctgtaatattagaacctgtgatgaaggtggaactcaaatttccaactgagtgtcagggcacagtaactggtgatatgaacaagagaaaagggatcattgttggaaatgagcaggaaggtgacgacaccattgtagtttgccatgttccgctaaacaatatgtttggatatgcaacagctattcgatcagcgactcaggggaaaggtgaatttacgatggagtacctggagcataatgttgtatcgcaggatgtgcagatgcaactagtgacctcgtaccaggcggccaagggcacagagtgattcttctttttacagaagaacaaattttgtttgcgaacttttagggcttgttcggttagctctcaatccatgtggattgagcgggattggatgg

SEQ ID NO: 1617 - DNA, 351 bp, Zea mays
  Clone ID: LIB3115-032-P1-K1-H7
cccacgcgtccgcccacgcgtccggggatccagtttaggccttgttcgtttacatcgggttgtacccggaatcattccggctaatcaaagtttatataaattagagaagcaatccggctcggaatcgttccgacccaccaatccgacacaaacgaacaaggccttatgtgacacagtcgttctcttcatctgttgaagtgccagcctgagtgaccgaatcaggacggctatgtaacaaccacttgtataatttttagcactattttagatttatatttgctgaggaaagttaaattaatatttacgaagttttaagtttaagtttaaagagttttagttaagtttttctat

SEQ ID NO: 1618 - DNA, 261 bp, Zea mays
  unsure at all n locations
  Clone ID: LIB3115-032-P1-K1-H8
ggggggacccacgcgacgnccacacgnccgcccacgcgaccggggaaccagaaaaggcccacgaacgaaacaggggggggcacccggaaggagggcggggaaaaaaagacaaaanaaacaagagaagcaaaccagcncggaagcggacagacccaccaagccgacacaaacgaacaaggccaaaagggacacaaaccgaaaaagcaaccgaagaagagccaaccggagggaccaaaacaggacggcgaaaaaacaaccaca

SEQ ID NO: 1619 - DNA, 382 bp, Zea mays
  Clone ID: LIB3115-034-P1-K2-A1
cggggcggaccaagccttccgccaacccgtccgccaacaggcaacatagatgtgggattacagtagcaccaatagagcaccagtggcggccaagatattttccatccttatgctccttgctctttctgcatgtgttgctaacgcgaccatttttccttaatactcacaagctcctatagctgcccttcttcccccataccttccatcaatgaccgcttcagtatgtgaaaacccagcccttcaaccctacaggcttcaacaagcaatcgcaacaagcaacttacctttatcacccctgttctttcaacaatcgccagccctatctttggtgcagtcattggtacaaaccattatggcacaacaggtgcagcaacttgtgcta

SEQ ID NO: 1620 - DNA, 403 bp, Zea mays
  Clone ID: LIB3115-034-P1-K2-A12
cccacgcgtccggtttgttgctgcctacctgtttgctgtcctcgctgggaacgccagcccctccgctgacgatttgactgccattctggagtcagttggctgtgaagttgacaatgaaaagatggaactcctgctgtcccaactgagcggtaaggacatcaccgagctcattgccgcgggcagggagaagtttgcttcagtcccatgtggtggcggcggtgtcgctgttgcggcagctgcacctgctgctggcggagctgctcctgcagctgaggcaaaaaaagaagagaaggtggaagagaaggaagaaagcgatgatgatatgggctttagccttttcgactaggctgcacagtcattacagtattgttttgggcagtgaaaccagaggaaaactagagtc

SEQ ID NO: 1621 - DNA, 253 bp, Zea mays
  Clone ID: LIB3115-034-P1-K2-A3
cacagaggtgcgacgtacgacgacgacgacgtaggcgtcacacatggcatcccagctctccgccgccgtgccccggttccacggcctccggggctacgccgcgcccaggtccgcggtggcagcgctgccgtccgtgagggtgggcaggaagaggtcgtcgtctcatggcattcgctgcgactacatcggctccgccaccaacctgatcatggtgacgacgacgacgctgatgctgttcgcggggcggttcgga

SEQ ID NO: 1622 - DNA, 298 bp, Zea mays
  unsure at all n locations
  Clone ID: LIB3115-034-P1-K2-A5
ggccganncacgcgnncgcggacgcgtgggcgccggcatgcataacacttgttatgttgctactctacactcacctgcggagggctccgtattaatcagctttcggatggtgtcattttgtcagttatggatggaaatgcctaactggcagcgtctgttttccctatgcatatgtaatttcctgcctctttatatttactcttgttgtcaagtccaagtggaaaattctggcatattatacatatttgttataataagcatcgtaccatctgtatgcttgttttgcattaatttaata

SEQ ID NO: 1623 - DNA, 206 bp, Zea mays
  unsure at all n locations
  Clone ID: LIB3115-034-P1-K2-A7
gtcatatctagctagtagctcccttataagttcactagagaagcatntgagggaggagccatgtctgttgagaagcaccaccaccacctgttccaccaccgtaaggcataggaggtggaaggcgcctttggctaggttgacttttagttgaaagtgaattttcatacatctcatggtatctatttgttttgttcgatgtatttttc

SEQ ID NO: 1624 - DNA, 311 bp, Zea mays
  unsure at all n locations
  Clone ID: LIB3115-034-P1-K2-A8
aaagagggccganccacgcgtncgnccacacgtacgacgacgactactttacgttttttggcagccaggaggacncgggggccggctgttttaataccatggactgcatcatgaacggggncatcaaggagaagctcaagatcatcctcaaggacgttaggtgggtggaggtcttcaatgccatctactacacgctggtcaacgacttcatgaagccacgaattgacgatgcaagcaagctactttatatgaatttagctgatgtacgtggagtttttgtttaccaaaagctcctattcttttttttggtg

SEQ ID NO: 1625 - DNA, 328 bp, Zea mays
  Clone ID: LIB3115-034-P1-K2-A9
cggctaccagccgtgcgccaccaattacctctgtgtgttcggcgacacggccggggacttggtgcccgaccgcttcctcggcgaggaggaaagtaagctgatgcagtacgtgtactagtttaacgagtcgacagacctacaaccgatagcgttcaataacaatgtaattgttcctttgaagaacttttttagatgatattaattttattgttttttcttaatgtatattttatttttatttattatttataaattttataactttgtgatttattttattttttacataatagcttatattagtattttattctattaattttttttt

SEQ ID NO: 1626 - DNA, 352 bp, Zea mays
  Clone ID: LIB3115-034-P1-K2-B2
agcgggagcaggaaggggaggcagaggaggtggaggttaagtttcgtctcttcgatggctctgacatcggtcccgtgcgctgcaacgccgccgccactaccgtagccgccctcaaggatcgcgtcgtcgccgattggcccaaagataaatcaattatcccaaagactgctagtgatgtgaaactaataagtggaggcaaaattctagaaaatgacaagaatgttgcacagtgcagagctccttttggtgatcttcccagtagtgctatcacgatgcatgttgttgttcaaccatcgtcagctaaatcaaaaccagataagtaggcgaacatgttgtccaaaaccactcgttg

SEQ ID NO: 1627 - DNA, 354 bp, Zea mays
  Clone ID: LIB3115-034-P1-K2-B3
cccacgcgtccgcggacgcgtgggccggaatctaggggcagaagctgcagcgtcgagatggtgaaggggcgcacggggcagcgcgtgaggctctacgtccggggcaccgtccttggatacaagcggtccaagtcgaaccagtacgagactacgtcgctggtgcagatcgagggggtgaacaccaaggaggacgtcgcgtggtactgcgggaagcggatggcctacatctacaaggccaagaccaagagcagcggcacccactaccgctgcatctggggcaaggtcgcccgcccgcatggcaactccggcgtcgtccgcgccaagttcaggtccaacctgccgccggaatccatg

SEQ ID NO: 1628 - DNA, 233 bp, Zea mays
  Clone ID: LIB3115-034-P1-K2-B4
cggatattcacatggatcttgacttcaagtttttatttaccgacctcctcttcgactcaggaatagggccaacattcaccctccaggatggtttcttacactacctcaaggggatcttcatgctgctgagctacatcgtgatcgagcatccttttttgttccgaggcaacctgtaaataacaacaatgacgctgcgctgtcgttgtcaactggcactttgagtgcacacgctg

SEQ ID NO: 1629 - DNA, 455 bp, Zea mays
  Clone ID: LIB3115-034-P1-K2-B6
cccacgcgtccgggggcaccgccacaacagttcatgtgtggaccgccgccgatggggccgccccaggtgaggcccgggatgccggggccgccaccgcctggaatgaggcctggaatgccttcgccaccattcggacagccgaggccagggatgccgtcttcgtcacctggtccacagcagcctggacagaacccgccgcagtagcttcctggataagctttttgcagatacacctatggaagatttttttttttatctctagaggatcatattctcatctggggtggttctgtgtattgctccaaagcttcaccatttttgtttgtattaaggctgtaaatttttcttgatttatgttgttggtagttgtaatatcttattttttgttattctttatttaacaattatatctttttttgtttttcttcttatctcatcttttttctgatttctta

SEQ ID NO: 1630 - DNA, 279 bp, Zea mays
  Clone ID: LIB3115-034-P1-K2-B7
cgctgacagcgaagctgaggagaattctcagtaacagagctggcgaaattgcattggcgcagcaggcaagcgaagaggagaagaaagaaatggctgcaatacctgcagcgatcccgggctgctgctcttcgtctcgcctgtctcagcttgctggccttcctgcctccacaagcagaaggcgctttaaggtcacggtcatggtgccccaaaagaaggtgtaccgttacgacgagaactggttgaagcagtggttcggctcgtgcattttttctgtttgtt

SEQ ID NO: 1631 - DNA, 409 bp, Zea mays
  Clone ID: LIB3115-034-P1-K2-C2
gtcaaggccagcaatttttgcaatgtccaattcaactaagaatgctgagtgtacacctggggaagcattttcaattctaggtgaaaaggtcatctttgctagtgggagcccatttcatgatgtggatcttggtgatgggaagattggccattccaatcaagggaacaacatgtacctctttcctggaatagggcttggaacccttctgtctggtgctcgggttatctctgatggaatgctgcaggctgcagctgaacgtttggcttcatacatgaaagaggaggaggttctcgaagggataatttatcctccaatttccaggaggtggcagcagcagttgtgagggaggcagtagcagaggatctagctgagggataccgtgacatggatgcacgtgagcttgcacgac

SEQ ID NO: 1632 - DNA, 314 bp, Zea mays
  Clone ID: LIB3115-034-P1-K2-C5
ggccgacccacgcgtacgcacacgcgccggcaaggctttagccctggattttttttagctgaacgggaagctgaacggggtcgggctccttttgccagccccaaacgtatcctttgtggacctgacgatcaacaccgtaaagactggcgtaaacggtcgatgacgtgaacgcggcgttgcgtaaggatcgtcaccggccctctgtatgagattctggatgagtgcgacgtgccgctcgtgtccgtcgacttcaggtgcttccacatgtcctgcaccatagacgctgcgctcatcatggtcatgggccacaacat

SEQ ID NO: 1633 - DNA, 315 bp, Zea mays
  Clone ID: LIB3115-034-P1-K2-C7
gcagagcagacgtatttgttccttgttgctttggaggctggaactggtattgcagaacttattgctcttgagatttcgaaacagacgaatgctccaattgaagagtgccgcaagaaggtttggctggtggactcaaagggtttgattgttgactctcgtaaaggctcccttcagccattcaagaaaccttgggcgcatgagcacgagcccttgaaaaccttgtatgatgctgttcagtccatcaaacctacagttctgatcgggacattttgagttggaagaacatttacatatgaattaatttgggtcattttt

SEQ ID NO: 1634 - DNA, 98 bp, Zea mays
  unsure at all n locations
  Clone ID: LIB3115-034-P1-K2-C8
gaaaangggccgaccacgcgtccgaccacgccaacgataacccctcacattaccggtggtggaccagaccaaagaagaggaggggggcgatatttata

SEQ ID NO: 1635 - DNA, 354 bp, Zea mays
  Clone ID: LIB3115-034-P1-K2-D2
attagcacactaaaattggcgcatacagataacgcacctgcaaagtgggatcatttgaacatagttcagcaaagggccgacgcacttgagtcactcctcaagctctacgcaaagcttctggaggagaggctcgatgagctcgccgacgtttttcgaccatttggtgagagagctgtgtcatccggagagatgagcatacaatgatgtctgaccataagcctgatgactccaccgaagttttgagagtccccaacaatgcttttgtagcagcgattcgtttcaacatttttttgtttttcaaataccatttcgagagtgtaaataacttcaacggaattcaaaattgatgtactt

SEQ ID NO: 1636 - DNA, 347 bp, Zea mays
  unsure at all n locations
  Clone ID: LIB3115-034-P1-K2-D5
gaaggagaccgcgctactagggtcggttttttttatggcgcggccaacctatccgggacgcgtggcgctgtccagaactcgccgcacgacttcncgaacccggacaacgcggcgcgcgcggccgtgggcgtgggtccggtgtcgggggatgagaacgtggccgccttcgctcggagctactccgagcagcgccagggcgactgtaagctggtgcactccggcggtgggcccaaccactacggggagaacatattttggggcggtggtagcgctctggaggcgtctgacgccgtccgcttgtgggtgggggagaagcataactactactacaacagcatcagctgtgc

SEQ ID NO: 1637 - DNA, 198 bp, Zea mays
  unsure at all n locations
  Clone ID: LIB3115-034-P1-K2-D6
cacgcnnccgngaccatttnaaatacatttttatttgttacacccccncagctgctgagacgtcacatggttttcaagcggataagaagcaaacaangtcaggttatagcacagaacttagtccaaactttcgtatgaacgtccatttgcgcgcatggtttatgcttctgcactggaagatgcctacggtactggttc

SEQ ID NO: 1638 - DNA, 242 bp, Zea mays
  Clone ID: LIB3115-034-P1-K2-D7
ggccgaccacgcgttcgaccactcgtccgtagaaagtggattttttgttgcttcaccccggaagagcccaagggagatgggataactcataataggaggacagatccaaccttaatagcttcatagttcggaggatggacaggcgcatctgcctggagggtacaagggaaggagttaaggggccattaacaattgtcgcggcgatatatgaactcacaccttcccttgtttatggtggaggt

SEQ ID NO: 1639 - DNA, 451 bp, Zea mays
  Clone ID: LIB3115-034-P1-K2-E1
tccgcggacccgtgggcggacgcgtgggcggacgtttgggtggacgcgtgggcgcgaattgaaaagctttcagaagtaaacccgatgcttggcttccgtgggtgcaggcttggtatatcgtaccctgaattgacagagatgcaagcccgggccatttttgaagctgctatagcaatgaccaaccagggtgttcaagtgttcccagagataatggttcctcttgttggaacaccacaggaactggggcatcaagtgactcttatccgccaagttgctgagaaagtgttcgccaatgtgggcaagactatcgggtacaaagttggaacaatgattgagatccccagggcagctctggtggctgatgagatagcggagcaggctgaattcttctccttcggaacgaacgacctgacgcagatgacctttgggtacagcagggatgatgtgggaa

SEQ ID NO: 1640 - DNA, 214 bp, Zea mays
  Clone ID: LIB3115-034-P1-K2-E11
agggacttgcctactatggatggggttcataacctgagctgcctgaactatttaatactagtgactatattaatgaaaatagtaagtcaatgctctgatctttcagaagcaaatcgttggcgttatgataatttgtgacttaccttgtcttatgttctgatccttgctaatgatgttaatattggacattttctttgactctaccttttgagtc

SEQ ID NO: 1641 - DNA, 415 bp, Zea mays
  Clone ID: LIB3115-034-P1-K2-E2
cggacgcgtgggcggacgcgtggggcgacgtctcggtcgccgtgtacgggctccggaacctcggcaacaaccacatctgccaccggctgacctacgagggcaaggagagctgcctgaacgccagcatacccagcgtcaggaaggaggcgcagctgaagatcgaggaggccgtcctgctgcggaagatctacggcgtggactaccacctcaaggacgccaagatcctgaacaacaaggtgaggaccctggtgactcgagaggcggtgaacgccggcagcatgcccagcaagaacacgcctgaccctcaagtacgtggtcagcaacggcaagatctgggacgccagcaggttcttgaggctgggcatcaaaagcagctttcaagcccgagtccccgaggtcgtgaccggatcgatta

SEQ ID NO: 1642 - DNA, 390 bp, Zea mays
  unsure at all n locations
  Clone ID: LIB3115-034-P1-K2-E3
cccacgcgtccgcgcaaattgcaccaagaaatccatcgagaggccgtcgacaggggaattaatggcgtcgtcgtctagcagcagccaccgccgcctcatcctcgcagccgccgtcctgctctccgtgctcgcggctgccagcgccagcgccgggacctcctgcgtgccggggtgggccatcccgcacaacccgctcccgagctgccgctggtacgtgaccagccggacctgcggcatcgggccgcgcctcccgtggccggagctgaagaggagatgctgccgggagctggcggacatcccggcgtactgccggtgcacggcgctgagcatnctcatggacggcgcgatcccgccgggcccggacgcgcagctggagggccgcctagagga

SEQ ID NO: 1643 - DNA, 312 bp, Zea mays
  Clone ID: LIB3115-034-P1-K2-E4
gatggccgtaccctagcagactacaacatttataaatgtagagcaccctccaccttgtgctccgtgtccgcggtggtcagtaagtcatgggtcgtttaagctgccgatgtgcctgcatcgtctggtgccctctccatatggaggctgactacctatctgctgttcgtgtcagtgttggtgtaataatggaccggttgtgttgtgtgtgcgtactacccacaactatgacaaatcatgaataactttgctgtgtgaccttgctgcaccaagttttgtagcccgatgggttgggagcctggtccggtcttttat

SEQ ID NO: 1644 - DNA, 382 bp, Zea mays
  Clone ID: LIB3115-034-P1-K2-E7
agaaggtgttcgtgaacgaccagttccttttctgggaccccgagaaccggatcaaggtccgcatcatctccgccagggcgtaccactccctcttcatgcacaacatgtgcatccgccccacggacgaggagctggaggacttcggcacgccggacttcaccatctacaacgcagggcagttcccctgcaaccgctacacccactacatgacgtcgtccacgagcatagacctcaacctcgccaggagggagatggtcatcatgggcacgcagtacgccggcgagatgaagaaagggctcttcggcgtcatgcactaccttatgcccaagcgcggcatcctttcgctgcactccggctgcaatatgggcaaggacggcgacgt

SEQ ID NO: 1645 - DNA, 384 bp, Zea mays
  Clone ID: LIB3115-034-P1-K2-E8
acaggaactggggcatcaagtgactcttattcgccaagttgctgagaaagtgttcgccaatgtgggcaagactatcgggtacaaagttggaacaatgattgagatccccagggcagctctggtggctgatgagatagcggagcaggctgaattcttctccttcggaacgaacgacctgacgcagatgacctttgggtacagcagggatgatgtgggaaagttcattcccgtctatcttgctcagggcatcctccaacatgaccccttcgaggtcctggaccagaggggagtgggcgagctggtgaagtttgctacatagaggggccgtaaaggttaggctaacttgaaggtgggcatttggggagaacacggtggagagccttt

SEQ ID NO: 1646 - DNA, 396 bp, Zea mays
  Clone ID: LIB3115-034-P1-K2-F2
ctcaagttccggttgctccaaagaaaattgtttagttttctagcatgaagcaacgcgtggcgtagctgaagatcacagattggcatgtctacataataattgctggccgcacctgtctacagtatgcatgtattcctaaattgtaaaataagtgaaaaaacgcatatgtgcgcgtgtatcatggtgtgtactcctaaattgtaaaataagtgaaagaaaaaacaagtggatcattgaatgttgaaggatgtttttgtaaccagatgttctttagactctgttttttgtttagagaaattatattcccttttcgtgtttatttattttttttttatttacttttattgattttattttttttcttaagtattctctatatatggttgtgtcgatttt

SEQ ID NO: 1647 - DNA, 434 bp, Zea mays
  Clone ID: LIB3115-034-P1-K2-F3
cggacgcgtgggcggacgcgtggggcaagatcacgatgtctaccacccagctgaagggcagcaaggaggatgctgaggccaagcaggaccaggggttcctgtacgtcaaggtcagcatggatggcgcgccgtacctcaggaagattgacctcaagacttacaagaactacaaggacctgtcgactgcgcttgagaagatgttcagtggcttcagtactggcaaggatggcttatctgagtaccgcaaggatggtgaatatgttctgacttacgaggacaaggatggagattggatgcttgttggcgatgtaccatgggagatgttcgctgactcttgccgcaggctcaggatcatgaaaggatcagatgcaattggacttgctccaagggcagcttataagtccaagaatcgcaactagaatggttgctttttt

SEQ ID NO: 1648 - DNA, 198 bp, Zea mays
  unsure at all n locations
  Clone ID: LIB3115-034-P1-K2-F7
cggacgcgtgggctggcaaagcgattttgngtcggtggcgcccctcgggtaatcggggggtgccttcgaacatttggaaaggatcatgttgacgttgcaggcactagcaagggagctgaatcaaaattgtgaacctttgcaaataccctgaatcgtacaacagaatggtggctgaggtaaagaactatgtaaaaaaca

SEQ ID NO: 1649 - DNA, 441 bp, Zea mays
  unsure at all n locations
  Clone ID: LIB3115-034-P1-K2-G11
cgtncgcagaataatctgattctgcttaattccatatttgactttttacaagtatttatatcccaactgatggttatctgatctaaggattagagctatgagatctcttctaatccttatccaactaactagagataatctctcctttttattagctaatccttatctaatcttatctaactaactagagataatctctcctttttattagctaatccttatctaatccgcatgtggcctgtggcttggccgtgggccttagccctcctagccactaatgtccctgcgcctggtgtaggggatgtcggtcataacattaacattagaaaattttgatgcagcaagcaaaccaaaagaaagataccattgatggggaaaacgaagatcaattggagcctttaacaacataagagcacgaagagaaggagcagttattagaag

SEQ ID NO: 1650 - DNA, 116 bp, Zea mays
  Clone ID: LIB3115-034-P1-K2-G2
cggacgcgtgggcggacgcgtgggctagatatagttattagttgtaattcaataataaagttttttggatgatgtatgtggccaaccagaaataagaagttacatttccagattct

SEQ ID NO: 1651 - DNA, 349 bp, Zea mays
  Clone ID: LIB3115-034-P1-K2-G7
ggcggacgcgtgggccgtactaatcgaccaggtcgccatccgtttctttcattcaaaacgggtcgtcttcacagcaacggtaagggcatatcagcctccgccatcccctactcccgcagcgctcctgcgtggttgaagaccactcccgagcaggttgtcgaccagatctgcaagctcgcgaagaagggtgctacaccatctcagattggtgagatcctccgtgacagccacggtgtcgtccaggtcaaggtcattactggcaacaagatcctccgaatcctcaagtccaacggccttagccccgatattccagaggacctctacatgctcatcaagaaagccgttgccg

SEQ ID NO: 1652 - DNA, 228 bp, Zea mays
  unsure at all n locations
  Clone ID: LIB3115-034-P1-K2-H11
cgtncgaccgggctggcggtgactttcngatttgtactgaancgnangcagggaggagctgtggagcatggtggagcaggtcgtcagcaacaccgacatcaaggacagggcgcgggtgctcaaggacgaagcccaccggtgcgtctcctaaggagggtccttgaacgacaacttcaaaaagctcgtgaatctgctcagtgaatgatgagaaccgggagactgggagca

SEQ ID NO: 1653 - DNA, 369 bp, Zea mays
  unsure at all n locations
  Clone ID: LIB3115-034-P1-K2-H2
gacgacccacgcgnncgcccacgcgttcgtggacgcttgggcttgttttatcattgataggcganggntngtcttctcggagagcacatgtatggaatatttcataaagttctcgtcgtgttcgctaccgttctcttcaagatcctgtttggaggcaagaagccgtgggcacctgtgaaacctgcagctgaggcgaagaagcccaaggccacagtgaccgactgtgctggaagcagtggcgacaaggatgagaaagaggacgataaggaggagacagcatgcccacgttggatgacccgaatggagacatacagacctattttcgatgtgtttggatgttctggcctctgctaattttgaggactctta

SEQ ID NO: 1654 - DNA, 444 bp, Zea mays
  unsure at all n locations
  Clone ID: LIB3115-034-P1-K2-H3
accgggnccgaccccacgccgtctcgcactcaactatatataggaaaaaatacctggttctttttttgctgttcnnttaccaccatagagtactctgcagtgtcaagtatttttactcctcggtcgcgttgtatctccaagcgtattagagtatgcttttaacgttatantcgttgtattttcaatggcatcgatcttcgaagccaatcgttcattagttctcgtatgaagttgtactccctcaagcanagatnngaggatattttggaatatgaaccaatgcttgtgttgcaaanttccagatattaatgtatgcacgcatggtgaaaagggaattggtttgttgagaaagaatcgtgagtgattattttcctggcaaaatgtggtggttctaattgacatatgaaagaccaatgacttgatttcgtcgtattaaaatgtgca

SEQ ID NO: 1655 - DNA, 215 bp, Zea mays
  Clone ID: LIB3115-034-P1-K2-H9
ggctcctctcctactcctaccactttcttgtcttcccatccccgccgagaactccgagggccggcttgtaccgaggccaagggtccctcgttccttctacaggcggcgcctacaccttaccgccctccttcaagttcaatgcctcgcggtcaccggccccgccgcgtcccgtccgcggtggcacgcgacactgaccgtcgaggcggggctgttcc

SEQ ID NO: 1656 - DNA, 348 bp, Zea mays
  Clone ID: LIB3115-036-P1-K2-A11
aaaaaaaaaaaaaaaaaaaaataaaaatttttttataaaacaaaaaaaaaaaaaaaaacaggcggggttttttaaaaaaaagttccgctcaccaacaaatcttagctttcattcatttattttaaaaatctatctttaaaacaatttttcttcactagttcattcttatccattcctcaaatacatccgttctccaattcttcttcttctctataaatttcctaaatattttctacttatcttaatcaatcagacatccctttttaagccgcccccttcaattttttactattttttcccgcaataaacccccgcccgccgacacaaaattttttttttttttttttt

SEQ ID NO: 1657 - DNA, 350 bp, Zea mays
  unsure at all n locations
  Clone ID: LIB3115-036-P1-K2-A12
cacggcctgacgcgccggctccaaccactactatcaccaccatggtcaccacggcggcgcacggtttctttgtgcgcgagaccagggtcgaggaggacattaacacctgcaccggcgaggtccacgagcgcagggagagcttgctcgccagggctaactgagccgtccggcggtcggcattcacgcccgttcgtgcctgcctgcgtgccttatgtatgtctgcggacgactggaagagcagggtctttttttttttttttttgttttttctctcatttattttcccgnacgatataccaccttaaagctcgggacttgaattaaactttcttttttatttgctaataaaa

SEQ ID NO: 1658 - DNA, 404 bp, Zea mays
  Clone ID: LIB3115-036-P1-K2-A8
ggcttattaaaatctggaaagatggtggatgttgaaaatctttttaatgagatgctagagtgtggatgcgaacctaattgcaccatctacaatattctactgaatggacaccgaatagctggcaacacagaaaacgtttgtcagctttttgaaaagatggttgagcagggaataaacccagatataaaatcctatacaattcttattgataccctgtgcacagctggaagattaaatgatggtttgtgttattttagacagctacatgaattaggacttgagcctgatcttatcggttataatttgctcattgatggtcttggaaaaatctgaaagaatagaggaagcagtcagtctttttaacgagatgaagaaagaaggaattattccaaacttatacacat

SEQ ID NO: 1659 - DNA, 278 bp, Zea mays
  Clone ID: LIB3115-036-P1-K2-A9
ctagcaattagctcatcgactccagattggttaactcgacaccatgaaggtgctgatcgttgcccttgctctcctggcgctcgctgcgagcgccgcctccagtacaagcggcggctgtggctgccagacaccaccgtttcatctaccgcctccgttctatatgccgcctccgttctatctgccgccgcaacagcagccgcagccatggcaataccccactcaaccaccgcagctaagcccgtgccagcagttccgatcctgcggcgtcggcagcgtcg

SEQ ID NO: 1660 - DNA, 342 bp, Zea mays
  Clone ID: LIB3115-036-P1-K2-B1
cccacgcgtccggagcaccaccacatgcacattacgtagctcctggaaggcgggagctcgccggtgtccaaatgcaatggctcggcagcggcagtgtgaggggcacgagaatacgcaaggatatagatatatatagtattaagcatgtagctatggatgttttttttccttttgcttttttgggtgctggcgttgtagaaagtatttggtaataataatataatgcttcgctgagattaaatctcacttttcgctgttcgtaattggggggtgagactctttaaggctcatatgggctggcatattgaaattacaaaaattttaaagaggccgaggggcttt

SEQ ID NO: 1661 - DNA, 406 bp, Zea mays
  unsure at all n locations
  Clone ID: LIB3115-036-P1-K2-B10
gaaaaaagggccgacccacgcgtacgcccacgcgtccgagccagttctcctgattcattttgagtggaggccaaagtcgctggtcaccggctcggttgaggtcgatacagggaccattgaaaagagctcgaaggttggaattgctgtggccctcaagccctgattgattatcaagactattttttcttctaaggtcctagcatgactgtttgggtcatatcaggtcagctggggaaaacaaaacngngggggtaaccggcatcttttggtcgttgcagtctgttgatttcatgaactgcgaaacggcacaaagaggaaacagatgggacatctgcttagcgctcttgtaaatgagcaacttctaaaataatttgagcccatttgaattctgaacttgtttacaatg

SEQ ID NO: 1662 - DNA, 314 bp, Zea mays
  Clone ID: LIB3115-036-P1-K2-B12
gaagacgagtgtcaagtgaacctgaaacttgcggtgccactggctggtaacctgagtgtgagggagtgatcgagctagctgagctccgatcctcgctagctaggataccgccataccacaagtcttcttcacaagtgtaggagtgacagcaacaagagatcgatggcctttgccaccgtgctcaagtcctacttccttcccaagaagtccgaatggggcgccaccagttaggcctgcgcgcccaggccgttcaccgttttcatgggcagccgcgcctccgactacgccgatgagcttcgtgaagaccgcgaaaa

SEQ ID NO: 1663 - DNA, 385 bp, Zea mays
  unsure at all n locations
  Clone ID: LIB3115-036-P1-K2-B2
cgcgncgcccaactccaccgtcccacgaaacacactttattatctgccgtctgccccgaagcggagaaccggctgccagacatgaagagaaccagagcgcancagcccaaggtcgaggagccgcaggacctcgccgccaacctaaagccgcagcgccgggacaaacagccgaggcagcccaaggcgggcgccaaagcgaagcccgccgcgggcccgcgcgtcgcggcggccacgacccttgccgccgccgccgcagcaacagcagcaaatgccgccttggccgcgtcgtcgcccgggccggaaacggttccgaccgtgcccgacgtgtgcgtcggcggggacaaggaccaggacgcgggacacgagcgccgtgggacttggacct

SEQ ID NO: 1664 - DNA, 345 bp, Zea mays
  Clone ID: LIB3115-036-P1-K2-B3
gaaagatgctgcagtggtagtccgccaaatgctcaatttagctgctgaatgctatctgcgtgggttagttcaccgagatatgaagcctgaggtcatgtaagactgtacctattttccttcccagaacttccttttcaaatcgaacaaggaggattcaccactaaaggcgacagattttggtttgtcagatttcattaagccagggaagaagttccatgacattggtggaagtgcttactatgtcgcaccaaaagtactaaaacgaccggcttgtcctgagtcaaatgtttggagcataggagtcattacctacattttgctctgtgggaggcgccctttttggga

SEQ ID NO: 1665 - DNA, 224 bp, Zea mays
  unsure at all n locations
  Clone ID: LIB3115-036-P1-K2-C1
ccacgcgtccgcggacgcgtggggccaccaaggacccgcgcgnctcgcgcgcgccgaggagtacgtgcccgacaggttcctcgcgaggacgggcgcagctgctccccacgtcgtctggtccaacggccccgagacggcgttgcccacgctgcaagacaagcagtgcgctggcaaggatcttttttgtgcttatttatttgtataatttttcactttatcttttt

SEQ ID NO: 1666 - DNA, 357 bp, Zea mays
  unsure at all n locations
  Clone ID: LIB3115-036-P1-K2-C12
gaaaaaagggncgacccacgcgaccgcccactcgtccgcgtgaacttgtccctttagtacctcaagaccnaccccttcgtcaagggggtgcttttaaatgggaccctggggctcatcaacacccactacgactatgtctcacgagagttcctcatatggaaaaagtgaaaaactagggctaaggcaattctaccggcccgccgactcctgcattatcataaatatatatactataactatactactacgtacctaccgatatgcacccgaacaatgtgaatgcgttgaagtctatctgttttctgcatctacatttatatacccggatcaacaatcgcccaatgtgaatgtaataag

SEQ ID NO: 1667 - DNA, 378 bp, Zea mays
  Clone ID: LIB3115-036-P1-K2-C3
gaccacgcgtacgctcgcattgttaccgaggacttcttgccacttccctgttaagggaaaactgggaaggatggctggtgtccttctggtcatggtgatgtgtttccctctttgaataacagcggaaaacttgacatcttattggctcacggcaaagagtatgtctttgttgcaaactcagacaacttgggtgctatagtcgacatcaagatcctaaaccatctgatcaataaccagaacgagtactgcatggaggttactccaaagacgcttgctgacgttaagggtggcactctcatcttttacgaaagaagagttcagcttttggagaattcccaagtaccccatgagcatttttatgaatctaaattcaaatcg

SEQ ID NO: 1668 - DNA, 364 bp, Zea mays
  Clone ID: LIB3115-036-P1-K2-C8
ttttgtctgcaattttgtcgcatggtttttatgtcctgggcggcgtatatgcaagtaacagatctggtattacagctgaacagctggaatgggtacatcagacaacactcaaaattcttcaggaaatggccttctagcattgttatcagggttcactgatatagtttgtaacataagaagtataatgctgcacatccgtagctattgaagagcctttttaagtggtcacatatctttttgttgagaagtggagtggaagaaacgataatgggttatctaaagccatatatcacttcagggaagaatggtgccacgttgtgcaatccacaaattacttacaggcttgggattgatatgaccatgt

SEQ ID NO: 1669 - DNA, 64 bp, Zea mays
  Clone ID: LIB3115-036-P1-K2-D1
cgacggagaaagggcaaaaggcaacaccgtccgcgacgtccactatggcagcctcgctccaagt

SEQ ID NO: 1670 - DNA, 351 bp, Zea mays
  Clone ID: LIB3115-036-P1-K2-D3
agaagaagaaagacaagggcgccaaggagaatacttccgatcccgtgaagctcagagcaaagctggagaaggtggacaccaagctgcaagacctacatgccaagagagaagatatcctgaggcagctgaaagagctggaactggaagatggcggcaagggaaaggccaacgaagaggagcctgcacatgtacagactctggaacagggtggagagagcgtggtcaaggaacagagtcatgtcgccgcagcctgatccggttacacatgcacatgcatcacactgtaaatgaaagaacatacatcagctgagttgtgaaaatggtacgcatgcaatgtgaggatctccgtct

SEQ ID NO: 1671 - DNA, 461 bp, Zea mays
  Clone ID: LIB3115-036-P1-K2-D4
cccacgcgtccgcggacgcgtgggcagcgagtattctctgatgccagatacaaaggtgtaatagactgtgtcagaaaggtttatcataaagagggtgtggctggcttctaccgtggatgtgccacaaatctgttgcggacgacccctgctgcagtgataactttcactagcttcgagatgatccataggtcccttcttgatctattccctgctgaacctgaacctcacatccaacctctaaagcattgaccatacaacatttgtaccctatccatgcggcagattaggaccccagtaaccatccagcaacagcaatgttgtttactgtgccagatggctcttgtaaaaaagagaattgtttttttccccagattatagctgccattcaaaagttgaaacaatagtgtaggcagagcattagcatctgtgtacgtaatagatttgttagcatgcctttgggg

SEQ ID NO: 1672 - DNA, 390 bp, Zea mays
  unsure at all n locations
  Clone ID: LIB3115-036-P1-K2-D7
gaaaaaaggggcgacccacgcgtacgaccactcgtncggactaattctagatttttttctttaccgcctaaaaaaaaaataaggggcggtgccatttaaagattgcgtcgccccaaacaaaatggacgctcggcataacacaaactgcctttgttcaacgatggtaggcatgacagccgttcatcgcaagcggagccgctggcacatgaggagccttcttaatttcgtcatctccaagctccatccagagcacacgcactcggancccagnaccaaaagcanggctggaggacaagaacatcgaacaacattctgtgtccttcaccttgggacaaaaacaccccacccatattttacacccaacccttggctgactgcttcaatggatct

SEQ ID NO: 1673 - DNA, 235 bp, Zea mays
  Clone ID: LIB3115-036-P1-K2-E1
accaacgcgaacgaccacgcgtccgctttcgcgcaccgaaccattgttattacaacgaacaacatggcatttcgcggggcttcttatgacggacgtggcggccgcataagcggacgtggcggatttactcctcgtggaggacgcggtggcatgggagcctcattcggacccccagacactgtcatcgaaatgggcaaggtcgcacactactgtttatacttttttttttgcgaat

SEQ ID NO: 1674 - DNA, 348 bp, Zea mays
  unsure at all n locations
  Clone ID: LIB3115-036-P1-K2-E2
gttcgtcgacaagtacggcgcgaacgtcgactgattcagcccaatctacaacgaggatgactggtctcccaccggcgacgtctacgtcggtggaaccactgggcttctgatctgggccgtcaccctcgctgggatcctcggcggcggcgccctcctcgtgtacaacaccagcgccctctccggctaaggatatccaatgcatgcgcttcttgcgattcgtcgtgtaaaatcagggggtctgtctataatctagcctccatggatgctcaaccttcgtcatgtaacaataatcagagctactcttcattacataattttgatgctatatatatatacccgcannaaaaa

SEQ ID NO: 1675 - DNA, 373 bp, Zea mays
  unsure at all n locations
  Clone ID: LIB3115-036-P1-K2-E3
cccacgcgtncgcgtcgacagcaacacctgctttttctacgacgggagcaccagaggctaggcttgcttcatcagtgacagggagccaagatgccggccggagggttctcggtctcggcgccgtccggcgtcgagttcgaggctaagatcacgccgatcgtcatcatctcctgcatcatggctgccacaagcggtttgatgttcggctacgacgtcggcatctcaagtggtgtgacgtcgatggacgacttcctgggcaagttctttccggcggtgctgcggaagaaactggaggacaaggagagtaactactgcaagtacgataaccagccgctgcagctgttcacgtcgtcgctgtacctcgcggggctga

SEQ ID NO: 1676 - DNA, 449 bp, Zea mays
  Clone ID: LIB3115-036-P1-K2-E4
gcttaaaccacaacgcagtcaaccaccaaagcactcgaaagtcgaaaagcaaccctgcaaggcaaagagagggcgcgaccaaacagatccaatccaatggcgatggcaccgtccgcagcatgcgtcgtctcgttccccgcccgcccggcggcgtccacggccgggccccgcgccgccgcgggcaccggggcggtccacgctgtcgcggggtcggcggagggagccaagtggtgggcgccgctgctggggtggtcggggaaggccgactacctggaggccccggcgccggcgcatgatgaggcgccgcggaggcagttccgtggggtgatgacggaggagaaagcccgggagctgccgggcgcggatggcgcaaactgagtcctttcacgacgccatgtaccacttccgcatcgcgtcgcgcctcgcacgctccttcttaaggggtgcgc

SEQ ID NO: 1677 - DNA, 384 bp, Zea mays
  Clone ID: LIB3115-036-P1-K2-E8
ctcagatctatctgccccgcgccgccgtcgttatgccgttcactccgggtccctactctggcgtcagcaccctcgcccttgtagcgagggcatcggtcttcggcttcggtgtcgtctacgggagcatcaagctctcaatcctcaaggcaacaaagcctaaaaaggaagaagcgcatgctcatcactaaggacgacagggctgctacatgttaatttctatggaaggatgatataaaaatgtggttgcactctttctccatacgtgcaatttgatttatgatttgtggacatcttgctgtaacacacctgctgagttatcttagttttgtgtcataataaaattcttagccaatggaaaaaaaaaaaaataaaaataaaaataaa

SEQ ID NO: 1678 - DNA, 161 bp, Zea mays
  Clone ID: LIB3115-036-P1-K2-E9
aacaccagcagcaggaaatggcgatggcaccgccagcagcaaccctagctattcgtggctcgtgccctaaccactttatctctaaaagacattttttgttgctcgccaacgaccaccattcccacacttttttttttttttttcccctccttacatcacct

SEQ ID NO: 1679 - DNA, 452 bp, Zea mays
  Clone ID: LIB3115-036-P1-K2-F3
ccaagtcgttggcttttgtcgtggctccggctgttttcttacccactgccgacctccaaatgacgtatatggacagagctctggttgaccttaccgagacacagatgttcgtgtacgagaaccccatcgatcgatcggccgagaccattagaagagctctgacccgtgcgcttgatgcctactacccaatggacgggcgcctgggcgtcactggggaccacctgaagcttgcgtgcaccagcaagggcgtaacgcatgtgggtgcgtcggcgcgctgcaccctgcaggacgccaggctctgcgaccggcgtaccgtggtcagtgtcgaggacctcagtatcagctatgccggccagtacagcgaggaccctccacttctgctggtgcaggtgaccgagtttttctgtggcggcttcgttgtcggggtgacgtggaaccacgtgcttactgac

SEQ ID NO: 1680 - DNA, 398 bp, Zea mays
  Clone ID: LIB3115-036-P1-K2-F9
gaccaacccagtgcaccacacaaggcattgttagcggcggcggcggcggcgggccggcggggactcccatgccaggagcagtctgccgattggaaggggagatgaaggccacgctcaagggccgctacgagggcgacaaggccacggtcgtcaccaccctcgccgtccccgccggcgacctccgcctcaaggccttcgccaccgaggccgtcttcaccaacggtccttccctgtgaggcctcaccctcaccctcgagaagcccggcgccttcctcgttgacctcaagccccacaatcaggatgtgcgctttcaagtcatgaactccgcgctcgtgctcgacaagcgcggtaaccttacctacactcacttcaatagcctcgcctggggccccgccggc

SEQ ID NO: 1681 - DNA, 428 bp, Zea mays
  unsure at all n locations
  Clone ID: LIB3115-036-P1-K2-G1
aaaaaacggggggaaggaaaaaaanaaaaaaaanaaaagaaataaaaaaaaaaatgggtggaaaaaagaaaaaaaaaaaanaaaaaaaggggggggggaaataaaaaaaaaaagggggggggaaaaaaaaaaatnaaatnaaatataataaaaagaaaaaataaaaaaaaaaaaaaaaaaaaaaaaaaaaaaaaaaaaaaaataaaaaaaaaaaaaaaaaaaaaaaaaaaaaaaaaaaaaaaaaaaaaaaaaaaaaaaaaaaaaaatgaaaaaaaaaaaaaaaaaaaaaaaaaaaaaaaaaagaataaaaaaaaaaaattttttaagagaaaggaaaagaaaaaaaaaaaaaaaaaaaaaaaaaaaaagaagaaaaaaaaataaagaaaaaaaaaagaaagaaaaaagaaaaagaaaaaaaaataaaa

SEQ ID NO: 1682 - DNA, 411 bp, Zea mays
  Clone ID: LIB3115-036-P1-K2-G10
taacgatcgagaagctcttggagtactgtcacatgctggtggcggagcaggagaacgtcaagcgtgtgcagcttgctgacaagtacctcaacgaggctgctcttggtgaagccaacgaggacgccatgaagactggctccttcttcaagtagaaagcaactctttgctattgctagctaggcgcgaggccggcataggatcgaggagggcgccaccaaaatgcattggagctaacgaacagcgaggggcgatcatggcagcagctgccactacatcttctaaacttgccatttttattattcctgatccatgtattactcttaatttgtacggactacaaaacggggtctggcccaaccgcgatatatagcgtgggcatgccaaaggttttgcgatgtgtttttttttgaa

SEQ ID NO: 1683 - DNA, 442 bp, Zea mays
  Clone ID: LIB3115-036-P1-K2-G2
cccacgcgtccgcccacgcgtccgcccacgctttttattgagagtacgtggaggagcagccatggcttcatcggtggccgccgcggcgagcacattcctgggcacccgcctggcggacccggcgccacagaacgggcgcatcgtggcccggttcgggttcgggttgggcggcaaggcgaagcctgctccgaagaaggtggcgaagacatcgacctcctctgaccggccgctgtggttccccggcgccgtggcgcccgactacctggacggctcgctggtcggcgactacgggttcgacccgttcggtctcgggaagcccgtggagtacctgcagttcgagttggactcgctggaccagaacctggccaagaatgaggccggcggcatcatcggcaacccgttcgagtcctccgaagtcaagtccaccccgttgcagccctac

SEQ ID NO: 1684 - DNA, 304 bp, Zea mays
  Clone ID: LIB3115-036-P1-K2-G4
ccaacgcgtccggcttgcaccagccactccgtttttttgctcgtatgttcgactgctcgtgtcgcgtcgggccacgggcggtcgtcagtttgggtgtgtccactccactgtaaagctccttttttgggtactccctgcatgccaaagttagcggacgtgtactaggtgtggttcggagcagcaggttgtattacttaccaccccctctgtgatgtaagaacgcgtgctgaaattatcatgtcgataccaagttatggcatatggattggataagaatgggaaaaaatatgatagattttgactt

SEQ ID NO: 1685 - DNA, 92 bp, Zea mays
  unsure at all n locations
  Clone ID: LIB3115-036-P1-K2-G8
taaaaaaaacgatgtgtaatataacatnngtgcgtaatacaggaaagaaatcaaaagggtgggtagatcaatctaagaggtcgattcccacg

SEQ ID NO: 1686 - DNA, 382 bp, Zea mays
  unsure at all n locations
  Clone ID: LIB3115-036-P1-K2-H3
ggaacccttcgagcatcctattgactcccatgtgctggttatgncggcgcagntcacaagggggagctttatcaacctgtttgtgcgtcggactggcccaagcagcacggagctgaccgtggagggaaggccatccgaccagctgggcaggagaaacctcactgacagtcccgtatttgacggccgtggccctgacgccagccttgtggctcgcgtacagggagtcgctacccagatgggcgacgtgcgccagttgtacaccgtcgtgtttcatgagaggccgtacaagggctccaccctcgtgacccgatgcgctatgactgtagggtgaaactatttttgttttttttttccgcaccggtaacttttattttttttattt

SEQ ID NO: 1687 - DNA, 448 bp, Zea mays
  unsure at all n locations
  Clone ID: LIB3115-036-P1-K2-H5
acccacgcgtccgctcccgaggaaaggctttggcgaaagatgttgattttgataaaattgctagaaggacccctgggggcactggngctgacctccaaaacctcatgaatgaggctgccatccttgctgctcgccgtgatcttaaggaaattagcaaggatgagatctctgatgctcttgagagaatcattgctggccctgagaagaaaaatgctgttgtttccgaggagaagaagaggctcgtcgcttaccatgaggctggccatgcccttgtcggcgccctcatgccagagtatgatccagtagccaagatttccatcatccctcgtggccaggctggtggactcacattctttgctccaagcgaagaaaggctagaatctggattgtacagcaagagctatcttgagaaccaaatggctgtagccccttggtggcagggttgctg

SEQ ID NO: 1688 - DNA, 458 bp, Zea mays
  Clone ID: LIB3115-038-P1-K2-A10
cccacgcgtccgatcccgttcaacatggcgtacgggatgacggcgttcgagtaccacggcacggactcgcgcttcaaccgcgtgttcaacgagggcatgaagaaccactcggtgatcatcaccaagaagctgctggacttctacacgggcttcgagggcgtgtcgacgctggtggacgtgggcggcggcgtgggcgccacgctgcacgccatcacgtcccgccacccgcacatctccggggtcaacttcgacctgccgcacgtcatctccgaggcgccgccgttccccggcgtgcgccacgtgggcggggacatgttcgcgtccgtgcccgccggcgacgccatcctcatgaagtggatcctccacgactggagcgacgcgcactgcgccacgctgctcaagaactgctacgacgcgctgccggaaaatggcaaggtcatcgtcgtcgagtgcgtgct

SEQ ID NO: 1689 - DNA, 183 bp, Zea mays
  Clone ID: LIB3115-038-P1-K2-A11
cccacgcgtccgatcccgttcaacaatgcttttgtgatgacggcgttcgagtaccacggcacggactctctgcttaaccgcgtgttcaacaagggcatgaataaccactcggtgatcatcaccaagaagctgctggacttctacactggcttcgagggcgtgttcacgctggtggacgtgggc

SEQ ID NO: 1690 - DNA, 422 bp, Zea mays
  Clone ID: LIB3115-038-P1-K2-A2
cggacgcgtgggcggacgcgtggggaaaataagccgatgcgaactaataaaggagctgaggcacgtagttggtgatagagtgctaatatcgacgataatgcgtctccaagataagttgcctcctgtggagaggcgtgagggaccgggtgcatcagctgccaagatggtggcgaaaccgtgaggcgggtgtcggtcggtcggtgggcgaggaatgcagaagggaggaagcagctgactttgacaaccctgtgggaagcagcaactatgaagcctcttgtgtcagtctttgtatggcggctgatgtttcttctttctgtgtcgtatgagtatgttttttcctagtagattggatcaagagtttttcatttcaaattgagctgcgcatgttcttttgagcctttggaatagttcggcaacgaaaa

SEQ ID NO: 1691 - DNA, 373 bp, Zea mays
  Clone ID: LIB3115-038-P1-K2-A3
cgcgtccgattacaatcagctcaaagtactccagagcgcagaagaacccgatcgacaccatgagggtgtggctcgttgccctcgctctcctggctctcgctgcgagcgccacctccacgcatacaagcggcagctgcggctgccagccaccgccgccggttcatctaccgccgccggtgcatctgccaccttcggttcacctgccacctcctgtgcatcttccaccgccggtccacctgccgccgccggtccacctgccaccgccggtccatgtgccgccgccggttcatctgccgccgccaccatgccactaccctactcaaccgccccggcctcagcctcatccccagccacacccatgcccgtgccaaca

SEQ ID NO: 1692 - DNA, 468 bp, Zea mays
  unsure at all n locations
  Clone ID: LIB3115-038-P1-K2-A4
cagcaatccaattgaatctgttgttgagaaacagaagcgtggttctgatcttttctgtactgcttgtgagatggctgttgtctggatacagaatcagctccgtgaaaacaagacaaaagaactcattttgaattatgctaatcagctctgtgagcgtctccctagccccaatggcgagtcaactgttgattgccatcagatctcaaagatgccaaatcttgcattcaccatagcaaacaagactttcaccttaacaccagagcagtacatagtgaagctggagcaagcaggacaaactatctgcatcagtgggtttatggcatttgacgtaccgcctcctcgtggtcctctctggatacttggtgatgtttttatgggtgcctaccacacttgtttttgacttcngtgagaacaggattgggtttgccaaatctgcatgaggactggaagtctgcgctttaatagcat

SEQ ID NO: 1693 - DNA, 135 bp, Zea mays
  unsure at all n locations
  Clone ID: LIB3115-038-P1-K2-A5
cggaanncccggcggcctaccatcgttgccatccaccatagtgaggtggttggacatgcttttcctatatgcacctgtgcttgccttccttcgggtcggtgctgtttggttaatgttcatcgaagacgttgattt

SEQ ID NO: 1694 - DNA, 373 bp, Zea mays
  Clone ID: LIB3115-038-P1-K2-A7
gcgtccgcggacgcgtgggtgggacaccaggtaatcgtgtggctttataagcctgtgtacaagctcgtaacgaagggcgcgatcttgctcgtgaaggtaatgaaattatcaaagcagcttgcaaatggagtgctgaactagccgcagcttgtgaaatatggaaggagatcaaatttgatggtttcaaagcgatggataccatattaaaaaaaaaaaaaacatttttatttcattttgttattatatctttaatatttgtttcttttttctttttaataattctttatattcctgtatgtgtatgggatacttttctctgttattaatctttgtatcagcgttttctttttgtttgtttttctctataatttat

SEQ ID NO: 1695 - DNA, 446 bp, Zea mays
  Clone ID: LIB3115-038-P1-K2-A8
tcgagggacgacgccacgcgtccgattttaatcagctcaaagccctcccataagccattgggaagttggaaaacctggaaatcctgacgttacactacaacagaatcaaaggcctgcctacaacaattggccatcttaccaggttgagggagctggatgtcagtttcaacgaagttgagactatacctgagaacatttgctttgcagccagccttgtgaagttgaatgtcagcaggaactttgccgacttaagagccctgccaaaatcaataggggaacttgagatgctagaggagctggacatcagtagcaaccagatacgagtgcttccagactcttttgggcatctctcaaagctacgtgtgtttcatgctgatgaaactccactggaagtaccgcccaaagaagttgtaaagctaggggctcaggagctggttaattatatg

SEQ ID NO: 1696 - DNA, 295 bp, Zea mays
  Clone ID: LIB3115-038-P1-K2-A9
cccacgcgtccgcgcagcgtcttctatccgttgagcaacctggccaccaagggcatgggcgccaacctctttgaccggccgcagcccaactcccccaccgtctacgactggctctacagcgacgagaccaggagcaaccaccgctagatcgggcgagatggatggacagcgaagaggccatgtttgctggtccttgtggttatctaaaacgcacgcatgctctattatagctagtcatcactatatatatacttgtgtttgtgtattgttgatcttgctctgctggtgtctccgc

SEQ ID NO: 1697 - DNA, 450 bp, Zea mays
  Clone ID: LIB3115-038-P1-K2-B1
cccacgcgtccgggttaaccgtattatgaaagtacggaaaaaaatcattggcttatcaaattctctatcgagccgtgaaaaagattcaacaaaagacagaaacaaatccactattggttttacgtcaagcaatacgtagagtaactcccaatataggagtaaaaacaagacgtaataaaaaaggatcgacgcggaaagttccgattgaaataggatctaaacaaggaagagcacttgccattcgttggttattagaagcatcccaaaagcgtccgggtcgaaatatggctttcaaattaagttccgaattagtagatgctgccaaagggagtgggggtgccatacgcaaaaaggaagcgactcatagaatggcagaagcaaatagagctcttgcacattttcgttaatccatgaacagaatctaagtatgtagacacatggatccataca

SEQ ID NO: 1698 - DNA, 222 bp, Zea mays
  Clone ID: LIB3115-038-P1-K2-B10
accacgcgcacggagatctccaacatgttggttgagagcacaaagcacgcggacgcggcgagggcggacgaccagaagggcgacgccgaccgcaccgcgagcgggaacgaggaggaggaacgcagggccgcggccaggcacacccgcgacaggctgaagggcaccaacgccaacgacccggtcgaggagagcagcaaggacaaacgggactcccaggagagc

SEQ ID NO: 1699 - DNA, 82 bp, Zea mays
  Clone ID: LIB3115-038-P1-K2-B2
tggcgtaatagacgaagaggcgccgcactcgatcgctccttaaccaacagttcgcgcatccatgaatggctgaatgggacgc

SEQ ID NO: 1700 - DNA, 463 bp, Zea mays
  unsure at all n locations
  Clone ID: LIB3115-038-P1-K2-B4
ggagaggggaagggctagagagagaaacaaatgtggttgtagatgtgagccaccctctttgtatccctcgtcaacttctcctaccaacttctttttcctcccccaccccttccttaccgtctcgcgcccgctccgcagcctngcaccacccgccgccgccggccgaccggccggcaccgccggtggcatttgaagtatggttagcttgaggcgacgccgactattgggtctttgttctgggaaagactcattgccagttgatcttcctaagccgattgaaaatgaaaaaactgtggaagttgcacactccaatgtgaagccattcagtgtgcatccactacccttggcaaagacttctgatgtgctcataaaatcctcaaatggttctgatgattcaaaggaagagaaaacccagtactatccaggcaaggaaatcaagtgcagaaaacggcatataagaaag

SEQ ID NO: 1701 - DNA, 426 bp, Zea mays
  Clone ID: LIB3115-038-P1-K2-B5
cccacgcgtccgagggaggaggtgagccaccgtatagtttagacgtgagtagtcgaccaaccccgtcgatccggctgcggcgcggcgtgctagatcgctaccgaccatggtggtggaggagatcgccgagggggtgaagaacctcaccgttaccggagatgcggcggctttaggcggagaggggcagaggaggggcggcggcggcagcagcaaccgcatccaggtgtccaacaccaagaagccccttttcttctacgtcaacctcgccaagaggtatatgcaacagcacgacgatgtaaagcttatccgttcttgggatggccatagcaccagttgtgaccgtggcagaaattctgaagaacaatggatttgctgttgaaaagaaaattaggactcttactgttgaaataaacgacgaatcaagag

SEQ ID NO: 1702 - DNA, 474 bp, Zea mays
  unsure at all n locations
  Clone ID: LIB3115-038-P1-K2-B6
aggcagcacactcnagctatccagcaaaagagtatcgagtactgcaggaggtcatggggccaccgtcaggcgccgcttgtggtgacccaccatcgttgcctcgcgcccgcgatcgccaggncccaatgctctagnggctgcctgcgctgagggcgaggagncgagagggtgcggtgcagctacgccaaggacgcggccccagtcagcaccaagggcgcaggcgcgtcgctgctcgccgcagcgggcgcggtgaccgcgtcggcggggcccgcgctggcgctcgtggacgagcgcatgtccacggagggcaccgggctgagcctcgggctcagcaacaacctgctggggtggatcctcctgggggtcttcggcctcatctggtccctctacaccatctacacctctgacctcgacgaggacgaggagtccggtggcctcttgctctagatccaccctttcctgttaatgatctga

SEQ ID NO: 1703 - DNA, 126 bp, Zea mays
  Clone ID: LIB3115-038-P1-K2-B8
gccgggcacgcgtccgccctagacaaaggaacccatctactttctcatatcaagcccaagcaagcagccaccaccatgtgccattattagaagccatgggcatgatcctacaccagctccagctcc

SEQ ID NO: 1704 - DNA, 281 bp, Zea mays
  Clone ID: LIB3115-038-P1-K2-C8
gaaacccgggcgacccacgctccggaatgctgggagaaggctaagaaagtcacttcttggactatggatatactacggctttgagtggccgtgcctcattcaacggctctctaccaggcctggtggccctccgagactccggatcacggcaatcgacacaccgcaccctggttttcgcccagcagagcgcatagaggagaccggaaggtatctaaaagattatgctgtgaccttcaatgtgcccttcgagttccgagccattccatctaggttcgaggcgg

SEQ ID NO: 1705 - DNA, 241 bp, Zea mays
  unsure at all n locations
  Clone ID: LIB3115-038-P1-K2-D1
cggacgcgtgggtagagaaagccatagcatgctataagtacagngagcgcaagagcccaacaggcgccagagaaagcaccgtccggccggtccgcgccagtatggtgacggcgatcgcggtggcgtcggtggggctcgggatgctggcgggcgttgtgatggtcaacaggtctttagtcgccttttttttgttacttatgctttgttatgctcttgtattatgtatctttgtttttttctt

SEQ ID NO: 1706 - DNA, 316 bp, Zea mays
  Clone ID: LIB3115-038-P1-K2-D10
ttgacaattaaagggaggggggatacattctaattgtatgcacacctgatgtttgataactattaacgtatctgtttacattgtatactaatgaacaatatttgttccatgtttgacttcttatcttattacccccttacgtttggcaggacataagctgtaccacctttttattacatgccaactaaaccaattattgatgatccatccatttttgatcataacatggaaaaggtattctaaaaatggaaatttatgctcaggggggagctgacttcggtttttaaaaacaatttgaggagcattatcttttaaa

SEQ ID NO: 1707 - DNA, 446 bp, Zea mays
  Clone ID: LIB3115-038-P1-K2-D2
ggacttcaaaaatccaggatcgcaagcagagtatagggtcattcatagggttagaggctgcactcgcaggtcaacagccaggctaccccgggggcccactgttcaatccactaggactcgcaaaggatatagagaatgctcatgacgagaagctcaaagaaatcaagaacgggaggttggcaatggtagccatgcttggcttcatggtgcaagcatccgtaactcatgccggccccatcgacaatctcttgacacacctttcggacccgttcaacaaaaatatcattcacacattctcctcttcctaagtactcgtcccaatgcccggatgctatggcggcacaaaaaggtcacaatgtttttgaacacaacagaacaatatgattattgatttacgtccttctccccaccgaataggggaaggaaggttagggaagcgttcaatc

SEQ ID NO: 1708 - DNA, 403 bp, Zea mays
  Clone ID: LIB3115-038-P1-K2-D3
gtacttcaaaaatccaggatcgcaagcagaggtatgtgtcattcatagggttagaggctgcacgtcgcaggtcaacatccaggctaccccgggggcccactgttcaatccactaggactcgcaaaggatatagagaatgctcatgacgagaagctcaaagaaatcaagaacgggaggttggcaatggtagccatgcttggcttcatggtgcaagcatccgtaactcatgccggccccatcgacaatcttttgacacacctttctgacccgttcaacaaatatatcattcacacattcttcttttcctaagtactcgtgccaatgcccggatgctattgctgcacaaaaaggtcacaatgtttttgaacacatcagatcaatatgttatttgatatactgtcct

SEQ ID NO: 1709 - DNA, 530 bp, Zea mays
  unsure at all n locations
  Clone ID: LIB3115-038-P1-K2-D4
ggaanttcccgggtgcggacccaaccgcgtccgcgagacgtcgtgtggcgagaccgctgtggcgcgagactgctttggttatatagtgtcacattatgtgcacaatnntaaatgtgagggagagatactattcataatgtgtatgcagcactctgagtgtttagatacactatatagtgtattctgttttacatgtgtatacataatgaacaatattgtgttccatgtttgactcttatctcattacccccttacgtttggcaggacaaaagctgagccacctatttattacatgccaactaaaccaattattgatgatccagccattgttgagcagaacaaggaaaaggtattcgaagaatggaaatctatgcgcagggctgagctgactcggtttcaaaagcaagttgaggagcaatatctctcaaatgtggagaggcaattgggagaggatccagaatgccccgaacgcttggaaggccaatgggcctggtaacatgcaagaaatggacaaggagcttgacaaccac

SEQ ID NO: 1710 - DNA, 419 bp, Zea mays
  Clone ID: LIB3115-038-P1-K2-D8
cccacgcgtccgataaaaaaaaatccgtctcttgtggtcttctccaaaccctagcgcccccggccccggtctccgcccccccgccttcgccgtcgcggtcgcgccccatggcggggaagtcgcgaccgcccaagcggatcctcgagtcctataccatcaagggttcggacagagtcatcaagcctggcgattgcgtgctaatgagggcatctgatgcatcaaagccaccttatgtggcaagagttgaggcaattgaagcagcaggatctcgaggcaccaatgtgagagtacgagtgcggtggtattatcgaccagaggagtccataggtggtcggcggccatttcatggttccaaggaggttttcctctctgaccactatgatgtacaaagtgctgacaccattgaggggaaatgcaat

SEQ ID NO: 1711 - DNA, 275 bp, Zea mays
  Clone ID: LIB3115-038-P1-K2-E3
ccgggaccccacgacgcggctggtgtcgacgtggctgtccgggatcgcgccgcgcctgacgttcccggccgtgtcgctgcagctgaacgtgacgctgctcatcgtggtggccgtgcacaacccgaacccggcctccttcgcctacgcgtcggggggccacacggacgtgacctaccgcggcgcccaggtcggggacgcggagatcgagcccggccgcgtgcccagccgcggcgatgccaacgttaggcttgcgcttacgctccagtccaaaccgt

SEQ ID NO: 1712 - DNA, 447 bp, Zea mays
  Clone ID: LIB3115-038-P1-K2-E4
gagggacttatgtcaccacaaacagaaactatttcatgtgttggatttaaagctggtgttaaggattataaattgacttactacaccccggagtacgaaaccaaggatactgatatcttggcagcattccgagtaactcctcagctcggggttccgcctgaagaagcaggagctgcagtagctgcggaatcttctactggtacatggacaactgtttggactgatggacttaccagtcttgatcgttacaaaggacgatgctatcacatcgagcccgttcctggggacccagatcaatatatctgttatgtagcttatccattagacctatttgaagagggttctgttactaacatgtttacttccattgtgggtaacgtatttggtttcaaagccttacgcgctctacgtttggaggatctacgaattccccctgcttattcaaaa

SEQ ID NO: 1713 - DNA, 420 bp, Zea mays
  Clone ID: LIB3115-038-P1-K2-E7
ggtggccccggccggcttcggccgttacggtttcggcgtccagcagcacgtcgtcaaggagaagttcgaggaggtcgacacggtctcacgcgccggcgccaaccaccaccaccaccaccatggtcaccacggcggccacggcttcgtggtgcgcgagaccagggtcgaggaggacatcaacacctgcaccggcgaggtccacgagcgcagggagagcttcctcgccagggctaactgagccgcccggcggccggcatccacgcccgttcgtgcctgcctgcgtgccttatgtatgtctgtggttgactggttgtgcagggtcatcgtacttggctatcgtacgtgcacgcactcagctcctgtacgaattacgacaataagcttgtgacctgaataaaacttcttctaatactaatacct

SEQ ID NO: 1714 - DNA, 294 bp, Zea mays
  Clone ID: LIB3115-038-P1-K2-F1
ggcgaccacgcgtccgggacgcgtgggagaagagccatttgggcaatgagtgtatagaaacccttcgctgggtcatcccatgcgaagggcattgtcctggagaagattggtattgaggccaagcagcccaactccgctatccgtaagtgtgctcgtgttcagcttgttaagaatggcaagaagattgctgccttcgtgccaaatgacggttgtttgaactacattgaggaaaatgattggtgcctgattgctggatttggtcgttaggggcacgctttggtagatatttctagg

SEQ ID NO: 1715 - DNA, 363 bp, Zea mays
  Clone ID: LIB3115-038-P1-K2-F3
gaccacgcgtccgcccacgcgtccggtgcatgaaattcgctgagctagagataagtcttggggaaatcgatcgtgcgcgtgccatctatgtgcatgcatccaactatgctgatccaaacaatcctgacttttggaagaagtggaatgattttgagattcagcacggtaacgaagatacattcagggagatgcttcgtatcaaacgcacagtggctgctagccgcagtcagacacatttcatactgccagagtacttgatgcagagggatcagaagttaaacctggacgaagcagttgacactcttaagcgtgctggcgtccttgaggacgagaatgccacttttggaaaggcaactggctacc

SEQ ID NO: 1716 - DNA, 404 bp, Zea mays
  Clone ID: LIB3115-038-P1-K2-F4
cggacgcgtggggcggcgcgccgcggcggcggtcggttggtcgccgtgcggtccagcgggccggccacgccgtcggagatctccgacaaggtgtcggagagcatcaagcaggcggaggagacgtgcgcggacgaccagaagggcgacgccgagtgcgcggcggcgtgggacgaggtggaggagctcagcgccacggccagccacgcccgcgacagcctcaaggagaccaacgccaacgacccgctcgagaagtactgcaaggacaacccggactccgaggagtgccgcatctacgacaactagctagtcgtatagctatataggccatcgacatgaaggacgaaggttgtagcacactacgaaagaatgatactctcgatcggcgcgtcatacgtggaatgaac

SEQ ID NO: 1717 - DNA, 313 bp, Zea mays
  unsure at all n locations
  Clone ID: LIB3115-038-P1-K2-F8
cgggccgaccccacgccgtccgcggtactcgttttgccggacgtcttgtggctttacgccttttttannaaaaaaaaaaataaaaataaaaagaaaagtgaaaaattttataataaataaataaaagaaaataaaataaataaaataaaatttataatatatataaataaaaataatttatataaatatgtataataaaataaatttaaaataatatataaaaaatttnttttggtgtgtctcttttttaaagttatctaaatttttcttaccctgtctttgtcaacttttaatattttttttttttttttcc

SEQ ID NO: 1718 - DNA, 387 bp, Zea mays
  Clone ID: LIB3115-038-P1-K2-G10
ggcactggcagcgaagatccaaagattgcactttcgcatctcacacgccgagctatttctactttgagagaatccccttctcccacaaggagcgagtaatttgaggcagagaccgacacagatggcagcggttatggtgtctcgccaaggccgggagctgcagcggtacagcgcgagcacgggcgggcgcgtggtggtgggctgcgtcccgtaccgcgtgcgcgggggcgacggcgaggtggaggtcctggtgatcagctcgcagaagaagggccccgcggggggcgtgctgatccccaagggcgggtgggagctggacgagtccatggacgaggcggcccggtgcgaggccgcggaggaggccggcttgctcgtcgagacgggccc

SEQ ID NO: 1719 - DNA, 403 bp, Zea mays
  Clone ID: LIB3115-038-P1-K2-G2
cccacgcgtccgaatccctgtagtagaggagttccaatggcggttagcaccatcgagtgctactcagcatgatggaaaagagaacttaagtggccagcatgatgtagaaggggcagaagaagatgaatctccttttgagttccgtgcattggaggttactctggaagcaatctgcagtttccttgatgcacgcactactgagcttgagaccgatgcttacccagctttggatgagttgacatccaagatcagcagccgcaacttggatagggtacgtaagttaaaaagcgggatgacaagattgaccgcaagggttcagaaggtgagagatgagcttgaacaattattggatgacgacgatgacatggctgatctttatttgtctagaaaggtggctggggca

SEQ ID NO: 1720 - DNA, 363 bp, Zea mays
  Clone ID: LIB3115-038-P1-K2-G3
gaccacgcgtccgggtgggttggcttctcctccccctccggtttgtgttttgtttcgtgaggttctccggggttcgggttcgtgggtgagcggatcgagatggcggcgtcagatgttgagtaccgctgcttcgtcggcggcctcgcctgggccacggacgaccactccctccacaacgccttcagcacctacggcgaggtcctcgagtccaagatcatcctcgatcgggagacgcagaggtcccgcggcttcggcttcgtcaccttctccacggaggaggcgatgcggaacgccatcgagggcattgacggcaaggagctggacggtcgcaacatcaccgtcaacgaggcccagtcccgcggc

SEQ ID NO: 1721 - DNA, 456 bp, Zea mays
  Clone ID: LIB3115-038-P1-K2-G4
gaccacgcgtccgcatttacgtatatgcccttgtcccggttccttttcctattcccaactccattatttgcttgatccttgagaagagagaggaagacgagagctagaagcgaaggagaaaagcagttcttcagctaggcaggagggcacaggaaggaggagatggcgtcaaagaggattcagaaggagctcaaggatctgcagaaggaccctcccacctcgtgcagtgcaggtcctgttggtgaagacatgttccactggcaggcaacaataatgggtccatctgatagcccatattctggtggagttttcctagttacaatccattttcctcctgattatcctttcaaaccaccaaaggtggcatttcgcactaaggtgttccattcaaacatcaacagcaacgggagcatttgccttgacattttgaaggaccagtggagttcggcactaacc

SEQ ID NO: 1722 - DNA, 398 bp, Zea mays
  unsure at all n locations
  Clone ID: LIB3115-038-P1-K2-G5
atatgattcctcaacactgcattgctatttttaaagatcccccngcagctcggtggtcgtgggcgacctgccccatattccttcaaatgatacctaactccgcgatatggggcaaggaaagatggtgtgttggcataaccgccatctactaaataaaatttccccagaggtacttgaaagccattgttcattgcagccctaagaactctagcatccgtcgcggacccctcccacctagtggatatgaaagttacattgagatcaaaatcacacgcttccattacattttgagtaagagtgcccttgctatgtctaaatggagcggctttgtcaggtgatatcctaatatgcacatgagtgccatcgatttgaccaaagcaaatcttgtttgtaaaaac

SEQ ID NO: 1723 - DNA, 305 bp, Zea mays
  unsure at all n locations
  Clone ID: LIB3115-038-P1-K2-G6
cgggngctttagatgcacgctgttcctatctaaagccggacaaaaaggattgcgggtgtggtgttccttgcgacggtccagggctcggcggtacttgtgatatttttgcttgggacgcgttttatttggcagtttactggatgttaaataccattggatgggctactttttattggcattggaagcacactacattatggctgggcatcgctttacaatttaatgaatcctccacttattcgatgggatggtttagagattacctttggtttaactctttacaacttattaatggattttattct

SEQ ID NO: 1724 - DNA, 375 bp, Zea mays
  Clone ID: LIB3115-038-P1-K2-H1
accccgcgtccgcccacgcgtccgcccacgcgtgcgcacacgtttgcgtttacatcgccccttcgcccacacgagcaagcgataatccggcggcgttgagatgttggtatatcaggatctcatatgtggcgacgggctcctggcggatttattcacctacagggggctcgaaaccggttttctgggggaagtcgggggaaagggggtcaacccagggtcttgttgatgtgacattggtgcccaaacaatccgcgggggtggtggaggacaaagcctttgacacaccagtggaaatgggggtgattttggtgacaaatttcggtcacgaggagcatccttttttggacagaaaatatttgggttctaccataaaaa

SEQ ID NO: 1725 - DNA, 314 bp, Zea mays
  Clone ID: LIB3115-038-P1-K2-H10
aggtgcattttaagcacgcatttctatattaaagccaaaaaaaaacgaatgggggtgtggttttttttgcaacggcccagggcacccctgaacatgtgaaaattctgcttggaacgcgagttattactcagcattctggattttaaataccaatggatggggtactttttaatggcattggaaacacattacattatggcagggcaacgattcacaaattaatgaaacctccacttattaaatgggatggttaagagaccacccatagattaactcttcacaacttataaatgtatataagctttagggatgaa

SEQ ID NO: 1726 - DNA, 442 bp, Zea mays
  Clone ID: LIB3115-038-P1-K2-H3
agcactactgctgggagtgcatgccacgggtgtgatgtatctggggccggctagctaatgagacggggtgttgctatgaagaagggtcttccagttcttggcgtctttaggacctttgccgctgttggagttgatccagctgtaatgggtattggtcctgccgttgcaatccctgcagagtgaaagctgctggccttcagatggatgatatcgatcttttcgaaatcaacgaggcttttgcatctcagtatgtctactgctgcaagaagttggaacttgatcctgctaaagtcaatgttaatggcggtgcaatggctcttggacattctttgggtgctacaggtgcacggtgcgtcagtactcttctcaatgagatgaagcgccgcggcaaggattgccggttcggagtgatttctatgtgcataggttctgggatgggtgc

SEQ ID NO: 1727 - DNA, 452 bp, Zea mays
  Clone ID: LIB3115-038-P1-K2-H4
agatgctgttgaggtcgatgcagaggatgacttgtttttagaaagtcaagatgaagctgttgaggttgaggctgagggttcaagtgatggtgctgtccttgtgaatggaaacagtagcgaggaacagtgggtgctgactgagcaatagtggattaacggatcagcaacttcgcttcagcggtgtagtttgtaaaggttgctgactgctatagagtacatgatatccattttttccccagcggtattaatcaacactttcatctttgtgcccgataggaaattttgtgcttccctttctacatgtagatcaggccttaggcgtcgaagacattttatagcctaccatgaggtactcgtttcacggagatggtatatgatataggtgatcggagtgatattttacatggtgcatatagtagcttgtcgaactgagaatgttttacctgtgatgt

SEQ ID NO: 1728 - DNA, 437 bp, Zea mays
  unsure at all n locations
  Clone ID: LIB3115-038-P1-K2-H5
gtgctttagtatgcccacgcgtgtttccatatattaatgcncnnggataaaaaggggatttgcgggtagtagnnnttttctcttgtcgacgggcncnncagggcgcccggctggtacctttgtnngatattntnncttgcttgggacccgcgttntnntatttggcgagtntnnttctggagtgggttaaatnnaccattggnnnatgggttacnnntttttattggggcatgtggaagaccacatnnntacattatgtgcgagggcgaacctgtttcacaaaatttannatgaatcncnntccacttnnatttgtatgtggatggggttatagaagattactcttattggttataacctctntcacccaactctattannatggatatttaatcnncttttggnngatgaatacgttttatcaagtattgggcctt

SEQ ID NO: 1729 - DNA, 274 bp, Zea mays
  Clone ID: LIB3115-039-P1-K2-A1
accacacgtccagtggagttgcaccaaccttttgcatgtttttactagactacttacttgtctggtgagggccctatcacgatgaaagcggtatgtcctgtgggccatataaagattgcgagtatcaatgtataatcatcgtcctgaacacgataaagcgctagtttggtcaaactggaggtgctctacaacaactttctagccctataaggggcgctggttctaaagggcctaaattgacacttacttgcatactacaacgcatatttattat

SEQ ID NO: 1730 - DNA, 372 bp, Zea mays
  Clone ID: LIB3115-039-P1-K2-A2
cggacgcgtgggtgaggtgaccactggagccgctggtgacttgcagcaaattactggcttagccaagcagatggtggtaacgttcggtatgtctgaaattggtccatggtctctgatggagggtggggcacagagtggggacgtcatcatgcgaatgatggcaaggaactccatgtcagagaagcttgcggaggacattgattcggcagtgaagcagttgtcagatgaggcctacgagatcgcattgaggcacattagaaacaacagggaggccatcgacaaaatcgttgaggtgctcattgagaaggagacactggtcggagacgagttccgggcgattctttctgagtttggggagatccctgtagagaa

SEQ ID NO: 1731 - DNA, 378 bp, Zea mays
  Clone ID: LIB3115-039-P1-K2-A3
gcggatacggagggggatacagtcgtggcctagctgctgctgctccatccattgaagatcaagctcagttcccaagccttggtgggaagtgaagggcgcccagctgctgctgtcaccgagcgttgtgttgtctgctgttgtcatatttaaattttgtccgacgttaaatttctgtgccacggtttaaacggaacaaataatgatgttgcatgtggctatctttagttatgtggtacttgacgtttgaataccggagttgttgtttatcagaaataaccttcaaattttgtttgccagtcttttcttgggggggggggtttttttttattttttcttattgttttgttttttcttttttttattgtttgataattattt

SEQ ID NO: 1732 - DNA, 447 bp, Zea mays
  Clone ID: LIB3115-039-P1-K2-A5
agcccttcatccaggaagaccacatgttccagaagatcatggacatctgcatccagcgcctgcgcaagtgctactgtgggctgacgccgcaccacgtcgtctccaagttcgacgacagaacgtccacgctctactacaatgtcgccgagcccgaggacgtgaactgcagcgccgcctgatgtaatatgatgtgagggggagggggagccaccccagcatctactagtctaatttttgctgcgcagaagtttcatgatgcagcagagttagttgtgcgattactgatagtgaaatactattggctgactgcgcgaggcagttataattgctctgtcctgtacatatacatgttgggcatattgctaaccagagagttgtatattccttggcggatcctctggccagaggaaaatttttattgcccgcgtaaattacaattttatcttt

SEQ ID NO: 1733 - DNA, 332 bp, Zea mays
  Clone ID: LIB3115-039-P1-K2-A6
taattaatctcccggccatgacccgagatgttttcttccctccgagagatacatctgtactgagcatggttaagcacgtactgcgatccattcccataacatgaaaccatgattatgatgatatgatccatggaccatgcatggagctcaggtcgatgccgtacgtgtgtccctggtacaatactattttagtacggatgctggccatcatatatatcgagcgagctcgccactgcgaagtctgagaaaatgcatgtatgcttgacggcgagatctgaggaagagatatctctatatatgcatgagtcgagatggctctcccttaattaatt

SEQ ID NO: 1734 - DNA, 395 bp, Zea mays
  Clone ID: LIB3115-039-P1-K2-A8
cccacgcgtccggtcgtgatggccaatgattgtattggtgaggaagttgagaaattggctgccgctttgccggaaggtggagttctgctcctagagaatgttagattctacaaggaggaagagaagaacgaacctgagtttgctaagaagctagcatctgtcgctgacctttatgtcaatgatgcttttggcacggcacacagagctcatgcttcaaccgaaggagttaccaagtatttgaagcctgctgttgctggcttcctcatgcagaaggaacttgactaccttgttggagctgttgccaacccaaagaagccatttgccgcttttgttggtggatccaagggctcaagtaagattggggtcattgattcctagctggcaaagtcgatatt

SEQ ID NO: 1735 - DNA, 351 bp, Zea mays
  Clone ID: LIB3115-039-P1-K2-A9
gtactgaactcgcaccagatctcttccaattttctgctttggcttgtcttgggagtcttgctaatggccacgagcctcagaatgtatgccacgtgccagcagcttgctcatgctgcagctgccaacagttttctcggccacactgagctgcgtgtgcatgtaccgccgtccattacccttgctacgagaggccggttacagagccttagacttcaactggctctttttgatcgtgaatttgacgatttagattatgacactctgagagcattggatgctgacaatagcccacatgctccatttatgagtgaagaagaaataaattcttcttcttgtcttcataattaaagt

SEQ ID NO: 1736 - DNA, 403 bp, Zea mays
  Clone ID: LIB3115-039-P1-K2-B1
gggcgccctcgcgggcggtgcctttgctctttacgaggggcaccgtgcgaagaaggaccgggcgaacgcgcagaggcacaagatcgaggccggcgtggcaacggcggctgcgctgggcgccggcggctacgcgtaccacgagcaccgcgagcagaaggaggcccactacgagagcaggcagtatgagcacagggtgccgtacgggcacgggcacgggcacggtttctcctactactgcgactgaaacgactgatcattccatctatcgagatatgcatgcagaactcgatatattatacttgctctagcgccgggcacgtgcgttcgtttaattttaataatagtcattacgttttcacgttgtgtgttgttttatctctttactttatctaattttctttat

SEQ ID NO: 1737 - DNA, 265 bp, Zea mays
  unsure at all n locations
  Clone ID: LIB3115-039-P1-K2-B11
ggccgaccgacgcgnccgcccacgcgtccgtggtatttgaggtatgtttttctctggacgacctgaccactgaggttggtaatgcttgcatttgggtgtgagacaacaatgcgccttacaatgtgctcatttctgactgtggcaagatggttattcagttccctcagtgctatttctaaaacatgttctggtttatgtgagccaagatcttcttgacactctatttgatcccagctgtgtggtagatcaattgtcacattttgct

SEQ ID NO: 1738 - DNA, 296 bp, Zea mays
  Clone ID: LIB3115-039-P1-K2-B4
cggacgcgtggggcccccaggggccagggcttgtcattggcggcgtgtccctaatcccaccgccaggctctgggcaccaaatttccggcggcgatggcacccgctgaggcgaggccagggttccggcgcatgttctccgtttgtgccttcgcgcgcgccgaaggcgctcgccgcgcgccctaagggcgacccatgccgcaaccttttcttgctcggcataagcaagcgtaccacatgtgagggactgagagaagcgcatgcggagcttggtgcaagcatagcatgctcgaccttgt

SEQ ID NO: 1739 - DNA, 275 bp, Zea mays
  Clone ID: LIB3115-039-P1-K2-C11
gcaatcgattcttggatgtctctatttgtattgatagacgataatccagtccagtcgagtgcgctcgcgtagaaccgggtttgtctctgtaattactcctctctttcgaatcatgatgagtcgtcgttctaactttttttttagatttctactatatacgtaaaaagatcttatctagaaaagaaaagttagaacgtgttgccatttgcgaacgaagagagtattatgtgtaaattttgtatttgtttgttgtagtagagaaaattgaactttgt

SEQ ID NO: 1740 - DNA, 329 bp, Zea mays
  Clone ID: LIB3115-039-P1-K2-C2
cccacgcgtccgagctaaggaaaagggtgtctcccttatgctgccaaccgatgttgtcattgctgacaagtttgcccctgatgctaacagccagattgttccagcatctgcaattcctgatggttggatgggcctggatattggcccagattctgtcgcttcattcaacgcagccctggatacaaccaagacggtcatctggaacgggcccatgggtgtcttcgaatttgacaagttcgctgtaggaaccgaggctgtggcaaagaagctggcagaactcagcggcaagggcgtcacaactatcatcggaggcggagactccgtcgccg

SEQ ID NO: 1741 - DNA, 306 bp, Zea mays
  Clone ID: LIB3115-039-P1-K2-C5
cggggcggcccacgcatccggcaatcgatactttgatgtctctattttttatctatagacgataatccataccatgcgagggcgcgcgcgtagaaccgggttagtttactataaatactcctctctatcgaatcatgatgagtctgctttctaactttttttttagatatttactattatacctaaaaagatcttatctagaaaataaaagtactaacttgttgtcattttttaacgaatataatttatttgtaaaatttggttttttttcgatgagatattataaaatttaactctttcatataa

SEQ ID NO: 1742 - DNA, 221 bp, Zea mays
  unsure at all n locations
  Clone ID: LIB3115-039-P1-K2-D10
caacgaatcagctcnaggcacgggggggatatattataacaaggggggcaccttgtactcagacccacatgatatttctccaaaagcacctgcttctaccattcctagaagcttggctactagctttagctaattttattctgtgccttcaaaaacaagtgaaagaggcttattgttcaactacttaatatccttaattttattcatttcacttaatgcta

SEQ ID NO: 1743 - DNA, 257 bp, Zea mays
  Clone ID: LIB3115-039-P1-K2-D2
cccacgcgtccgcggacgcgtggggccgatgtggcgtatgtggaccgaccgccgcagcgcccggtgacacgagacgagacggctccgagaggtcgcgtagatgattagaaacaagctgtattagtacgaggttgggttcaatttgccgcgatgggttactgctagccaggtgtacatagacctttttgcatcggcagctaatacctatttgccgatgttacaaaaaaaaaagagcgaaacgttttgtagttcgttgt

SEQ ID NO: 1744 - DNA, 353 bp, Zea mays
  Clone ID: LIB3115-039-P1-K2-D4
cggacgcgtgggcggacgcgtgggatcgcctccaagctccccgctgaggacaagaagaagatcgaagatgccgttgacggcgccatcagctggctggacagcaaccagctggctgaggtggaggagttcgaagacaagatgaaggagcttgaggggatctgcaaccccatcatcgcgaagatgtaccagggcgagggcgcgggcatgggcgctgctgctggcatggatgaggatgccccgtctggtgggagcggtgctggtcccaagatcgaggaggtggattaagttggttagtgttcgaggttttggtttggtgaggtgtgaaattccctgaactctgatggttgtttgtg

SEQ ID NO: 1745 - DNA, 184 bp, Zea mays
  Clone ID: LIB3115-039-P1-K2-D5
gctttgagaccattctacgtggaggatctccctgggccaccagttctgccacccgtatggtcaacgtgtttcaccatcggcatgggtaataagccgtgggtgagcctgtcctagggctagggaatcaagcttagcatcataaaaaagcaaaggaagcgggatgccgctttccaggcttgttgtc

SEQ ID NO: 1746 - DNA, 300 bp, Zea mays
  Clone ID: LIB3115-039-P1-K2-D9
aaaaaaaaaaaaaaaaaaaattaaattttaaaaaaaaaaaaaaaaaagggaaagggaaaaaaaaaaggggggccggcaaaaaaaccaagctaaaaacccgtgcacgcaacgtcaaagcactataatagggccacctaaataaaaaaaacgggccgacaataaacaacaacgagacaggaaaaacccggacgtaaccaaactaaaccaccatgcagaaacacccccaaacgccagatggcaaaaaaacaaaaaggcccgaaccaaatcgacattcccaacaaatacacaacctgagggggg

SEQ ID NO: 1747 - DNA, 391 bp, Zea mays
  Clone ID: LIB3115-039-P1-K2-E1
cacttcgacgtcacacgggcgctgcgcacagacacaccaagcgtcggcaccaatggcttactaccaggaggtggactactgctcggaggaggtgaggtcggtggccccggccggcttcggccgccacggcggcggcgtccagcagcacgtcgtcaaggagaagttcgaggaggtcgacacggtctcacgcgccggcgccaaccaccaccaccaccatggtcaccacggcggctacggcttcgtggtgcgcgagaccagggtcgaagaggacatcaacacctgcaccggcgaggtccacgagcgcagggagagcttcctcgccagggctaactgagccgcccggcggccggcatccacgcccgttcgtgcttgcctgcgtgccttatgtatg

SEQ ID NO: 1748 - DNA, 438 bp, Zea mays
  Clone ID: LIB3115-039-P1-K2-E10
cttagtcatcgcacaagactcttgtgaccattaacaggatgaggactaccgtgcatgctgcgctttgcattgtgcttgtgataatgtcttcaacactgtcatcttgcgaggacgatgagaaggtatctatcgcatgtgacacaggatgcaatgccgcgatctcccgtctcaaatgctttctgatggcctattctgaagggaaagtgttggtcagcagcaactgcgaaacgccgaccaggtgcggctgcgtgtttcgtcacaaacaagatgcagcccttatcgccggcgactttggcaacaaaaagggatactgatggcagacgtgtacttcttggttgaataatatatactgctatgaattaatatgggcaccatctgaaatatctataatgtaattcttcaatgtaatgcttccagcattgtctggtttagttaact

SEQ ID NO: 1749 - DNA, 404 bp, Zea mays
  Clone ID: LIB3115-039-P1-K2-E12
cggacgcgtgggcggacgcgtgggcgtgcgtttaagacattgagggatggactgcaaggctgctcccgtccaggcagttcggatacatcgtcctcacaacttcggcaggcatcatggaccacgaggaggcccgccggaagagcgtaggaggcaaggttctaggtttcttctattgaagaagctgagaatctttgttatggcctgcctgcctgtcttactctctcagactagagtacctgttattttactttaatatgtctctctcagactagagcgccttcttttacttgaatattggtgactgcattggtctttcactttaaaatcggtgactgcattgatcgaaatatctgagccggttcttcaaatactatgtggcacaaaaaaaaaaaaaaaaagggcgg

SEQ ID NO: 1750 - DNA, 106 bp, Zea mays
  Clone ID: LIB3115-039-P1-K2-E3
cgggccgagaaaaaaaacaaaggaagaagtttgtgtccaggtttcagaattttttgtttgtaattaccattttgcatgacaagaatgagatactgtagatattaat

SEQ ID NO: 1751 - DNA, 418 bp, Zea mays
  Clone ID: LIB3115-039-P1-K2-E5
aatcaagacgggagctccttgccggtctgagcgcctggccaaatacaaccagctgctcaggatcgaggaagagctcggtgatgccgcggtctacgccggagcaaagttcagggcaccagtggagccctactaagaaaggaagaggatggggatgttttcttgtggagctatactagctcgctgctgtcctttgttacaatgtttgtacggtcgcaataaatgtatggtcgtgtttgctcgagagctactcaggtgattttgtcgtgggagcaccaaaagcagaaaagaactgtttttttcttctctctctctagattctgacgagtgttggtctgcactcgtcgtaatgtcgtttggctaaactgattttgttgggacaggaaatcttgctgttcttgtcaacaaaaaaaaaaataag

SEQ ID NO: 1752 - DNA, 226 bp, Zea mays
  Clone ID: LIB3115-039-P1-K2-E7
cttttccccaaggcaaccaaaccatctcgactcgtggggaagattcgctctcgccggcgtcgacggcctagggttcgaggaacgtccgtccgtccgtccggtgaaggagcggtagggaggcggagatgatcgaggtggtgctcaacgaccgcctggggaagaaggtgcgggtcaagtgcaacgaggacgacaccatcggcgacctcaagaagctggtggcggcgca

SEQ ID NO: 1753 - DNA, 342 bp, Zea mays
  Clone ID: LIB3115-039-P1-K2-F1
ctagtgtgagggatagccttgaaattctttgtatctgttcgtcttgagatacggctcattggaaagataaaatctgccaagggagatgaagatgttggtgtgaaggttcgtgtcagagtgcagaagagtaaagtatctaggccctacaagcaagctgaatttgaaatcatttttggggagggtgttagtaaattggggtgcgttcttgattgtgctgagctgatggatgtagttgcaaagaagggttcgtggttcagctacaaagatataagattgttccaaggcatatagaatgcacttctttattttcgagtgagcccaaccatcttcgatgagatttaa

SEQ ID NO: 1754 - DNA, 261 bp, Zea mays
  Clone ID: LIB3115-039-P1-K2-F2
cagacattaggtgcatgtactctcccgatattaccgttcgtttcatcacatgcctagctccctcgtactatgttgagatggacgctcatctaccgtgcgtgccatttctcgtaaggagactgtcaccgtcagattattctatagtgtaaagctggctgaaactatgtattattttcttttactatgttgtatggcttggcgcatgatgccttttgcaaaaacggttactgaaagtttgtaactgttcttttagcctttcct

SEQ ID NO: 1755 - DNA, 428 bp, Zea mays
  Clone ID: LIB3115-039-P1-K2-F3
ctcttgaggggctaccgcccaggcgcaggttcgaggctcaggattcatccaagtggcaggagagctttgtcgcatcacaggggcggcagggtggtggcaaccggtttggatactccggtagaggtgcagcatctggtcaaagtggtggactccagaggggcaggggcaatcatgtttcccgcgggggatacggtggcaatacacgatttcaggatgcaagtgcacacatggtgaacctgaacagggttggtagggttgttagtgtttagaagtgcgtaaatttttgaagcacctgccctttccataattacgaaacttctgttctaagctcagacatccaactattttctttattttcgtgtaagagtttggtactgtcggggtttgattagtgatagattccgctttaaaaatttgggctttttttt

SEQ ID NO: 1756 - DNA, 261 bp, Zea mays
  Clone ID: LIB3115-039-P1-K2-F4
aaacccgggcgaccacgcgtccggaatacctgcagactttggtcgacaattgctttgttcttagcagggaagtacacatcagaggcgagcaaacagcatgagtggtgccatggacatagcacgagccgcgtgacccatcatactacatacatacacctatcactatcatagaccagagattcagagctcaggagctcaggatgtgtcgttgtatgctaactatttattgaatgaggtagagaaatgtttttaccttctttt

SEQ ID NO: 1757 - DNA, 299 bp, Zea mays
  unsure at all n locations
  Clone ID: LIB3115-039-P1-K2-F5
gccacgcgtccgcacacgcgttcgaaggagggacgtgttgtttatttttatgctccaaccacttcacctctgagcattgagaaggatatcaagaagctgcttgngagctcttaaacaatatctgggtgcaaaactgtagaaaaacatgtatcaacaatgccctgagcgataaaatatatgataagctgtattaataagtattgccgtacttgagaggttgcagtatctgctctatttcccttgcatacactctgtacttgtatatccccttccaatgaattccaatgctgtatcagttt

SEQ ID NO: 1758 - DNA, 258 bp, Zea mays
  unsure at all n locations
  Clone ID: LIB3115-039-P1-K2-F7
gtgttatcaaggttaagagtcacttttattgttattgttgntaagcgccggtgggcgacgaggttcttataagtctaagttactcttctatacttctaattgagaatggtcacttaagctagcatatattttaaaattataaataatttataactgttcaaagttatttctttgaaccacttttgttatcactccgatcatgtacaatgaaaacttgttataacttgttaaatttggtaatatgatttccgttgctta

SEQ ID NO: 1759 - DNA, 421 bp, Zea mays
  unsure at all n locations
  Clone ID: LIB3115-039-P1-K2-G1
cagngctnagagactaccttgacacactatgctcgaacttgagatctcatacaattacctttgtgcaatctaacaatgacaaggtttccttacttttaaaagagagctttattggttctttcccaagccgggataggccttttatgaagctttttgtggacacccagttgttctcagtacatacagacctagttctctctttttatcagaaggactaagtgtctggcagacttgaatgtctgcctcgtcttgccaagcctttagatgttgagctaaactgtacatatcggcagctcagtgtttgtgcaaagagctcgaaggagaagccatataccgtcagaaaaaagtggtagattgccaggatccagttatgggtattggagaagaatgcttgtagctgcttaaagtagtctggtgcggt

SEQ ID NO: 1760 - DNA, 346 bp, Zea mays
  Clone ID: LIB3115-039-P1-K2-G10
cgagatcgtgcgcctcacgcgcgatgtcgtttccggcatgatcgtcaccggaatggaggtggccgagattgacggcgcccccaggatgggcccgacgtttggcgccatgatgatctccggccagaaggcggcgcacctggcgctcaaggccctgggcaggcccaacgccgtggacgggaccatgtcgccgccgttgcgcgaggagttgatgattgcgtacaaggacgacgaggtcgtggacgcctgattgcggcaagcatagaggaggatcgtcgccagcagcgatttattcttatatgccttgttgggtcaatgatgaatttaacgaatatccttgggtagcttt

SEQ ID NO: 1761 - DNA, 457 bp, Zea mays
  Clone ID: LIB3115-039-P1-K2-G11
ggggcaattaatgactttgaaaactttaattatctgatgagggaagttgttgttgagaagtaggaaagtggaatgaaatccagtcttagtcaaatatttcatatctcttctcttcttgtccaaacagaaggaaaaggagacaatttgagctgagcggaaaatccatatctctcttatccatttagagcatatggatcgatttataagaatcgaatgttttggttttatgttattttgtgatagaatgaaaagaattctatatagaatgggttgggaattatgcctagatcccgtataaatggaaatttcattgttataaccttctcgattggtaccattattttattgcaaatatttccgacatcctttcggtggaaaaaaggggcattttctaattattagaaaatgggttgtttgccttaatcccttagaaaatttttctgcaatcctttctcta

SEQ ID NO: 1762 - DNA, 347 bp, Zea mays
  Clone ID: LIB3115-039-P1-K2-G4
aaaaaaaaaaaagggaagggtaaaataaaaaaaaaaataaattaaaataaaaaaaagaaaaaattaataataaaaaaaataaaaaaataaataaataaaaaaaaaaaaaaaaaaataataaaaaaaaaaaaaaaaaaaaaaaaaaaaaaaaaaaatataaaaaaaaaaaaaaaaaaataaaaaaaaataaaaaaaaaaaaaaataaaaaaaaaaaaaaaaaaaaaagtaaaagggaaggaaaaaaaaaataaaataaaaaaaataataaaaaaaaaaaaaaaaataaaaataataaataaaaaaataaaaaaaaaaaaaaaaaaatataaaaaataaaaaaataaaa

SEQ ID NO: 1763 - DNA, 396 bp, Zea mays
  Clone ID: LIB3115-039-P1-K2-G6
cggctgcctcccgcagccgcccgctgcttttttctttccgaacgctggcctgttcttccgtgcctttggcccattcgtcaggcggcccctccgcaggcgacgcatgcgcgggcacgacggcgcgtggccccgactacgtagacagctaaccggtctccgcctccggcccttctcctgtcgcccgattgagtcgctgctgcaactgccaacttcacccccggcgagctcaccacagtctttcggaaaggtgctatcaatttggaagatggcagatgaggagcatgccccaagctctaggaaaagggttgcaggtactcaaatcaacaaggataattcggaacctgatgatgaaggaacagaacaggagatgtgttcatttaagaaagctactgaaga

SEQ ID NO: 1764 - DNA, 368 bp, Zea mays
  Clone ID: LIB3115-039-P1-K2-G8
ctgcgagcgtttgaccgggaagtcagtacctttatgggtgaatcgactcgccagagtaggtgccttcttcaattgggtattgcctgacagcatcaaggtttcagcagtcatagatgtaaatgcacatccagatttttctgatgatggcttggggtccaatgcctctatccttgagggaagtgatgacgatgatttagaccaactcctaagaacacctaacagcgacactgtgtcttcaagggacaagacattaactcctggcagggatagtctttaattgttctcctttgatatcaaataagaggcaggtgcttttatgttcacgtttcattgtggtattgggttggcctgatcatatcatcatctgc

SEQ ID NO: 1765 - DNA, 265 bp, Zea mays
  Clone ID: LIB3115-039-P1-K2-G9
gatggcggcggcggtttccagggttatctgtttccagaaaccgggctccaaatgcagcagggacagggaagcgacctccttcgcccgccgaacggtcgcggcgccgaggcccccgcgcgccaaagccgccggcgtcatccgctccgactccggcgcgggacggggccagcagtgctcgccgctgagggccgtcgttgacgccgcgtctatacagactaccaaaaagagcaaatggcgccttagtctcccgcgcgcaagctacaac

SEQ ID NO: 1766 - DNA, 354 bp, Zea mays
  Clone ID: LIB3115-039-P1-K2-H1
agctaagaggagaagctatgcaggatgctttagatgttgccaatagtgcgatggttagtgtgattggtctggattcagaaaaggtgcaagaactatgtgatgctgctaatgacgaagtagatgaaaacgatagagttcaaatagcaaactttctgtgccctgggaattatgcagtttctggtggtgtaaaaggtattgaagtagtcgaagccaaagcaaagtccttcaaggccagaatgacggttcgcctagctgttgctggcgctttccatactagcttcatgcaaccagctgtttcaagattggaatctgcgttggctgccactgagattagaacacctagaatttcggtca

SEQ ID NO: 1767 - DNA, 383 bp, Zea mays
  Clone ID: LIB3115-039-P1-K2-H2
gaccacgcgtccgaggaagagaagaaggaagaaaagaaggacgtttagaagtcggcgccggccaaaacggagtacaagtttgtgccctacccgtacccgctgccgaaccccgcgatgtgcccgagctggccgtggcagtgcccgcctcagcagcagtgccagtgctgccagaagcctccgccttcgccgcccaagtcgccgtcgaagccgccgccgtgcacctgttcgagccacgccgcctgtgtctgcggcaagacaccgccggcggtctggccaccgatgccgccgccggtctggccgcccccgtggggcacctgcaacgtcgtcaccgaggagagcccgtgcttcgtcatgtgacgctacgcgcttgctttgtcatgtac

SEQ ID NO: 1768 - DNA, 427 bp, Zea mays
  Clone ID: LIB3115-039-P1-K2-H3
gcaatccacacaagcactttaacgtcgcactttcgcttctcacacacacaccaagcgtcggcgccaatggcttactaccaggaggtggactactgctcggaggaggtgaggtcggtggccccggccggcttctgccgacacggaggcggcgtccaacagcacgtcgtcaaggagaagttcgaggaggtcgacacggtctcacgcgccggcgccaaccaccaccaccatcaccatggtcaccacggcggccacggctttgtggtgcgctagaccagtgtcgaggaggacatcaacacctgcaccggcgaggtgcacgagcgcaaggagagctttctcgccagggctaactgagcctgccggcggccggcattcacgcccgttcgtgcctgcctgcgtgccttatgtattgtttgtggttgactgggtt

SEQ ID NO: 1769 - DNA, 268 bp, Zea mays
  Clone ID: LIB3115-039-P1-K2-H4
cacgcgtccgcaaccggatcatgagcgttgtcttcccatgtccttcctctcgcttctgggacgccatcaccatcgccggcagctgctacctctacgcgtgcatcgccgccgcaggctgggtgttcatgtacttcttcctgccggagaccatgggcaggagcctggaggacaccgtgatgctcttcggcaaggacgcggactactaggacgtcggtgacagccgttgttactcgcccagtaagaagcctcttcctttccactgagcttg

SEQ ID NO: 1770 - DNA, 394 bp, Zea mays
  Clone ID: LIB3115-039-P1-K2-H5
cgtccgcctggacctgctggagatggttttcgcttttggtttccccggcattgccggcttgtatgacgagctgcttgttgcggaagaactcaagccctttgggaagcagctcagggacaaatacgtggagacacagcagcttctcctccagatcgctgggcacaaggatattcttgaaggcgatccattcctgaagcaggggctggtgctgcgcaacccctacatcaccaccctgaacgtgttccaggcctacacgctgaaacggataagggaccccaacttcaaggtgacgccccaaccgccgctgtccaaggagttcggcgacgagaacaagcccgccggactggtcaagctgaacccggcgagcgagtaccccccggcctggaagacacgc

SEQ ID NO: 1771 - DNA, 340 bp, Zea mays
  Clone ID: LIB3115-039-P1-K2-H7
gcatgtgtacgactggcctggcggttagcttatatgcagacacttgatctaggtgacactggactccttccccttgaggtgaggtttttacatgatccatcaaaggacactggctatgttggctgtgctttaacaagcaacatggtgagatttttcaagaccgcggatggatcgtggagccatgaggttgctatctctgtgaaaccactgaaggtccgcaactggattctgccggaaatgccaggattgataactgatattgtcatctctcttgatgaccgatatctttactttgttaactggcttgatggcgatattatgcagtacaacattgatgatt

SEQ ID NO: 1772 - DNA, 319 bp, Zea mays
  unsure at all n locations
  Clone ID: LIB3115-039-P1-K2-H9
ggggccgaccgacgcgtccggtcaccaccatccccaccatcggttttaatttttaaaccgnggagtacaagaacggcagcgggactgtctgggatgtggggggccactacaagatcaggccactgtggaggcattacttccagaacacccatggtctcatctttgttgtggacagcaatgatagggaccgcgttgttgaagcaagggatgagcttcaccgaatgctgaattgaggatgagttacttgatgctgtgttgcttgtgtttgctaacaagcaagatctttcaaatgctatgaatgcctctgagatcactgatt

SEQ ID NO: 1773 - DNA, 577 bp, Zea mays
  Clone ID: LIB3115-031-H5-R1B
gactagttctagggcggtcgaatccgccagcgcatccgctgagcaccgccagccccgcacgcggaggtcggagggctacgctccggagtccgaggggaaggcagaggaggcaagcaggcaggatgggtgccgctggtgacgccgcggcagcggcacgcggtgcgagctctgcgggggcgcggcggccgtgcactgcgccgcggactcggcgttcctctgcccgcgctgcgacgccaaggtgcacggcgccaacttcctggcgtccaggcacgtgaagcgccgcctgccgcgcgggggcgccgactccggggcgtccgcgtccagcggctcctgcctgtccacggccgactccgtgcagtcgagggcggcgccgccgccagggagaggcagagggaggagggcgccgccgcgcgcggaggcggtgctggaggggtgggccaagaggaagggggtcgcggcggggcccgcgtgccgtcgtcgcgtcccgctccgcgtcgcgatggccgccgcgcgctggtcggaggtcagcaccggcggtggagcggaagctgcggtgctcgcaatttcggcgtggtgg

SEQ ID NO: 1774 - DNA, 178 bp, Zea mays
  Clone ID: LIB3115-018-C7-F3A
aatgcgccgccgggccccgagcacctagtggctgggaacacgggggaaaggtgatcgacctttaacaaatactggtcgcaaaccgggttgtttcttcaatgtttaacacagtctggggcgggaaaatcgctatcctacggtttgccctcaagaaagacacccgggacacgagggagga

SEQ ID NO: 1775 - DNA, 508 bp, Zea mays
  Clone ID: LIB3115-018-C7-R3A
ggcacactatgcaatccgacgacgcggcgtccccgtcgcagtcgtggtcgccggactgctgctgctcgtcgtgctcggccaggagctggccgtactccacggcggggagccgggccttcacctcgccgggctggtggccggcgtccaccgcgccgtcgggcgggaagcggcacagccccaccacgggcagcatcagcagggcggcgtccctgacggcgctgatgcagtctgcagaaggcgatgaccggcttgggcacggcgaggcagtagcacaccagcgggatccccatcatcagtggattgagcgagcgagcgagttggacggaccgggacacgagcagatagctgtgctctgtgtttgcctggcactaaagagcgcgcgaagcgggggtgggctcttgttgcttgcttctggatagaattctaggcggcacgggcacgggcacggtggctggacgagcgacacgggcggagcggaaagctggagaggatatggcccacgcgtccg

SEQ ID NO: 1776 - DNA, 312 bp, Zea mays
  Clone ID: LIB3115-001-Q1-K1-A7
agcgctctggcgacgattgtcgcgcgaatattttagcactagcagtaggctctaggaacccaggcgagatcaatgcctgcttgcagtggcactgacaatgcactaacaaaaaaaatgcacgataaagatatgagaccaaacactgatgcagaaaggggacagagggacagtgggaataggaacgctgaggaagagctgagcgaggcagggagtaaaggacaagctggatgtcactgttagcgatcccagagcacagtgaaagtcaggtattgttggtgcccagacacaacaccctgtacgtcacgagctgat

SEQ ID NO: 1777 - DNA, 72 bp, Zea mays
  Clone ID: LIB3115-001-Q1-K1-A8
aaaaaaaaaaaaaagagggctaaatcaaaataaacaaaaaaaataaaaaaaagggaaaaatagggaaaaaaa

SEQ ID NO: 1778 - DNA, 89 bp, Zea mays
  Clone ID: LIB3115-001-Q1-K1-B10
cccacgcgtccgcggacgcgtggtaaaaaactaaaaaatcaaaaaaaaaaaaaaaaaaaaaagaaaaaagggaaaaacaaaacgagaaa

SEQ ID NO: 1779 - DNA, 261 bp, Zea mays
  Clone ID: LIB3115-001-Q1-K1-C10
aacgaaaccctttattttgaaaaacaaagggcgatgaatcaggtccgacaacgggttttccgacaagctgtacaaggagctctaggaactctgaatagttgtttgaataccgagttacatttccgtacgattcgtgctaatattggcattctcggggccatagaatggaagagataattcaatttattaggttttgaacttctacttttgtttagaatttaggcattatttttcccttgcttccaaaaaaaaaaacaaaaa

SEQ ID NO: 1780 - DNA, 328 bp, Zea mays
  Clone ID: LIB3115-002-Q1-K1-A9
gcgcggacgcgtgggcggacgcgtgtgcggacgtttgtgctataccgagaaacctaggcgctcagaaaacttgttctacaattcaggtgcatcgaactactttatggttttgctagagttcattctggttataattgtagaggaacgaaacgatgagagaacactgacttttccgtttctctgcaattcatgtgatatgatctcggaagcaataacatttcatcttctatagcttcgagcatcacagagatggtcaaatgacactgatttgcattacatgttattgtgaaacatttgcttttgaaaatgccaatagacagaagcatac

SEQ ID NO: 1781 - DNA, 296 bp, Zea mays
  Clone ID: LIB3115-002-Q1-K1-B11
tcgcggacgcgtggggttcaggaagctcatcgatctcgttgtacttgtaccgaactatctcaagggacatagtgcctgtttgtctggattgctgctcggccacaagcacagctgtctggcccggggcaccatccaaacaatcccatatagagcgtgtttggacgcagtcatgcgcttgggttttgcttttgcctgtctgtgcccggcagattcatgggcctgtaagcaaacacgtcccaattatctgaactcggaattatttacgcctcggcaaaaaacttgccagagcccataaa

SEQ ID NO: 1782 - DNA, 269 bp, Zea mays
  Clone ID: LIB3115-002-Q1-K1-D12
gtgagtgctaggcgatatatctgctatagggccacctagatgcagtacaatggacgtggctctacaccgtcctagctggcaaacagcgtgtcgcacccaactgaatcgcgcggcagaatatccctctttggccagctggcgcaattgcgaagacgcccggactgatcgcccttccaaacagttgtccatgctgaatggctgaatgggacgcaccctgctgcggctcattcatgctcggtctgtgtggcggatacgcacagcgtgaccgc

SEQ ID NO: 1783 - DNA, 56 bp, Zea mays
  Clone ID: LIB3115-002-Q1-K1-E5
cccacgcgttcgcggacgcgtgggaaaaaaaaaaaaaaaaaaaaaaaaaagaaaaa

SEQ ID NO: 1784 - DNA, 85 bp, Zea mays
  Clone ID: LIB3115-002-Q1-K1-F7
aaaaaaaaaaaaaaaaaaaaaaaaaaaaaaattaaaaaaaaaaaaaaaaagggggaaaaaaaagggaaaaaaaaaaaaaaaaaaa

SEQ ID NO: 1785 - DNA, 257 bp, Zea mays
  Clone ID: LIB3115-002-Q1-K1-G11
gccaatttggagaacgcatactcgacaagttattcaaagagtacgctcgccgtgttgccaagcaccttgagactgagaaaaccaagcatgctgttcttgtcctatccatcgagaaagcaataattcatgtgtgaagtgtcttgtttctcactatatatctttccattattatcacatggtaatatatgtttgttttgaaaaaaaaaaaatgctatataagaaaaaataaaaaagacaatagaaataaccgatcataa

SEQ ID NO: 1786 - DNA, 352 bp, Zea mays
  Clone ID: LIB3115-003-Q1-K1-B6
tcccactcgtccgttgccctgcgcctcggcggccggcttctgcgaccctctgggggacttctgggaggacatccccttgaccgactagtgctaggtgtacgaagcatgaggccagtgttctttccacgtctaaacgtacagcacgggctcgagggttctttccatagagaataatatacagattattcgcccaaagagacgtatgttatatatatgagttgtatgcagtcaccgaactggtacaggcttccgctttccatttcctgttgggagtcgtgtagtgtaatcctggggtgcgtattcgtatcatcaatcatgccattcgatttgaatctcgtttcaaagtaagata

SEQ ID NO: 1787 - DNA, 313 bp, Zea mays
  Clone ID: LIB3115-003-Q1-K1-E12
tcggataaacgcagctttggtgagcattcaaataagcatccactaatcaggcaatccctcaattaatgtccaagcaccaaaacttggtagcggcaagttgagtaacacatatctgccatctagcacatgtaatcacgcacttctaggggtctcaagttttatgaaaaagctttgataaacagatagattagacagttctctgtattccaaataactgtttgtatcaagcaatttggtcttgtttttttaggggaagcaatttggtcttgttacccaaaagaaaatttagaatacatatttaaatttttaaaat

SEQ ID NO: 1788 - DNA, 360 bp, Zea mays
  Clone ID: LIB3115-003-Q1-K1-F8
tctcggactcgtgggctgactcgtgggctgactcgtgggcttgaaaggaaaagagtacattcacgggtacctggccaattctctcgattaaaaggcttgactattttttacattagcctcgtgttgtatttctaatactgcatccagttttcttattctcatcgatgcggttttctataaaatgtttcagcaaaaatctgtcgtaataatcacatcaactagctagatctgtactgtttggtagttattcagattcttataaaaatattttggatccaaataaatgtttaggagataaatcagaatcaaaaaacaatatatatttgtacttaaatatttttatgatttgtcctatataaa

SEQ ID NO: 1789 - DNA, 56 bp, Zea mays
  Clone ID: LIB3115-005-Q1-K1-B7
aaaaaaaaaaaaaaaaaaaaaaaaaaaaaaaaaaaaaaaaaaaaaaaaaaaaaaaa

SEQ ID NO: 1790 - DNA, 215 bp, Zea mays
  Clone ID: LIB3115-005-Q1-K1-C9
aagcaattacatgatatgaggatgtggattatgctattacacataggatcgatgttgtgacgctagccagcacagcatgcagcttcacagcctcatttcacaactactacaaatcaatcacccgctgcaaggagtccgcgcccatggcgagcaccaacatggcgtcggccacctcgcggttcatgctggccgcgggcgtgcccaccggcagcagc

SEQ ID NO: 1791 - DNA, 234 bp, Zea mays
  Clone ID: LIB3115-005-Q1-K1-E4
aatccctttgttgttttgtaagctctgttcgcgctatgtttaatggaaaaatgtgcaatttggcagggtcacggcgctacatcgtgttgagttggtaactgtttatactgttattacgagaatatcagtaacgtgtgatctgcccttttctttgtacaaaaaagaaaaaaaataacatatattaaaaataaaatataaaaaaaaaaaatatttaatataaattaaaaataatat

SEQ ID NO: 1792 - DNA, 267 bp, Zea mays
  Clone ID: LIB3115-005-Q1-K1-G1
gcgcccacgcgttcgctagctagatctcatgcccgtgcagcatgcgcccgccatatatacggactggtcgggagcatatgatggaattataagtaattaattgccatgtaagctagctaatgatgcatggagacataggtcagaggtagagggccaagcgcgcgctctctctctctatctatctatatctatttttatatctatatagagagtctaaaataaaaataaaatattaaatatagtttattaaatagtgaatattttaat

SEQ ID NO: 1793 - DNA, 51 bp, Zea mays
  Clone ID: LIB3115-005-Q1-K1-G7
aaaaaaaaaaaaaaaaaaaaaaaaaaaaaaaaaaaaaaaaaaaaaaaaaaa

SEQ ID NO: 1794 - DNA, 57 bp, Zea mays
  Clone ID: LIB3115-006-Q1-K1-A3
aaaaaaaaaaaaaaaaaaaaaaaaaaaaaaaaaaaaaaaaaaaaaaaaaaaaaaaaa

SEQ ID NO: 1795 - DNA, 57 bp, Zea mays
  Clone ID: LIB3115-006-Q1-K1-A4
aatacatgctaggaccactagaagcaataaaactattctactaaccataacagaaaa

SEQ ID NO: 1796 - DNA, 58 bp, Zea mays
  Clone ID: LIB3115-006-Q1-K1-A5
acgcgaacaaagacgcatcggcgacttacactggcgctgtgcacagacacaccaaaca

SEQ ID NO: 1797 - DNA, 313 bp, Zea mays
  Clone ID: LIB3115-006-Q1-K1-B1
gggtcgagcaggcgtccccgtattacgccaagacggctgctgactgctggtgaggtgccatgccgcacgctcggaatcgcggtgccggcattcgtcgtagtatgagctacagacgggcatgtgcagcgcagaaaagatgcttatactgggcatcatcaacgctgaccggacgctgagcacaccgaagcattgacggtagacggtatctgaaccggagctgcttagatcttgttagtacgcgctatacactaggagaagccttcaagatggctacaactaccattaagctgcgtaacttatgatgagaagaaac

SEQ ID NO: 1798 - DNA, 83 bp, Zea mays
  Clone ID: LIB3115-006-Q1-K1-C7
gttcatgccacgagatagctcttacatggggtcaactccattcaattctatggccgtgggcataacccggctatactggcaaa

SEQ ID NO: 1799 - DNA, 145 bp, Zea mays
  Clone ID: LIB3115-006-Q1-K1-D10
gcaatgggaccccccctgtagcggtgcattaagctcggctggtgttgtggttacccccaacgtgaacggttaacttggcaaatcccttacggccggttcttttggtttctttcctttctttcttggcaccttcggcggcttttcc

SEQ ID NO: 1800 - DNA, 72 bp, Zea mays
  Clone ID: LIB3115-006-Q1-K1-D3
aaaaaaaaaaaaaaaaaaaaaaaaaaaaaaaaaaaaaaaaaaaaaaaaaaaaaaaaaaaaaaaaaaaaaaaa

SEQ ID NO: 1801 - DNA, 82 bp, Zea mays
  Clone ID: LIB3115-006-Q1-K1-D5
tcgacccacgcgtacgaaaaaaaaaaaaaaaaaaaaaaaaaaaaaaaaataaaaaaaaaaaaaaaaaaaaaaaagagaggga

SEQ ID NO: 1802 - DNA, 154 bp, Zea mays
  Clone ID: LIB3115-006-Q1-K1-F6
gcctgtaatgtctataaacactagtgcacatagcgctgacatagagcaatatccgtggtataaccggaagcatcgctgtgtgtatactatgattgtgacacaataagctagaaactgggactaatatacataatggactcgaccttattgatca

SEQ ID NO: 1803 - DNA, 62 bp, Zea mays
  Clone ID: LIB3115-006-Q1-K1-H2
gtcacgcgtccgaaaaaaaaacacataggtaaaaatatgaattaaaaaaataaaacttaaat

SEQ ID NO: 1804 - DNA, 434 bp, Zea mays
  Clone ID: LIB3115-006-Q1-K1-H8
acgcgtacgcgtccgaagcatacgattgacgcatcatgcagcaccctgtgttacttacctacgtgcatcggacattcgactagcccatacatttcagacatgcatgctcactatggacatctaaattgcagatatttatgcacatggtgagctaccattatgctcatgatcaagacatactctgacaccttgatctcatcgtgacataactgggcctactcgctgtgctgcatgagctgcacttgtgccatctttgcgagcaattgctgcttcatagtgatacgcaatttcaactgaatggacgacgcttcacaagatcatgacttggacagcgctgataatactcatataaaacattttggaacgcatccccctgttagcaattgacgtgagatcgatatggatcgtacggatttacgttcccagcagttgca

SEQ ID NO: 1805 - DNA, 150 bp, Zea mays
  Clone ID: LIB3115-006-Q1-K1-H9
gcggctagctatccattccatgcatctcgatctgtatgtacttcgaccgtcgatggatgatgcatgcatgtctacttggtttcctgacatgtacaacaattaatgcaacaaattaagtacgtacttgagagaaaaagaaaagaagaaaat

SEQ ID NO: 1806 - DNA, 267 bp, Zea mays
  unsure at all n locations
  Clone ID: LIB3115-007-Q1-K1-F1
aaaggaggttttattgaaaatttatgggctccgtagcgttgtactgataaccaatggcaacacaagtacacaacgttggctaagcgccatgtagcagaatttgcttgtagaagagtacagaccatgcatccatggcgaacgaaggccatgcacgagtacaaacgctacgctggtggatgaagtgtttcgtgtcgaaaaggcgtgctgtttgttgggcactgtactccattaaacagcatgcctatctattangcgtggcgcgcgcgc

SEQ ID NO: 1807 - DNA, 117 bp, Zea mays
  Clone ID: LIB3115-008-Q1-K1-C8
ggactcgccctttatctgcgcattaatctctgctggttttgttgttactcgcatctttaccgctacacttaccatctccctagctcccactcctttcgctatcttcccttcctttct

SEQ ID NO: 1808 - DNA, 85 bp, Zea mays
  unsure at all n locations
  Clone ID: LIB3115-008-Q1-K1-D3
tcggggcacgcgtgcggactagttcttaatcgctgtttgttgtgcgnnanataaaaaaaaaaaaaaaaaaaaagggggaagggaa

SEQ ID NO: 1809 - DNA, 58 bp, Zea mays
  Clone ID: LIB3115-008-Q1-K1-E11
actttcttaatatcaaatatgcccttactcatctccctttctaatcatttctcaatct

SEQ ID NO: 1810 - DNA, 322 bp, Zea mays
  Clone ID: LIB3115-009-Q1-K1-B10-F2A
caaaatcaaaccaagatgcttaaatcagaacacagagtggatgtgctgctgtttgccaaaatttcgcccatccaaacgaagacctaaaagcagttgtacaggcctgctagcttacatacaataacatacaatacaaatggccaaatgggtgttctttttatctacatacaaaagtttgcagccttgtcatgcacaaactcaatcccccagccccagttaccagggttgctcttcttcatcctgctaatccaaacaaactgacacctccttgccattgctaacgcaccatcagaagctgtcaacaaacaaaaacatcatcatc

SEQ ID NO: 1811 - DNA, 322 bp, Zea mays
  Clone ID: LIB3115-009-Q1-K1-B10-R2A
gatgatgatgtttttgtttgttgacagcttctgatggtgcgttagcaatggcaaggaggtgtcagtttgtttggattagcaggatgaagaagagcaaccctggtaactggggctgggggattgagtttgtgcatgacaaggctgcaaacttttgtatgtagataaaaagaacacccatttggccatttgtattgtatgttattgtatgtaagctagcaggcctgtacaactgcttttaggtcttcgtttggatgggcgaaattctggcaaacagcagcacatccactctgtgttctgatctaagcatcttggtttgattttg

SEQ ID NO: 1812 - DNA, 98 bp, Zea mays
  Clone ID: LIB3115-009-Q1-K1-B5
aaaaaaaaaaaaaaaaaaaaaaaaaaaaaaataaaaaaaaaaaaaaaaaaaaaagggaaaaggaaaaaaaaaaaaaaaaaaaaaaaaaaaaaaaaaaa

SEQ ID NO: 1813 - DNA, 207 bp, Zea mays
  Clone ID: LIB3115-009-Q1-K1-F8
cggacgcgtgggctgacgcgtggtttgagcgaataaaccgaaatatctagtggggggcgcgtcaagtatgcatacttgatactgcatgttcacagaaatgcttgtgcggcaagctgttccaaggctttaaactttatggcgctttacattcctaaaaaacccaaatggggttattaatgttgggaaaattggtgatttttaaggttc

SEQ ID NO: 1814 - DNA, 218 bp, Zea mays
  Clone ID: LIB3115-010-Q1-K1-G12
accaatcttcggttgtttcaaacagatctttgtattgactgactcccggttgcctagggtgccaattatttatgctcgtgatgcttttacatcattaacaggttactcaagagaagaaatattgggctgtaactgcaaagtcttaaatgggccaagcactatcttggaggttttagaggatgcatgcacggtggatctactgttttacagatggaagt

SEQ ID NO: 1815 - DNA, 118 bp, Zea mays
  Clone ID: LIB3115-011-Q1-K1-B3
gaacgcgcccttgtacggggcaataaaccccgggggttttggggttacccccaacgtgacccgttaaatttgcaaggccctaacgcccggtccttttgctttttttcctttctttttt

SEQ ID NO: 1816 - DNA, 436 bp, Zea mays
  Clone ID: LIB3115-012-Q1-K1-B12
tcgatcacttctacatctctcggtcgcttctcacatactcaccaagcgtcttcaccaatggcttacgaccactatgtggactactgctcggatgacgtgaggtccgtggccccggccggcttcggccgccacggaggcggcgtccagcaacacgtcgtcaaggagaagttcgaggaggttgacacggtcttacgcgcctgctcctaccaccaccaccaccaccatggtcaccactgcggccaccgcttcttggtgcgcgagaccagggtctatgaggacatcaacacctgctccgtcgaggtccacgatcgcatggagagcttcctcgccagggcttactgagccgccctgcggacggcatccacgcccgttcgtgcctgcctgcgtgccttatgtatgcccgcggttgactggttttacaaggtcatcgtacttg

SEQ ID NO: 1817 - DNA, 346 bp, Zea mays
  unsure at all n locations
  Clone ID: LIB3115-013-P1-K1-E1-F2A
acgaagatgtccgcggcctcgacgatcttgccgtcgctgtccttggtgaggcagcccatgaagccgatgtccgccacctgcacctggccgcagctgttggggcatccggtccagtgcatgcggaccggccgcggcacggccacgcgctnttncacctnccgcgccacctgcagcgcccgcgccttggtctcgatgatggcctgcccgcagaactggttgcccgtgcacgccaccagccccctgagcagcatcgacggccgcggcgagagccgctgctcctgcagcagcggctccgccagcagcgcgtcgagcctctcngtgctgacgttggggagcacgatgttct

SEQ ID NO: 1818 - DNA, 516 bp, Zea mays
  Clone ID: LIB3115-013-P1-K1-E1-F2A89
acgaagatgttttcggcctcgacgatcttgccgtcgctgtccttggtgaggcagcccatgaagccgatgtccgccacctgcacctggccgcagctgttggggcatccggtccagtgcatgcggaccggccgcggcacggccacgcgcttctccacctcccgcgccacctgcagcgcccgcgccttggtctcgatgatggcctgcccgcagaactggttgcccgtgcacgccaccagccccctgagcagcatcgacggccgcggcgagagccgctgctcctgcagcagcggctccgccagcagcgcgtcgagcctctcgttgctgacgttggggagcacgatgttctgctccaccgtgagccggagctcgccggtgccgtactcgtcggcgaggccggcccagctcgaacatgtccgcggcctgcagccggcccaccggcacgtggaggcccacgtacgacaggccttcctgcttctgcgggtgcacgccgaggtagtcccgccgttccagcgcttg

SEQ ID NO: 1819 - DNA, 516 bp, Zea mays
  Clone ID: LIB3115-013-P1-K1-E1-R2A
caagcgctgggagcggcgggactacctcggcgtgcacccgcagaagcaggaaggcctgtcgtacgtgggcctccacgtgccggtgggccggctgcaggccgcggacatgttcgagctggcgcggctcgccgacgagtacggcaccggcgagctccggctcacggtggagcagaacatcgtgctccccaacgtcagcaacgagaggctcgacgcgctgctggcggagccgctgctgcaggagcagcggctctcgccgcggccgtcgatgctgctcagggggctggtggcgtgcacgggcaaccagttctgcgggcaggccatcatcgagaccaaggcgcgggcgctgcaggtggcgcgggaggtggagaagcgcgtggccgtgccgcggccggtccgcatgcactggaccggatgccccaacagctgcggccaggtgcaggtggcggacatcggctttatgggctgcctcaccaaggacagcgaccgcaagatcgtcgaggccgcggacatcttcgt

SEQ ID NO: 1820 - DNA, 315 bp, Zea mays
  Clone ID: LIB3115-013-P1-K1-E12
cccacgcgtccggactagttctagatcgcgatcttgttaaaaaaaaaaaaaaaaaaaaaaaggggaaaaaaaaaaaaaaaaaaaaaaaaaaaaaaaaaaaaaaaaaaaaaaaaattaaaaaaaataaaaaaaaataaataaaaaaaattaaaataataaaaaaaaaaaaaataataatatattaatatatataaaattaaatggggttttccttttaaaaaaaaaaaaatttcatatccctttattattaatttaataatttttttttttttatatataataaaatattttgtgtgtctttttaaaaatttcttt

SEQ ID NO: 1821 - DNA, 69 bp, Zea mays
  Clone ID: LIB3115-013-P1-K1-E4
aaaaaaaaaaaaaaaaaaaaaaaaaaaaaaaaattaaatttttaaaaaaaaaataaaaaaaaaagggaa

SEQ ID NO: 1822 - DNA, 141 bp, Zea mays
  Clone ID: LIB3115-013-P1-K1-G3
acgtagagcttctagctataatcctaggattgattttagctttatgattgttcatgagaggaccatggcaagagggataccacaaccgtgtcgtgtgcaacatgacaaaccattcatagaagataccaatagggacatgct

SEQ ID NO: 1823 - DNA, 138 bp, Zea mays
  Clone ID: LIB3115-014-P1-K1-C9
gccagggattttcttttccccggccagttttgaggcttttcagcgttggaactaatgacgacttccttccttgaagacatcatattaattgccctaatcagctatctagtagttaattataaaaaaaaaaaataaaaa

SEQ ID NO: 1824 - DNA, 283 bp, Zea mays
  unsure at all n locations
  Clone ID: LIB3115-014-P1-K1-D5
tcggacgaacaccttattgattgtatgacaggattgnttcagttgcagcgctggtcgtgcgtacagatgtttgatgtactttatttacggcatcacacacagtgaccattccttattttgtccaccgaatgaaatgccctatgatctccaggcacgttggcttttaaaaaaaaaaaaaataatttataataatttaaaaatatataaaaaattaattattataatatttaaaataaattataattaaattattaaaaattttaaaatatattaaatataataa

SEQ ID NO: 1825 - DNA, 505 bp, Zea mays
  Clone ID: LIB3115-015-F5-F1A
cgtcggaggtggacgacgtggccggctcacggacggcgacggcgaccgcgactagcggcagcgggggcggggtggcagtgactggtggtggtgcgggggcctccaccaagagggccactgccggtggtgccgggagctggacatgagcggcaggaggggtcggcagcttgacccggtggctggtcttgtggccccccagcgcctggtaggagccgaaggacttcccgcagacggagcacctgaactccgcggacgggaccggcggcggcggcgcctggacgcggtggcggtcgccgcgggagagcatgagcaggcacagcgcgaggttctcctcctctgagcgctggcgccgcgagcgcttcttcttggcccacccctggggcaggtgggcgccctcgtcgccgctggtgacggtggcgctgctgctcgtggtggtggtggtggtggtcgtcgtcgtcgtcgcagctccatggatgacggcgtggagtagctccatggaagtcac

SEQ ID NO: 1826 - DNA, 447 bp, Zea mays
  Clone ID: LIB3115-015-F5-F2A
cgtcggaggtggacgacgtggccggctcacggacggcgacggcgaccgcgactagcggcagcgggggcggggtggcagtgactggtggtggtgcgggggcctccaccaagagggccactgccggtggtgccgggagctggacatgagcggcaggaggggtcggcagcttgacccggtggctggtcttgtggccccccagcgcctggtaggagccgaaggacttcccgcagacggagcacctgaactccgcggacgggaccggcggcggcggcgcctggacgcggtggcggtcgccgcgggagagcatgagcaggcacagcgcgaggttctcctcctctgagcgctggcgccgcgagcgcttcttcttggcccacccctggggcaggtgggcgccctcgtcgccgctggtgacggtggcgctgctgctcgtggtggtggtggtggtgg

SEQ ID NO: 1827 - DNA, 438 bp, Zea mays
  Clone ID: LIB3115-015-F5-R2A
gtaaccacagccagccaccaccgcgagaacaagtcgcagccaagagaagtcgtcctcgcgcgcgtctcgatctcccagcgaagctagagcttgccgtgtgccgtgacttccatggagctactccacgccgtcatccatggagctgcgacgacgacgacgaccaccaccaccaccaccacgagcagcagcgccaccgtcaccagcggcgacgagggcgcccacctgccccaggggtgggccaagaagaagcgctcgcggcgccagcgctcagaggaggagaacctcgcgctgtgcctgctcatgctctcccgcggcgaccgccaccgcgtccaggcgccgccgccgccggtcccgtccgcggagttcaggtgctccgtctgcgggaagtccttcggctcctaccaggcgctggggggccacaagaccagccaccgggtc

SEQ ID NO: 1828 - DNA, 351 bp, Zea mays
  Clone ID: LIB3115-015-P1-K1-A2
aagatcctgagcatcattttgttagataggatgctcttttcctattttcctatgagtatcctctcacgggggaaggcatgttctggtgtaagcgtgcgcggatccatctgtagacctcataatgttgatacaatttacttatgtccctaggaggcgtagctaaactcattttatacactccagagtgattaccatatgttgataaggcgacagtaactataataggtgatattcaactttacatagttggtccataacttgggataaatcatcaaagtgtggctgaagctgtccgttttacgcatttaatcaaatctgcggtccaactgtcacaggcaaggttgataacag

SEQ ID NO: 1829 - DNA, 369 bp, Zea mays
  Clone ID: LIB3115-015-P1-K1-B10
gactagttctagatcgcgagcggtcgcccttttttttttttttttttttttttttttttttgggttttttttttttttttttgggttttttttggcaacactcaaaacctgatcacaggatgcattttttataattaccttgtttacaccaatttggtgggcggtggctaaccaaacattcttcacacttacaacatccatgtcgggtcaaatttcgagcgatacaagtgaatttggaaccgcagcactcaacaaacattccgggagaaaagccagcatcttccatgttcttttttttttgctgcgaccaccaccccttgggggcacaacagtccacccattcggcgttttgagtttgcttggggggcc

SEQ ID NO: 1830 - DNA, 388 bp, Zea mays
  Clone ID: LIB3115-015-P1-K1-B4
aaaaaaaaaaaaaaaaaaaaaataaaaaaaattttttttaataaaaaaaaaaaaaaaaaaaaaaggggggaaaaataataataaaagaggaattcttactatttttataaaaaaaaattaaaaaaaaaaataattaacaaatatatatggcccccctttttaattaaacaacttttttttcccctcttatccaaatattaactttttttatttttccccctatttcaatatattttcccgttttttaaaaaatctatttttgaaaaaccccttgtttccccaattttattccctttctacatatttccccttttttcctcttttcttatttctaaaatctcccccccttttccccttcccaaatatttgctctttttatatttttttt

SEQ ID NO: 1831 - DNA, 410 bp, Zea mays
  Clone ID: LIB3115-015-P1-K1-B5
gactagttctatatcgcctgctgccgcccctttttgtttaactactcgcaggagccgggcaagcctaccaaatcggccaaggccatggaaaggcacctgagggtccacttcaagaacacaagggagacagcttttgcgcttcgcaagctgcctttgaccaaggctaagcgataccttgaggatgttattgctcacaagcaggcaattcccttccggagatactgtggaggtgttggtcgcaccgcacaagcaaagtctcgccactccaatgggcagggtcgctggcctgttaagtcagccaggttcatattggatctgctgaagaatgctgagagttacgctgttttgataggcttggacgtggacaacctttattttttacacattcaggttatccaagcccataatca

SEQ ID NO: 1832 - DNA, 378 bp, Zea mays
  Clone ID: LIB3115-015-P1-K1-B6
gcttccgaccgacgtgagtccgagtcagttctacggtgattgttacgatgacagtgataagagaattcgggacatgactataatcaacaagcagctaggttggaacccaaagacacctctcaaggatctgctggagacaacattgacgtaccagcacaagacatacaaagaagctgtgaagaggcaaatgtcgcatgcttcagcaacaagttaagttggcgctggctggggacggctcctcgtttagagccctagtcgcagcagctgtttcgcaagtcagaatacatatacgccggtaatcgttctgtttgaggccctagacgcgcccatgttttgtctgctaccaagggatgttatcctattgtgatattaactact

SEQ ID NO: 1833 - DNA, 333 bp, Zea mays
  Clone ID: LIB3115-015-P1-K1-B9
gtactgctgctatgaaacggtcctcttgcgcttcgtctgtgctctggtcagtgacgacgtggcgatctgctacttaagctaagctagctaggagagttagggttcatggtctcaccccccgctgttgtgcccctgagtaagattaatttaatttgaattagcctctctcataatgctgcgagttgtgatggtttcctgatcagatcttcaccttctaggctagttaaaatatcatttctctagtactatggatcatggatttacttggatacttgggtttaattcaggaatttgttcgtttaattattaatttatttttattatatttatatt

SEQ ID NO: 1834 - DNA, 187 bp, Zea mays
  Clone ID: LIB3115-015-P1-K1-C1
catagcactagtagcttattgatcttgtttactgactggatggtgattcgagcaggcaactagaacctgttggttgtgtttctggtgttacattgtggtgttagaatggtccggctgtttcgttttgagtcctgaccatttcaggtgtggtacgttgagatcagttaactgttcgtttttttttttt

SEQ ID NO: 1835 - DNA, 431 bp, Zea mays
  Clone ID: LIB3115-015-P1-K1-C6
gagcaccgccgcgcaggccaccgtcgtcctcggcgtggccccggagaagaaggccgcgcccgagttcgtcgaggccgcggcggagtccggcgaggccgcccacggctgcagctgcggtggcaactgcaagtgcgacccctgcaactgctgatcacatcgatcgacgaccatggatatgattattatctatctagcttgtggtggtggttgaacaataataagcgaggccgagctggctgccatacataggtattgtgtggtgtgtgtgagagagagagaaacagagttcttcagtttgctatctctctctgcatgtttggcgtcagtctttgtgctcatgtacgtacgtgtgtctacctgcatggttggtgatccgattgcatttgctgtaaccatatattaattggtccacgatgatatgatttgaatct

SEQ ID NO: 1836 - DNA, 191 bp, Zea mays
  Clone ID: LIB3115-015-P1-K1-C7
tgatccatggaccatgcatggtgctctggtctatgccgtacgtgtgtccctgatacaatactattttagtactgatgctagtgatcatatatatcgatcgagctcgccactgcgaagtctgagataatgcatgtatgcttgacggcgagatctgaggaaaaataatctctatatatgcatgtttcgagatg

SEQ ID NO: 1837 - DNA, 260 bp, Zea mays
  Clone ID: LIB3115-015-P1-K1-C8
cccactcgtccgcccacgcgtccgcggacgcgtgggctgttatatgggatcagtaggtgtccctttccatgaagttataggctactttgctaagttatgaattgttttttttttgtgtgtgtgtattcagtggatgttaaatgcggccaatgacaatggttatttcttagcattcttgtgggatttgcatacttgtagatgtagacagttgtaagactcataatcctgtcaaagatatatcatatgctcaacattcatcc

SEQ ID NO: 1838 - DNA, 97 bp, Zea mays
  Clone ID: LIB3115-015-P1-K1-C9
aaaaaaaaaaaaaaaaaaaaaaaaaaaatttttttaaaaaaaaaaaaaaaaaaaaaaaaaagggggaaaaaaaaaaaaaaaaaggagaaaaaaaaaa

SEQ ID NO: 1839 - DNA, 390 bp, Zea mays
  Clone ID: LIB3115-015-P1-K1-D12
gacacacaaaaggatgttctgaaaagatgtgttgcagcagaaccaaagcatggcgaaaaatggcaagcaataaccaaggctgttgaaaactcacacctgcctgttgaggctcttctgaagaaagctgttgtcgtgcttgatgtagaagaaaacgccaatccgggaggagcctagactctcttttttataagttgtttggtgaacatattttgtggcttacaatttactccgcaagtctgcatctttaaatctgttgttgattcttgctttttgctccaaaaaaaaaaaaaaaataaaaataaataaaaaaaaaaataaaaaaaaaataaaaaaaaaaaaataaatatattattattataaaaatataaattataataaaatattttattg

SEQ ID NO: 1840 - DNA, 443 bp, Zea mays
  Clone ID: LIB3115-015-P1-K1-D5
caaacatttaattcacttacaggagcatttattccaagaaagctatgactgacatggatagcaccaacgtgtatgcttacatctcaataatcgctctaattgtttgcattccacctgcattgatctttgaagggcccaagctaatgcagcatggatttagtgatgccattgcaaaagtaggtttgacaaagtttgtcagtgacctattcttggttggactgttctaccatctgtataaccagattgctacaaacaccttggagcgagtggctcctctgacacatgctgtcggcaatgtgttgaaacgtgtttttgtcatcggtttctcaatcattgtttttggcaacaaaattagcacacaaactggaattggcacgtccattgccatagctggtgttgctatgtactcttacattaaggctaagattgaagaggagaaaagg

SEQ ID NO: 1841 - DNA, 62 bp, Zea mays
  Clone ID: LIB3115-015-P1-K1-D6
cggacgcgtgggcggacgcgtgggaaaaatttttttaaaaagataagaataaaataaaaacg

SEQ ID NO: 1842 - DNA, 327 bp, Zea mays
  Clone ID: LIB3115-015-P1-K1-D7
cggacgcgtgggaaaaaaaaaaaaaaaattttttaaaataaaaaaaaaaaaaaaaaaaaaaaggggaaaaataaaaatataaaaagggaaaaataaaaaaaaaaaataaaaaaaataaaaaattaaaaaataaaaaaaaaaaaaaaaaaaaaaaaaatggggcgccccctttaataggttcaaattttctttcctcgtcttacctacttattaattttttttttgtttccccaaattcaatttctttgccccttttttaaaactccttttgtttggaaaaccccttgtgttccccatttttatttctttttataaattccccctttt

SEQ ID NO: 1843 - DNA, 71 bp, Zea mays
  Clone ID: LIB3115-015-P1-K1-E1
cggacgcgtgggcggacgcgtgggaaaaaattttttatataaaaaatataaataaaataataataggtaat

SEQ ID NO: 1844 - DNA, 224 bp, Zea mays
  Clone ID: LIB3115-015-P1-K1-E10
cggacgcgtgggcattaccatcgttatgtatttcttgtcatggaatgtttagctggtttcatgtttatctgagttgtgtgctctccatttttttttcttttgtagtttatgtactactcttccagagtccagacgtccgaaaaatttgtatttagtgggcaatctgcaacatctatgctctctgtacccgcactaaattaagtgagaactatagcttcaccttt

SEQ ID NO: 1845 - DNA, 300 bp, Zea mays
  unsure at all n locations
  Clone ID: LIB3115-015-P1-K1-E3
gactggttctagatcgcgagcggggcgcctgagtctcccgccctcgccgggccagcgccacccgggtcgtcctcgtccccggccggcgggcgctcctccagccgggccgtcacgggatacgcggcagcgctggctgacgcgtgcgtccgtgcgggcacgctgcgccgcgccgcgcgccacgcgcgcgcgctcctncaccttnttctccggctagagcggcccctggaagagggcgccgtcgcggtcgaggctggcatgactggcgctgaccagcacctggactcaccgataggcagtcat

SEQ ID NO: 1846 - DNA, 358 bp, Zea mays
  Clone ID: LIB3115-015-P1-K1-E6
cggacgcgtgggtgaaccttaaacttgaggggtcagttggctaatttgttggctcagcgactgcgtgcaaaactccatgacagccagttacctagaaaatccatgtgtacagcagtacgagaagaatgaagtgcacgatagatatacatatacatttcctggcttgtaatactgaatgttcacattatgcctatggcaattggcaacgaagatagcagttgtgcctgcttgtcttctgtttgcccagtttttgctaatgttgtaagccagctcacatggctcggctagacaagaatgaaatcaatgcgattgtgttggcgttattaaaaaaaaaaatatttaaattaaattaaaatta

SEQ ID NO: 1847 - DNA, 401 bp, Zea mays
  Clone ID: LIB3115-015-P1-K1-F4
catgttcttcggcaccgtgatcctcttcgcgttgtagacgatcaacaaggccaaagccaacgccttctcgccagcggttgcgtcggggctgatctgcggcgacggcatctggaccctgccgcagtccattcttgcgcttgccaaggtgaagccgcccatctgcatgaagttcttgtccaggtcggtgaatgcccaggtggacggcttcctcggaagttgaactgttgaaatcgtgacgtgcatgtatattgtgttgatgcaccacgcgtgctgtaaaacgtaccgggtaatgttgtgtcgacacgttctggttttgatgtacatgagtaagtacactagtcgtagggattgctaaattaatgtttggcgtatacgcgtcagcattagtaatgtacatgagt

SEQ ID NO: 1848 - DNA, 280 bp, Zea mays
  Clone ID: LIB3115-015-P1-K1-G3
cggacgcgtgggcggacgcgtgggcaaaccaaacaatttcacctcacgcacgaaaccgggaagcaagcaaggtcctcccaactcccagcaacccaaggtagcgcgcggcagcagcaagcagctcgacggcgacgatggcggcaacagcggttactactccagtaggcacgggcggcgctgcggcagcgagaagccggttcgcggcggcgtgcggggcgctcagccagtacgtcaaggcggccgaatccgagaggatgcacgcgaggccgcccgcgcctct

SEQ ID NO: 1849 - DNA, 399 bp, Zea mays
  Clone ID: LIB3115-015-P1-K1-H12
tcgcatggagctgagcctcctcagggctttcaagctctcatggccagggcatttcctcctgcgatcatactcggcatggctttcaatgtgccgggggagtacctgtacatcggggcggccgtcttcatcgtggtgttctgcgtcatcgagatgggcaagcccgacatgccgcacaacttcgagccggagatctacatgatggagaggccggtccgcgacaagctcatcgccgactacaactgcatggacatctgggacttcaacgagaagtactgcgagctctgggacttcaccgtcaacaccagggacgacatcttcaagtcgacctatatgcgttgcatacaccgctcgctgcccttcagattggtgcctgacagcaaaaaaccctgtgaaaggaaa

SEQ ID NO: 1850 - DNA, 451 bp, Zea mays
  unsure at all n locations
  Clone ID: LIB3115-015-P1-K1-H6
tcgggtttcttggcatacaccccctctttctttcgtggctacgacggcgaccgtctccttcccctacgcgctaggtgccagggtccgtcgggtccttcgctggcgacgagcaactaccaggtaacctagtggtgtgttcgggaacgtttccgcgggcgggcggcggcccccagtggcgaagatgatccgactaccgacgtacgcagcaggaggcgtccgttgccatcttcttctcctttgagtatatgatactagcaacatccacagtatcaacattcgtgaagtatatattctatgttagtgacatgctaatggaaggtcaatgggagaaaaaggcagtgtatacattttacttggttcatgagctatatgtgacttttcgcaacttcagaattcgcattacagattatgtgcgctacagaaagatcacttncaacatgaatgaacgctt

SEQ ID NO: 1851 - DNA, 208 bp, Zea mays
  Clone ID: LIB3115-016-P1-K1-A12
gattatgggtgaggtgaatttttagtttctaaacatttttttactttatttagatacttgagttcaaagataaatatttctcatttaaataatttaaaaatattttttattacttttttaatttatataattatattttaatttaaaaaaaaaaaaaaaaaaaaaaaaaaaaaaaaaaaaaaaaaaaaaaaaaaaaaaaaaaataaaa

SEQ ID NO: 1852 - DNA, 350 bp, Zea mays
  Clone ID: LIB3115-016-P1-K1-A5
tccacgcgttcggaacaacaaagcgagggaagctgtgcagaaagcctttggaactgggcggaacagcaaagggggcaacacaggagaattccatcgccacaatggtggcagccatggcaaggacccctacaagagatctgcttaaccttgtgtcggtcgaggctcgtccacattgatacacctatatcgtgcctacacctcaactaaaggagagtgtggtgatctatccgtgtactggaaattacttcacttgtggccagcgctatacattcattatcttgagctgcaggtgttcctggtcagctggtatgtacacacactatcattatactgctgcagaacttcattgt

SEQ ID NO: 1853 - DNA, 217 bp, Zea mays
  Clone ID: LIB3115-016-P1-K1-A7
gttatatatatatatgagttgtatgcagtcaccgaactggcggtacaggcttccgctttccatttcctgttgggagtcgtgtagtgtaatcctggggtgtgtatttgtttcatcaaccatgcctgccgatttgaatctcgtttcaccaattaaaaaaaaaaaaaatataaattaataaaaaaaaaaataaaaaaaaaaaaaattataaaataaatag

SEQ ID NO: 1854 - DNA, 286 bp, Zea mays
  Clone ID: LIB3115-016-P1-K1-B10
cggcaatgccgccgctaagtcttgggcgccaaaagcaggcgaggagcacgtgtgcacgcttgtctccaagcggctccagggcagtgtcgtgccactgcctgcgcatggtcgagtgcggcctggtcggctacagtttcgccgtcacggagtggcgcgggcgtgaccagccgcaggacctggacttcatcgatgactgcttatttatgcttgacgagctgcaggagtgcctgctactcgccgagcggctcgggccggaatggtcctcctgcaagaggtgcccagtgcg

SEQ ID NO: 1855 - DNA, 292 bp, Zea mays
  Clone ID: LIB3115-016-P1-K1-B3
gctcggcgacggcgggcgggtgctgcgggagcaaggtcagggtccaggaggcttgacgctgatggatggcggcgcccggatccctgtctcgctccatcgcggtcgcgactcgtgacccattggagcagggggttcatgaaattctatgtactacttactcgatctccgttgattttgttctccatcttttttctttctttctgagagagactgctgcttgtacttgcacaccatgaaagatgaaaggcaaatagatgcgctgataaaaaaaaaaatataaaaataaaataat

SEQ ID NO: 1856 - DNA, 322 bp, Zea mays
  Clone ID: LIB3115-016-P1-K1-B5
atggaccatgaggaggcccgccgtaagaatgttggtggcaaggttctaggtttcttttattgaaaatgtgtttttttgagccacagatgcgtccaagaactcgtctgatgttttgaggtttgttaagactgggtgtccgagcctttgtggtttgttaagacagcgatgtgtcatgtatttcagaaattgggatttttatgagatgtacctgcgagagccctgtctgtttcgattttcagatattggttttgatttatgcgatacaaacaggtcctttagtccatataactttttgatgctgtgaaaataattatattaaaaa

SEQ ID NO: 1857 - DNA, 407 bp, Zea mays
  Clone ID: LIB3115-016-P1-K1-B9
cgcgagcggccgctcgcgatctagaactagtctacactgacaacgaaggcgacatgatgctggtcggcgacgacccctggaatgagttctgtgacatggtccacaagatcttcatctacacaagggaggaagtggagaggatgaacccaggtgccctaaactcgaggctcgaagactgcctgtctgactcgctgggaagagggctggcttccaaagagccccggagcggcccctcgacttcggctgtcgattctgagaaccgcgctaacttgtccagtcagtgagcccttttgaaagtggtgaagaagacaaaaggccacgtgtcagagtgaccggaagaacgagaaaggggtgtgtttcagtggtgtgtagtaagtaggtaattttgtgtggttgcctccgggtaa

SEQ ID NO: 1858 - DNA, 379 bp, Zea mays
  Clone ID: LIB3115-016-P1-K1-C1
cccacgcgtccggatcgtcgttgctagccaggtgctggatccgtagcggcggcggcggccatggacaagagcatgctcggcgacctggacggcctccccgaggaggacaagatgcggatggccgccatgatcgaccagctccagatccgcgacagcctgagaatgtacaattcgctggtggagaggtgcttcacggactgcgtggacacgttccggcgcaagaacctggacaagcaagaggagtcgtgcgtccgccggtgcgcggagaagttcctgaagcactccatgagggtcggcatgaggttcgccgagcttaaccagggcgtggccacgccggactaagaaacacgctgccgctggctggctgctcacgttgtgc

SEQ ID NO: 1859 - DNA, 172 bp, Zea mays
  Clone ID: LIB3115-016-P1-K1-C10
tcgcggacgcgtgggcgcccttttttttttttttttttttttttttttttttttttttttgccggcctagtttttttccttatccggccattgtacaaacaatttctccagggcttgtagcttgtggacttgggttgcccaacatgtcatgaatacaaactgagtttgcttc

SEQ ID NO: 1860 - DNA, 344 bp, Zea mays
  Clone ID: LIB3115-016-P1-K1-C2
atggacgtcgtcaaggccatcgagaaggtgggcacccgcaacggctccacctccaaggtggtcaaggtcgctgactgcggacagctctcctagatctctctgatctggtctgttcggccgccctccctccgtcatcgtcgactccccctgcgtccgttcctttggatctgaataagatggtggtgatctgagtggtggtcttagtttatcatgtatcgctcgcagtttaatttagcggtttaggtgtggatctgtgaaccccatggcgcctctgcttgattcgggtttcacctgttatgttctgagattcatgataatgctatgagaactgaaattcccgtttc

SEQ ID NO: 1861 - DNA, 75 bp, Zea mays
  Clone ID: LIB3115-016-P1-K1-D1
aaaaaaaaaaaaaaaaaaaaaaaaaaaaaatataaattaaaaaaaaaaaaaaaaaaaaaaaaaaaaaggaaaaaa

SEQ ID NO: 1862 - DNA, 374 bp, Zea mays
  Clone ID: LIB3115-016-P1-K1-D12
acgcctgcataaagacgcctgcgcgccatcccctgtatctgtctcagggactcagaccaggtaacagattcccgggtggctgggagactgcgcacttcttcaagtttgacatctacaaggacgtcaggaacttacaggtactcaaagagatgtacaacgagtggccattcgttgaggggcaccctggacctgctggatatggctttcgccaagggagaccccggcattggcagcttgcatgacgagctgcttgtggcggaagaactcacgccctttgggaagcacctcatggtctaatacgtggagacacagcatcttctcctccagatcgctgggcacaaggatattcttgaaggcgatccattcctgaagca

SEQ ID NO: 1863 - DNA, 65 bp, Zea mays
  Clone ID: LIB3115-016-P1-K1-D3
aaataaaaaaaaaaaaaaaaaaaaaaaaaaataaaattaaaaaaaaaaaaaaaaaaaaaaaaaaa

SEQ ID NO: 1864 - DNA, 349 bp, Zea mays
  Clone ID: LIB3115-016-P1-K1-D6
acgccacgcgtgcgaagagaggagggatgcatcacccaatagaggctcaagtagtctgaccacttaatagaaacgggggaccactagagactgctcactcttttttcttgatgtctggaactaggtagggggataaaacttacaatgagtgttgccttcgtatggccgtgagatgattgtatatacctcctgctgcatatagctcgcgtcaatggcatcgcagtatttggaacgtcgcctgactagcttaaggtggcgtatgcacagacatctaataaaaagcagctactgtcttattactgaatgacacagaagcttttcctccagatcgcttgtcacaaggatattc

SEQ ID NO: 1865 - DNA, 346 bp, Zea mays
  Clone ID: LIB3115-016-P1-K1-E5
cccacgcgtccgcagctccgtgtaattttctactgtttggtttttgcggctgcgttggcccgatggcattttagacgtcgggcatggcggctgcaagtagcaagtgagtaactagctagctagtacatcgtcgtcgtccagtgttgtgaagcagagttaagtacatgcgtgctaatctcctggttgagctgccggttgttttttctcacggcacggccagtcgagaagagtcagtagtgtaatctcgtggttttatgatcatctgttgcagcttatgttattattatatatatattttaatttattgtatatcttattatttttaatattttattaattttatatt

SEQ ID NO: 1866 - DNA, 265 bp, Zea mays
  Clone ID: LIB3115-016-P1-K1-F11
caccagtggagagggccaaagaagtgaatgcagtgatcaatgagccactaaagctacaagaaaaccatacacacatgtctgttttgtgagaggaaccaaatgtcgatgtgacgttttcatttgatttagtaggtgtgctttctatataagatagttcgctaggtgactgcatcaggtggtgcgtaaaaacttagcacattggtaatgtataggagttggcccatatgtatgtttgattgtggttggtgagtttagtattattttg

SEQ ID NO: 1867 - DNA, 243 bp, Zea mays
  Clone ID: LIB3115-016-P1-K1-F12
tacatgcatacagggacaaataagttttttttgtcatcaatgagccactcactttagaagaggtccatacgcacatgggggcggttcgactatttcccaatttctaattcacctactcatgtcatttattattattactttctatattatataatactctatttcatctgtcataaattgatctttaaaacttaactcatctgtaatatatatgttttaactccattttttattttttatttt

SEQ ID NO: 1868 - DNA, 282 bp, Zea mays
  Clone ID: LIB3115-016-P1-K1-F6
ggcgtgaccatcctccgctccgagaaggtcaaggacgagcttattctcgatggcaacgacgtcgagttagtctctcgcttcgcaaaccctcctaccccattccgccgcccgccccgcgaccccgaggaggaggcaagatgaagacgatcctggcgtcggagacgatggacatcccggagggcgtcacagtgacggtggcggccaagctggtgacggtggagggcccccgcgggaagctcacccggaacttcaagcacctcaacctcgacttccagctgcagg

SEQ ID NO: 1869 - DNA, 405 bp, Zea mays
  Clone ID: LIB3115-016-P1-K1-G6
tcgcccacgcgtccgaaaaaaccgtatcgtctcgtctgttcagtttccttctcctcttcccgcagcccggtttgccgaccaggttgcaccgttccagagtagccaagcgaatcccgtgtctggttcgcgcgatggcggaggagcagtccaacccccagcaccagcaagcggaggagagggaggttatggtggagcagcagcagccgaggagggccccgaagctgaggtacctggacttcgtccaggtggcggctgcccaggccgcggtgtgcctcgctgggctctacggcctcgccaaggaccacgccggtccgctccgtcccagcgtttacgccgtcgagtctgccgtcaagggcgttgttagccccgtctacgaccgctttggcggtctgccgctcgacgttc

SEQ ID NO: 1870 - DNA, 284 bp, Zea mays
  Clone ID: LIB3115-016-P1-K1-H1
tcggcaaaatggcaaacacacattgtaatctcggttcatcggtacaacgatatatgtatagaaattgtactatttttgaagttatatttgagtgtgtgtttttgttggtgcaaaaaaaaaaaaaaaaaaaaaaaaaaaaaaaaataaaaaaaaaaaaaaaaaaaaaaaaaaaaaataaaaaaaaaaaaaaataaaaaaaaaataaataaataaaaaaaaaaaagggggggccgttttaaagaatcaaattttattaacgcgtgattgcaacagaatattttttt

SEQ ID NO: 1871 - DNA, 337 bp, Zea mays
  Clone ID: LIB3115-016-P1-K1-H5
atcaagattcatggtttctgagcaaccgccgggtccatagcaaaccaaccctgcatgcagggccagcttattatatataatatctgaggtggagcatatctatctggctgtgtactgcaagcaggcctagtacgccgcctgcgcgttcctcctattacacatataggcccctccctgcgtgtatgcttgttaccgtcgtgtcgaaccttgtactacgaggctccatcgaacatcgatggcttgcttctttatcagaacatgtttgaataaacgctatttggttaaaaataaaatttaaaagtcaatatttattgaatttgtaaatcattaaataaaa

SEQ ID NO: 1872 - DNA, 119 bp, Zea mays
  Clone ID: LIB3115-017-P1-K1-A1
cggacgcttgggcgctacgtaatggttctccttgcctttgcagagggctgcgaacccccaccgtccattgtttaccccattgaggccagagacttactctagctcttgcagaagctcac

SEQ ID NO: 1873 - DNA, 394 bp, Zea mays
  Clone ID: LIB3115-017-P1-K1-A5
tgcaccgtcgcgaccccttggctcgacggcaagcacgtcgtcttcggccaggtcgtcgagggcatggacgtcgtcaaggccatcgagaaggtgggcacccgcaacggctccacctccaaggtggtcaaggtcgctgactgcggacagctctcctagatctctctgatctggtctgttcggccgccctccctccgtcatcgtcgactccccctgcgtccgttcctttggatctgaataagatggtggtgatctgagtggtggtcttagtttatcatgtatcgctcgcagtttaatttagcggtttaggtgtggatctgtgaaccccatggcgcctctgcttgattcgtgtttcacctgttatgttctgagattcatgataatgctatgagaactg

SEQ ID NO: 1874 - DNA, 270 bp, Zea mays
  Clone ID: LIB3115-017-P1-K1-B10
acgaccttctggtcggcgccgagtaccattaagtattcatgttccacaaggagattcttcgggacgacctccacgatgatggcgggagaatactatctctgatttacttcaagctgctatggctggtgatggagaatgacaccatcaagtacttgaatctgttctaagataaccaaatcagtaactcaaatatacaacaatgcatacagctttgcaatcgttaaataatggatgaaagacgaattaagcaaacatcagtctaaaattcat

SEQ ID NO: 1875 - DNA, 97 bp, Zea mays
  Clone ID: LIB3115-017-P1-K1-C2
cccacgcgtccgcggacgcgtgggaaaaaaattaaattaaaaaaaaaaaaaaaaaaaaaaaaagaccccgcccgtccggactagtggtagatcgcga

SEQ ID NO: 1876 - DNA, 443 bp, Zea mays
  Clone ID: LIB3115-017-P1-K1-C3
ccggttggtttttggtttttgccgaacaagggcttctacgtctggctcttcgcgccggacgacgccaaggccacccaaaccgcggacccgaacaggaagaagatcaagctccatgcagggcataacccaaggccacgcaaaccgccggacgactccaaggccggatctccgtgcagccgtgcagggcatcacccacaagaagaagatcaagctccggcgagtacctctttccatctcctgtcgctgcctctaccatatctatctaaaggaacaaatttgagcgcatcttctgttgacagtgactttagtttgctattggtgctccagtaagaaaaatagatgtattttgttgatggtggcttcacaatctggcacatgactcatgaaaaagcttgtttgacaaactattgtgaaggaacaagtatactgtcttttactacttc

SEQ ID NO: 1877 - DNA, 277 bp, Zea mays
  Clone ID: LIB3115-017-P1-K1-C7
aagcgcgtcaccatcatgcccaaagacatccagctcgcccgccgcatccgcggcgagcgcgcgtaggcgtatctcgcgcccgggcccagtggcggcggagggatggaggagggcaatttgtaaccttatgctgtttgttcgcttttagacggcgtggtgaagaactagtgtaaaaacggctttaaagtctattttgtgcggtagttcgtgtaggccgcttcgtcccgaagcgatcttggtaaaagacttattcgtgttgccaaacgacacaattcgt

SEQ ID NO: 1878 - DNA, 287 bp, Zea mays
  Clone ID: LIB3115-017-P1-K1-C8
cccacgcgtccgcctgcctgatccctcccaataagctccccagctccacgccggacgcagcagcagcagcagtagagatggccggcctcgccgcctcctccacggccgccttcgccgccaagccgcgcctcccacgcgcgcgcctcaccgtggcctgctccgccaccggcggcgacggcaacggcagcagcagcagtgtgtcgctcgcatcctccgtgaagacgttctcggccgcgctggctctgtcgtcggtgcttctctcctcggccgccacctcccctcccccc

SEQ ID NO: 1879 - DNA, 269 bp, Zea mays
  Clone ID: LIB3115-017-P1-K1-D2
cccacgcgtccgcccacgcgtccgcggacgcgtgggtgatgccaatgggaacatcaagaagaagaaatgcctttgtggctcggttgagtgtgatggctggctgtattgattttttaaaaacttgctgtattacgtttagaatctgcagtttttttaagcataactgaacttgaacttgtttcattttgccttcatctagatcatgttgtgacaaaatgtaaaataagacatcagtgtttttagttgccaatgggggtcaagttttttcc

SEQ ID NO: 1880 - DNA, 345 bp, Zea mays
  Clone ID: LIB3115-017-P1-K1-D4
tcgcccacgcgtccgcccacgcgtccgagaagattattttagtgcatccatgttgttttcagtctgtaattactccatggtactgctattcggaacagtatagtttggcgttccggcacatgccaccaaatgtgtgcacataccataccgtggattcctggagtcatctgctgatcctacaccgtgaggtcatttatgtaacttaggaaaaaaaagtagatagatcctcattctggaaaaggccgggtatctgattgtaattcaatactgtgcttgatatatcacaatcagctcgcattttgtaattcaatactggacgaatataaattcaatcctttgttttgc

SEQ ID NO: 1881 - DNA, 425 bp, Zea mays
  Clone ID: LIB3115-017-P1-K1-E11
aagacagaacgtttgtgtcatctatccttaattcgcttcctggtgttgatcccaatgatccatctgttaaagatttgctggcatcattgcacagccagggagagcaagagaagaaggaagacaagtcagacaaaacagaagacgagaagaactgatgtagccatgttcatgcttccatgctcacaaagaaattgaacattggtctgcattggctgcgcttactctcttggctatgaaatttgcttatcctcatgtaacagtgctttgtttataacttaatgccgagggaatttgtattgtgactgcaacaatcttctcgtcataaatgttcaagtgatttcgtgtttcaagctctaaaaaaaaataataaattattattatataaaaaaaaatatataatttataaataataaatttaataattg

SEQ ID NO: 1882 - DNA, 426 bp, Zea mays
  unsure at all n locations
  Clone ID: LIB3115-017-P1-K1-E12
tgcaaccaggacaacaagcctctcgcgaaggagctgggcataaaggttgtgccgacgttcaagatcctcaagggcgggaaggtcgtgaaggaggtcaccggcgccaagatcgacgagctagcggaagccatcgagatagccaacaagaagtcaggctgacaaaggaatagcaagatcgacgtgcagtgcaagcaaggatgaatggatgatcgatgaactagctagtgaagactgcgaatgaatgcgccccggccgcgcatttgtgggaccggcaacatgcatgcagaaaacaagctattctagttcttctgcttaggccgtccgcaattgctatctcaaatagctagctgatgtggagctgagagaagaatacaaatagtaatttatctcatcactganaaaaataatatantatagttataatgt

SEQ ID NO: 1883 - DNA, 385 bp, Zea mays
  Clone ID: LIB3115-017-P1-K1-E4
cccacgcgtccgcggacgcgtgggatctaccagcgactcagcgagcgagagcagcacacacgcagctagctaggagcagcagcagcggcggcggcgatggcggcctccatgatctcctcgtcagctctggcggtggcgcctcagggcctgccgcccctcggccgccgcgcctcctccttcgccgtcgtctgctccaagaagaagatcaagaccgacaagccctacgggattgggggtggcctgaccgtcgacgtctactccaaacttagaaagggcatgggctagggcgttaaccatttcgtctaccagttcggctcgatcgtcatcagtatcaggccaatctacaacgaggatgacttggtcttccacctgccgcgttttacat

SEQ ID NO: 1884 - DNA, 336 bp, Zea mays
  Clone ID: LIB3115-017-P1-K1-G9
cggacgcgtgggggatgatgggttcagccaagacgtgtaccagatcggccttctcctggccgtgatctacttcattgtacagggtctgaaggcgaccctgtgaccggctgcagcctgtcgaagaatgtagcctgtgtgcagtatacatgtatgtaactatgcctagcaacattataaaatacgggcatatatcatcctgccatctgacctgcgacagatttgtgacctttcaccactgctgtcggtgatattagtttggcacgcaagttgccatataaataaaaaaaaaaaataaaatatattaaatattaatattaaattaaaaaaatataaaaa

SEQ ID NO: 1885 - DNA, 224 bp, Zea mays
  Clone ID: LIB3115-018-C7-F2A
gacgaactaatttaattactattatatgggcgaggagagactgaaattaaacgcgtgtacaaatgaaacatctaggtgccggatactcaatcctttaacgaattaaaaactagtatatcttttaagtataccaagggtgaggcgccttttaacgactaatgaaacccccccggagattagcggttggctgatggcagggagagcacctgttataccaaccgggc

SEQ ID NO: 1886 - DNA, 651 bp, Zea mays
  unsure at all n locations
  Clone ID: LIB3115-018-C7-R1A
ggacgctggcntcatatcctctccagctttccgctccgcccttgtcgctcgtccagccaccgtgcccgtgcccgtgccgccgagaattctatccagaagcaagcaacaagagcccacccccgcttcgcgcgctctttcgtgccaggcaaacacagagcacagctatctgctcgtgtcccggtccgtccaactcgctcgctcgctcaatccactgatgatggggatcccgctggtgtgctactgcctcgccgtgcccaagccggtcatcgccttctgcaggctgctcagcgccgtcaaggacgccgccctgctgatgctggccgtggtggggctgtgccgcttcccgcccgacggcgcggtggacgccggccaccagcccggcgaggtgaaggcccggctccccgccgtggagtacggccagctcctggccgagcacgacgagcagcagcagttcggccaacaacgactgcaacggggacgccgcgtcgtcggattgcatcgtgtgcctcgagacgctggaggcggcggacgaggtgcggcggctgggcaactgcgcgcacgccttccaccgcgcctgcatcgaccgctggatcgacctcagccgcgcgacctgcccgctctgccgctccgacctcctgccgcgcgctacgg

SEQ ID NO: 1887 - DNA, 229 bp, Zea mays
  Clone ID: LIB3115-018-P1-K1-C9
gttattatgatctttatatatagttaggcaagttagctacattgacagtggaaggtggggtgcattttttgttctgtctgacccattttgtgaacatcctttttgacaacaaatactggcagaggaagacacgtcggcatttgtcatattttgttgcggcaaaccgacaatgtttatggaaaccaacaatttttgttaaagttattcaatcaaagaagtatatgtaccc

SEQ ID NO: 1888 - DNA, 55 bp, Zea mays
  Clone ID: LIB3115-018-P1-K1-D7
aaaaaaaaaaaaaaaaaaaaaaaaaaaaaaatttaaaaaaaaaaaaaaaaaaaaa

SEQ ID NO: 1889 - DNA, 252 bp, Zea mays
  Clone ID: LIB3115-018-P1-K1-E9
ttccactcgtcctgacgggcttctggtttcttttttatccaccgcaagccttgactacgcgcggtctcccttggaccagcggcggggcctttaggaggctcctatatgaggattgccaacatgtccgtccatctgctgggggctgcttcgggtgcgcctcatcattggctcccctcgctcggcgacattttctattagttcagcatcatcaccttctcctttaaggtcattgtaggcagctttctgtgacct

SEQ ID NO: 1890 - DNA, 295 bp, Zea mays
  Clone ID: LIB3115-018-P1-K1-F4
cgacacccgttccctatccggatgctatccctgttgacggcacttgactgccgcacgacggtgctctacttacccggggctaccgggtgactactatccaactggatgatgatagtagacatgcatcctgacttcaccctattattgctgccccgctacactcggatcgtgctcctactatggagtccatgtggagggaaatgctgaaaatcctttattctgtcttaggcagtatccaggacctggcgcaaaagtcggatccaggtcaactaaatatatggggcattgatcattg

SEQ ID NO: 1891 - DNA, 252 bp, Zea mays
  Clone ID: LIB3115-018-P1-K1-G7
cgttacgcaagcatcctccacctcctgccttgcctgcctgcctgcgtcgtagtttgcacaccgcaaccgtgttcttctctctgtctctctctctccctctcgtccctgagaaagcgccgccgctctacgttcccctcgcttgcgctcggtccggcaaaggcccgtccttccatggccatcgcctcccgtgcaacgaagcgcgcgctgtccaccttcgccgccgccaagctcccggaggaggcggtcgcggcc

SEQ ID NO: 1892 - DNA, 311 bp, Zea mays
  Clone ID: LIB3115-018-P1-K1-H1
gagagattaatgtaacgaaatgtccctcgctcactcattctgccttaattggtcccatgaatcgatccagactactatacactacatggtacatacacggaagaagaagaacaaaaaaaaaactcccccattttgttggatgcgtctgatccgatgcagccgtaccacgacgctcgcaatcgagaactagctcggtggattcgatcgatctatgagcacaaacagtcaaacacacagccacacaggatgactgatgatacgacacacgtcgtgggcggcagcatgcaaatcataagccaagcgcgccgagc

SEQ ID NO: 1893 - DNA, 351 bp, Zea mays
  Clone ID: LIB3115-018-P1-K1-H10
cggacgcgtgggctagaactagtccagccctgtccccatccagttcagcggccctggaagcgatgactcgaaccacaccttgatgctggaactcggtgctgagttatagagacgcgtccttcacttatttttgttcttacagttttgggagtggagacttggacactgggtctcctggagcagcctgcagtgcagtctccatattgtgaattgtctaataagaggttcgatgggagttttttgggtaccgactggatgtggtagaaaataagaactggttctagtttttttgggtatgatttatgcagcaactgacttgtcttgtagccctgattctgttcccatgtttgc

SEQ ID NO: 1894 - DNA, 318 bp, Zea mays
  Clone ID: LIB3115-018-P1-K1-H12
ttccgagggtacgacccacgcgtgcgtctagttgtagatcgagagcggcgcccttttgttaggttcattatcagcgtttttggggggggagaaaaacagctaaatacgctgggactatatggacagcgttcccaatcaaagttcatttacatctaatattacaacaacttttccttcacacatgtccatggagtgtatgaaggtgtcaggtcatggctaaggatcaacagccaatatacatggaagctcagaaggcacaacagaaacaagggtaaaatctgatgctattaacatcatatatgcaaaatcagcggttcc

SEQ ID NO: 1895 - DNA, 399 bp, Zea mays
  Clone ID: LIB3115-018-P1-K1-H6
gcctctaggagcgagagcagagcacacccttctagctaggagcagcaccagcggcggcggcgatggcggcctccatgatctcctcggcagctctggcggtggcgcctcagggcctgccgcccctcggccgccgcgcctcctccttcgccgtcgtctgctccaagaagaagatcaagaccgacaagccctacgggattgggggtggcctgaccgtcgacgtcgacgccaacgggagaaagggcaagggcaagggcgtgtaccagttccgtcgacaagtacggcgcgaacgtcgacggatacaggccaatctacaacgaggatgactggtctcccaccggcgacgtctacgtcggtggaaccactgggcttttgatctgggccgtcaccctcgctgggatc

SEQ ID NO: 1896 - DNA, 167 bp, Zea mays
  Clone ID: LIB3115-018-P1-K1-H7
ctcccctgtgctgcgcccctggtgttgtgattgggacctgctgtgtgcttgtgagtgatttttttttttgtagagaaaagaaagaaatatgggaggtttgttttgctctgcaaaaaaaaaaaacaaaaaaaacaaaaaatacaaaaaaaaaaaaaatactaacaaaa

SEQ ID NO: 1897 - DNA, 332 bp, Zea mays
  unsure at all n locations
  Clone ID: LIB3115-019-P1-K1-A5
cggacgcgtgggccgccctttttttttttttttttttttttnngtnaatttttttttttttgggttgggttttttttttgggggtgggggttttttttttttttttgggaaaaatacattttttgcttaattgcctgcttgcttcattggattttggcaccggggtgggtcgttacactcttaaaaaacatcccctatagttttttttgcagaccataataatttgtttgatggggtttggattcagcaacacaccctttaccaccttttttttttttttttttcccccccccccctgttcccgcttttggggccctttatattttgggttt

SEQ ID NO: 1898 - DNA, 320 bp, Zea mays
  unsure at all n locations
  Clone ID: LIB3115-019-P1-K1-A7
cccgcgctctgctcctcccagtcccagactcccatcctcgcctccgccatggccgccgtcggcatcccctcccctccggcgccacacgtcttcgcgcccgccgcatctccttcctcctccacgtactccacactgggcccccgccgtctccgcctctccacccgactcggactcgccgccgcggcggcgtcgtgccgtacgcggtgcgctgccgctgccgatggcggggccgcggcttcggagggtgcctctgcggtggccgagctggagggggaccccgacgctggcacagacgttgccggaggcgccgcgacctncac

SEQ ID NO: 1899 - DNA, 284 bp, Zea mays
  Clone ID: LIB3115-019-P1-K1-B1
gttttcatgggagtctaccacaccgtcttcgactatggcaagctgagggttggcttcgcagagtcggcctatggatatggtttggcagcaacccgtccagaggcaaacgcgtaatttgtgtgtttatgcgaccggcgatgtgtgtatatatgctactacatgtttagtgatgctttccgagacctgagacaacgcccgtctgttttaacgtggcgcaagaataattctggttctggatgtattctccgtacacaaaggcgtgtctgatgcaatggtgaccatct

SEQ ID NO: 1900 - DNA, 139 bp, Zea mays
  Clone ID: LIB3115-019-P1-K1-C12
ggctctgattttgttcagcaattgaagatcctgttgcgcactctcggaattgtgggcttggattaataatgccgggcttggtgttttcgttatgcataagtcttttaaatgtaatgtacttaattgatatggcatatag

SEQ ID NO: 1901 - DNA, 353 bp, Zea mays
  Clone ID: LIB3115-019-P1-K1-C6
actttgtgtagaaactgtgcagcttccactgttactgcatcaaacacagggctagaatcatggtatttcccaggaagcaactggggggctgagaccaccaggtatgcacagtactttgacagtatggttgcgatgtcaagatgtaacttgagtgcccccccaactctaggataaaggcattttaatgtttgcacctcgcagtaacacgttgcaatgtgccaaggcaaaacgatgtgtgtctgattctccttgtccaggtaacagttggtgcctgggtctgagagcatattgtgcctgcaagcccataagaggtcatgcacctcattgtacactaagactagttctagacgcga

SEQ ID NO: 1902 - DNA, 434 bp, Zea mays
  unsure at all n locations
  Clone ID: LIB3115-019-P1-K1-D6
aaccggttcgtcggccttccacgcaaacgaaatccagtagaccgacgcgaaccgagaaaaatcccacgaaatctcgtggccgcggcgaccggaagaagaggacgacgacggacggagcggcgatggcgtgccgcgcacttgccctccgctccctgctcctccccgacccgctacaccgncttccggccgcggcgccacctgtttggagagcgtcccgcggtggccgccgtccgcacctccgctgctgctccggcggcggnggcggngagcccgggcagccgccgcaagaagctgtgctcgaggccatatccaagatagcaaggtctaaaggaagggttgcactcacaacaaatatggtcatgggtggtactgtgactgacgatgcaagtgatgaatggcttgttctggatcagaaggtaattcctaccccacag

SEQ ID NO: 1903 - DNA, 332 bp, Zea mays
  Clone ID: LIB3115-019-P1-K1-D9
tcggctccaggacgtacgtacgtacgtttatcgtttcatcgatcgctagctagctgacgaccatggcgtccctctcctgggccggcatcacctccccttccttcacggtcgcgcccgctcgcgcagtggtcatcaggaggtccttcaccgtgcgtgcctctctccgcaaggccactgccaccgtcgccgtggccgttgccgtcagcgcactgcttgcctgcggcggcgccatgggccatgaggtgcttttgtgcgcaggctactgcagcctttgtcttttagcccagccagttcacctgcaaggtctgcgacatcttcatcttcaagaacaa

SEQ ID NO: 1904 - DNA, 390 bp, Zea mays
  Clone ID: LIB3115-019-P1-K1-E4
cggacccgtgggcggacgcgtgggcggacgcgtgggcggacgcgtggggccgcacacatcggagcaatgttcaccgcgttcctgtcggtggcgagtgccctgggcaccccgtcgcttttcgctgccatggttctttcattcctctcgaacctcatgggcgggaccacccactacggcatcggctctgctcccgtcttctacggcgccgggtatgtcccattggctcagtggtggggctatgggtttgtcatctccgttgtaaacatcatcatctggctcggggtgggcggcttctggtggaagataatcgggctgtggtgagcagagagcagcacattaactgcgacattccttttggttttctggtggttttttgtcgagtggggggag

SEQ ID NO: 1905 - DNA, 311 bp, Zea mays
  unsure at all n locations
  Clone ID: LIB3115-019-P1-K1-F5
tcgcccacgtcgtctcgaaaaataaaaaaaanaaaaattttataatttttaaaaaaaaanaaaaaaaaaaatgggaaaaaaaaaaaaaaataaaaagggaaaaaataaaaaaaaaaataaaaaaaaaaaaaaaaaaaaaaaaaaaaaaaaaaaaaaataaaaaaaataaaaaaaaaaaaaaaaaggggggggcccttttaagggtccaaatttttcttccgggtgattgaaaagtaatatttttttttttggggcccctaaataaaattaatggggggggttttaaaaacgggtgaacgggaaaaacctgg

SEQ ID NO: 1906 - DNA, 96 bp, Zea mays
  unsure at all n locations
  Clone ID: LIB3115-019-P1-K1-G5
naaaaaaaaaaaaaaaaaaaaaaaaaaaaaattaaaaaaaaaaaaaaaaaaaaaaaaaaaaaaagaaaaaaaaaaaaaaaaaaaaagaaaaaaaaa

SEQ ID NO: 1907 - DNA, 254 bp, Zea mays
  Clone ID: LIB3115-020-P1-K1-B10
cccacgcgtccgcccacgcgtccggggatggttgcggctcccgcgtttggttggcgcgggacggcaccccgcgcggtgccatttatttttcgccgccggcatcgtcgactttgcttttttgctgggtcgatgatgattctttagcgaacaagagttcatgatgacgcgtactatgtgaaacgtgtcgagctgactgttgaggctattacacaacttgaataatcaaaacggggatgggattggattggatcaat

SEQ ID NO: 1908 - DNA, 295 bp, Zea mays
  unsure at all n locations
  Clone ID: LIB3115-020-P1-K1-C1
cccacgcgtccgcccacgcgtccgnccacgcgttctttgcatcccctcccctccggcgccacacgtcttcgcgcccgccgcatgtagttnntnntccgtactccacactggccccccgccgtctccgcctctccacccgactcggactcgccgccgccgcggcgtcgtgccgtacgcggtgcgccgccgctgccgatggcggggccgcggcctcggagggtgcctctgcggtggcggagctggagggggaccccgacgctggcacagacgttgccggaggcgccgcgacctccac

SEQ ID NO: 1909 - DNA, 53 bp, Zea mays
  Clone ID: LIB3115-020-P1-K1-C10
cccacgcgtgcgatacaaaacatgcacttatttgaaaaacaacaaataaaatc

SEQ ID NO: 1910 - DNA, 319 bp, Zea mays
  Clone ID: LIB3115-020-P1-K1-D10
cccaaccgtgttcccgcgccgcccacgaactactctccggcgctgcccatgacaacggtgtcgagcgcgctctaataagagtgggcggcttcacgcggacgcacgctgtggaacaaaccatgaaacacatgaatctactatcgggtcgactaaattgaatcaactgtgcggctgtagaaaagaatggcacaggaaaaacattgaggttacccaactgaaacgggttggagtacatgccctttttgatagctggaggaatagtaaagagggccgaaccagacgacgtttagaaaagtggcgcaacctgaagggcaaatgg

SEQ ID NO: 1911 - DNA, 353 bp, Zea mays
  unsure at all n locations
  Clone ID: LIB3115-020-P1-K1-D6
atttcctttccttttgttctcaagtctttcttagaatgtcactcataactagtaatagtatttcttttccttttgttctcaagtctttctaaaatgtcactcataattggtaatagtatttcctttccttttgttcataagtcttctaagaatgtcagtcatagctggtaatggtaatcatggttgtaacctgatttgtagtgagagaccagtaaccatataatgagctatgttcttatgagataaaagctggagacttttttttgnaaaaaaaaaaaaataaaaaaaaaaaataaaatttattaaaaataaaaaaataattaattaaattaaaataaaaaattaaaaattaa

SEQ ID NO: 1912 - DNA, 385 bp, Zea mays
  unsure at all n locations
  Clone ID: LIB3115-020-P1-K1-D8
acgctgcgcgcgctggcgcgcgacgcctcttatcagcttcggctgccgcgggccggcacgtcggcgtctgcgtcgtcgtcgtggccgtnntcgggcgcgaggaccacctccacggccacggcaagacggccaaggtgatgcacctgctgctctggggacccaagtgaagcggcggcgagaggccaccgtaccgtcgggctctcccgccggcgttgctcgttttgctctgcctgcaatccgccccgcacggactgtactgtacctatacacctatatactacgacgtgcacctgtactacgacgtgctgctgtaccatactaatactagtgcgctgctgttcccttgccttcttgaaaaaaaaaaaaatttaaaaaaaaataatat

SEQ ID NO: 1913 - DNA, 390 bp, Zea mays
  unsure at all n locations
  Clone ID: LIB3115-020-P1-K1-D9
gcattgcgcaagcaatggagcttgcgccaagaatcgtgtccgaaaacttgagaacaattagttactagtggctaggaatacccttgccattctgagcaaacttgagcagtcaataagaaagcaaaagagagtcatcgactctcaattttattctctctacgctgtcttttgcctgtggcaatgaatagcgcattagcatcatagaagtattagcttggtcaatggaagttgttcatgcgcttcttcattgctgaaagtgttgtcatcttgtcgaactcacaataagcttagataagtgctgggtttgtgggaacatcgtttgtgcaatataaatgagatcttgcnccttanaaaaaaaaatatttattttataatntttaattatataat

SEQ ID NO: 1914 - DNA, 257 bp, Zea mays
  unsure at all n locations
  Clone ID: LIB3115-020-P1-K1-E1
cggacgcgtgggcgaatctcgatcttcgccgttggacgagacgatgatcgtctcgagtctcgaacgagccccccgtgtaagctcgagcgntnnntctgatgacgccccccgatggcccgatcacgttcgagagtatgagtacataggaagagtttggagagaaagggttgcattgatcgagatgtacaaaaataattaacttcgaaccaaagaagacttttgctttgtaaaaaaaaaaaataaaaaaaaaataaaat

SEQ ID NO: 1915 - DNA, 455 bp, Zea mays
  unsure at all n locations
  Clone ID: LIB3115-020-P1-K1-E7
gccctccattctttctttcactaccactgtttccttctcttttttttttctcaatgcttcatttccttttctggtgggctttcttcctgtctggggggtnnnnnacctgtgcatcaagaccaaggccacagtaaatgatcagtctgctaaaaagcatcagaaggtgaagagcattctttgccaggactgcgaaggaaatggggcaatcgtatgcaccaaatgtgaaggaaatggggtaaattctgttgactattttgaaggccgatttaaagctggatctttatgctggttgtgcagaggcaagcgtgtaatcctatgtgggaactgtaatggtgctggcttcttgggtggatttctaagcactttcgatgaaactgcgcaatagtcatcggtttagcacttttgatggaactgccccatagtcattgggttaatttatggttaagttactttga

SEQ ID NO: 1916 - DNA, 92 bp, Zea mays
  Clone ID: LIB3115-020-P1-K1-F11
gtaaaaaaaaaaaaaaaaaaaaaaaattaaattaaaaaaaaaaaaaaaaaaaaaaaaaaaaagaaaaaaaaaaaaaaggggggggcgtttta

SEQ ID NO: 1917 - DNA, 101 bp, Zea mays
  unsure at all n locations
  Clone ID: LIB3115-020-P1-K1-H3
ntattaataatttattaaattaaaattaaaattttatttatataaaaaaaaaaataaaaaagggggtagatttataaataaaaaggggaattttntcgttt

SEQ ID NO: 1918 - DNA, 264 bp, Zea mays
  unsure at all n locations
  Clone ID: LIB3115-020-P1-K1-H5
gtcggctcgcctgctaagtagaaagcacatctttgtttctttacaccggccacttcataacgtggctcatcacactggggtcggagaggccacctcggcgcttgcaagggagctgatgaagctgttaagattattttggatgctgtcgagcaagttggtggtatttaccttgttaccgccgatcatggcaatgctgaggatatggtgaaaaggtacaagtctggcttngcctttctttgcatgattgatcctattttatgattt

SEQ ID NO: 1919 - DNA, 340 bp, Zea mays
  Clone ID: LIB3115-021-P1-K1-A3
aggagctcaagaacggccgcctcgccatgttctccatgttcggattcttcgtccaggccatcgtcaccgggaagggcccgctcgagaacctcgctgaccacattgccgaccccgtcaacaacaacgcttgggcctacgccaccaacttcgtccccggcaagtgagggaggcgccgccggtgacctttaggtgtccggatgcatgtgagcgcacgctggttttcggtttgtaccatgatgtaaactattgttcaatcgacaaggaataattgtgttcattgtcattatttttcccctctctttttcgttcctgccgattttatctaaatcaggtgtttgat

SEQ ID NO: 1920 - DNA, 53 bp, Zea mays
  Clone ID: LIB3115-021-P1-K1-B1
actagttctagatcgcgagcggccgcccgtgtttttttttttagtctagcgct

SEQ ID NO: 1921 - DNA, 276 bp, Zea mays
  Clone ID: LIB3115-021-P1-K1-B12
cggacgcgtgggcggacgcgtgggcgttctcttttgcaccgaggccgagagcaacatgaacgacctcttgtgcgagtacgagcggtaccagtactccactcgcgacgaggagggcgagtacgtggacgaggaggagggagattctcacgactagaataggctgcttcacattcagtcacctgtagtcatgaaaaactaattcatttgctgctttttattcgtcgtattagtatgtaggttcggtaatcaatctgtgcgaggggtttagtttcgttt

SEQ ID NO: 1922 - DNA, 346 bp, Zea mays
  Clone ID: LIB3115-021-P1-K1-B5
aacccagccgaagcgcgagctgagcaaggcggaggcggcgggaccggcgatggagcggctggagcggatctttggcgcctccggcatggggcatccgccgacggactcgccgctgctcgactcctccgagcaggtctacatctcctccctcgcgcttctcaagatgctcaagcacgggagggccggcgtgcccatggaggtcatgggtctcatgctcggcgagttcgtcgatgactacaccgtcagggtcgtcgacgtcttcgccatgccgcagagcgggactggggtcagcgtcgaggccgtcgaccacgtcttccagacaaacatgcttgacatgctcaagcag

SEQ ID NO: 1923 - DNA, 349 bp, Zea mays
  Clone ID: LIB3115-021-P1-K1-C10
gcgagcgcctccctttttttttttttttgctacaaaaggcctggcacagtcgcacacaggagaaactgatgctcttggtagtggtcttgggaatatgtacaagacgcccggggtaagtggcgccgaccgaggagaaacaacttgctacacctcaactccgatcctctccgcgatctccttgaaggagtaaacgtcactgccccaaagccaggcatcgcagcctgcatccctcgctccccataagtcgttcctacggtcatcaccaatgtgcaccgcttcttcaggtttcactcctagcagctcgcaggccttcaagaatattgtggggttcggcttttctgctgcaacc

SEQ ID NO: 1924 - DNA, 451 bp, Zea mays
  unsure at all n locations
  Clone ID: LIB3115-021-P1-K1-D1
cccacgcgtccgaagatccatgggatacggcgaggatgatctccctcttgtatcatttcagtctgtctccaaaggatactatggagagtgtggtaaaagaggaggttacatggagattactggcttcagtgctccggtaagagagcagatctacaaggtagcttcagtgaacctgtgctccaatatcactggtcaaatccttgcgagcctcgtcatgaatccaccaaaggttggggacgaatcatatgcttcctacaaggcagagaaagatggaatccttcagtctttagctcgccgtgcaaaggcactggaagatgcattcaacacgcttgagggattttcatgtaacaaggctgaaggagcaatgtaccttttccctcagatccatctgccacataaggcaattgaggctgctaaagctgncaagatagcacctgatgcattctatgcg

SEQ ID NO: 1925 - DNA, 297 bp, Zea mays
  unsure at all n locations
  Clone ID: LIB3115-021-P1-K1-D11
nntccggaagaagaagaagaagaaggccgccgttgttttcttgccaaaattaaccttttttaggttggggaccccctgtcccgtgtggaagtggttaaaggccaccgctcccaccccgcgcttttcttgaccgatcttctttatccctcccttaatcccccggcgctcatctgtttaagtggggtggaagccccgttctggtttcgattcttttgtttcttcttttttgtcgtcgcctgcttatatatcatttgcgagatcttcttgtgtttaatatttctctcgcttcctggtttt

SEQ ID NO: 1926 - DNA, 364 bp, Zea mays
  unsure at all n locations
  Clone ID: LIB3115-021-P1-K1-D2
cccacgcgtccgcaatggtgttatctactatgctgtttcatcatttggaaaacatcagtggatgaatcctgtgttaaccaagaatatcactgtggtggcaagcagtccaaattcaaggcacacagatccaaaggctttggtttcaaagaattaccaggggacatgttttgctgggccttgtgttgaaaatggcaagagggtttcttggtggatggtagacatcggacaggagcaccagttgatgtgcaactactacacggtgaggcaggatggctccacagcattcatgaggtcttgggctttccagggatccatggacggccggtacttgacaagcctncgtgtccacgacagcgaccctacc

SEQ ID NO: 1927 - DNA, 271 bp, Zea mays
  Clone ID: LIB3115-021-P1-K1-E2
atcgacgtcaagttcaccggcaaggccaccttctactaatcacacttcacgtacgccgcacgccccagccgggatccaaattaaagaacttcttcttctattaattacagtatattgtaatttggctgctggtacggtggtggcatgatttgagatgtgcatgatgatccttgtgtaattttattaccaagtctcttcttattaaataaaataaaaaaaaaaaaataattaatttatttattataaaataattattaaattaaatattttg

SEQ ID NO: 1928 - DNA, 356 bp, Zea mays
  unsure at all n locations
  Clone ID: LIB3115-021-P1-K1-G5
acttgcggtctgtaaggtgattgaaatgtgtcttataaatcagacacccggggcctttccccctgtnggttgttgctgtgggtactttagttgcttcattagaaggctcgggtgcccggtcggttttgttgtggaggtttgtcagggtttcaactggtagagtcgttttaccgtcatagatggtgttatgctttattttgtttttttctgtttttcctatctgttttattttttaatgttttttgggcggtcgctctttttgttcttattttttttgcgcttgggttgctgatttatttatgtttttttttgttgttgcttatttgttatttgtgtggtcggcgtttttctttctt

SEQ ID NO: 1929 - DNA, 302 bp, Zea mays
  Clone ID: LIB3115-022-P1-K1-A11
ctgcatcaccagtggtgctgcatggaagtggtcagtcttcaaggtcagccggttggatcatttgggctcttgctcccaccgcctctggtggtaggcatgaagtcgcaggtgttgtcgggagttgggttttgcctccaatatagcatgaatgaattatattgttttacctatttgatgaggtagaagaaaagaaccttggaagatagggaatgtgttggtttttgtcaaagcggttcctgtcctgtatgacatgttgcatgagtattgacacaaattatattatataaaaataaaaaatattg

SEQ ID NO: 1930 - DNA, 285 bp, Zea mays
  unsure at all n locations
  Clone ID: LIB3115-022-P1-K1-A5
accacgcgtccgcccacgcgtccgcccacgctttcgttcacgcgtccgcccacgcgttcgtccacgcgtncgctcagaagctgagcatgtagtgtgcttgttacacccatgatgggtacattgagaccatttatgttgtattggtaatatcttgtttgattgcccaattaacggggtgagctattgtttcatcacaacatcgatgtgttagcagataaccacattgccgttttaagcaaacattgggtgcgggtagaagaaaacaaaactaatgtccgttgcaat

SEQ ID NO: 1931 - DNA, 115 bp, Zea mays
  Clone ID: LIB3115-022-P1-K1-B5
cccacgcgtccgaataaaaaaaataaaaaattttattttaaaaaaaaaaaaaaaaaaaaaataaaaagatgaaataaaaaaaaagggaaagggaaaaaaaaaaataaaataaaaa

SEQ ID NO: 1932 - DNA, 405 bp, Zea mays
  Clone ID: LIB3115-022-P1-K1-C8
aacaggcctcctgccgacaaagtgctggataacttaatttacaactacagtccgacatttaccgggaaaaaatcgaaatcgggggaggaggtctacatcttctcctgagactggattgaacgcctgagtgtcttcaggaatctgtagttctgcactacattgctattgtagtgtaaccgtgcattagtattacccgtggtaccagaagttgtatttgtatagattcgttggactgcctgtattgcagtaacctttccaccgtatgggtggctctatagaatgcctataagcagcgcaataataatgataatgtaagactgaaaaaaaatacttgtatggagattttctgaatttaaaaagttctccaaaaaaaaatttttttttatcactttttttatttctttg

SEQ ID NO: 1933 - DNA, 52 bp, Zea mays
  Clone ID: LIB3115-022-P1-K1-C9
tcgaacaggcctactgccgacaaagcgcttcatatttttaaattacaactac

SEQ ID NO: 1934 - DNA, 385 bp, Zea mays
  unsure at all n locations
  Clone ID: LIB3115-022-P1-K1-D3
cccacgcgtccgcccacgcgtccgccgccctttttttttttttttttttttttgacagcaaggaaagcccattcttatggtagggacaggcttacaacacagaaatgaaagcagagngacccatccacagcagaagcagatggaagcactggagcagcaccaggcaagagatcgcattcacctcgcatggcgccaaccacagcgaaacaagagaggagagagggccacaacaactcacgagacgaccgcacaggaaagaaccaaagctgctgcattcaagtgccagctgccagccgggacacggtggacgcatgctggtcgacgactccctatccctagcagcagccacggcccacggccaaccgggatacggctcccttcattc

SEQ ID NO: 1935 - DNA, 74 bp, Zea mays
  unsure at all n locations
  Clone ID: LIB3115-022-P1-K1-F9
aacggccacacgaacgcacagagaanccacaaggaagccaaagggaccgcgccaaaaaaaggagggggggggca

SEQ ID NO: 1936 - DNA, 461 bp, Zea mays
  unsure at all n locations
  Clone ID: LIB3115-022-P1-K1-G11
ccgtccggtggcaccttggagtngcattacnnntatcaagtataaaccttgtgcatgtnnccttgattattttcggtatcgtaggtgatgatgccaattgacgtcgcagggcgaggtgcgaatatngnngtggtggagaaggctttcggcgattaccctgatacgaaccaagggcgttctaagtttgtcattaatgcttattttggtcatntgggcaccttaagtttnngcacctcatttggttctgtatatatgtgggccttgtgcatttgtgcttggcgtatttgcatttgcagtgaataatttaaatcttcgcgttgggnttggtgacaattgttgggaaccggatttgaattggggtttatgcttgccatcttctcatatctcgaactcagctgctgtttcactgagtaatgtacatttccctggtaatggtacttgtgcactctgctgctttatgg

SEQ ID NO: 1937 - DNA, 374 bp, Zea mays
  Clone ID: LIB3115-022-P1-K1-G3
cggacgcgtggggtccctcaagtttttgtccatggaaagcacctgggtggttctgacgatactgttgactcctacgaaagtggaaaactggctagacttctaaacatcggagtcaaggacgacctttgagtgacatgctacatcggtcagcctgttcgtttggtttcaatccgtactggcttctactacttctatattggttttgtctctatggattacagctacaacagtctaaatagctgattttaatccgaagcgaacagtccaaacagtctcttgttttgagttaccaagggatttttagtgtgactctgataaaagatatgtaactgaatgttttattatagtttataccatttgaaccgtactttaac

SEQ ID NO: 1938 - DNA, 62 bp, Zea mays
  Clone ID: LIB3115-023-P1-K1-G5
gccgtgaggagcgccgcaggcaagtccgcgtgggtcgtgctccagctcttcttctacgcgct

SEQ ID NO: 1939 - DNA, 142 bp, Zea mays
  unsure at all n locations
  Clone ID: LIB3115-023-P1-K1-H4
ttttttttttcaaacatatttttttgnnccataagcatgcatgtgcagcttcatatgcataagctctgccggcttgtgatatacatggagctgcggnggttgtgcatttttttgtaaccatgtaccagtattattgtgtcat

SEQ ID NO: 1940 - DNA, 409 bp, Zea mays
  unsure at all n locations
  Clone ID: LIB3115-024-P1-K1-A2
acctgcatgcgaccttctgtgtggcggcggcgacccctacctgggagttgttaataaagagtaaatgagcgtggtggatggcttttactagtcataagcggaccttgttggtaggcacttgctggagtagttgcttcgaacttctttttacgtgttagatgaggtaaaaaaacaattttgtgttattgactctgctgtgagcgagtgaaccttgcgcattttcgttatctcaaatggatagatctattttacgcttgttttgtgaaaaaacaaaancntncttattttttatttttttatttttacatctatccctattttttttnttttatatttgtttttcaaattaattaatatcaaaactaaaccaaagtgtgttttttaaaaaaaaaaaaaagggggggctttt

SEQ ID NO: 1941 - DNA, 285 bp, Zea mays
  unsure at all n locations
  Clone ID: LIB3115-024-P1-K1-A8
accgccgatggggaggcctgcgacttgcttggtggcttacgcgtgcaancgggcccatgttcnccggaggcgcaagctccgcctttcggcggcggggcggcggcagagccaggagtgttgnngtcggggtggacacgggaccctacctgtcctacgacgagggccaaagacgtngtgttcccgggcgaaggcgtgccgatgaccccttggcggcgagttctgcgaggcgccgtaccaggacggcgtcttcaggagctggcgcacgcctgaagacctgatccatca

SEQ ID NO: 1942 - DNA, 460 bp, Zea mays
  Clone ID: LIB3115-024-P1-K1-B6
ggcggacaaggtaagcagcaatcgcaggaaccttagtgccgccgaacccgcaggaatgggtttcgacctcgtcgccggtgggaggaataagaagaccaagcgcactgcgcccaagtctgacgatgtctacctcaagctcctcgtcaagctctaccgtttcttggtcaggaggaccaagagcaatttcaacgctgtcattctcaagaggcttttcatgagtaaaaccaaccgaccaccaatctccatgcgccgccttgtcaagtttatggaaggaaaggagaagaacattgctgtcattgttggcacagtcacagatgacaaaaggatccaggaggttccagcaatgaaggttactgccctgaggttcacggagacagcaagggccaggattgtcaatgctggtggcgagtgcctcacatttgaccagcttgctcttcgtgctccacttggcgagaacacg

SEQ ID NO: 1943 - DNA, 364 bp, Zea mays
  Clone ID: LIB3115-024-P1-K1-E1
cggacgcgtgggccagcgccttggtctcccaaccattcgctgcaaagttcgtcgtgggacaaaggaaacactgaggcaccatatgcgatgagttgaattttattcagttacaaagtgatctgtgtatctagagctaaaacagaagcttccatggtcttttcgtcgtctcatctgtaattctccatacctgtaaatgttgtccaaacagagtggtgaatagtacttttgtacccagcagaaacaggaaatgttattttttcctacaacactcttttcggtcagtggatggatgagtaccacccgctcaaaagaacaaatgctgtgtttaatgggcaagaaacccatcagcggtggaataacacat

SEQ ID NO: 1944 - DNA, 173 bp, Zea mays
  Clone ID: LIB3115-024-P1-K1-E9
cgtggagggcggtgacgccggcaaccgtgagaactacatcaacgagcttatcaagaggatgaactaggctctctcttgtatcctgtgagaatgcttttctgtgtcagcgtggttgtttttgctctagtaagttgacggataatgatcgatatgcaaattttttttggtgttcc

SEQ ID NO: 1945 - DNA, 382 bp, Zea mays
  unsure at all n locations
  Clone ID: LIB3115-024-P1-K1-F5
cggacgcgtgggcacgtcctgcgccgcgcggtttgttggtcaaggtgcccccacgcgccgggggtggcgccgccgccgctgccgcccaccgccgcccgcgtgcgcccaccgccacctgttgccgcctaaggggaacgcctccgttataacccaacgcttcaccatccatgccgtcctccaccaccgcttcaccatcccctccaggcccaccaccaccatggcctctccttccccttcttcccccgcccgcgcctccggccgccgcgtgccgccgccgtgctggacgaccgacgagaccctcgcgctcgcgcgggcctacaccgngcgccgnctcgccgtcggccgggagcacctgacctccaccgactgggccgtcgtagcc

SEQ ID NO: 1946 - DNA, 460 bp, Zea mays
  unsure at all n locations
  Clone ID: LIB3115-024-P1-K1-G1
gaattcttaattcatgagttgtagggagggacttatgtcaccacaaacagaaactaaagcaggggttggatttaaagctggtgttaaggattataaattgacttactacaccccggagtacgaaaccaaggatactgatatcttggcagcattccgagtaactcctcagctcggggttccgcctgaagaagcangagctgcagtagctgcggaatcttctactggtacatggacaactgtttggactgatggacttaccagtcttgatcgttacaaaggacgatgctatcacatcgagcccgttcctggggacccagatcaatatatctgttatgtagcttatccattagacctatttgaaaagggttctgttactaacatgtttacttccattgtgggtaacgtatttggtttcaaagccttacgcgctctacgtttggaggatctacgaattccccct

SEQ ID NO: 1947 - DNA, 439 bp, Zea mays
  Clone ID: LIB3115-024-P1-K1-G6
caattcaacaaagacgtacttacttgcacaatactatagcgagctgtgtgtgtgtgtgttcggcatttcctcgatcatggcgaaggcgcaggcgcaggtggcggcgaggttcatgatggaggcgccgccgccgcaggtggtgtcggtcatgcggcggaggaaggcgccgaggagcctgagcaccatcgccgaggacgacagggagatgctggcgccgtgcgggtcaccgtcggaccacggccacgcgcaggcgcaggtggcggcgaggttcacgacggaggtggcgccgccgcatgtggtgtcggtcatgcgacgaaggaaggggccgaggagcctggacaccatcgccgaggacgacagggagcagcagctggcgtgcgggtcgccatcggaccacggcctcgcgacggcgtggtcgtcgctccagaggataccgacg

SEQ ID NO: 1948 - DNA, 302 bp, Zea mays
  Clone ID: LIB3115-024-P1-K1-H2
cggacgcgtgggaaaacagaaggaagctgaagttagttatagcggccggcctaccgaacgcaacgcaggcagaggaggaggattacagatcgaggcgtacggacgtcgagcgagaagtggtatatatggcagcgggaccgccgtcgtcggtgagggcggagcgcgtcctgcgggcggcgtgcgcggccatggcggcggcgggggcgctgctgctggggttcagcgcgcagaccaagaccgtgctcttcatccagaagaaggccgtccccaaggacgtgcaggccctctgggtgctgatcgta

SEQ ID NO: 1949 - DNA, 441 bp, Zea mays
  Clone ID: LIB3115-025-P1-K1-A10
cccacgcgtccgcccacgcgtccgactagttctagatgacggcgaccgccctgttggctggggtggcggctcccctgggcgcctactactgctgctacctcttctgagggtttccttctgctgctgctgccgtctaggctgagtgacctatttctatgtatgtgacgattcaagttaacttgtggagcgcggctgcgcgtgcgtttgtgcttgtgcagtcgccactgttgctgtgttcttgcgatactcttgtcacttgagaggtggtgttgtatggactggtttagctggctcccccgtgcttccatcgacccgcttcgcgcttcatgtttactacttgcgatactgttgttacttgtgattgatgatgataaaagccacggcctgtgttactactgctgtaacaagtccgacagaagaaccatccaatgcaagcccacg

SEQ ID NO: 1950 - DNA, 374 bp, Zea mays
  Clone ID: LIB3115-025-P1-K1-A11
cggggcggcccacgcgtacgcccacgcgtccgcccacgcttccgactagttctagatgacggcgaccgccctgttggcgtggggtgtcttttcccgtgggggcctactactgctgctacctcttctgagggttttcttctgctgctgctgccgtctaggctgagtgacctatttctatgtatgttgactattcaagttaacttgtggagcgcggctgcacgtgcgtttgtgcttgtgcagtctccactgttgctgtgtttttgcaatactttttgtcacttgagaggttggtgttgaatggactgtttttagctgtctccctcgtgctaaccatctaccctcttcgcgcttcatgtttactacatgcgatactt

SEQ ID NO: 1951 - DNA, 451 bp, Zea mays
  Clone ID: LIB3115-025-P1-K1-A5
gtcatgcttgtcatatcatggcacatgaaagccgccacaatgtgtgaatttactcgtcaggaattgagttggtggactgcaatgaattggggtagattcaatcgagaagtttcgtggaaaattaccatcattacgagctgagctaaaagatgacaataaattccgtgatatatacaactttgcattcacttgggcaagggaaaagggtcaaaagtctctctcactggagactgctattggaatgtggcagttgctatttgctgaaaggaactggcctcttctggatcattggtgtcagtttttacaggtcagacacaataaagccatatctagagacacatggtcccagctgctggaatttgtgaagacgaccgatccacagttatccaactacgacgacgaaggtgcctggccctacctcatagacgaatttgtggaatatctgactgag

SEQ ID NO: 1952 - DNA, 53 bp, Zea mays
  Clone ID: LIB3115-025-P1-K1-A8
gggccgggcaacacatataaactttccactcttattaacccttttttgtctcc

SEQ ID NO: 1953 - DNA, 420 bp, Zea mays
  unsure at all n locations
  Clone ID: LIB3115-025-P1-K1-B12
acgcccacgccgtccgccagtcgcgtgcgccactcggtctgacccgtaccccccttccnccggagaggcgatgggcgacgtgagcctgaccggcgggcgcgagctgctccgcgtacccgacggcaccgacctcgtccaagncccatctancgtctccgtccggggcaagggtcttacgacgtcaccttccggcccgcggctttctacccggccccggcggcgcctaacgccgtcttcgcgggccgcgaggccagccgcgccctcggcaagatgtccaaggacgaggccgacgtctccggggacctctccgggctcaccgacaaggagctcggcgtcctcgccgactgggagaccaagttccaggccaagtaccccgtcggtcgccgactcgccgtcgacgcctgaactcggcagtctcgg

SEQ ID NO: 1954 - DNA, 436 bp, Zea mays
  Clone ID: LIB3115-025-P1-K1-B6
tgacagtttctcagaaccacagcctcgatccatcgttggagaggatgggagagcctacgcggcaggggctggcggaggcggggctcgccgttgagtcggcggagcagcgcaaccgcttcctggtgctgcggctgtacgaggcgctcggctcccgcgacgcgcgccgggcgcggaagctgctggcgcccgacctcgagtggtggttccacgggccccccacgcgccagcacatgatgcgcctcctcaccggcgcggaccaccagcgccacatgagcggcggcgggttcgccttctccccgcgctccgtcgacgccttcgggtccaccgtcgtcgcggagggcggcgctgactacgcgcgccagctctactgggtgcacgcctggaccgtggggcccgactgggtcattacacagctcagggagtaccttaacaccga

SEQ ID NO: 1955 - DNA, 363 bp, Zea mays
  Clone ID: LIB3115-025-P1-K1-B8
gcttggctgtctcttcctattcggcgaggtttgcgctccccaggctccgcgggcgccgggggttcgccacctccgcacggggcgccgtgatggggaacccaggccccggcgccgttgacgccgacgtcgggatggacgccgtccaacggcggctcatgtttgaggacgagtgcattttagtggatgaacaagacaatgtcatcggccatgagtccaagtataactgccatctcatggagaagatagaagctggaaatgtcctgcacagagctttcagtgttttccttttcaactccaaatatgaattgctactacagcaaaggtctgcaacaaaagtgacattttcacttgtttggacaaaca

SEQ ID NO: 1956 - DNA, 344 bp, Zea mays
  Clone ID: LIB3115-025-P1-K1-C1
cccacgcgtccgggcttctcctccccctcttaccaagtcctcctcgggttagggttccttggggtgttgtggaggggcgatggcggcggctgatgtggagtaccgttgcttcgtcggcgggcttgcctgggccaccagcaacgagtcgctggagaatgccttcgcctcctacggcgagatcctcgactccaaggtcatcaccgaccgggagacggggaggtcccgcggcttcagcttcgttaccttctcctccgagaactccatgctcgacgctatcgagaacatgaacggcaaggagctcgacggccgtaacatcaccgttaaccaggcccagttccgtggcg

SEQ ID NO: 1957 - DNA, 272 bp, Zea mays
  Clone ID: LIB3115-025-P1-K1-D1
ctagaactagtcagagggtttatcttcgttcgtctcgtgtttgttgttgcccatctgtgtgtttgattgcaaggtcgctctgtgtcagttgttagtgctgtgttcatcctcggctccagcagacccatgcatcaaacagcatggactgcggatcgatggatgctgttacccccgtcaggctttattctaagttaatcttaaggaaaaaatggtgcttcttggtgctgcaaaaaaaaaaaaaaaaaaaaaaaaattattaaataaaaaataaa

SEQ ID NO: 1958 - DNA, 399 bp, Zea mays
  unsure at all n locations
  Clone ID: LIB3115-025-P1-K1-D12
acgggatgaggctgaggtggtacaagcgcgaattcttggagacgtacctgcagttcatgttcaggtacctcttctacccagggatgatgttctgggcgccattcgtcaacttcaggaagttcccgagggatcccaccatgaagtacccttggtccaagccgaaggagggcacgccgctgttcaaagacagatacccgcctatagactcctagatacagccttgatgcttgtactcggctcgtcgcgcgccacgggcatgcaggcagcagcgaaaaggccggtttcttcacctaaaaatctgtgtaaaacattactatatatcacacagtctaataatacccgtgctagtacatgggaaaggttactatcnnananaatttttttaaaaaaaatttttta

SEQ ID NO: 1959 - DNA, 383 bp, Zea mays
  unsure at all n locations
  Clone ID: LIB3115-025-P1-K1-E12
ggagaatgtggcggctgcactggagttgtcaacatcaggcatcgatgaagaacttatgcgggaagtttaagcaattggggagcctgtnaanaatctgacatggcctagcggcatccaacaagcctgacggccagaagcagctttgcctaactggagaagctggcatgatgagcgtataactgctgttcgatgcagtcaattgtgcacaccagcatcattggctgctgattgcaaaatttgcaatgcccgtatggtcattgatggaaggggacgattgggactgttgggcttttatggttgggccctgtggtaatttagacatgtcgaataaacgcgatacgagcaatgaaagatcgatgctgatcattgaataaaanaaatta

SEQ ID NO: 1960 - DNA, 100 bp, Zea mays
  Clone ID: LIB3115-025-P1-K1-E8
gatgtcgcaatttgttgcttgatcgaatgatgtttcaacctcccatctgctagctgtgatacgcattggccccggctgataattattacctattcctggg

SEQ ID NO: 1961 - DNA, 444 bp, Zea mays
  unsure at all n locations
  Clone ID: LIB3115-025-P1-K1-F12
gtggaggactgcgtctgctgcgccaccgtgcacggcatcggcccgtcgatcggcgtgttcgactcgatcaaggacggcgggctggactgggcgtgcgtctacccttctcccctgcactcgaggaagcaggtccaggagatcttcgacaaggtgaagcagattttgcgccatgcggctgcggctgaggaaaattttgaagactgcacctaacgatgtcgtcgggagctttatggggcatctcggtagagctattgctccatttgtgtctttgtgaggcattcttttctcttgagggttgtaatgtaagtatagtgaaatataactgaacatgcatcacttcatgccttgtgttagcctttttattctttcaattctcggcgcaatgaaatttttccggtgggaggctggtagctttatgatcctnaccgtgagttttgttacttt

SEQ ID NO: 1962 - DNA, 57 bp, Zea mays
  unsure at all n locations
  Clone ID: LIB3115-025-P1-K1-F5
cgggntcgagcccagcgcggntccgcccacgccccgtccgnnattttganngcattc

SEQ ID NO: 1963 - DNA, 356 bp, Zea mays
  Clone ID: LIB3115-025-P1-K1-F7
gctggccacgctgcgcgcgctggcgcgcgacgccgcggagcagcttcggctgccgcgggccggcacgtcggcgtcggcgtcgtcgtcgtcgccgtggcgcgggcgcgaggaccacctccacggccacggcaagacggccaaggtgatgcacctgctgctctggggacccaagtgaagcggcggcgagaggccaccgtaccgccgggctctcccgccggcgttgctcgttttgctctgcctgcaatccgccccgcacggactgtactgtacctatacacctatatactacgacgtgcacctgtactacgacgtgctgctgtaccatactaatactagtgcgctgctgcttccttgcc

SEQ ID NO: 1964 - DNA, 58 bp, Zea mays
  Clone ID: LIB3115-025-P1-K1-G2
gtacaatcttacattgttcatactgccttcttgcaatcatgcaatgactatctttagc

SEQ ID NO: 1965 - DNA, 339 bp, Zea mays
  Clone ID: LIB3115-025-P1-K1-G8
cccacgcgtccggaatcgacgcagacaaaagtcctgagccgcacaagacgccaaagcaactgggtgctacacaggtggatcctgtcccagagagatgcccacaagcttcaaggggcacacagtgcaaatcacaaggcgggtcgactaggagctgcaagaaggtccacaagcaaggaatggcgctgggcaggtccgtggaccttaccaagttcaacggctacacggagctggtggcggagctggacgagatgttcgacttcaacggcgagctgaaaggctgtagcaaggagtggatggtcgtgtacaccgactacgaaagcgacatgatgctggtcgggg

SEQ ID NO: 1966 - DNA, 399 bp, Zea mays
  Clone ID: LIB3115-025-P1-K1-H5
gcgcccacgcgtccgcacttcctgagcttcgtgcagcggttcggcaagtcctacaaggacgccgacgaggacgcgtaccggctgtgcggtgtaaggccaacctgcgccgcgcgcgccggcaccagctgctggacccgtcggcggagcacggcgtcactaagttctccgacctcacgccggcagagttccgccggacctacctcggcctccgcaagtcccggcgcgctctcctcagagaactcggggagtcggcgcacgaggcgcccgtgctccccaccgatggtctccccgacgatttcgactggagggaccacggcgccgtcggccccgtcaagaaccagggttcgtgcgggtcgtgctggtcgttcaacgcgtctggagcgcttgagggtgcgcact

SEQ ID NO: 1967 - DNA, 267 bp, Zea mays
  Clone ID: LIB3115-025-P1-K1-H6
ctcacgcttccggtccgtgttcgtggaggtaatgtgaaatcggacacttctcagtaaatcaggcgcgggcaccctggagtgaggtggatccaacacgctaatcagcacggtgcatcctctccacccattcccgcagccagatgggccagtcgacggctcagataatagactggacgtctggatccaagaggtttgatccctttaatttgcattgaagtgccagcttttggtcaggaaggtgatgctggatgatgctgacggactttg

SEQ ID NO: 1968 - DNA, 367 bp, Zea mays
  unsure at all n locations
  Clone ID: LIB3115-026-P1-K1-A12
gctgctcttcgcgagatcaaggagcgcatcatgaagaccaaggatgaaagaaggcgaaaaaggctgaggtgaccaagtcccagaaggcacagactaagggagcggtccagaagggttccaagggccccaagttgggtggtggcggtggcaagcgctgaaagaacctaagtgtcgttccttgaccttgcaattgctcctccatagcccaccttgttgcaccaacgccacttttgtagtacctcggttaattttgcattttctttcagagttgtttgtgggttttgagttccatctcaagagagttgagtttatttatctttatattgggtgnaaaaaaataaatattaaaaaaaaattaaatttatat

SEQ ID NO: 1969 - DNA, 269 bp, Zea mays
  Clone ID: LIB3115-026-P1-K1-A2
tcgctcacgcgtacgtgagagggtgcggagagaatatgcgcgcgacaatcccaaccctggcgctgctggtgactccgaggctccccgggctcgccgtgccgctggctggaggccgcctccgcgtgggcggtcgtcctcggacccgcctccgcgtggcggcgccgacgtccgtcccaggggaagcggcggatcacgcagagccaagcacgtctgcgcccgagtacggcgagaagttctcgcggagggatcactggtacccggtctccctc

SEQ ID NO: 1970 - DNA, 354 bp, Zea mays
  Clone ID: LIB3115-026-P1-K1-A7
tcgcccacgcgtacgcgagaggcgatggcagcagcatctttgcgctgttcaaggagggaagtactgttctatactgagatgcaaatcgcgagtccatgatcgttgaagctgaaccgtgaagtagttatactgcttatgcttttctttcttatagtaatatactccggctcaaaataagtcaatttctaaaaatacttaaaggcaaaatatcttaaagttggacaaatttataaggaagggacccgcggttattgttttatggccaccaaaggagtccatattgaaaatattttaatggggcttaagggcccctaaaaaaaaaaaaaaaaaaattaagggggcggcggttttaaa

SEQ ID NO: 1971 - DNA, 234 bp, Zea mays
  Clone ID: LIB3115-026-P1-K1-A9
ctattttttggcgcctttgcctcctatgatcggcatagagacatgcggatggatattgatgagatgtcctatgaggaagtatgggccctggaggagagaataggctctgtgagcacagctctttcagaggagcagttcacaaaatgcctcaaaagaagcatatatagtcaggtcgctctagaagtgaacaaatcaaccgttgatgacatgaaatgcatcatctgtcatgaagag

SEQ ID NO: 1972 - DNA, 351 bp, Zea mays
  Clone ID: LIB3115-026-P1-K1-B1
cgtgttctcgctaggttttcgccacaccgctctcgtcctccgcgaagatgccgaagaacaagggtaagggaggcaagaaccgggggcgtttaaagaacgaggctgactacgacaagcgcgagctcgtcttcaaggaagactggcaggagtatgcgcaggtgacccggatgctcggcaacgggcggtgcgaggtcacctgcgtggacggcacgcgtcgcctctgccatatccggggcaagatgcacaagaaggtgtggatcgcggccggggacatcgtcctcgtcggcctccgcgactaccaggacgacaaggccgacgtcatgctcaagtacatgaacgacgaggcgcgcc

SEQ ID NO: 1973 - DNA, 321 bp, Zea mays
  Clone ID: LIB3115-026-P1-K1-B3
gcacgaataatccttttgtttctcccctgatgagccgtctgacacaagacagccctcacgacgcaccagccttaactgacctactgggtccttacactagctaatagcactagcacagagacccgaccttggtaccagctggtgctggatatgctcaccttcacttcacctccacacctcgcctcgcttggcccccccacacacaacaaaagcacacacatgcatggttttctcgtttcgcccgcttcttattctgtttcaactttcaaaacatacagctctagcacggctgggctgtgccgccgtgccgtgctccggcgc

SEQ ID NO: 1974 - DNA, 217 bp, Zea mays
  Clone ID: LIB3115-026-P1-K1-B4
ggagcgccacctcgctcgaggcgcgtgtggacgcggcgaggctggtggagtcgctgctccgcaatgcggcgccgggcgcgcgggcgacggtggcggactccgaggagctgctcggcgagctcatccgcctcgtgggccccgcggacgacaagggcggcctcgacaggcaggccgtggcggcggggctgtcgtgcctggcggccatcgcggcgacgcg

SEQ ID NO: 1975 - DNA, 246 bp, Zea mays
  Clone ID: LIB3115-026-P1-K1-C6
cattaccataggctcattcatcgaaccgcaaatcagagagacaggaaaagaaaaaagaattttgatcaaatcaatagaaggaagggtcccttacctgatttgaatttcatcctcctttaaataggatatgctctaagtcttcccatactttcctataatgactgcaacgattttctccattttgcgaattcctattttatttgaagtatattactatcatatacattatctaaatcgatccacttt

SEQ ID NO: 1976 - DNA, 370 bp, Zea mays
  Clone ID: LIB3115-026-P1-K1-C8
cggacgcgtggggacccagcggcctcctaccaacaacacatcattggtggtgccctcttttagattgcttattagttgtaattcaataataaagttttttggatgatgtatgtggccaaccagaaataagaagttacatttccagattctaaaaaaaaaaaaaaaaaacaaaaaaaaaaaaaaaaaacaaaaaaaaaaaaaaaaaaaaataaaaaaaaaaacaaaaaaaaaaaagggcgggcggtcgagattctatacactggggctagatcccagcggccgcgagtaggatggctatggagcttatgacattacatcgaatttgacacatacatgatcatcatctgcatcttgtgtatggggggtgttc

SEQ ID NO: 1977 - DNA, 543 bp, Zea mays
  unsure at all n locations
  Clone ID: LIB3115-026-P1-K1-D10
tcgtctcgtcccacgtcgtctcgcaccaaattacccaagtatttgtgtggcccgtaataaagaagccctggtcaatcttattagaggttgcaatacaattaggcaaagggtgggtgntatcacgtcgacaacggccttctcgttaccaatatgatgggagagaatcgggtatggcgtgccttcgggtgattnggtatcaattaccaanannggcaggacccctggtatcattattgcatgatggcatattgatcccccgtggcttacccacattatntnnctaaatgattantcattgctggaccaaggaagctggccaatgtccccctacccgttgttcgaaaatggggatgtgggaaatnnttctcgaaatctcccaaaacaagattggcgatagattagtttgccgacctggtttgtgcccaaaggtcaagaccgaattcaggggtaatggtcccaagaatgcccctcatagctagcaacgaccctgatgcttgtgttcaataatcgtccaacgatctgcacgaagctcgtcagggaaaa

SEQ ID NO: 1978 - DNA, 87 bp, Zea mays
  Clone ID: LIB3115-026-P1-K1-E4
cccacgcgtccggtgctgaactagccgcagcttgtaaaatatggaaggagatcaaatttgatggtttcaaagcgatggataccagat

SEQ ID NO: 1979 - DNA, 217 bp, Zea mays
  Clone ID: LIB3115-026-P1-K1-E5
aagaatttgaggaagccacttatgatatactgatgatgtggttgtactcttgtttgcttccactcttggaagcaaacacctctgtgcgtggtgacgtagctattgcactctggacatccgttggaacaacctctctcctccctacagactacagtgtgtaatggacgaattccatgtcgttgggtttgcattatcgatcaatgcatggattaacgta

SEQ ID NO: 1980 - DNA, 278 bp, Zea mays
  unsure at all n locations
  Clone ID: LIB3115-026-P1-K1-E8
cccacgcgtccggaaaacgagcacctctgcacaaaaatccgattgacagggagtatagagcgtgtagtgtgttcttcatttttggcggngaggggctgtgcctgaagacctgaccagcctccacctctgattagcgtgagtggggtacgtcgactgaagaacgtaagctggcgaagtagtaccatgtatgtatggagagggttaaatgtaattctttccaatggtccaaggcggatgctgcttccaatgtagcagcatgcgattctttggacaagatg

SEQ ID NO: 1981 - DNA, 196 bp, Zea mays
  unsure at all n locations
  Clone ID: LIB3115-026-P1-K1-E9
gccaancgcgtccgcttttagttgatcttttaggtagcacagtctttgggttgatatttatcgaatatnggnctattttnnnctatttnnaaattgacgctatnnatgcttagtcgcgacgaaacgatgttatttattttttgggttatttattatatngnagataacnntgtacaannntgagtttgggggtatg

SEQ ID NO: 1982 - DNA, 403 bp, Zea mays
  Clone ID: LIB3115-026-P1-K1-G4
gaagaaatcccggaaaatgtcgcctccataccgtgtcatcctgcacaatgacaactacaacaggcgcgagtacgttgtcaaggtgctgatgaaagtgatccctgggatgaccgtcgacaacgctgtgaacatcatgcaggaggcacacgtgaatgggctgtcagtggtgattgtctgttcccagtccgaggctgaggagcactgcacgtcgctcaggggcaacggcctccggagctcgatcgagcccgcgagtggtggctgctgaggttcgagacttgggggtataccttgttttgccagcgtatagtttgtaaatacccagcgtatcaagctaaagctgaaacggattggttatatgcacttatcgatacacgaagctgagtacccctctcgggtaggggta

SEQ ID NO: 1983 - DNA, 315 bp, Zea mays
  Clone ID: LIB3115-026-P1-K1-G8
actagttctatcgcgagcgccgccctttttttttttttttgaaggtaactcttgacattaacgttatcgtcacattaaccttaggagcacaatgatatccgcaactcaacaattcagctacagaaatacaacgttgtcttctaataataataacacacactggttcgtcatcgtcgccggcgccttccaccgctggtacagaatgcccatgtgtaccccagcctccgacatcaaatttacaacctagtaacccaccccgcgcaccacccacaactagagcaaaaacgagtaaacatctaaaatcgaaggagcacg

SEQ ID NO: 1984 - DNA, 398 bp, Zea mays
  Clone ID: LIB3115-026-P1-K1-H2
caactatgcacctgcctccgaatcccccctcttcccgccgctgctggtgccagtttccatgaactaacatccccttttttcgggtggtacccaccctgctcttccagctggtagctcctccccttcccttccaatccggtcttgcacaatttccgtcgtcctccccttcctttcaatcctgcaggttgcagcccctccttttcttcgattttgcagttcaacggcgaccggctgaccgccatctgccgggattggtccggcgtggaccttcttgccatctctggcgctgctgcagggcgcccaaccagcagccagggcccactggtgggcacccgtgcacgttcaagcttaccttgcagtttacagaagaatacccaaacaagccaccaactgttcga

SEQ ID NO: 1985 - DNA, 306 bp, Zea mays
  Clone ID: LIB3115-026-P1-K1-H6
acgggaccatgacaacttcggcaacgttcctgccacggatctggtgaagataacacactccattttgaacataaactgcccggtaaatggaggaaacctggcaccggcccatgaccagcaacagcaagttaacagcaagattgcttcgttccagcagttcatagcccatgacttcgacgccagcgaccatggcacgtcaagcttccctgtcgctgctgttcataggatcggcatactagatatccggattttcaacactgacaggcacgccggcaatgtgctggtgaggaagcttaacggtggcac

SEQ ID NO: 1986 - DNA, 208 bp, Zea mays
  Clone ID: LIB3115-028-P1-K1-B10
accacgcgtccggtgataactactttgtgatttacattgacatgcacagatttagctacatgggaaggaaaggtatagaaacatttttggacaggctaaaagcatgcgttttagatgttgggctgacaattcaaggaaataaagctgaagagctgcccgagcagatcttatgctgtgttaggttaaatgggatagattacaccaaata

SEQ ID NO: 1987 - DNA, 81 bp, Zea mays
  unsure at all n locations
  Clone ID: LIB3115-028-P1-K1-B5
gcgaggcgaacgtccacgcctccggcgttaactacttatttttttatatangcacgcacaaaattaaatgcagggggcggt

SEQ ID NO: 1988 - DNA, 380 bp, Zea mays
  unsure at all n locations
  Clone ID: LIB3115-028-P1-K1-C1
agatcgtgcgcctcacgcgcgaggtcgttcccggcatgatcgtcaccggaatggaggtcggcgagattgacggcgcccccaggatgggcccgacgtttggcgccatgatgatctccggccagaaggcggcgcacctggcgctcaaggccctgggcaggcccaacgccgtggacgggaccatgtcgccgctgttgcgcgaggagttgatgattgcgtacaaggacgacgaggtcgtggacgcctgagtgcggcaagcagagaggaggatcgacgccagcagcgtcttatcttaattgccttgttgttcaatgatgaatcgatcgaattcccttgggttagctttattaatggtgttgntattattaatttgactcgctttt

SEQ ID NO: 1989 - DNA, 264 bp, Zea mays
  Clone ID: LIB3115-028-P1-K1-C2
ggcgccaggaagggagtcgagaaggccgccttctccttcagcgtcgcatgatgcagtaatggtggtgcttcgatgggatgggatgcacgcactacgtagagagcttggctaggccaggcctggctgagcacgcttgtgtgttccttcgactgtacatgagaacaaagactaagaccttgttcgtttctatcggattacacctggaattgttccagctaaagccttattcggcacaatagtatttaatacacactcggatccaat

SEQ ID NO: 1990 - DNA, 321 bp, Zea mays
  Clone ID: LIB3115-028-P1-K1-C9
aggtgctggaacatattgatagccattttattatattatgcgtttcgatttcatgggagttgggaggacagaattgtatcatagtgcagtaactcttggttgtaggattgagttatcctgcatgccatggttgtggcgcttcgtcagcgaccgaatgctgtaatgtggttacgattctctgagctccttttcaaccattaattccagttgtaaaaaaaaaaaaaagataaaaaaaaaaaaaaaataataataataatataataaaatttataaataattaattaaaaataaaaataagggggtgtggggggggggaataaa

SEQ ID NO: 1991 - DNA, 422 bp, Zea mays
  Clone ID: LIB3115-028-P1-K1-E7
cggacgcgtgggcggacgcgtgggctgcgtttcgccactgagatagccaaccctgcgactgcgtgcgtgcgggcgagcgagcgagcgagcaggcagaatggagcgccacgcccagaaccagaagcaggcgccgctagtcctcgcgctgtcctgcctactcctcctcgcccccctcgtctccgccgtccccactccaagaagcctgcgcctggggggccagcagcagcacccgccggctctgaagctcacttcttctcaggaggcggcgatcgcggcggcgatgaacatgggcaggccgacggcgagggtggccgtggaggtgaacgactaccaaccgtccggccccaacaaccgccacgacccacccaagggcccctgaagagcttggtgaacggcgctcggctggacgacccaataatgct

SEQ ID NO: 1992 - DNA, 240 bp, Zea mays
  unsure at all n locations
  Clone ID: LIB3115-028-P1-K1-F2
gaaaacgcctttacataaaaaataataaacatttttattttacaaaaaacacatatgaaatctggctgtttttattgaatgcaggcacccaacngacaaaacaaacttacaatttccatttccttttcaaagtcatgtaacgcaatcctgtagtgtgtatttgattcatcaaccattcctgaccatttgaatctcttatcaccaacaaaaaaaaaaaaaaaaccctttcctatttatatt

SEQ ID NO: 1993 - DNA, 112 bp, Zea mays
  unsure at all n locations
  Clone ID: LIB3115-028-P1-K1-F5
ggggctggatntaaataaagccatacnaatgatgctngacgcatttttncgcacaatggttctgccccatctaggggcaagctaaaggcagcttttcaaaaaaatttaaaaa

SEQ ID NO: 1994 - DNA, 294 bp, Zea mays
  Clone ID: LIB3115-028-P1-K1-G1
attggcccaactagcaacatagaaggcacattagtgtaccaacaatggcagccaaaatatggggccgccttatgctccttgggctttctgcaagtgctgctacggcaaccattttcccgcaatgctaacaagctcctatagcttcccttcttcccccgtacctctcaccagtgttgtcttcagtatgtgaaaacccaattcttcaaccctacaggatccaacatgcaattgcatcaggcatcttacctttatcacccttgttcctgcaacaatcatcagccctattacagcagt

SEQ ID NO: 1995 - DNA, 297 bp, Zea mays
  Clone ID: LIB3115-028-P1-K1-G11
gttagtgagtgggctgatctactggacgtgtcactctgaagattgacttaagaaggatagggatatatggccaaggaggaggaggatggaaactgcttttctcagaagcgattgcttttccgtagtacgtttctggaggcacctttggaccgtgctttccgaaacgggtggaataaagagccattttctagttgtttcaagagagatgtagataagctgtactactattttacacgtgtttatagtcgtgtatcatgttgcttaaaactactttgtgaggtgttgttttggagcaag

SEQ ID NO: 1996 - DNA, 401 bp, Zea mays
  unsure at all n locations
  Clone ID: LIB3115-029-P1-K1-A6
caggttaagaattggtaatgctcataattttttgaccccttatccatgacgccttaagaaagtgcaaaaaggtgtgttttgcggtaccaagaacatttggagagacgatccgccggatctcagaaggcagaaggaaataatcacgtgcctttgcttattagtgttcttctctgtttgcattttgatcgttcaagctctagctctagaccatacctgtaaaatattccgtggctcctctatctactgtatgattattgtggcgctgtcttttcttgtaggctgttttaacctgaatgacggcctctatataagcatgtcataaatcgactttattcgtcnnnnaaaaaaaaataaaaaaaaaaaaaaaaaaaaaaaaaaataaatataaataaaataatatg

SEQ ID NO: 1997 - DNA, 110 bp, Zea mays
  unsure at all n locations
  Clone ID: LIB3115-029-P1-K1-B6
aaaaaannaaaaaaaaaaannaaaaaaaaatttttttataatttaaaaaaaaaaaaaanaaaaaaaggaaaaaaaggaaaaataaaaagggcgcgggccgggttnaaaaa

SEQ ID NO: 1998 - DNA, 102 bp, Zea mays
  unsure at all n locations
  Clone ID: LIB3115-029-P1-K1-C7
cccacgcgtccgcccacgcgtccgcccactcgtccgaaaaaaaaaaaaaaaaaaaaaaagcgaaaaaaaaaagagaaaagagagaacggccnccccttttaa

SEQ ID NO: 1999 - DNA, 75 bp, Zea mays
  Clone ID: LIB3115-029-P1-K1-D6
aaaaaaaaaaaaaaaaaaaaaaaaaaaaatttaaaaattttaaaaaaaaaaaaaaaaaaaagaaaaaaaggaaaa

SEQ ID NO: 2000 - DNA, 344 bp, Zea mays
  Clone ID: LIB3115-029-P1-K1-E3
cctggctcgtcaggaaagctcctcaggaaatgctacaccgtccacgccaccctgcgaaacaaccggggacgaggcgaaggcgggggctgctgcgtcggctggtccccggcgcggcggagcggctgcggttgttccaggccgacctcttcgacgccgccaccttcgcgccggcgatcgctgggtgccagttcgtcttcctcgtcgccacgccattcgggctcgatagcgccggctcccagcagtataagagcacggcggaagctgtggtggacgcggtgcgcgcgatcctccggcaatgcgaggagtcccggacggtgaagcgagtgatccacacagcctccgta

SEQ ID NO: 2001 - DNA, 451 bp, Zea mays
  unsure at all n locations
  Clone ID: LIB3115-029-P1-K1-E6
acaaaagggtattccttttaatgttttgtttcctatttaaaattgggaaacgagaaccaaatcgtaccctgtaaatggttatctggtaaactgtatacagatatacagacgaatttacacaaggttagtatgatgctgtgatcagggaggaggaaggaacatcccccaactgctgtcggatcgccaactcatcatctattgtcgtcttgtaaaggctgtgaagtggaactcgatctgcagccgccggtgcggcgcgccgccaccgtcgatgctgctgccgccctttttctcgatctccagctcctccctcagcgggatggcggccaggaacctcttgatgaactccctgcagcattccttcccggcgacgaccacctnctcggtgccttcggcccgcatctccgacgagccgtcgaacctcagcatgtaggccttgtcgcagccctcgtgc

SEQ ID NO: 2002 - DNA, 171 bp, Zea mays
  Clone ID: LIB3115-029-P1-K1-F10
ctcggggaggccatggtcggcatcaacctcaacgaccccaaggtggaacgatacgccgccagatccgagtgaaccctttctttccggagtcatctgcatccatccatccatctgccttggattgcatttccgtcgtctcatgtctctcaatcagtaataatggaatgaatg

SEQ ID NO: 2003 - DNA, 128 bp, Zea mays
  Clone ID: LIB3115-029-P1-K1-F5
aaaaaaaaaaaaaaaaaaaaaaaaaaaaatttaaaaaattaaaaaaaaaaaaaaaaaaaagaaaaaaggggcgccctttttgggggatccggccttacttccccttgcttgccacgaaataatttttt

SEQ ID NO: 2004 - DNA, 390 bp, Zea mays
  Clone ID: LIB3115-029-P1-K1-G10
tcgcttcagctgtgaagcaggcttcctagcgtcaggtactcttaaaattaattacttacagaagtcttccagcaattagaacatacaatgcgagttccaaggtatgcaatggaaaccttgatactggggacagatctgtggccatgtggtggattgtatgacctctcccacccactcatgctaagacaaacttgggttgggcgcccacccttcgttcgttgaatcatgagctcgagccttagaggagaattttcagaaaaggaaatctacatgcccgagtgaccatgtaaatatttaccattgcagttcgcggacccatgagtaccaaaaaaaagagatgattcatattgacctgtaacattgtaagatcaacctcaggaatatttgaag

SEQ ID NO: 2005 - DNA, 252 bp, Zea mays
  Clone ID: LIB3115-030-P1-K1-A12
tcgaacccttggccggccccttggctggccctttggccggacccttggccccatgtcctggtaatagaattggaactcccggatgcccggaaaacgccattttccgttggcttaaggttccaaaggatacttaagttttcaaaagggccccataccaactgggatttccggatggccattgcctgggtagtcggggaacttttggcggaagttgctcttgttttcgggttaaactggaatgggggtccggcc

SEQ ID NO: 2006 - DNA, 274 bp, Zea mays
  Clone ID: LIB3115-030-P1-K1-A2
aatgaaaattggttattttgttaccaaggaattttttgtttttttaacaaaacagcaatcctaaaggggggattaaaaattcctgcaaatgggatccatacggtcaaaaggtcccctttacaggatgttgttgtttttgttggctcaaatataattggaatggagggattcagcattggtgccatcaggtttgtttttaaacaccaacttggttttccccacacaatgccaccaacttgaatttttttttgttttttaattggaaggaaaagaa

SEQ ID NO: 2007 - DNA, 414 bp, Zea mays
  Clone ID: LIB3115-030-P1-K1-A8
attggcatgtggccagggggatgtttttatataaccattttttaaaggcacttgagaaaggctgggagaagggcatttttatctgcagggatggggtgacctccaaaaggatgggcaggaaaataaccaggctggcctattttaatggctataatgggggggacccctttgttggccttggaatgggacctatgtttcattctgggccactaattttccatcatgccaccgaaacctaagggcgtttggttgggggccaacctattccaattgaccctatcttaccatgggaaaaaccaaagggggttaccatggaaggatggatggccaactgcccctgttgatggaagctggcctgcccatttggggcataccatcctggggacttgggccggggcaaaaatcctgccaaag

SEQ ID NO: 2008 - DNA, 403 bp, Zea mays
  Clone ID: LIB3115-030-P1-K1-A9
tgaacccttggccggacccgtgtttggccttttggccaaaggtttggccatgatcctgtggggcggtaaaaagaaccgtggggcctcgaacaaccccaacggcaagggggacgacacctccaagcccatgacggacccattttgccgtgggaccagaaactcccccagggaattaaccttaattaacgggggcaggaggaactccgttggtttgcacagaaaggggttcagggagttgtactgtttaagcccgggatccaagtaccagtggtccggaaggtttgcttacggggtctaagggccggcattgttgaatctcttaatgtttaatcccgaaaacacttgggggggggtttataccttgtgcaacccaaatctttaggtttgctattatttggaaaat

SEQ ID NO: 2009 - DNA, 311 bp, Zea mays
  Clone ID: LIB3115-030-P1-K1-B12
cccacccttccggagggggcacattaggattaatggttccggagcaaccgccgggtccatagcaaaccaaccttgattgcagggccagttaataatatataaaatcggagggggagcatatttatttggttgggtcctacaagcaggcttagtacgccgcctgcccgttcttcttataccacataacaaatttagccccttccttgcgggattgctggtggccgccgggtcaaatttggacctacaaggttccgtcaaacttgaatggttggttttttaataaaaccatgttggattaaacgtttttgggt

SEQ ID NO: 2010 - DNA, 142 bp, Zea mays
  Clone ID: LIB3115-030-P1-K1-B9
gaaaggcagttccggttcctcctttctgtgttgtcttccggccaactccaacttttttttgggttccagcacacaaaaacgtgttctcccccatggccggccacctgttctggccgaggtttccggagctgaagggggccat

SEQ ID NO: 2011 - DNA, 223 bp, Zea mays
  Clone ID: LIB3115-030-P1-K1-C10
acacccttccgcctgggtctgggggggacctatccatccaatttggggggggggggtggcattttagtggggctttgttcgggggaggctctctttcaaccacatgaaacctggggccttttgccattgatggaaagggtttaaggccctcttcaaatgcttatgttggccagtcctgaccgcgttcctgaaatgaccttaaggcccggattagggttgacct

SEQ ID NO: 2012 - DNA, 329 bp, Zea mays
  Clone ID: LIB3115-030-P1-K1-C4
atcggaccaagccataagtttactcttcgggagggagaacatttgtatttttggttccggaccaaccgccggttccatggcaaaccaaccttgcttgcagggccaattatattgtataaataaggctgtgggcccttttttatttggcttgatccaacaagcgggctaagtcggcgtcttggcttttccttttataacacataaaacatatatccccttccttgagtgaatgcttgtggccgtcttgtcaaatctggacctacaaggttccttcaaacctcgagggttggttttttaataagaccatgtttgattaaaccctattggtt

SEQ ID NO: 2013 - DNA, 378 bp, Zea mays
  Clone ID: LIB3115-030-P1-K1-D10
acacccttccgcgaccccttggcttcaacaccggtggcttttgtttcccgccgttccggtccggggaaggcggagaagtagaaggcgttgccgtcaccatttcgtccgggggtttcatccttttgggggccgtcctgttcctggattacttaagggggtcctaggggacccttcaaaccggcccacggaggaccggtagtggctacaactccggcctggcccaccattaaattcctttttttttttttttaacacacattttgggtttgtggttgggaagaaaactgtgctctcttttttccacaaccttttgttgcataaatgttctgggttcttttggcgtaatctctttttttgttacaaaaaaaattatttttt

SEQ ID NO: 2014 - DNA, 439 bp, Zea mays
  Clone ID: LIB3115-030-P1-K1-D11
cgggcccggaattccggggtggcccacacccgtccgggaggtggatccattacctcctattttaatttttgcttaaccccagggttggggccctccagaggagcccacccttgtcccaactttccatttaagggggtggctggttcaataggccaatcttatatcctaaggctggcctttatttagtctataggtcctagttaaaataacaaatgctgcttgcagcctgggatattgggggggggaccacattgtggatggcttatggttaagaaggtaatgtatttttttggggaggggtaatattgtggcattatttttggcaccaatgttgcttggggtaaaaaaaaaaaaaaaaaaaggggcggccgtttataaaggacccaggtttacttccccgtccatgcaacgtattattcctcttttggggccacttaaa

SEQ ID NO: 2015 - DNA, 428 bp, Zea mays
  Clone ID: LIB3115-030-P1-K1-D12
accacaaccatggacggtggatctaccacttgtggcaccggaccaaagcacagggggccgggaccgggttccagttaacaatccaggcttatcctgtccacccccagatggccagaccagacccgaccgcccgccagggcaccaccagttttcttgggtaaggtggtggtaaatggatggcgggaaaactaaatggtggttaccttctttccggttgggctggtttccgtttttatggttaaagaaccgaccgctatggatggtatattggaccgagggggaaccagcttgcagcctttatggggaaaggtttaatatgctttggcagggtggaagttggattttgggggatcaggcctgcagcattgtaagggactccatgcccatgaaaaaaattgggttaaatgggaatgtttcagggtttaagg

SEQ ID NO: 2016 - DNA, 314 bp, Zea mays
  Clone ID: LIB3115-030-P1-K1-D6
gcctcaaagcgcccccggaggcaagttccgtttaagttttcagaaccaacctgggcggccacgaaggggtaacccgcggggacgctcggaccgcccaggttatggaccaaccgcctcttttcccgaaggcagttggggctcgaggttttccacccgggccgggccaacgtttttaaggcgggcctaaaggaagggctggttaagatgtccgaggggagggatcccaccggcatttttgttttaaggtacggaacccactttgggggcggcatgttaaccggattcggttcaattaacaacacctttaatttatc

SEQ ID NO: 2017 - DNA, 314 bp, Zea mays
  Clone ID: LIB3115-030-P1-K1-D7
acacccttccgccacacccgtccgccaacccgtccgttgtggttttttcctccccctccggttcgggttcgggttcggaaggttttccggggtccgttttcatggttaagcgaatcaagatgccgccttcggatgttaagacccgtggtttctgtggtggccttccctgggcaacgaacaacaactccttcaaaaacgccttatgaactaacggtaaggtctttgagtccaaatatacatccttaatcggagaacccatagatcctccgtcttttttttattaactttttccacgaagaaggtatttctgtaac

SEQ ID NO: 2018 - DNA, 317 bp, Zea mays
  Clone ID: LIB3115-030-P1-K1-D9
acacccttccggcggtccgggcccttcccaaggtataggtatgaggataagaagaagaacctttggaaggcgccgcttggaactggccggcccaatttattaaggtctggatgggatgtatatatatattaatctaaacttatatggattcctgaggttaaaaaatttaaaaaaaatataaaatatgggtggcctctttatagattctcaactttatttcccctttcattcatacatatattttctttataggtttcatctatattataatttttgtcttttttttttcaactttttaattggaaaactcttttttt

SEQ ID NO: 2019 - DNA, 330 bp, Zea mays
  Clone ID: LIB3115-030-P1-K1-E1
cggaatagacctacccttccggctatccttaaggtctgcaacgtcccgtttttttccttttttttaaggggctccaacttttcttcaacaattaacccttccttaacaagggcaatggccaacaccatgttaaaggcaatttcctggtccgacaccaaggggggttcttcccaaagggtcgcgaacttcgttaccatttgccccaaccagtgaaagtgaagcgttgcattgaaatagcactttgaaactcctaaccctccaaagggttttggaatcaaccccaaaatgactaactttcggggaaaataataatatttttttattattttt

SEQ ID NO: 2020 - DNA, 334 bp, Zea mays
  Clone ID: LIB3115-030-P1-K1-E11
acacccttccgcggccccggggccgtttttgagctggagttgttcatgagccacaccaggccctactgggctgaaatggttaacaccgggtccactaaaaaccgcagggggatcggggggcgtgctgcccacttggccattggggtaacgaccaagctggttgggctccgcacccgggaggccgggtggtttggtttttggcttaaccgccgacctggatgtggccatccctttctgtgggaaactacttggctggggcttggttggacctgaaacccagagtcactccaacttttttgcaatcagttcctcctaaaagggggcaatttccact

SEQ ID NO: 2021 - DNA, 66 bp, Zea mays
  Clone ID: LIB3115-030-P1-K1-E3
accggcccgggtcccttgggcattaatcaaccctaaaggttaaaatttgggttaggggaagcctct

SEQ ID NO: 2022 - DNA, 435 bp, Zea mays
  Clone ID: LIB3115-030-P1-K1-E7
ttcaggggtttggcgaccgggggggcttggttgatggctccacctaaggcaagcggtttggaccattttttaatggcagaggaagttaaatttaagttggccgggggttggaaaaactgggatgagcctgtaaaggatctcccaacgttgggggtgggccattaatggggatctgtattccacatgtggatgggatcaagatttgctgggcagcgaaggggaaatgtcctgatgtcctttaccaccagggaggcaggctttgcgatcccacttatttaacctgtaatggttcctatggcccaaagtttgggccctatattttcccaatgggcatcgtatccaacaatccgatttggggcagaagcagcttttaagcagttggggaatttaagcccacttgtggttaagcaatttttacctttacttaaacaactt

SEQ ID NO: 2023 - DNA, 337 bp, Zea mays
  Clone ID: LIB3115-030-P1-K1-E8
gctaatgccggggcgtccccacaaatacatttttccgggcggtggaataacggccaccggggaggggtatctgtttgattggattaagggccttgcaggtggaaaagtttaataggcggaaatcaaccaggtcggtaggggggcagtcatgtaagacctaaggttgttttaatttaatttgcccaatttggaacggattggtaaaatgtttaatttatgaagagggtactctttatggtgtatttctccaacctatcttattaaccttataataaattatattatagggttgaaccttatctcttttataattataacaaaaataaatatagggcct

SEQ ID NO: 2024 - DNA, 415 bp, Zea mays
  Clone ID: LIB3115-030-P1-K1-F10
ccacacccgtccgccaacccgtcctcccgtttttaacgccaagcccccttccggggaaatggcccccaaccaagggggcagggggccgttcccgcccaaaaaaaaaacggttaaagggacaaacctttttttcaaaaaaaggccgaagcagttcggattcggggggggtgttcctcccaaaaaggacctgaaccggttcttcaaggggccaaaggtcttgcgtttccaggagacaggtccgaatcttaaaacagggctttaaggtaccaccggggttaaaccagttaacccgaaccttctacaagaaccttgttccaaacctgtttaaaatgcttttatagtaccggcctgaaaacaaggctgccaaaaaggaaaggctttttaaaaggtcccatgctgaaattgaaggaaaaat

SEQ ID NO: 2025 - DNA, 176 bp, Zea mays
  Clone ID: LIB3115-030-P1-K1-F11
ccggtccggaatccccgggccgcccacacccttccgaaaaaaaaaaaaataaaaaaaaaatttaaatttttaaaaaaaaaaaaaaaaaaaaaaaatgggggggccctttaaaaggacccaggttacctatcccttccttccaacttaatacttttctattggggcccccaaaatca

SEQ ID NO: 2026 - DNA, 357 bp, Zea mays
  Clone ID: LIB3115-030-P1-K1-F5
gatttggttttcaattgcaaaaaacttttttttttcttttggccgccagggactcttacttgggaatggctgcccatagtaagctttcgggttgaaggttctccttttttgtgaaatcatgccttgttccaaatggaaaccgggtttgtggcttaagtccttgaccaaactccgttttgtaaccggcagttcctattgccaaagggccaacaacttgtttgtttcattacgctaacaagcaaatgggggaatgggtggggtgtttcttttggtgaaaattttttttgccatgttcaatcgagcagtttattatgttgatcagaattgggcggctggtttattgaatccaattttcct

SEQ ID NO: 2027 - DNA, 454 bp, Zea mays
  Clone ID: LIB3115-030-P1-K1-F7
acacccttccaagacctaaggcctttggggaggcagttaagtttccaaatcctgggagccccagaagtttttcttccaaatcgttgggcccagggatatttttgaaggcaatccattcctgaagcaggggttggtgctgcccaacccttacataaccaccttgaacgggttccaggcctccaccctgaaccggttaagggacccaaacttaaaggggacccccaacccgccgttgtccaaggggttcgccgccaagaccaagcccgccggactggtaaagctgaacccggcaggcaagtccccgcccggcctgaaaaacacgctaatcttaaccatgaagggcatggccgccggcttgcaaaacactggttaggcggttttttttaattaacctgcaaagtgcaccgaaataataagtttccggtatggtggcgttttgtcagttttggatgga

SEQ ID NO: 2028 - DNA, 361 bp, Zea mays
  Clone ID: LIB3115-030-P1-K1-F8
cccacgcgtccgcccgaccaactgaccaggttcccatatggggatatccaggcccgggtctatgtaattttggcaaaaaaaaaaaaaaaaaaaaaaaaaaaaaaaaaaaggggcggccgtttaaggggaccaaggttaacttccccttgcttgcaacgtaatagttctttaatggggcaaccaaaatcaaattaatgggccgtggtttaccaccgccggaccgggaaaaacctgggcgttcccaaattaaatggccttgaagaaaatccccttttggccggtgggggtaatagcaaaagggccggaaccaatggcctttccaaaaattggccaatcctgaatgggaaagggaacccccctt

SEQ ID NO: 2029 - DNA, 184 bp, Zea mays
  Clone ID: LIB3115-030-P1-K1-G10
acacccttccgaaaacagttgaaggagggccgtaccttactttattacaccatccaaaaggggggcaccctcgaccttttgctccgtttccgggggggtaagtaagcaatgggtcgtttaacttgccattttgccggcgtcgcttggggccctttcctaatggaggttgctgaatatattgttt

SEQ ID NO: 2030 - DNA, 211 bp, Zea mays
  Clone ID: LIB3115-030-P1-K1-G11
cggcccctggggttaaagaaactccggcttttccgcccgcaaggggaaccttagccacaagggccttgttgaagcccgccgggatcggggcccggtcggtcccgccttcaaccagcggaggggtttggttgggcgtcccgggtgggcccaagaaggccggggtgtccggttcctggtcgtctgggctggcgggcgctttttttttggtgtt

SEQ ID NO: 2031 - DNA, 196 bp, Zea mays
  Clone ID: LIB3115-030-P1-K1-G4
gccggatacaggttggggttcgccgcggcttttaacgttttctacccgacccctggggtccatcgatggccgggtttttccggccccggatggctttggaccgggtttccaagcaatcaggaacgttcctataaaggccaaggatcctcctgggagatcccagattatttaaaagctacttctatgcttttgaaaa

SEQ ID NO: 2032 - DNA, 381 bp, Zea mays
  Clone ID: LIB3115-030-P1-K1-G5
cggccccttgggtgaaactgccaccagccttttttttattttatgcgaaagcaaaatttagggcaaagagggccccataaggcaaacttaccctgtaaaaaccaccaaaggaggtttttggtcttacctaaagcagggcggttaaggctaaataaaaggatgctgattccatcctggtggataatgccccggaaaagaaggttctggaaccaaaaccaactttttacttctggacaaaccaagcttggtggactccttgctcaggagaagttatttaagtttctggaaaccagcgcttacttccttgtgaaaccaggcccttttggattaatccttctccaggacttctatcccattggggctctgtactttgcacttgac

SEQ ID NO: 2033 - DNA, 420 bp, Zea mays
  Clone ID: LIB3115-030-P1-K1-H7
ggcttcaaagatttggaaggaggggtccttaaacgggccaggcgggacttattcggtaaccttaaccgggccgggaacttacggtttttactgcaagccgaacaaaggagcaggattggtcggaaggataacagtaaattaaagttggttatcaattcaatgcatttgaatttgattgtactccgcccgtcaatggatgatgcatcaatttttactggttttcttaacatgtccaacaattaatgcaccaaattaagtccttacttgggggaaaaaaaaaaaaaaaaaaaaaaaaaaaaaaaaaaaaaaaaaaaaaaaaaggggggggccgttttaaaggatcaaagttaacttccccgggattgcaacgtaaaagttttttattggggtaactaaaattaaattaattggccgtggttt

SEQ ID NO: 2034 - DNA, 401 bp, Zea mays
  Clone ID: LIB3115-031-H5-F1B
gtaatcaaatcgaaccggcttttgttaatcggacgacgagaggaagccaacgacaccaccaccacacgatcgatctcgttaattactaaaataattagggaggaaaagggcaaactaacgtcgcccacatgttgttgcagacggatgtgggccctgccggaccacgaattcaggagagcactcggcccatccctcctccaggtccggagcgcccgccgccgggggtctcgctctcgccgcgcgcgtcatccaccacgccgcaactgcgagcaccgcagcctccgctccaccggcggcgctgacctccgaccagcgcgcggcggccatcgcgacgcggagcgggacgcgacgacggcacgcgggccccgccgcgacccccttcctcctggcccaaccctgca

SEQ ID NO: 2035 - DNA, 233 bp, Zea mays
  Clone ID: LIB3115-031-H5-F2A
gtaatcaaatcgaaccggcttttgttaatcggacgacgagaggaagccaacgacaccaccaccacacgatcgatctcgttaattactaaaataattagggaggaaaaggacaaactaacgtcgcccacatgttgttgcagacggatgtgggccctgccggaccacgaattcaggagagcacttggcccatcccttctacaggtccggagcgcccgccgccgggggtttttttt

SEQ ID NO: 2036 - DNA, 581 bp, Zea mays
  unsure at all n locations
  Clone ID: LIB3115-031-H5-F3A
cacggcgccaacttcctggcgtacaggcacgtgaggcgccgcctgccgcgcgggggcgccgactccggggcgtccgcgtccagcggctcctgcctgtccacggccgactccgtgcagtcgagggcggcgccgccgccagggagaggcagagggaggagggcgccgccgcgcgcggaggcggtgctggaggggtgggccaggaggaagggggtcgcggcggggcccgcgtgccgtcgtcgcgtcccgctccgcgtcgcgatggccgccgcgcgctggtcggaggtcagcgccggcggtggagcggaggctgcggtgctcgcagttgcggcgtggtggatgacgcgcgcggcgagagcgagacccccggcggcgggcgctccggacctggaggagggatgggccgagtgctctcctgaattcgtggtccggcagggcccacatccgtctgcaacaacatgtgggcgacgttagtttgtccttttcctccctaattattttagtaattaacgagatcgatcgtgtggtggtggtgtcgttggcttcctctcgtcgtccgattaacanaagccggttcgatttga

SEQ ID NO: 2037 - DNA, 510 bp, Zea mays
  Clone ID: LIB3115-031-H5-R3A
tgggccctgccggaccacgaattcaggagagcactcggcccatccctcctccaggtccggagcgcccgccgccgggggtctcgctctcgccgcgcgcgtcatccaccacgccgcaactgcgagcaccgcagcctccgctccaccgccggcgctgacctccgaccagcgcgcggcggccatcgcgacgcggagcgggacgcgacgacggcacgcgggccccgccgcgacccccttcctcctggcccacccctccagcaccgcctccgcgcgcggcggcgccctcctccctctgcctctccctggcggcggcgccgccctcgactgcacggagtcggccgtggacaggcaggagccgctggacgcggacgccccggagtcggcgcccccgcgcggcaggcggcgcctcacgtgcctggacgccaggaagttggcgccgtgcaccttggcgtcgcagcgcgggcagaggaacgccgagtccgcggcgcagtgcacgggcggcgcgcccccgca

SEQ ID NO: 2038 - DNA, 452 bp, Zea mays
  Clone ID: LIB3115-031-P1-K1-A4
ctgatcgatctacacacatacatagtttcttctactacacgacgacaaacatggggaagcctgcgaagatcggagagtggggtggatacgccggcgagcgtctgtatctgagggctactccggaccggctgatcgaggtgaaggtcacggcggacaacagcagctgcatccgctccatctccttcatctacatcggagccgatggcaaaccgtacgaggaggggccatggggtttcggccatgctggcacggagtacaagattgatctgtgcaggttcgacgagagcttgacggagatctccgggaccacgggcccagcctacaacattgacaatctggtcaagtctctcaaattcgtcaccaacaaacgcgcttactgaccgtacggcagggacgagggcaccccgttccgtgtcaaggtgatgaacaacggccacgtcgctggcttcttt

SEQ ID NO: 2039 - DNA, 256 bp, Zea mays
  Clone ID: LIB3115-031-P1-K1-A8
cctacatgactcagagcgcgcagcttattttttgaggaaagatgccagtcaacaaggagcttcaaaacatcaaggaggttgtggacattaacctatcaagctagatcaatatcttataagttaaccatgtaaacacgaagtgcactgaccgtcttttgcaggatattatcatatctatcaaggcgagagaatcaatttgattactatgctcaaaaaatactatatattaatacccaaaacttattttgccgctcct

SEQ ID NO: 2040 - DNA, 201 bp, Zea mays
  Clone ID: LIB3115-031-P1-K1-B10
acgcggacgcgtgggcggacgcgtgggctgactcttgggcggacgcgtgggattcaatggaggagatagcatagaggtgaggaaggcttttataatagaaggaagggaaaaagtgtggagccaaggcttccttgcctcctctcttgtaggttttaccgtctttaccgaggtgataagctggactgtgttccttaatgatgc

SEQ ID NO: 2041 - DNA, 219 bp, Zea mays
  Clone ID: LIB3115-031-P1-K1-B3
cacgactgtgcctagcatgcgtccgcctttttttctggacgccctctggccactcacgcacgagttctttccggcgcgcgtcgtacaatttacacttttttactcttcgctttacactgttgctgcggtggccttctttctcaaggctaacgtgttctggtttctgttttgaccatttctactgtctcgacccactgtatgagcgctccatggtttttt

SEQ ID NO: 2042 - DNA, 463 bp, Zea mays
  unsure at all n locations
  Clone ID: LIB3115-031-P1-K1-B5
cgtgccgccgtcgtcagaggagcttcagcattcaccagtcagagtccaaaactgatcagcgggcagtcataccgtgttnggtngtgttgttaccgtccgtctgatacgaaccaatttttttgcttcttctaccgtcttgacgccatttgtcgcgcaacgtatactgaatcacgagtatagcttgggtttagctggcctctcgccggccgcgtggctttcattttccgggaaaaactattctttttttaaggacttgtttggatgcacaatataatcctttattatatagtctagcaaggtattatttaaaaaaaaaaaaaaaaataataaattaaataataataataaaaaaaatttttatttattatttttttattaaattttaaatttaatattttaaaatgggtgtccttttaaataattaaattttttttatcccttgctatatattaattaatttttt

SEQ ID NO: 2043 - DNA, 268 bp, Zea mays
  Clone ID: LIB3115-031-P1-K1-B7
caggtaatgaacctataaatttgttctgtttttgtgactgctgtgataaaaagaccgtgtgttccttcgagcgatggatgagctcctagtgacgtcagacagcactataactttgttggaaccgtgacatgcctgaatatctgtggaaaaagaaacccgtgttatgttgttttaaaaaaaaaaaaaaaaataaaaataatttaaaaaaaaaaataaataaaaaatataaaaaaaaaaaatataataaaaaaataaaataaataaaatg

SEQ ID NO: 2044 - DNA, 418 bp, Zea mays
  Clone ID: LIB3115-031-P1-K1-B9
agttcttgccctcgaatgtctggccgaactgccaggtgctcggggcggcgttccaggaggtggaggtgcggcggggggtggcggtgacacggaaggagagcgcctggccgacgaggatggcgttggactgccagttctggccccagttcctggacatgggcagccacccggtgctggccgccttcacgctcgcgcgcaccacgtcccccgcgccggccacgttcgtgatcagcaccaggttgaagtaccggaagccgttgatggtgaaccgcaccccgccggacttgcggcacggcaccctgcagcgccagcagcggcggcgagacgagttgttagtgatacttttgctcccagtgaacactttggttggtactgccactactactacaacacaagcaggtcgttgatattgcgtaaa

SEQ ID NO: 2045 - DNA, 452 bp, Zea mays
  Clone ID: LIB3115-031-P1-K1-C4
cccacgcgtccgcgatgatgcaaaaatatggagttgaaaatgtaaacgatcacttcatgggctgcaatactatttgtgatggcgctcaggaaagacaagatgctatgtatcagctggtgaaagagaaagttgaccttattcttgttgttggaggatggaattcaagtaacacctctcatctgcaagaaatcggagaactcagtggaattccatcatactggattgacagtgaacaaaggattggaccaggaaacaggatcagctacaagttaaatcatggtgaactggttgagaaaaataactggttacccgaggggcctattaccattggtgttacttcaggtgcctcaactccagataaggttgttgaggatgctcttcagaaggtatttgagatcaagcgtcaggaaattttgcaggttgcataaatttaagcagagatttggtgaaga

SEQ ID NO: 2046 - DNA, 250 bp, Zea mays
  unsure at all n locations
  Clone ID: LIB3115-031-P1-K1-D4
aaggggcacggatgagggctacagcgcgggacctgcaagccagggtggtcaaggccttggggcctgacngtggatccggggcaacttccacaaatttgtcgacacttgcctgactgtagggagagacatgcacttgaacgcccgtggtaatcatccaatgtgaaacactaaaataaatctactagagcatggacagatctccaacatattggacctctctcaaaaaaaaaaaataagaaaaaataaatat

SEQ ID NO: 2047 - DNA, 360 bp, Zea mays
  Clone ID: LIB3115-031-P1-K1-D7
gcggccgccctttttttttttttttttttttttttttttttttttttttttttttgttttttttttttttttggtggggtttttttttttttttttaaaaaaagggggcaagcccttgatttttgttgaaggggtccaaacccagttcctttttgtagctgggcaaaaacaagccacaaatttattttttcacctcttaacggggcagggggggatacctcctgataaaacctcctttgtggggagaaaattcccctattgttttgtcccggggaacaccttcacattaatttttccctccccagctttttcgggaaacaaaaacatattgcccttataatttgtcccccctgccttttt

SEQ ID NO: 2048 - DNA, 124 bp, Zea mays
  Clone ID: LIB3115-031-P1-K1-D9
gctcttcgcctagctagctagatgatccgtagcggcggcattgattagtatataatccacccaggacatgtgaatcttcttaggccctgtttgggaacaaagtttttgaaaaccacagtttttg

SEQ ID NO: 2049 - DNA, 63 bp, Zea mays
  Clone ID: LIB3115-031-P1-K1-E11
aaaaaaaaaaaaaaaaaaaaaaaaaaattattttaaaaaaaaaaaaaaaaaataaaaaagggg

SEQ ID NO: 2050 - DNA, 114 bp, Zea mays
  Clone ID: LIB3115-031-P1-K1-E4
cggacgcgtgtgcggacgcgttttaaaattattttttaaaaaaaaaaaaaaatataaaaaggggggtattataatattgagtggatgaaaataaaaaaaaaaaaaaaataaaaa

SEQ ID NO: 2051 - DNA, 361 bp, Zea mays
  Clone ID: LIB3115-031-P1-K1-E8
cgaatatgatattttttggacatttctaataatagcaagccttattcctattttggtattttggatttcaggacttgtagccccggttagtgaaggaccagagaagctttctagttatgaatcgggtatagaacccatggggggggcttggttacaattccgaatacgctattacatgtttgcgctagtttttgttgtttttgatgtggaaacagtctttctctacccttgggcaatgagtttcgacgtattgggtgtatccgtttttatcgaagctttcatttttgtgcttatcctagttgttggtttagtttatgcatggcgaaaaggagccttggaatggtcttaactgaatattcag

SEQ ID NO: 2052 - DNA, 160 bp, Zea mays
  Clone ID: LIB3115-031-P1-K1-F1
cggacgcgtgggcggacgcgtggggcttctgtccacagtatatatgtgggatatatatctgtggacaaaaaaaacaagaaggcagggcatgttgggatatatatctgtaaacaaaaaaacaagtttgggcttcggtccacagtatataagctgttttcac

SEQ ID NO: 2053 - DNA, 435 bp, Zea mays
  Clone ID: LIB3115-031-P1-K1-F3
gttgtacatgaacaagacgccggtggcggcgactgccgagggcaaggatgccggcaagctttggtcagctgcagacgagcgcgggctcgtcaacatcgccaagctcagcccagccctcccggagaggagctccggggtgcacccagtcacccagatggcgggagttcccgtcaggagctgcgctgctgaagcaaccgcgccggctatgctgcccaacagggacgtggtcgacgtcttcgtcacccgacacagccccgccgtccacgtggcatagattctcgatcgatcgcgtgcatggcccatgcatgcgcccgccacacgtacgctagcttttatatattcgaaggacttgctgctggtcgtgagcatatatatgatggaggaaatgattaaatagtatattatgtaagtaattaactgccatggaagctagct

SEQ ID NO: 2054 - DNA, 302 bp, Zea mays
  Clone ID: LIB3115-031-P1-K1-F5
acaacctgtccaagaaccagcagccaaaggacaagagacacaacgaaaggaaaggaaccaagagaaagatcgagaagagaggagggttcgcttttggacttgcaccgtcgtgatctgtcccgcgaccacatgaggatccacccagcatcccccaccgccggcggcaagaaggacctccggcgcctgccgcacgtgtacagcaaggtgctggagctgccgctcccggcggacaccgacgtccaggtgttcgaaggccccgacgccttccacttcgtcgcggcgccggccgccggtgcgcgtgc

SEQ ID NO: 2055 - DNA, 411 bp, Zea mays
  unsure at all n locations
  Clone ID: LIB3115-031-P1-K1-F9
acgcggacgcgtgggcggacgcgtgggggtgaacgcggaactgcggacgtacattacgcgcgcgttctttgacgtgaaggggaggtgccttatccacagctgcgacctccgcatgggcgccttcacgctgggcgtcaaccgcgtcgcgcgcgccaccgtcctcaggggatgggaagcatgacctccccctccgtgtcgtccgtgtgcccctccctgttgtatcctcttggtcttggtcttgggcccttgtttttctttggttaattattatcgatcaacggagatccgagaaaaaacgggcttaatttaatatttcaaaaaagtgcgttttcttggagataaatagcggaaggagagttatattaagtttttaactttaaccaaantattttttattattttttttatttt

SEQ ID NO: 2056 - DNA, 453 bp, Zea mays
  Clone ID: LIB3115-031-P1-K1-G10
ggtaaatcctgtgagatttagatgagaagaaagctttagcgaggcgcttgccaagtgctgggtgaatcacctcaacggggtgtggttgtctatctcgcggagtcgagtcgagtttagtcgtggtacgctagatgattatgcgagctgaaggacatggatcagagcaaaccagtattggtggattaatcttgtggatgcatcaagccagcaccagaatggaagatgctcaccaagtggtcgtcaattaacaacactaacgtagtgtttatcccaggattataagtttgttctgttgtggatggtgctaagtgccggtgggctcggccttcttatataagtatatcacatctttagcttctttattgaggactgtcacttaagctagcatgtattttaaaacttataaatgttttatacattcaaatttggaatcttttttaattattttctttt

SEQ ID NO: 2057 - DNA, 389 bp, Zea mays
  unsure at all n locations
  Clone ID: LIB3115-031-P1-K1-G11
cctccttccgctacactcacgctcccactctacccaaaacgaccgctctcggcnccctccgcccttctttccaccaccggcagcacctcatactaccatcaccacacctatcggcatctaagcatctccctcctccagcacctctagcggtgattgcaattgactctttcttgtccttgaatagcatgtttttcagttccttatcgaccgttgtcaccttggctgtctttcattctcccgtagtcttctactaactgcttctatctgctgtcccgtttccagtgcatctgtttttactgcggcagttccaatgtccttaagtctaactaccatgacttccatctttatcttttcaattagcttttagatagttctatatactcttttta

SEQ ID NO: 2058 - DNA, 457 bp, Zea mays
  Clone ID: LIB3115-031-P1-K1-G3
cccacgcgtccgcaccgggacccggcgatgtgttaggacccggaggagttcaggccggagcgggtcgagctcggcagggcagaggggaagttcatgatgccgtttgggatggggaggcgcaggtgccccggcgagaacctcgcgatgcgaaccatggggctggtcctgggggcgctgctccaatgcttcgattggaccagggttggggatagagaagttgacatggcaacagccactggcaccatcatgtctaaggctgtcccactcgaagctcaatgcaagccgcgagcgaacatgtctgctgttcttcagaaaatctagagtgagattgtgaatatttctagttgcagataaacgatacataactatgcaatgcttatatatagtgtatagtagtatagcagtttcttcattttaaagttgtacaatgacatttatagaaaataacgacataaat

SEQ ID NO: 2059 - DNA, 402 bp, Zea mays
  unsure at all n locations
  Clone ID: LIB3115-031-P1-K1-G9
cccacgtgcccctagatcaggaagcggtgggcagttcaaagggccattcanagaaggaggggtgttcatgattggtggggggaattacattgagtacaggagcttgatggagctggcagaatgctcgcagccgccttcttccaagcatgtcatatacggagcaactgagattgtcaacggggtggagttcatcgagcaacttgcagaactggggcagaaagcggggctgggtctgggtggtggaaacaaccctccactacagtaattactaataaataagggggggttctttcacatcgtttgaacattgtcagatatgatatgatcatttgcttccttttgtatggtttaaaaaaaaaaaaaaaatatttttttaattttaattatattttataaaatata

SEQ ID NO: 2060 - DNA, 266 bp, Zea mays
  Clone ID: LIB3115-031-P1-K1-H1
agccgcccacgcatctcgattcgagcagcattatctatcagcagcagaagcggctctcagagctggtgactagagcaaccttcgttccgttcctcgatcgccatggacaaggtgctggccttctcgatcctgagcgcgtcgccggccgacctctgcttcacgggcgccttcttctgcggtagctgggcgcggctgtcgtggctgatgggcgcggactaccagcgtgctcctcggcgttagcatcagtatcggctttgaggaggatg

SEQ ID NO: 2061 - DNA, 235 bp, Zea mays
  Clone ID: LIB3115-031-P1-K1-H12
acagctcagcgtctcctctgtccaatgctattattcttggctgcagcataacacttggtgcaattttgttacgtcgaacgggccgtattatcaatactcactcctgctatttcatgcatatattatttttcatttttaaataatttaattatatttaatataatctttttttttattaaaattcattattaaattatttttttattttattctctcattttatatttaattaata

SEQ ID NO: 2062 - DNA, 450 bp, Zea mays
  Clone ID: LIB3115-031-P1-K1-H3
gactagttctagatcgcgagcggccccctttttttttttttttgagatattcaattgttcagaggttcaaattctttggggagggcagcacaaacattcaaatgttcagatattcaaattcttcgaaaatgttcagactttagacaaaaagtaactctaatatagcagcttcacacacgcacgggggacaactccgaaactgagtgggcagaagacttaacacggtcgaaaagctaaagcctatgggcgagcagcaaccggtgctggagctggagctgtagcagcagcaccaggaccagggcgggggcctccttgtccaccagcaggcctatcctccctgcgcctgaagcgctccggcggcttgcggtccctgcgcttctcacgggatcggacgcggacgatgtgagcgtggatcgcgcacgagacgcagtggtgcaccttggcgtacag

SEQ ID NO: 2063 - DNA, 396 bp, Zea mays
  Clone ID: LIB3115-031-P1-K1-H5
gactagttctagggcggtcgaatccgccagcgcattcgctgagcaccgccagccccgcgcgcggaggtcggagggctacgggccggagtccgaggggaaggcagaggaggcaagcaggcaggatgggtgccgctggtgacgccgcggcagcgggcacgcggtgcgagctctgcgggggcgcggcggccgtgcactgcgccgcggactcggcgttcctctgcccgcgctgcgacgccaaggtgcacggcgccaacttcctggcgtccaggcacgtgaggcgccgcctgccgcgcgggggcgccgactccggggcgtccgcgtccagcggcttctgcctgtccacggccgacttcgtgcaatcgagggcggcgccgcccccagggaaaggcaaaagga

SEQ ID NO: 2064 - DNA, 428 bp, Zea mays
  Clone ID: LIB3115-032-F11-F1A
ggcgccgtgggagctgcggcggaggcggagggagccctgtaccgcggcgcacggaccgcagcgctggggaagttggtgcgggcggtgggcccgcggagagatcgggcagcggcgtcgtaagcgtgcgcggcggcctcggcgcagtcgtaggtgccgagccagatcggggtcttcttggccgggtcccggatctcggcggcgtacgccccgacggccgcctccgcacgccgcggtaccgaatctccggcgacggcgagggctgctgcggcggcggcttcgccggcgcatcgcggacggagagggggtggggcgctcggcggagagcgcaacgggggcgggtctcggctagggtttggccataaatttatttattttcttctctccagttctggtttctccccgattttttgatcttcttttccgcttcg

SEQ ID NO: 2065 - DNA, 289 bp, Zea mays
  Clone ID: LIB3115-032-F11-F2A
gtcgccttgggagctgctgcggaggcggagggagcaatgtgcctaggtgcacgtaccgcatttctggggaaggtggtgcgggcggtgggccctcggtgagatctgtcagcaatgttttaagcgtgcgcggtggactctagatactcgtaggtgccatgccagatcgaggttttcttggccaattactgaatctagtcagattaatggccctacggtcacttccggactccgagtggccaaatctattgtgacagttagatctgttgatggggcagcttccgccgagata

SEQ ID NO: 2066 - DNA, 128 bp, Zea mays
  Clone ID: LIB3115-032-P1-K1-A3
cggacgcgtgggaattttgaaaggtgattatggttattgttgaactcgatgcttcattggaggacttgtacatgggcggtgtcagtaaaggtttgaaaagagaaaaacgtcttaaagccaccaccaga

SEQ ID NO: 2067 - DNA, 312 bp, Zea mays
  Clone ID: LIB3115-032-P1-K1-C1
ggctaatggggttctaaacactgtcaacaggtatagttacccgcgctgatgttcttcgcgtgttggaaggcatgttgaagatttaggagcgcagatacccatgctcggaagccacagcctcttgtaaatatgtagatgtgcccgggcatggtgtttctgagtagcagcaaagagatctaccatgtataggagtttttccttgtaaataaaagtagcacgccaggagactccatcccaggttccgcactgcttgcgcgaccagatgctgtaaactagccagatacttgaagaccaatataaatggatatgtct

SEQ ID NO: 2068 - DNA, 376 bp, Zea mays
  Clone ID: LIB3115-032-P1-K1-C3
agcacaatggacgccgccgtctccctctccctgcccctgcaccaccacgcccactgccggctggcgctcccgcacccggcgccgcaccacctccactgcgcggtcccgctcaggcaccacgccacctccgcgtccgccgtaaccgcgccgccgcccaagcctgacgttcaggctcctccagcggcgcgcctgagccccgccctcgccgcgccagcgccaccccgctcgtcctcgtccccggccgccgcgcgctcctccagccgcgccgccacgggatacgcggcagcgcttgctgacgcgtgcgtgcgcgcgggcacgcttcgccgtgccgcgcgccacgcgcgcgcgctccttcaacttatttttcggttagagt

SEQ ID NO: 2069 - DNA, 442 bp, Zea mays
  Clone ID: LIB3115-032-P1-K1-C7
ggggcgccggctcgccggagaagatcaaggagctgcgcaccaaggagatcaagaacggacgcctcgccatgctcgccgtcatgggcgctgggttgcaggccgagtacaccggcaccggacccatcgacaacctcttcgcccacctcgccgaccctggccacgccaccatcttccaggccttcacccccaaatgaggagctctgatgaacttagcagttcgaggagtgctaccacacatgcatgcattgttaggtttgatggccgatatggaacttcattttttttgttgcgggcggactactgggtagactgtcaatgatgatgatgatgaaatgttcgtggtgcgatgcatggtgtacttgtactatgttgtaactaatgtaaaaatgcgatggtcgttagatgctatgtcctcttaagtagggcgggcctacatgcaagt

SEQ ID NO: 2070 - DNA, 405 bp, Zea mays
  Clone ID: LIB3115-032-P1-K1-D11
cccacgcgtccgggtttttgcaactactacagtttgagtacaaaaaccaacatgattagtggacaagttgtagggggtgctttttttttttttttcgtgaaccgaatctgttgggccagaaaactaaatttaacatccaaattacttatccatatgctacactgaaatacatcacagcaaaaacaactgaacagcatcaaactagaaggatgtccggacgcgtggtctgtgccacccacctgagcgacccgctccacactaccattttctacacgttctgagggtcctgttaagcctgccattgctctttcctgttcatttaccggaacgtgtttttggattaatttattacgatttttatattcctgtggatggatcatctcctttttcgttgtctcatttttt

SEQ ID NO: 2071 - DNA, 383 bp, Zea mays
  Clone ID: LIB3115-032-P1-K1-D2
tcgcccacgcgtccgccgccggcatgcagaacactgtctaggcggcttctcttcactcacctgcagagtgcaccgcagtaatcagctgccggatggtggcgttttgtcagttttggatggaaatgccgaactggcagcgtctgttttccctatgcatatgtaatttcctgcctctttatattcactcttgttgtcaagtccaagtggaaaatcttggcatattatacatattgtaataataaacatcgtacaatctgcatgctgttttgtaataattaattaatatcccagcccattggatggacttgttgtaaaatataatctaaattatacaaaaataaaaatctttgcttataaaattcttaaaacattgtggtcctctt

SEQ ID NO: 2072 - DNA, 53 bp, Zea mays
  Clone ID: LIB3115-032-P1-K1-D6
cacccaagccgccgccccctaccctcccttttttctatccacctccccttcct

SEQ ID NO: 2073 - DNA, 93 bp, Zea mays
  Clone ID: LIB3115-032-P1-K1-E2
aaaaaaaaaaaaaaaaaaaaaaaaaaaaatttatatttaaaaaaaaaaaaaaaaaaaaaaagaagggaaaaaaaaaaaaaaaggggggggaaa

SEQ ID NO: 2074 - DNA, 88 bp, Zea mays
  Clone ID: LIB3115-032-P1-K1-E3
aaaaaaaaaaaaaaaaaaaaaaaaaaaatttatataaaaaaaaaaaaaaaaaaaaaaaaggggaggaaaaaaaaaaaagaagggaggg

SEQ ID NO: 2075 - DNA, 90 bp, Zea mays
  Clone ID: LIB3115-032-P1-K1-E5
aaaaaaaaaaaaaaaaaaaaaaaaaaaaattatatataaaaaaaaaaaaaaaaaaaaaaagggaagaaaaaaaaaaaaaagggggggggg

SEQ ID NO: 2076 - DNA, 435 bp, Zea mays
  unsure at all n locations
  Clone ID: LIB3115-032-P1-K1-F5
gcaacctaaggctaactcaaataaccaaaagaagtgcaccaacttaacccacttgctgactctgagaagccatggcacaagaaggagggtgcacgacaacctgtaacgagtgcggccaggaaattagttgggagactctaaacagagatggtagatcgagatgatgcctgtctctgtggcattgccagatttttttggggtctttatgtaatgttaacgtccaggtagcagtatatatattgcgtatacgagagtattagagcaggtagaatgtagaatggacaaaaaatggctcttgtggtacacatggtagaacgcatgggatgcaaaaaatgaacgatcacattgttatggaatgtagtcgtaacaagatgtttgtttanaaaaaaatatattatattttattttaattttaaattatataaaaatttataa

SEQ ID NO: 2077 - DNA, 441 bp, Zea mays
  unsure at all n locations
  Clone ID: LIB3115-032-P1-K1-F9
ggctccgcagccagtcccgggctcatcggctggatggggccgttcagcgtcccggccatcaacttcaacagcgggacggtgctcttcttggccagcatcngccaggagctggcccacttccccacgcccccgcccgtcacctcccagttctggctgtggctagtgacgtggcacctgggcctgttcatcgtgctcaccttcggccagatcggattcaagggcaggaccgaggactacttctagaagtgaagcggttaagatcctatccatcatccctggtgctgcgctgcgttgcgttgcgtgcgtgctcgccgctatcgaacctttgctgtatagggttccgatttcttcgaatgtaatgtatgatgctacttttgagcttcaatgtaaaatctatgccgtccggccccaacgcgctcaggtttaaaaaaaaaataaaaa

SEQ ID NO: 2078 - DNA, 456 bp, Zea mays
  unsure at all n locations
  Clone ID: LIB3115-032-P1-K1-G4
nnccgagaccctgagtgcanttccttcacgccgctgagtgctttcactgggtnnggagttcccagaacaagtgtctgatgaagggtgatgggctgcgaagtgttgccccattctccnttcgcgctgattncgtgagggaggaagattgagncttgtctcaacatttgtatttattgtagccgataaaaaatctttggtggtctttgttcccagaccaaatcattttttcatctgttgtgtcggatgtggatcataaaccaccgtccctttgtttaaactgggacgaacagcatcatttttccttagctatgcagaggattcttgggttggttggcaacagatatggggtgatgtcacccttgtatgatgctaataagtagttgccgattgggcggtgtgttggatataaataagcactgtattgaaggttagacaatctccatcacgttcattgtc

SEQ ID NO: 2079 - DNA, 433 bp, Zea mays
  Clone ID: LIB3115-032-P1-K1-H2
acgaggaaaggtgcaattcagttcttcatgaaagaatatgacaaggccgtggaaacctaccaggctggcttgaagcatgacccgaacaaccaggaactgcttgatggtgttaagaggtgtgttgaacagatcaacaaggccaacagaggtgaaataagccaggacgaattgcaagaaagacagaacaaagctatgcaagacccagagatccagaacattcttaccgaccctatcatgcgacaggttctaatagatttccaggagaacccaagtgcggcccaggagcacctgaagaaccccggggttatgcagaagattcagaagcttgtaagtgctgggatagttcagatgagatgatcgagcgatgcgatgattggctttgttcgttcacgtgcaccctggtcatacatatgttttaacaagcagcagcggc

SEQ ID NO: 2080 - DNA, 394 bp, Zea mays
  unsure at all n locations
  Clone ID: LIB3115-034-P1-K2-A11
cccacgccgtccgcccacgcgtnccgttacgnatcctcggcagnccaggaggacttcgtcgcgccgacttcctccaatactcatcgacggcatcattgaacggggtcatcaaggangaagctcaagatcatccccaaggacgtcaggtgggtggaggtctccaatgccatctactacacgctggtcaacgacttcatgaagccacgaattgacgatgcaagcaagctactctatatgaattaagctgatgtacgtggagtttttgttaaccaaatgctcctttccttttttttggtgtgtgtgtgttcattttcgcaaattgatgagatgctattgtatggtgtgaatgttactgtatacaacaggcaggtcagtatctcccttttatacaacg

SEQ ID NO: 2081 - DNA, 282 bp, Zea mays
  unsure at all n locations
  Clone ID: LIB3115-034-P1-K2-A2
ggcnattngttctacaacatgtcaacatatattttggtattctttagcaacaanagagcaacaggggcggtgaagatattttacattcttatgctccttgctcttnctgcatgtgttgctaacgctaccatttttcctcaatactcacatgcttctatagttgtccttttttcctcataccttttatcaatgacctgctttagttatgtaaaactctacttttcaattttacatgctttaatcagtaattttatcatagaacttacttttatcattcttgtt

SEQ ID NO: 2082 - DNA, 366 bp, Zea mays
  unsure at all n locations
  Clone ID: LIB3115-034-P1-K2-A4
cggacgcgtgggcgccggcatgcagaacactttctaggcggcttctcttcactcacctgcagagtgcaccgcaataatcagcttccggatggtggcgttttgtcagttttggatggaaatgccgaactggcagcgtctgttttccctatgcatatgtaatttcctgcctctttatattcactcttgttgtcaagtccaagtggaaaatcttggcatattatacatattgtaataataagcatcgtacaatctgcatgctgttttgtaataattaattaatatcccagcccattggatggacttgtttaccatggtgttacttcnnannaaaaaaaanaataaaaaaataaattaaaaataaataat

SEQ ID NO: 2083 - DNA, 358 bp, Zea mays
  Clone ID: LIB3115-034-P1-K2-C1
cccacgcgtccggattaaggaggagctggtgaagggtgctcgactattggtaactggtaacactagtctggttaagaaactaccatcaaagtcatcaagatgaactacgggcatcgcaagcgttagtatatgttcccaaaaagccatttattatccgcataaacagtaaaacaaggtcgacaagctatagagctcgcctctgctttggagatgtcaactgtaggttacacaatagccagtatgattcacgtagggaccaaagactatgttggatagatatttgtatcattcatgtaaaatgtatgtggaagattgaaacagaagaaaataaataagtatgataatttgaacttcggcc

SEQ ID NO: 2084 - DNA, 371 bp, Zea mays
  Clone ID: LIB3115-034-P1-K2-C3
gcaaccagaagtgttaagtcccaacagctttattagtcttaggctacgggcactcgtgcgcggcggctgtttatgacacgagcatcgaaagcaagagcactaactacagcaattggatgcggctgtctacgctgcgaaaacgccatcgattatccgcataaacagcttatcatggccgacaccctatagaggtcgcctctgctttggagatgtcaactgtatgttacacaataccacagtttgatgcacgtacggaccaaagactatgttgcatagatatttgtgtcattcatgtaaaatgtatgtggtagatcgatacacaagaaaataatttagtttgttaatttgaaactttgtcaaaataaataaat

SEQ ID NO: 2085 - DNA, 346 bp, Zea mays
  unsure at all n locations
  Clone ID: LIB3115-034-P1-K2-C4
cggacgcgtgggctggagatcatgcgtgtaaataggtcagccatactagtagtagattagagaaagaaacgtatagagagaaagagagagaggttcttgaaggcctacttcactcgtcccagctgctactgtacaatatcaatgaagcactgggtggtgggcttgggatctcaagttgaaccacgatgagattcacctggagcgtgccgatgccgacgcagtgccgtatgagatgtccatgcaaaagaggatttgttcaattattaataactcaatcaaatagcgaccaattggtcaactttctttgaccaannnaaaaaaaaaaaaataatataaaattttttat

SEQ ID NO: 2086 - DNA, 305 bp, Zea mays
  unsure at all n locations
  Clone ID: LIB3115-034-P1-K2-D4
gaaaacngggcgaccacgcgtccgggcaggggcccgtacgtacgtgtctctttctctctctcatcttgtcaccgtacctatctagagtgtgtgtgttcgtactaattaaaatgttcttgtcgtcgtcgtctgtgcatgcatgtaccatgtcgtcgtgcatgtctattatgtgtgtgtcgtcgtgtcgatcggtacgtatagatgcctgttgttagcatgtgtgtcattacctagtcgtgtgtagtgtatgtatgtgcttgccgggcaaaagttgcatctagctaaacagtagtattacttttgtt

SEQ ID NO: 2087 - DNA, 179 bp, Zea mays
  Clone ID: LIB3115-034-P1-K2-F8
attcactcttgttgtcaagtccaagttgaatttcttggcatattatacatattgtaataataagcattgtacaatctgcatgctgttttgtaataattaattaatatcccagcccattggatggacttgtttaaaaaaaaataaaaaaaatataaataaaaaaataattatttataatg

SEQ ID NO: 2088 - DNA, 255 bp, Zea mays
  Clone ID: LIB3115-034-P1-K2-G5
acgtgtacaactactaccggaagtttcacttttcttggactagatctgatatttttattgcgtctatatttatttttattttcttttgcttcgttctcttcaagagctctttgctttctttgcggttctcccaagagttctttgtacctatgtattacaaattctttatatgtataagatgaggacaattttggcaattaaaaaaaaaatacctattaatatttttcaaaattaaaataatcataatattttaag

SEQ ID NO: 2089 - DNA, 309 bp, Zea mays
  Clone ID: LIB3115-034-P1-K2-G9
cccacgcgtccgcggacgcgtgggttggattttaattgatacatttgaaaaatctgaaaactaaaatagaagtataaatttgaatttggaatagaaaatagaaagtaaaagagaagggaagaactaagaaaaaatcctacataaaataaaataaaatcagaataaacatccttcacacttataatattaaattatactattcaaactaaggaccagttattcacaaaagtttgaatttaaacttgaactcaaattggatttgaaaatggagaaaaaaaaaaaaaaataaaaaaaaaaaaaaaaaaaata

SEQ ID NO: 2090 - DNA, 239 bp, Zea mays
  unsure at all n locations
  Clone ID: LIB3115-034-P1-K2-H12
cgcgnncgagttctagatcgcgagcggcctcacctgctgctgctttcggtagctagggtagctgcgcgcatgcacagatgcaggtgccagagtgccagtggagaatggagcgtcggtctctctctcgtctcgatcgtgtaagataaatatatggcagatgataatgcacattacaaattaaaaaaaaaaaataaaatttaatcattataaaatatttaataaatttttttataataaaa

SEQ ID NO: 2091 - DNA, 289 bp, Zea mays
  unsure at all n locations
  Clone ID: LIB3115-034-P1-K2-H5
gccacgcgtccgtccacgcgnctttttcacgtgntcttccacgcgnccgcccacgcgtncggttctagttcgtgagcggccggccctttttttttttttttgttaaaagcataataatcatttttttccgtccatttctatgaattccaacagatcgaagaactttaacctgggagattaaaaaaaaaacccttttcggtataacattactgatttactgtacacagcacgccatattcatggttcgcttacttcttggacacttaggcttagtactgcgtcatgggca

SEQ ID NO: 2092 - DNA, 251 bp, Zea mays
  unsure at all n locations
  Clone ID: LIB3115-036-P1-K2-A10
gttctagatcgcgagcggctccctttttttttttttttnctcaacaagcatagtattatgcggagcttatcttatcccagcggcaagaaggttgtcaagatcgcaaggaccagttttggagcaaagtgtaaaaccaaaaaaaaaaggaccgaatgaaactaagaacgcaaggacccttttgagtccatgtccatctctggcgtggcgtggcgtgcgcaccctactctgcccgttcatgcagtgcaacaaca

SEQ ID NO: 2093 - DNA, 255 bp, Zea mays
  Clone ID: LIB3115-036-P1-K2-A2
gcgggcagcgacaagtgcacacgtcacacttatgtcacactcaatcagtccatatcttttcttttcttttttgccgtcgccttggaggttgtagctagctgtacgaaaacgaagctacttttgtccaatatttgctatcggccatctggccttttcttttccattttgtttcttcaggagtactccagaatcatataatcactggataatattggatttggtcaagagctggttccctggcagaacactcccttt

SEQ ID NO: 2094 - DNA, 240 bp, Zea mays
  Clone ID: LIB3115-036-P1-K2-A7
ggcagcgacgagtgacgacagtggcatgcggtcgggcgggcgagcgtcgacggcgttctctaggtcttcgttgtccccttcaccggcggctgccaacgccctttgccaggtcttcgttgtcaccttcgccggcgactgtcacggccccttcgccagcttttcggctgccccttccccggtaccgggactgaagataagatggctgccttaccattggccacccgaaaagcatgtgatgct

SEQ ID NO: 2095 - DNA, 464 bp, Zea mays
  Clone ID: LIB3115-036-P1-K2-B5
actagttctagatcgcgatctagaactagtcccggtgaccatccgactcctggaccctcccctgcacgagttccttccagaagggaacatcgaggacattgtaagtgaattatgtgctgagacgggagccaaccaggaggatgccctcgcgcgaattgaaaagctttcagaagtaaacccgatgcttggcttccgtgggtgcaggcttggtatatcgtaccctgaattgacagagatgcaagcccgggccatttttgaagctgctatagcaatgaccaaccagggtgttcaagtgttcccagagataatggttcctcttgttggaacaccacaggaactggggcatcaagtgactcttatccgccaagttgctgagaaagtgttcgccaatgtgggcaagactatcgggtacaaagttggaacaatgattgagatccccagggcagctctggtggctgatgaga

SEQ ID NO: 2096 - DNA, 263 bp, Zea mays
  unsure at all n locations
  Clone ID: LIB3115-036-P1-K2-C7
acgctgacggaaccatacgtgccggaatcanctcggttgcacgcgaagcaaccagcttacgggggagctgtaactgggccgggctgtcctaactaaaacctgcgttatcgacctcttttcttttcttttttttactctctctctctctctgatataagactactggtattttgtcgatgtcgattggattagactagggctggtgtgtattctgtggatgctccgtgtttctggtggtattcaagttcaaacctgtgattatt

SEQ ID NO: 2097 - DNA, 71 bp, Zea mays
  Clone ID: LIB3115-036-P1-K2-D2
cccacgcgtccgaaaaaaaaaaaataaaaattttttttattaaaaaaaaaaaaaaaaaaaagggggggggg

SEQ ID NO: 2098 - DNA, 63 bp, Zea mays
  unsure at all n locations
  Clone ID: LIB3115-036-P1-K2-E7
gaanacccgggaaaaaaaaaaaaaaaaaaaaaaaaaaaaaaaaaaaaaaaaaaatttattatt

SEQ ID NO: 2099 - DNA, 115 bp, Zea mays
  Clone ID: LIB3115-036-P1-K2-F5
aaaaggccgggccacgaacggtcgctgttttgttcctccgaacacgaactactgcaatcctctaaggctatgtcaaatcacagaatcagtctaatctgcatgttgggcgtcgttt

SEQ ID NO: 2100 - DNA, 55 bp, Zea mays
  Clone ID: LIB3115-038-P1-K2-A1
cccacgcgtgcgcggacgcgtgggcggactttttggtcatactgcactacaagtg

SEQ ID NO: 2101 - DNA, 152 bp, Zea mays
  unsure at all n locations
  Clone ID: LIB3115-038-P1-K2-A6
ccatccaccatagtgaggaggttggacatgcatttacttatgcacccgngcttgccttactgggggtgtgtagctgtttggttagtgtccatccataactttgatttaaaaaaaaaaaataataatataaaaataataatatttcgtctcgt

SEQ ID NO: 2102 - DNA, 207 bp, Zea mays
  unsure at all n locations
  Clone ID: LIB3115-038-P1-K2-B12
ggcattgcggtgactcaaaagngtttcattttcactacgacagcgccaaggagcggcgggtcaccaactcctggtggacgactattccacacctgtggaggaaactcatccggtgcatcatgcccatcgaggtggccgtcggttatgtctcgaccaacgccggatacccgattgagctgctaaacattattactctgtgctgttcat

SEQ ID NO: 2103 - DNA, 369 bp, Zea mays
  Clone ID: LIB3115-038-P1-K2-C12
tcgtggacgcgtgggcggacgcttgggcggactttttgttatattgtccatattgacaattaaatggagggaagatacattctaattgtatgcaaacctgatgtttgataactattagtgtatctgtttacattgtatactaatgaacaatatttgttccatgtttgacttttatttcattacccctttacgtttggcaggacaaaagctgtgccacctttttttttcatgccaactaaaccaatttttgatgtatccacccatttgttgagcagaacaaggaaaaggtttttaaaaaaatggaaattttatgcgcaggggttgagcttaactcggtttttaaaaagcattttgtggagctattttttt

SEQ ID NO: 2104 - DNA, 434 bp, Zea mays
  unsure at all n locations
  Clone ID: LIB3115-038-P1-K2-C2
tcgcccacgccgttcgtctggtacaacgttggatgatatggttattgtccttaaagaaccaataatcatgctcaatagcgtgagtaaactcgggaaaacgttctgcacaagtgtgctctgtcgccggaacatgtcagatgnggtcacacgtgttcttccaaagagcacgtgtgaatgaaagggtaaagcacaaccttgatgtttatgattggtcaattccagatgacttgcttgcaaaggtctctgagattaagcaggctaggctacttagaggcgacttcattgtgaattcagagagcgtttacacgacccacgaggagctctgggatggtgaacttttagaaggacgccgttgtccgtcctgactcctgagcacggagcaagcagcgtttcattatggcccgtcagatcattttaccttcaaagttgttttt

SEQ ID NO: 2105 - DNA, 239 bp, Zea mays
  Clone ID: LIB3115-038-P1-K2-E2
cggacgcgtggggcagtagctagctggctgtttggttatagttgttgctgcaaataagcagcacggttcaatgtagacagttggtggtgccctcttttagattgcttattagttgtaattcaataataaagttttttggatgatgtatgtggccaaccagaaataagaagttacatttccagattcttaaaaaaaaaaaaaaaaaaattaataaaaaaaaaaataaaaaatataatatt

SEQ ID NO: 2106 - DNA, 236 bp, Zea mays
  Clone ID: LIB3115-038-P1-K2-H2
atcatatctccgagaggcggtagaacggtttgtcgtgacttgtctctagccaggggttgaaagggggggaggagggccttgttttgttgctctgtacatgactcgctaggacgtagtgtcacagtagaaggtttgttgttcggtctagttggtgtctggtgacatttcgattggttttgatcgtgaaaaccgtattttttttaaattaatatattatatttttatatttattaatt

SEQ ID NO: 2107 - DNA, 261 bp, Zea mays
  Clone ID: LIB3115-039-P1-K2-B5
cggacacatgggcgaagatgcgcccggcctttttgtctcgccgaggacagggccaagaatgacgagcccatgatggtcaagttgagctggatctttgatatggaagccgttgtttaggcacttgttgctaactgtgatatgtgctcagatcatgttgctagctgtcagtgtctttgtcacattgttgttatgtgtttgaaattgccgtagaatgttttttttctgctattatcacataatttctgcataaatatattttct

SEQ ID NO: 2108 - DNA, 103 bp, Zea mays
  Clone ID: LIB3115-039-P1-K2-B6
aaagagtgtaaaaacggctttacaagtctattatgttgcggagttcgagtaggccgcttcgtctcgaaacgatcttggtaaaagactgatcattcgtgttgcc

SEQ ID NO: 2109 - DNA, 281 bp, Zea mays
  Clone ID: LIB3115-039-P1-K2-B7
tcgactacgccccataaccagtggttttttactttttgtcgcagccaaactcgagcgggttttgcacgtatttcgtgcggcttacgcaactcccgtactccatgcaacatgcacagccgcacccacatgtcatgatcttctactgtgttcacacgacaccgccggtgtactactccaggcaggagctgaatccgcatcatccatcttaatcaatgctcgccgtctgtaccttttcatgcgataccctcacgctcatgctgctccggatctttactactatt

SEQ ID NO: 2110 - DNA, 365 bp, Zea mays
  Clone ID: LIB3115-039-P1-K2-C3
atccaggacaaggaggggattcccccagactttcagtttctgatcttcgccggcaagcagggggaggatggtcgcacccttgcagactacaatatccagaaggagagcaccctccacctggtgctccgtcttcgcggtggttattaagccatcagtcgttgaagctgctgctgtatctgggttatctagtgtctctgccattgcccatggatggtactgtctttcaaagtatttgtatggtttgtgtcgtgagtcgtgactgaactggtttcatggaccagttgtgttctcgttacccaaaactatggggcgaccgcatatggcttaattaatgaataaaagtttgtgtctgatattttaactta

SEQ ID NO: 2111 - DNA, 363 bp, Zea mays
  Clone ID: LIB3115-039-P1-K2-D11
cgcggcatcggcatcgccacaaggctttctttcgctcacgcccccggacccttctgcccgggccgccgctcgccggagctccgcgtctccgcccgcgccacaccctaattctcaatggctgccgcaaggggcattaaccagctcctgaagagaactctttacaaccagtctgctggttcgtcgccgcttttctcatttcggggaaagcatgaataatcctttgctggactgagagcattggctcttcttggagttggtgcctttggtcttatgtgtttttctacaatatcatctgctgatgaagctgagcatggctttgcagcctcagtttattcctggccacatgcttggctttatgatgct

SEQ ID NO: 2112 - DNA, 403 bp, Zea mays
  unsure at all n locations
  Clone ID: LIB3115-039-P1-K2-D6
nccacgcgtncgncttaccgttttaaacgattcctttgatgatgccacagatgatgacgcctaacgtgatgtcaccattgatgatgcccaacatgaagtcaccaatggtcttgccgagcatgatgtctcaaatgatgatgccacaatgtcactgcgacgccgtttcgcatattatgctgcaacagcaggtaccattcatgttcaacccaatggccatgacgattccacccatgttcttacagcaaccctttgttggtgctgcattctagatagaaatatttgtgttgtccctaataatgaaattgacatgccagtcgcgtgtgaactcaattattaaacaataaaacaaggttttcttcttatttttcctagaaataaattacttttatatttatattattat

SEQ ID NO: 2113 - DNA, 289 bp, Zea mays
  Clone ID: LIB3115-039-P1-K2-D8
gctggccatgctggcgttcctggtcttccttatccagcacaacgtcaccggcagggggccgttcgacaacctgctgcagcacctgtcctacccatggcacaacaccattatccagaccctgtcgggttgagtcgacggtccatcaggtcatgtggtccgagctgaaaggccgagactcgaagacagttcgtgtgatgcgttcttaatcgactgagggctaaggaatgtgacgtactggtatatgtacattagttgaagcggtggctataaagggtgtagagattgtttc

SEQ ID NO: 2114 - DNA, 239 bp, Zea mays
  Clone ID: LIB3115-039-P1-K2-G3
ggcccggggttttttttttttttttttttttttttttttttttttttttttttttttcacaaaaaaatgatgaaagggctaggttctggcatcatcgaatcatttacccaaatttacattcagcccaattgttaaatttcaagggaaacagaaaacccatacaattaatcgaatttaacatgctgccactttttggttctgtatacattgagactaccctagtacacatcagtttccac

SEQ ID NO: 2115 - DNA, 575 bp, Zea mays
  Clone ID: LIB3115-018-C7-F3C
ctcctggccgagcacgacgagcagcagcagtccggcgaccacgactgcgacggggacgccgcgtcgtcggattgcatcgtgtgcctcgagacgctggaggcggcggacgaggtgcggcggctgggcaactgcgcgcacgccttccaccgcgcctgcatcgaccgctggatcgacctcggccgcgcgacctgcccgctctgccgctccgacctcctgccgcgcgcgccgggctgggccagccggctcggcctgggccggctcacgcgcgttcggtgaggaggaccgtcttccagggcagtttttaatttgtctattggatgatggggcgcggacaggttagcgacggcgatcgcccgggtggtataacagctgctctgcctgccatcagccaaccgctaatctacgggggggcttcattagtacgtaaaaggcgcctcacacttggtatacgtaaaagatatactagttattaatacgttaaaggattgagtatacggcacctagatgtttcatttgtacacgattttaatttcagtctctcctcgaccatataatagtaattaaattagttcgtc

SEQ ID NO: 2116 - DNA, 165 bp, Zea mays
  Clone ID: LIB3115-018-C7-F3B
agacggcgtccggccgagccacagcgagagccggcgaccacactgcacggggacgccggtcgtcggattgcatcggtgcctgagacgctggagcgggacagggcggggctgggcaactgccgcacgccttcaccgcgcctgcatcgaccgttggatcgacctcgg

SEQ ID NO: 2117 - DNA, 511 bp, Zea mays
  Clone ID: LIB3115-001-Q1-K1-A5-F1A
taatttttttttaatccagtatcatcaataccacaatataacaagtttgcaaatcttgcttcgtttacaggctcggcaacacggcaaccaaacctcataccaatagagcttagatagcgcttcactaagtgtcatgcatagcgactaaatgatatgcttacaggaacttattaacaaacaccacggcgggaccttcatcgttgataattgaatttgcatatggctgaaggttcacggccctccacaggtcccttcaaaaggagaaccagcttcagtgagcccgctcccggagaacctcgatgtccacctccgatgggtcggtcgcctggatttcgtagtggaacccgtcaagctcgtacttgatgcggtccttcgacgtggagtacagcatcttagcacgtatgcggggatgtcgatggggaccaggcaatgaagaaaatcttgcttttctgcacattctccccagtaacaaaatcaaaatcatacagcgcatatcggcagtcattctctg

SEQ ID NO: 2118 - DNA, 484 bp, Zea mays
  Clone ID: LIB3115-001-Q1-K1-A5-R1A
gaagagaagcaaaagcaggtggttgtggagaagacaggggctactactgaaactatgatgactttttggcctctctcccagagaatgactgccgatatgcgctgtatgattttgattttgttactggggagaatgtgcgggaaagcaagattttcttcattgcctggtccccatcgacatcccgcatacgtgctgagatgctgtactccacgtcgaaggaccgcatcaagtacgagcttgacgggttccactacgaaatccaggcgaccgacccatcggaggtggacatcgaggttctccgggagcgggctcactgaagctggttctccttttgaagggacctgtggagggccgtgaaccttcagccagatgcaaattcaattatcaacgatgaagctcccgccgtggtgtttgttaataagttcctgtaagcatatcatttagtcgctatgcatgacactagctgaagcgctatctaagctct

SEQ ID NO: 2119 - DNA, 190 bp, Zea mays
  Clone ID: LIB3115-010-Q1-K1-H11-F1A
agccttttaaaaaattttttaaaaaaaaattttggggttttaatttaaccataatcacaaagtttttcatcaattccaattccatcatacgtaaaaaggactctaaaggtattgggaaacgatattataaaggacaatttttaatggggggggaaacacctacatgttatctccttatcctaaacagaaa

SEQ ID NO: 2120 - DNA, 319 bp, Zea mays
  Clone ID: LIB3115-010-Q1-K1-H11-R1A
atcaagcaagcaagaatctactcggtaccaccatctgcgtacacatactaatccagcctgtcatccatcttcccatggcgctcaacgtgagttatctcctcttcggtgccgtcttgacttcgtttcagcgtctcatatccgggggcatcctctccatctgacgtctccaatctggagtattggcattctcaccccccgcgaaagtttatggtgaatttatttttggacggcttccgtacaaagatttttttcaagctgtcttatctgagtaatgtttttttcaaagtgtgttattagattgcagtactttttgtgtttc

SEQ ID NO: 2121 - DNA, 462 bp, Zea mays
  unsure at all n locations
  Clone ID: LIB3115-013-P1-K1-B1-F1A
aaaaaagtcacacgtggccacttataaggttgtccatatatgtatagtacaaactttttgtagttctgtaatactggacaggtgcctactgggtagtaaatcagccactacgttattccaagccatggggggctataggctatggcattcgaaaataccagcacattacattaccccccaaaaaaaaagtttcatcgcaaaaaaaaaactcacgcatcatcgtcgccttcaacagtgttgncacgctcacactcatcaatccattcactatatatataaataggctcagtgagtgcattaacagttgtgctggggttttcctgacagattctacaagatgcttcgccaatcagattcttcatgtcaattcggcactctacacttctcccgtggttgcagaataggcaggaaaagacagtgtcaagcttgtccatccgcttcttaggaagtggcttagcagct

SEQ ID NO: 2122 - DNA, 457 bp, Zea mays
  Clone ID: LIB3115-013-P1-K1-B1-R1A
cccacggtccgcccacggtccgcccacggtccggtcttgtgttgttcggagcgggcagcagcacacagccccatcccaatcctagtcgatcttcttcccctcctcaaggaagaaaagaagctgaaccatggggaagggaaagtcagctgctaagcacctcctaagaagcggatggacaagcttgacactgtcttttcctgcccattctgaaaccacgggagtagtgttgagtgccgaattgacatgaagaatctgattggcgcagtcttgtagaatctgtcaggaaaacttcagcacaactgttaatgcactcactgagcctattgatatatatagtgaatggattgatgagtgtgagcgtgtcaacactgttgaaggcgacgatgatgcgtgagttgccccatgcgatgaaactgttacctacaatcgtaatgtaatttgctggtattctcgaatg

SEQ ID NO: 2123 - DNA, 141 bp, Zea mays
  Clone ID: LIB3115-014-P1-K1-C8-F1A
acaggagctggcatcgacctgccggaaaaaaaaagcgctgcacatcatgcccttggaggagactacctgcggcaatggccggcgtcgaacgcacatcagcttcaccgacgactacaccgacctggtgcgcgacggcatcca

SEQ ID NO: 2124 - DNA, 420 bp, Zea mays
  unsure at all n locations
  Clone ID: LIB3115-014-P1-K1-C8-R1A
acgtgcgcgaataggggacgccgagcacgnagggcgcagcgcgtcggcgaactggtacacgtgtccaggtgccaatcggtgtcgccggactgttgggcgcgcgatcatgggggcgcctgggctcgggaagctggctgcccaggggggggcatcgagatcagcagcggggcagtgcgcggctgaaagtggtacaccccgctcaagaggaactccgggtaacaaaggcaaggctccccgggctgggccgcaaatggcgggcgcccttttacgccggagcctgttcccgcggagaccggacacaactctagacaggaccacccgccagaggttttgcatcggtttagtggatataaattatcggtatcactgatgcaaatgacgccggcccggaaacattcggacgttttttccaaccgccgg

SEQ ID NO: 2125 - DNA, 424 bp, Zea mays
  Clone ID: LIB3115-014-P1-K1-G2-F1A
aaatgcaaactagaaacgggcaagcgcaggatgtacatacagatctgagctgctgccatgcgtattacattctactggatacatggccactacgggggattacaaacaatgcttctacattccttaatgggggggacaatgcagtacaaatactaccagctagtagagtgtgaatggctgtcacccaaggaggggatgcgtaaacaaaacctcgatccgtccgtccttgtcgtaggcctccacgatcttcttggcataccccgggatgtgctgctcagctctttgctttccccatgcccgcctaacatgcagataattccgaatggtgtgatagtccagagagtagcgtgcgaactccagacccttgggtccaaccaagttcagcaggaaggccagaatgtcgccggacgcttgggcggagcgt

SEQ ID NO: 2126 - DNA, 420 bp, Zea mays
  Clone ID: LIB3115-014-P1-K1-G2-R1A
cccacggtccgggacattctggccttcctgctgaacttggttggacccaagggtctgtgagttcgcacgctactctctggactgggacaccattcggaatgggctgcatgttaggcgggcatggggaaagcgagggggggggcagcacatcccggggtatgccaagaagatcgtggaggcctaccacacccacggggggatctaggcaaaagatacgcatcagcgtgactctacagcaccattcacactctactagctggtagtatttgtactgcattgtagtaaagattaaggaatgggagagcattggttggaatgtgacgtggggccatgtatacagtaggatgtataggctgcatggcaaagctcaggattctgtaaggacatcctgcggcttccagtttctagggtggcatttga

SEQ ID NO: 2127 - DNA, 480 bp, Zea mays
  Clone ID: LIB3115-015-P1-K1-B7-F1A
atcaggacacatctctccacttccattttggagtggaaacccccctagaaataagtgtttcaggtttttacagcggggtcatggcaaacacacacatgctttccatcaggaggggcctctacatacaattgctaatcggaagaatatgaacgctaccgtggccaaaggatgcggagaaaaaattaaaactgattgatctttaagaacgggaggggcggcgcaaaggtgagcaacgggggctcacgttaaaaaggcagatcgaggctcccacgtaaatgaggtatgagaaagagataaacagatgcaaatcttcctccctaaatgcgaagaggctggtttgaaaacccacaactcaacactgcgccaaatttgcccctcgttgttgaagaaaaactgccctggtgttatatcttgtacaaatcctcatcaggagggtcccttatgcttccatctggggatgcgactgcctccaggccgagc

SEQ ID NO: 2128 - DNA, 491 bp, Zea mays
  Clone ID: LIB3115-015-P1-K1-B7-R1A
cctcgaaaagcacctttcttcgccgggtttgccttaatatgccatggtcaacacgcatgaagattgcattcgggtgctgcaagggggctcgagtaccttcacggagctgagagatccatcatttatcgagatttcaagaggggaaacatcttgctagatgcggattacaatgctaagctttcagactttcgcctcgcaagaacaggtcctagtggagaccaaacccatgtgtcaatcgggtcatgggaacttatggatacgcgctccagaatatgtcatgactggccatctgacggcagaagtatgtttatggcttcggagtggtgcttctagagatgattatcggaagaagggctgtggacaagagccggccaagccgtgagcataacctagttgactgggcacggcccctcctcgtccataacaggaagctgttccgaataatcgatccgagaatggaagggcaatactccaccaaggctgccactgag

SEQ ID NO: 2129 - DNA, 178 bp, Zea mays
  unsure at all n locations
  Clone ID: LIB3115-001-Q1-K1-A5-SP6A
acacagaggacgaggggcgaggcacgcgaacaaacggggcgcccaacaagagcaaccaggaacccacagcagcgacaaagggaggaaanagggcggcggngancccacacgccagggggggacaccagacgccgcacgngacgaaacggggcgaagcaccnactcccgaggggggcag

SEQ ID NO: 2130 - DNA, 458 bp, Zea mays
  Clone ID: LIB3115-001-Q1-K1-A5-T7A
aatccataatcatcaataccacaatattactattttgcaaatcttgcttcgtttacaggctcttttacacggcaaccaaacctcataccaatagagcttagatagcgcttcagctagtgtcatgcatagcgactaaatgatatgcttacaggaacttattaacaaacaccacggggggagcttcatcgctgataattgaatttgcatttggctgaaggttcacggcccttcacaggttccttcaaaaggagaaccagcttcagtgagcccgctcccggagaaactcgaagtccacctccgatgggtcggtcgcctggatttcgtagtggaacccgtcaagctcgtacttgatgcaggccttcgacgtggagtacagcattttagcacgtatgcgggatgttgatggggaccaggcaatgaagaaaatttggttttttgcacattttccccagaacaaa

SEQ ID NO: 2131 - DNA, 543 bp, Zea mays
  Clone ID: LIB3115-009-Q1-K1-G4-SP6A
agctgatcccagagtggctgagctttgtcaagggtattgttgactctgaggatcttcccctcaacatctctcgtgagactctccagcagaacaagatcctcaaggtcatccgcaagaatcttgtcaagaagtgcgttgagctgttttttgagattgcggagaacaaggaggactacaacaagttctatgaggccttctccaagaacctcaagcttggcatccacgaggactccacgaacaggaccaagattgctgagctcctgaggtaccactcgaccaagagcggggatgagctgaccagcctcaaggattatgtgaccaggatgaaggagggccagaacgacatcttctacatcactggtgagagcaagaaggctgtggagaactccccgttccttgagaagctgaagaagaggggctatgaggtgctgttcatggtggatgccattgacgagtattctattggacagctgaaggagtttgagggcaagaagctcgtctctgccaccaaggagggcctgaagctggacgagagtgaggatg

SEQ ID NO: 2132 - DNA, 481 bp, Zea mays
  Clone ID: LIB3115-009-Q1-K1-G4-T7A
acatataatagaaccaagaacagaagaacttggggatgcgttccaattcccagtcaaacatttttttagtcccacaggggaatgttttctaccactgatgcgatgagaaactgaccacgcaaaacaacaacaaaattaacttgaagacagcagagacaattgttgcactagcataccaacaacagattgcataatagcataagggggaagacccacagaacagacccgatgttctttttttttcctccataagaataaacccagcttagtcgacctcctccattttgctttcgccagggttatcctccaaagggggcatgtcggtgtcagcctccggagcctcctcgtcctcgtcgatgctcaggcccagcttgagcatgcgggggatgcggctgccaaaggtgttgggatcgtcgaggctaaagccagaagtgagcagcgccgttttgaacagcagcatgacaaggtccttaacggactt

SEQ ID NO: 2133 - DNA, 536 bp, Zea mays
  Clone ID: LIB3115-010-Q1-K1-H11-SP6A
cataggctgagctttgttgagatggttgttccttatggagatccattttaaccacattatcgcaagaatgcatttgatgctggagaagatggacttggaaaaaatgctcattctcttaagaagggatgcgattgcttgggctacataaaatattttgatgcacatttcacaaacttcactggtggtgtggagacaattgagaactgtgtttgtttgcatgaggaggatcatgggatcctttggaaacatcaagactggagaactggtttagcagaagtaaggcggtcaaggaggctcactgtttcatttatctgtacagttgcaaactatgagtatggtttttactggcacttctatcaggatgggaaaatagaggcagaagtaaagcttactggaattctcagctaaggggctttgatgcctggggaatcgaggaaatatggcacaactattgcccctggtctgtatgcaccagttcatcagcatttctttgttgcccgtatggacatggttgttgattgcaaacctaatgaagc

SEQ ID NO: 2134 - DNA, 565 bp, Zea mays
  Clone ID: LIB3115-010-Q1-K1-H11-T7A
aagcaagtccaaacagtactttattagaacgcgagcaatgtaaacagtacttcacatcccgctgatcgataatcatagaaaaccatcaaacaattatagcaaacagaacggtattaccaagcaacaaacaaaaggacatcgagcagttttcctttttactcgcggaatacgataaaaaaatagtagggagagcagccgcgcgcggatcctttttcctcggcagaacagcaaagctcacagcttcgatatgaggctattctggatggccttgggcgactcggcttccttgacatccgcatcggacgagctgggaggcacgtcgaccgcaggcgagcagttgaagaatccatgtggcatgagcatgaagcctatgtgctccaccggcatgactggccaatcttctagcctggggatatgggtgagcccgaacacgtaccagagaacaatgtcggtttcctccagaggcctatcattcttgacccatgttggcagaccctcatggatgcgaggattctggttgggaaactcccctccagggaacatctcgccacgcttgtattgagtg

SEQ ID NO: 2135 - DNA, 184 bp, Zea mays
  Clone ID: LIB3115-013-P1-K1-B1-SP6A
cggagggagtagaatataggtatttctgagaactgaaatcaaacttttttaggcactactatgtcatcctgcatcacattctgtcactacatgtaatgctatgtgtttttggactgttgacatgctttattagttactgcttattcaaaaaaaaaaaaaaaaaaaaaaaaaaaaacaaaaacaa

SEQ ID NO: 2136 - DNA, 157 bp, Zea mays
  Clone ID: LIB3115-013-P1-K1-B1-T7A
gggaaaaaccgggacctaaaaaagggtggcaacgggccaaaaacccataactttacttgttgggccaaaatgggatgccggaaaacaaaaaagggcccccccggggtggatttcagttttaaaaaaaccctattttttcccccctcccgggccccgg

SEQ ID NO: 2137 - DNA, 587 bp, Zea mays
  Clone ID: LIB3115-014-P1-K1-C8-SP6A
cccacgcgtccgtgggaatggaaaaacaatgcttgccaaagctgttgtatcagaatctgaagcaacattttttaatgtttcggcttcttcattgacatcaaagtgggtaggagaagctgaaaaacttgtcaggacacttttcatggttgcaattgatagacaaccatctgttatttttatggacgagattgatagtgtcatgtctacaaggttagctaatgagaatgactctagcaggcgtctgaaatctgaatttcttatccagtttgatggggtgtcctcaaacccagatgatctagtaattgttataggggctactaataaacctcaagaattggatgatgctgttcttcgaaggctggtaaaaagaatatatgtgccactacctgatccaaatgtacgaaggttacttctgaaaaatcagctcaaaggacaatcattcaaactgtcgaaccatgattttgaaagacttgctgtggagaccgaagggtattctggaagtgacctgagagccttgtgtgaagaagctgcaatgatgccaataagagagctcggtccacaaaatattcttactatcaaagcaaatc

SEQ ID NO: 2138 - DNA, 590 bp, Zea mays
  Clone ID: LIB3115-014-P1-K1-C8-T7A
aacacatatacgagtcattaagcatgtaggttttgtgtttctttttacacaacgaccggcttgttcgctgcggctacaatccggctgcggctgcggcttctacagtatttttctctctatggattgcagctgcagcagtccaaacagctgcaacagtgtcagcttgcagcctgccgaacacgcccgacgatacttcgatttcgccctcggcggcccagagcagctataggctaataataacacacactagaggtttgtttttttaaataacttgggcagcggcatttcaatgggtatacatatagggctgttcccagcattatattgtaccttctgcttctgttgaagacgcgctgtccagactgaggacgcatcgatggccgatgggcgcgtgtgtgtgtgtaagccaccatgtgtgtgtgagacataaatcatgtacatctggaaatagggccgcttgatcatcatcatcaggcagcgcgcgtctccgtcagctcgaaccgaattcctcgttccagttctccagctcgtcccatttgctcttctgcaagcttggcctgatcaccgtcatcgcgttcttgaagtcctcg

SEQ ID NO: 2139 - DNA, 582 bp, Zea mays
  Clone ID: LIB3115-014-P1-K1-G2-SP6A
gttcccagttcccaccgtgtagatgggttcttggtataaaaatgtatttctatatttgtaacacagattactatatacaggttcgtgatcaaactttgagcagaataaagagcaatattgaactcatagtagcgacaaatggtggaaatagggtggtggtgatcccacactccatgggggtcctctattttctgcattttacgaaatgggtcgaagcacctcctcccgtggggggcagtggtggtccgaactggtgtgagaaccatattaaagctgtaatgaatattggaggatctttcttaggagttcctaaggctgttgctggggctttctcatctgaagccaaagatgttgccgttgctaggtataaggtaattgattcatttatttaaagcaaaagggaatagcaaaagaatggaatattattggatgctcgacaagcttggcggagcttttgctcccaagccatcttctggacctaacaagtccagggagtgcctgcctctgatcctcatcatcaggaacaggctcaagtatgcaccgacgtaccgtgaggtcatttctattctgatgcaacaccat

SEQ ID NO: 2140 - DNA, 715 bp, Zea mays
  unsure at all n locations
  Clone ID: LIB3115-014-P1-K1-G2-T7A
aattaattaatataaataagtaccattcaatatatcataaataagcattgtcaaacaacgcatacatagtgtactctaaatctaaactaaaatacaactgtttgcactaatgttaagcctaactttatatgaaatcaagtctccacacttttgtggccaccaaatttgaatttcattctatgttttcctgtacaacaaataggagaaaactagacatagcaaaaagctccaagcagcacgtggatggtctcgaagttgcccttatgcttctcccttatcttgatcactcctacacgcccggtattcctcctgccgatcaccatgaccacgttgccgacgtcaaacatgatgaagtccatgatcttgttggtctccagatcgatcttgatggtgtcgttggccttgatgagcgggtcggggtagcggatggtgcggtcgtcgtaggtgttcagataggggatgtctttctggccaaactgaacagacctcaccttgtagagcttgaacttggcatcctcatccctgattgggtgaagacgaaagcagcctgtagttctcgtttgtcttagggatggaaatgacatccatgaacccagcagggtaggtcttgtcagtcctgaccttgccatcaacaagtacatgngtgtgcatcaggatagaaatgacctcacggtacgtcggtgcatactttgagcctgttctgatgatgaggatc

SEQ ID NO: 2141 - DNA, 326 bp, Zea mays
  unsure at all n locations
  Clone ID: LIB3115-015-P1-K1-B7-SP6A
cgcggcancaaacagaaccacttgatgaggaggcatcatggctcgcttttttgccgccgcagcaagcggagaggaaggcagccatgtnggagggagagggcgcctccgctcnccggngaacacaggccgcggcggcgaggacgacgacagcgccggcggggacaggctgacgacggaccggntcctcacctggcaggcgacagacaaccggccagacccgacggcggaagagaggcagcggcggcaccaggagtaccgccgcaacattgagcacatcgaggccaccaaccgggccggcaacctgacggacacgctcggcgagaacc

SEQ ID NO: 2142 - DNA, 418 bp, Zea mays
  unsure at all n locations
  Clone ID: LIB3115-015-P1-K1-B7-T7A
anaacncntctaacaacgttaatggatttcccctcccctcggagggggggggcccctttaaaaaaggggggcggcccctcttacaaaaaaaatggcgaaacccccccaattgtaaaaattccaacccccggggaaaaaaaaacctaacgggaaaaaaaacaaggtccaccgaggcacggggcccccagaaaaaaatacagctgattgatctttaagaacgggagtggcggcccccaaaggagaaaaacggggcttcctttaaaaggcaaatagaggctcccccctaaaaggggtgtaagaaaaaaaaaccagggcccaaaacttcccccccctaaacccaaaaagcgtggttaaaaaaacccccactaaaactcgcccccaaattcccccctgtggataaaaaaaaaaccccccgggg

SEQ ID NO: 2143 - DNA, 549 bp, Zea mays
  Clone ID: LIB3115-001-Q1-K1-A5-R2A
gaagagaagcaaaagcaggtggttgtggagaagacaggggctactactgaaagctatgatgactttttggcctctctcccagagaatgactgccgatatgcgctgtatgattttgattttgttactggggagaatgtgcagaaaagcaagattttcttcattgcctggtccccatcgacatcccgcatacgtgctaagatgctgtactccacgtcgaaggaccgcatcaagtacgagcttgacgggttccactacgaaatccaggcgaccgacccatcggaggtggacatcgaggttctccgggagcgggctcactgaagctggttctccttttgaagggacctgtggagggccgtgaaccttcagccagatgcaaattcaattatcaacgatgaagctcccgccgtggtgtttgttaataagttcctgtaagcatatcatttagtcgctatgcatgacactagctgaagcgctatctaagctctattggtatgaggtttggttgccgtgttgccgagcctgtaaacgaagcaagatttgcaaacttgc

SEQ ID NO: 2144 - DNA, 257 bp, Zea mays
  Clone ID: LIB3115-001-Q1-K1-A5-TAA
cggcaacacggcaaccaaacctcataccaatagagcttagacagcgctgcagctagtgccatgcatagcgactaagagagatgcttacaggaccttattaccaaacaccacggcgggagcttcatcgatgataattgattttttttttggctgagggttcacggccctcatcaggtccgttcaaaaggagaaccaacttgaggcagcccgctcccggagaagcttgatgtccacctccgatgggcacggccgcctga

SEQ ID NO: 2145 - DNA, 280 bp, Zea mays
  Clone ID: LIB3115-009-Q1-K1-G4-R2A
gttacaaatcagccaacccgtactgcctagagaggatcgttgaacagaacagatcgaacaggacatcgctctcgtaccgagcctgactctatcatctgccagtgcctatgcaataaaaatgccctacccctgcgcaggactagaaggcttgtacaagccgctgtctccggactgactacgatgattggagcctgcggtttgttccccttctcggagtaactgaagcagtcgcaatgcaaccatttggcggaggagccctactacaccggcagtgggcaga

SEQ ID NO: 2146 - DNA, 545 bp, Zea mays
  Clone ID: LIB3115-010-Q1-K1-H11-R2A
gaggagacgagctcaagcgactcgctactattttctggagcgaaagtccgtaatgctgcctgtgagtctgattgtcttgggacggaccgggatgatgggctctcccgtgacctgctgacgttccagctggcacgggtcattaacgcaacatgcggtcgagccctgcacatgcgacccgcgcactctgaaagagctctacattctcaaaggcacggacagagcgtgcaccaagcttagtcactggatgaactgccgaccgcagcttgatttcaaggaggcgtgtctcaaactgacgctgctgtcacaggtcggacctttaaaagcacagtggtctagcgtgctgtccgacgacgatgatgccgatgactctgattaaggatgaaaccttatttacaaccggacatagctaatatcccttggctacatcctaccgagcggtctggtaccatgtgaaagactggcaagtgctgaatgaccgacggaacccgggtggacttggagctgcaggaggccatcgccgcgtacccggacgcggtgcaccgtgt

SEQ ID NO: 2147 - DNA, 388 bp, Zea mays
  Clone ID: LIB3115-010-Q1-K1-H11-TAA
tcgaacgatatggactgatgcttctacaggttctcacctgatcctagacgaagccacgcatatctcctgtccttaataactcgttggacaaacgaatccttttgtgaacgccacttgaaaggagctatgacgggaaagttatggaggaatagagagagagtgccctgtgcctgcctttaacaatgctatacttgcagacaggaccctgggtatacatacccacgcattttactatataacgccgggctaggtgacgattgaactgacgcgctgataactcctgtaccatgttcatatgatgagacgacagatacaggcattccggatactcggcgaatgagattacgctcactcgtggacattccaccggactcgtggcatcccccat

SEQ ID NO: 2148 - DNA, 356 bp, Zea mays
  Clone ID: LIB3115-010-Q1-K1-H11-TGA
aacccggggggggagggggaccgaaaaaaaagaaagagggggcgacacgcgcgcaacagaagatggacgaaggcaggcgggggggagggggggggggaatgaggggagaaaaaggaaaagtggtgtgttggtggacagaaaggaagaggaggaggggggggggggggggggagggagggagggggcggggacagagggggggggggggggaggcgcagacggggcaaggggggaggaagggcgcggaggggagacggggagggggggggaggaggcgaggggggggggggacagaggagggaagaggacgggggaggcagggagggaggggaaggcggaagggggcggggggaagg

SEQ ID NO: 2149 - DNA, 553 bp, Zea mays
  Clone ID: LIB3115-013-P1-K1-B1-R2A
cccacgcgtccgcccacgcgtccgcccacgcgtccggtcttgtgttgttcggagcgggcagcagcacacagccccatcccaatcctagtcgatcttcttcccctcctcaaggaagaaaagaagctgaaccatggggaagagaaagtcagctgctaagccacctcctaagaagcggatggacaagcttgacactgtcttttcctgcccattctgcaaccacgggagtagtgttgagtgccgaattgacatgaagaatctgattggcgaagcatcttgtagaatctgtcaggaaaacttcagcacaactgttaatgcactcactgagcctattgatatatatagtgaatggattgatgagtgtgagcgtgtcaacactgttgaaggcgacgatgatgcgtgagcttgccccatgcgatgaaactgttacctacaatcgtaatgtaatgtgctggtattctcgaatgccatagcccatagtcagccatggcttggaataacgtagtggctgactgatatgccagtaggcacctgtctagtacttacagaactacaa

SEQ ID NO: 2150 - DNA, 594 bp, Zea mays
  Clone ID: LIB3115-013-P1-K1-B1-TAA
tagccctttatgggttgtcctatatgtatagtacaaactttttgtagttctgtaagtactagacaggtgcctactggcatatcagtcagccactacgttattccaagccatggctgactatgggctatggcattcgagaataccagcacattacattacgattgtaggtaacagtttcatcgcatggggcaagctcacgcatcatcgtcgccttcaacagtgttgacacgctcacactcatcaatccattcactatatatatcaataggctcagtgagtgcattaacagttgtgctgaagttttcctgacagattctacaagatgcttcgccaatcagattcttcatgtcaattcggcactcaacactactcccgtggttgcagaatgggcaggaaaagacagtgtcaagcttgtccatccgcttcttaggaggtggcttagcagctgactttctcttccccatggttcagcttcttttcttccttgaggaggggaagaagatcgactaggattgggatggggctgtgtgctgctgcccgctccgaacaacacaagaccggacgcgtgggcggacgcgtgggcggacgcgtggg

SEQ ID NO: 2151 - DNA, 473 bp, Zea mays
  Clone ID: LIB3115-013-P1-K1-B1-TGA
ttgtacctctctgtatagtacaaactttttgtagttctgtaagtactagaaaggtgcctactggcatatcagtcagccactacgttattccaagccatggctgactatgggctatggcattcgagaataccagcacattacattacgattgtaggtaacagtttcatcgcatggggcaagctcacgcatcatcgtcgccttcaacagtgttgacacgctcacactcatcaatccattcactatatatatcaataggctcagtgagtgcattaacagttgtgctgaagttttcctgacagattctacaagatgcttcgccaatcagattcttcatgtcaattcggcactcaacactactcccgtggttgcagaatgggcaggaaaagacagtgtcaagcttgtccatccgctttttaggaggtggcttaactgctggactttttctttcccatggttcaactgcttttcttcct

SEQ ID NO: 2152 - DNA, 462 bp, Zea mays
  Clone ID: LIB3115-014-P1-K1-C8-F2A
aagtcaaaccattaatacaaagttttttatcatttccaattccatcatacgtagaaaacaacttgaaaggtatttacaagcgaaattaacaaggacaattgtaaataaggtttcatccatctacaggttatcaccacatcctaaacagaaaaacacagatcactgtcacttaataacacagctgggaaaacagcattgctttgaaaacgccacttgaaaggaagctgtgtacggaagttatgtcaaaataagtgggacatgcactggcactgcctttgaaaatgttatacttgcaaaggggacacgtcgcattcatgcccagccatttggtaatacaaggccagtggaagtgatgattgcaggggaaaacaaataactcagctccatcttcatatgatgatagacagatacagcattcagcatcctggcgaaggaaaatacgctcacttgttgacattccac

SEQ ID NO: 2153 - DNA, 417 bp, Zea mays
  Clone ID: LIB3115-014-P1-K1-G2-R2A
cccacgcgtccggcgacattctggccttcctgctgaacttggttggacccaaggtctggagttcgcacgctactctctggactatcacaccattcggaattatctgcatgttaggcgggcatggggaaagcaaagagctgagcagcacatcccggggtatgccaagaagatcgtggaggcctacgacaaggacggacggatcgaggcaatggttacgcagtcaggtgactgactcacaccattcacactctactagctggtagtatttgtactgcattgtagtaaagattaaggaatgtagaagcattgtttgtaatgtgacgtagtggccatgtatacagtagaatgtataggctgcatggcagcagctcagatctgtatgtacatcctgcgcttgccagtttctagtttgcattt

SEQ ID NO: 2154 - DNA, 432 bp, Zea mays
  Clone ID: LIB3115-014-P1-K1-G2-TAA
atactacatctgtttcatttgttcaactgacaactgcctttgatgcgtgtgtccaaatcatatgaatgagtgaacgtgaacatggtctaagatccgaactactcaggtactccatttcgatgagtaatttttctcaacctcatcagagatggctttcagtggttttcgcttccgccttgagctcagcctcaccctcaaaagcaacgagttggccatcacaccgaccgaactaaaacccatcagagctccagctattgatggtgtcagtatcgtccccgtagctggaagcaatgctccagcagcaatgggtagtccaacaatgttatacaggaaagcccaccaaagattttgcttgaccgtcttcgtgggctctttactcaactctaaagcatcgatgaggctgggaatagcctgatgcccataagtacaacc

SEQ ID NO: 2155 - DNA, 555 bp, Zea mays
  Clone ID: LIB3115-015-P1-K1-B7-R2A
cctcgaaaagcacctttttcgccgggtttgccttaatatgccatggtcaacacgcatgaagattgcattgggtgctgcaagggggctcgagtaccttcacggagctgagagatccatcatttatcgagatttcaagacatcaaacatcttgctagatgcggattacaatgctaagctttcagactttggtctcgcaagaacaggtcctagtggagaccaaacccatgtgtcaactcgggtcatgggaacttatggatacgcagctccagaatatgtcatgactggccatctgacggcacgaagtgatgtttatggcttcggagtggtgcttctagagatgattatcggaagaagggctgtggacaagagccggccaagccgtgagcataacctagttgactgggcacggcccctcctcgtccataacaggaagctgttccgaataatcgatccgagaatggaagggcaatactccaccaaggctgccactgaggtggcaagccttgcataccgctgcctgagccagaaccccaagggacgaccaaccatgagccc

SEQ ID NO: 2156 - DNA, 653 bp, Zea mays
  Clone ID: LIB3115-015-P1-K1-B7-TAA
ctcccttcattttggagtggaaacccccctagaaaaagtgtttcaggtttttacagcgtcgtcatggcaaacacacacatgctttccatcacaactctcctctacatacaattgctaatcggaagaatatgaacgctaccgtggccagtggccatcagagaaaaaattacagctgattgatctttaagaacgggagtggcggcgccaaaggtgagcaacgcgggctcacgttaaaaaggcagatcgaggctcccacgtaaatgaggtatgagaaagagataaacagatgcaaatcttcctccctaaatgcgaagaggctggtttgaaaacccacaactcaacactgcgccagatctgcccctcgttgttgaagaaaaactgccctggtgttatatcttgtacaaatcctcatcaggagggtcccttatgcttccatctggggatgcgactgcctccaggccgagctggtgtccatcagagtccggtgacgggatgtacatcttgcactccaacgatggctcgctcttgctccggccattcccaggccgcgtccgcctgctctgggggactggctttccgttcatgggcggcatcgcggcgctctttactgccggttcctgcttggccttctccagctcaactctgtctgcagg

SEQ ID NO: 2157 - DNA, 589 bp, Zea mays
  Clone ID: LIB3115-015-P1-K1-B7-TGA
tgctattgcttcaggcgtacgtatgtctccaaacattattaacaggagaggatggatcttagatgcaaatagccatgtctaaatttacaccgatgaccaccaccatgtttacattcagatcattaacaggagaggaggtggatctagagcgagaggccaccggactcctcgtcctcgtcgaggtcagaggtgtagatggtgtagagggaccagatgaggccgaagacccccaggaggatccaccccagcaggttgttgctgagcccgaggctcagcccggtgccctccgtggacatgcgctcgtccacgagcgccagcgcgggccccgccgacgcggtcaccgcgcccgctgcggcgagcagcgacgcgcctgcgcccttggtgctgactggggccgcgttcttggcatccttggcgtagctgcaccgcaccctctcgctcctcgccctcaacgcaggcagccctagagcattgggcctggcgatcgcggcgcgggcaacgatggtggtcaccacggcggcgctgacggtggccatgactcctgcgtctcgatctcttttgctggatagctgagtgtgctgcctttgct

SEQ ID NO: 2158 - DNA, 295 bp, Zea mays
  Clone ID: LIB3115-019-P1-K1-C8-R2A
cgacgaatcggttcatgagatcctcggtgtccgcaaggtatatcattcctacgtgctcgatcgtgcatgcacgcacagtgttttttttttttttctctctctctttttcttgaggatacatatgccaatattttcagttaatttggtatcgaacactctctgatcatccctgcaacttttggtgttaagaggttgtgttgtttaggactataatctgtctatattatatattccaacaaataatgtgttatctggctggattatgtaattctggacagattattttcttaaacaa

SEQ ID NO: 2159 - DNA, 365 bp, Zea mays
  unsure at all n locations
  Clone ID: LIB3115-034-P1-K2-D7-TAA
ccccccccccccgcgggggggagagagagagggcccccccccccccccccccccccccccccnnnnncccccccccccccccccccacccccccccccccccccccgccccncccccccccccccccccccccccccccccccgncccccaccccacccccccnnaccggccacgaanccccaacccccccccgcccggcgcgccgccgcaaaaccccccccccccccccccccccccccccccccccccccccccccaaaccacacacacccccccccccccccccccaccgccccccccccaccacccccccccccccccccaccccacgccccccccccaccccgcccccccccccaccccc

SEQ ID NO: 2160 - DNA, 585 bp, Zea mays
  Clone ID: LIB3115-034-P1-K2-D7-TGA
tatatataaattatcgtattttatactttgaatataagttgttagtatttatgtggaatttatgtatatagtaggtggactttttttgtgctgcatctctataaaaaaatatttttttttttttttttttatatttttttttttttttttttttttttttttttttttttttttttttttttttttttttttttttttttttttttttttttttttttttttttttttttttttttttttttttttttttttttttttttttttttttttttttttttttttttttttttttttttttttttttttttttttttttttttttttttttttttttttttttttttttttttttttttttttttttttttttttttttttttttttttttttttttttttttttttttttttttttttttttttttttttttttttttttttttttttttttttttttttttttttttttttttttttttttttttttttttttttttttttttttttgtttttttttttttttttttttttattttttttttttttttttttttttgtatttagttttattatatttataagttag

SEQ ID NO: 2161 - DNA, 567 bp, Zea mays
  Clone ID: LIB3115-039-P1-K2-G9-TGA
gatatgggtgcactattatgtgccatacatatatatataaaattctcgtattttatactttgtaatttatcgatttgttgtatatactgttgatatttatgatgtatagttagtgttgactttattttctgccgtcatctccacaaaaaaaaaatttttttttttttttttttttttttttttttttttttttttttttttttttttttttttttttttttttttttttttttttttttttttttttttttttttttttttttttttttttttttttttttttttttttttttttttttttttttttttttttttttttttttttttttttttttttttttttttttttttttttttttttttttttttttttttttttttttttttttttttttttttttttttttttttttttttttttttttttttttttttttttttttttttttttttttttttttttttttttttttttttttttttttttttttttttttttttttttttttttttttttttttttattttttttttttttttttttttttttttgtttttttttttttt

SEQ ID NO: 2162 - DNA, 506 bp, Zea mays
  Clone ID: LIB3115-020-P1-K1-H8-SP6A
tcgccggtcccgaacagcatggcctccacggccgcggcggcggcctctgagccgatgggggcgacggggacccgcgcgtggcgccgggccagcgggttggcgtcgtggatgtcggagtcgcaggcggcgcagagcacggcggcgtcggccttgcacgtgacggcggcgggggccagctcgcagacctcgcacatccacacgcgctcgtggcccaggcgcgcgtgcgcgggccgggcgtcgcacgtcgtgcagaggaaggatccaccaacgcacgtgcggcagtgcaccgccgccggggccccctcgcagctgccgcaccgccggccccccacgccccagtacttgtgcagctccatcgaacgtggtcaccaagcagcaggtgtgcgcgcccgccttctcctggctggacgcggctaagaggaggctcagctggacgcggcaatggtgaagcggttcttgtggtggtgggggagggaaggcagagtggctggcgtaatagtggaggg

SEQ ID NO: 2163 - DNA, 448 bp, Zea mays
  Clone ID: LIB3115-020-P1-K1-H8-T7A
ccctccactactacgccagccactctgccttccctcccccaccaccacaagaaccgcttcaccattgccgcgtccagctgagcctcctcttagccgcgtccagccaggagaaggcgggcgcgcacacctgctgcttggtgaccacgttcgatggagctgcacaagtactggggcgtggggggccggcggtgcggcagctgcgagggggccccggcggcggtgcactgccgcacgtgcgttggtggatccttcctctgcacgacgtgcgacgcccggcccgcgcacgcgcgcctgggccacgagcgcgtgtggatgtgcgaggtctgcgagctggcccccgccgccgtcacgtgcaaggccgacgccgccgtgctctgcgccgcctgcgactccgacatccacgacgccaacccgctggccccggcgccacgccgcggggtccccgtcg

SEQ ID NO: 2164 - DNA, 223 bp, Zea mays
  Clone ID: LIB3115-020-P1-K1-H8-TGA
aaagggaagggggggaggggaagggaggagaaaaaaagagagaaaaaaaagggagggaaagagaggaaaagaaagggaagggaaggaggggaagaaagggaaaggaaggaaaggaaaggaagggaggggaggggaagagagggaaagggaagagggggggagaggaaaggagagggaaaggggaaaggagaaggagaaggaaagggaagaagaggaagaggga

SEQ ID NO: 2165 - DNA, 111 bp, Zea mays
  unsure at all n locations
  Clone ID: 10LIB3115-004-Q1-K1-D10-R5
aatagaagcgcgacgccagggctgctctncatcaccgccgnaaggaaagaagatcaagctncccttattttcacgagcnagngacgaagagagannatacggacgcgtggg

SEQ ID NO: 2166 - DNA, 437 bp, Zea mays
  Clone ID: 17LIB3115-004-Q1-K1-D10-R1
cccacgcgtccgtataatctctcttcgtcactagctcgtggtaataagggaagcttgatcatctttccttacggcggtgatgaagagcagcacaatcgtcgcgcttctattggctgttgccattctgtcctcactgtctccatgctacgaagccggcggctgcatcgggaaacccaagaagtcaccgccgccgccgagaaggccatacttctcgtcctattccgaggaccaccagaaggaccaccagaattgccgcttgatctgtagctccaagggtttcaaggacggtggctggtgtgacgaaagcgtggagcacaaagtgtgctgctgctcccattagaaatataatagcgtatgttatgttgatgcatatatatatgcatcgtccatctacctctgtggtgcaaaattctgaataaaatctggcttttttgggt

SEQ ID NO: 2167 - DNA, 419 bp, Zea mays
  unsure at all n locations
  Clone ID: 23LIB3115-005-Q1-K1-A11-R1
cccacgcgtccgcggacgctggtcnnagcaggtccagcagcaccagcagcagcaggcggttggagcggtgaaatgcgagccgcccgtggccgcggcggcgtcggagctcatccggcggaacctcgcggacangatggccatgacgctgacgcgggaccccagcttcaaggcggcgttcgtcaccgcgctgtccggccggctcttcgagatgtcgccgaccaaggactgacggaacggatcggatggattgggagattggcatcgcaggagattctggatcagattgtcttcgagcgcacgccgcaatggtcaactgcgcagcgctggcttggctgtcagagcgaaacagcggtaacagagcaagacacgaggggtctgcactctgcagttgtgcaggaggaggaacagacacaagggga

SEQ ID NO: 2168 - DNA, 426 bp, Zea mays
  Clone ID: 29LIB3115-005-Q1-K1-C7-R1
cgtccacctccaccgccaccgatcggtagcaacgcgcaccaccgcgtcgtcgtacggcagcacacggaaagagagagagagagagagagagagagaggaatgggcgaccacgagggtcacggggtcgatttcgagaagaaggccgatcagaagctctccggctggggcctcttcggcaataagtacgaggaagccgccgacctcctcgacagggctggcagcttcttcaaactcgcgaagaactggagcagagcgactgcagtatacaaaaagattgcagattgtcatttgcagggggataacaatcacgatgctgcctctgcttatgttgaggcagcaaactgctacataaagttctccctgcaagatgctgcacaataacttaacagtgccgttaatcttttccaggaaatcagtagactgaac

SEQ ID NO: 2169 - DNA, 569 bp, Zea mays
  unsure at all n locations
  Clone ID: 32LIB3115-004-Q1-K1-D10-F3
gttgatctgagctccaagggtttcaaggacggtggctggtgtgacgaaagcgtggagcacaatgcgtgctgctgctcccattagaaatataatattgtatgttatgttgatgcatatatatatgcatcgnccatctacctctgtggtgcaaaattctgaataaaatctggcttttttggtnaaaaaaaaaaaaaaataaaaaaaaaaaaacaaaaaaaaaaaaaaaaaataaaaaaaaaaaaaaaaaaaaaactaaaaaaaaaacaaaaaaaaaaaaaaaaagaaaaaaaataaaatggggggcgccccttttaaagaacccaaatttacaaaccctggattaaaaaataaaatttttttataggggcccccaaaattaatttcgggggccggattttaaaaacgtcggaatgggaaaaacccgggggttccccaattaaaagcctttaaaaaaattcccctttttgacaagtggggttaaaacaaaaaaggccccaacccatttccccttttccaaaaaattttcccaaccttataattggaaaatggggacccccccccttttaagg

SEQ ID NO: 2170 - DNA, 415 bp, Zea mays
  Clone ID: 35LIB3115-005-Q1-K1-E10-R1
cggacgcgtgggcggacgcgtgggcggacgcgtgggcggacgatgggcggccgtcagtgggcggagagcatcggtcgtgcgcgcggcagcggctggcgacagggccgcgccggccggtgcccttccagcggcgctgttgttcgattgcgatggtgtgctggtggacaccgagaaggatggccaccgcatctccttcaacgaaaccttcgctgagagggaattaggtgtcagctgggatgttgaactgtatggagaattgctcaggataggtggtggaaacgaaaggatgacagcttacttcaaccagacaggatggccggctaaagcaccgaagacagatgacaaaagaaaggagttcatagcttctcttcacaagagggaaacaggattattcatggccccaatttggaaaaag

SEQ ID NO: 2171 - DNA, 671 bp, Zea mays
  Clone ID: 41LIB3115-005-Q1-K1-G3-R1
ggacctgggctctgcgtcacagtgaaagtggcatggtagatcaggttctgttaacaacaaatgcggatggtctaagatttgtcaaggttaggatgcgatctgttcgcataccacaaattggcgacaagtttagcagcaggcatggacaaaaaggaactgttgggatgacttacactcaagaggatatgccatggacaatcgaaggcattacacctgatattattgtgaatccacatgctattccatcccgtatgactattgggcagctgattgagtgtattatgggtaaagttgctgctcagatggggaaggaaggcgatgccactccattcacggatgtgactgtggataacatcagcaaagctcttcataaatgtaattatcaaatgcgtggatttgagacaatgtacaatggtcacactggaagaaaactgactgcgatgaattttcttggggccaacatattaccaaagcctcaagcacatggtggatgacaagatacattcgagaggacgtggtcctgtgcagatactcacccggccaaccagcagaggggcggtctcgtgatggaggtctccgctttggagaaatggaaagggattgtatgatcgcacatggagcagctttcttcctgaaagaaaggctgtttgaccagagtgacgcatacagag

SEQ ID NO: 2172 - DNA, 366 bp, Zea mays
  unsure at all n locations
  Clone ID: 44LIB3115-004-Q1-K1-D10-R3
tgcataacataacatacgctanatatttctaatgggagcagcagtttatttgtgctccacgctttcgcacaccagtttccgtccttgaaacccttggagctacagatcaagcggcaattctggtggtccttctggtggtcctcggaataggacgagaagtatggccttctcggcggcggcggtgacttcttgggtttcccgatgcagccgccggcttcgtagcatggagacagtgaggacagaatggcaacagccaatagaagcgcgacgattgtgctgctcttcatcaccgccgtaaggaaagatgatcaagcttcccttattaccacgagctagtgacgaagagagattatacggacgcgtggg

SEQ ID NO: 2173 - DNA, 223 bp, Zea mays
  Clone ID: 4LIB3115-004-Q1-K1-D10-R4
ggaataggacgagaagtatggccttctcggcggcggcggtgactttttgtttttcccgatgcagccgccggcttcgtatcatggagacagtgaggacagaatggcaacagccaatagaagcgcgacgattgtgctgctcttcatcaccgccgtaaggaaagatgatcaagcttcccttattaccacgagctagtgacgaagagagattatacggacgcgtggg

SEQ ID NO: 2174 - DNA, 613 bp, Zea mays
  unsure at all n locations
  Clone ID: 59LIB3115-005-Q1-K1-C7-F3
actgaacatggctgcaagatacagcaaggatatcggtgaaatctatctgcaagaacaagatttagagatagccgcagtctacctgaatcgcgctgctgatctttttgatagtgagggacaatcctctcaggcaaacagcatgacacagaaaatcgctgaaatatatgctcagctggaaaagtaccagaaagcaaccgagctctttgaagaaattgctcgtaaatcaataaacaataaccttctcaagtacggtgtcagaggcactcttcttaatgcgggcatttgccaactttgtagaggtgatgttgttgctataaataattcattggagcgctatcaggacattgacccaaccttctcagggacacgcgaatacaagcttttggcagaccttgcagcctctacggatgaaggagacgttggcaagtttactgatgcagtaaaggagtttgacagcatgacacgcctggatccttggaaaacaactctncttctgaaggcaaagaaacgagttggaagaaaaaggaggaaggatggaggatgatctaaccctaggctctgttccacaaaaaggtttcatgaatttcgttgagggatgcccgtgaaattcatt

SEQ ID NO: 2175 - DNA, 349 bp, Zea mays
  Clone ID: 65LIB3115-005-Q1-K1-C7-R3
gcagtttgctgcctcaacataagcagaggcagcatcgtgctcgttatccccctgcaaatgacaaactgcatatctttttgtataccgcaaccgctctgcttcagttcttcgcgaggttgaagaagctgccagccctgtcgaggaggtcggcggcttcctcgtacttattgcgcgaagaggccccagccggagagcttctgatcggccttcttctcgaaatcgaccccgtgaccctcgtggtcgcccattcctctctctctctctctctctctctctctttccgcgtgctgccgtacgacgacgcggtggtgcgcgttgctaccgatcggtggcggtggaggtggacacc

SEQ ID NO: 2176 - DNA, 618 bp, Zea mays
  unsure at all n locations
  Clone ID: 83LIB3115-005-Q1-K1-G3-F3
ctgngccccacatattaccaaagactcaagcacatggtggatgacaagatacattcgagagtcttggtcctgtgcagatactcacccggcaaccagcagaggggcggtctcgtgatggaggtctccgctttggagaaatggaaagggattgtatgatcgcacatggagcagctttcttcctgaaggaaaggctgtttgaccagagtgacgcatacagagtccatgtatgcgagaaatgtggtctcatcgcaattgctaacctaaagaaaaactcgttcgaatgcaggggctgcaagaacaagactgacattgtccaagtacacataccctatgcttgtaagcttctgtttcaggagcttatggcaatggccattgctcccagaatgcttacccatgatatgaagacagggaaggatcagaagaagcgctgaacgtgtatcacgtgagatgtaaccagaactcatgccccgttgctataattctggatcctggttcacacaatagtacccttgtgaggaactttgtgtcacttcttttctgatttggacttcggttcttcgcgatcgatggagggctgttactatctcttgatggattattatcctatctgtgctcgtg

SEQ ID NO: 2177 - DNA, 372 bp, Zea mays
  Clone ID: 89LIB3115-005-Q1-K1-G3-R3
tgaagagctttgctgatgttatccacagtcacatccgtgaatggagtggcatcgccttccttcccatctgagcagcaactttacccataatacactcaatcagctgcccaatagtcatacgggatggaatagcatgtggattcacaataatatcaggtgtaatgccttcgattgtccatggcatatcctcttgagtgtaagtcatcccaacagttcctttttgtccatgcctgctgctaaacttgtcgccaatttgtggtatgcgaacagatcgcatcctaaccttgacaaatcttagaccatccgcatttgttgttaacagaacctgatctaccatgccactttcactgtgacgcagagcccacgcgtccg

SEQ ID NO: 2178 - DNA, 204 bp, Zea mays
  unsure at all n locations
  Clone ID: LIB3116-006-F5-F1A
caagttgccgggaaccaaaccaagggaaacgggggatttcgacaataaaaaaagcaataaaacgtgtgggtaaactaaattaagcccaaaagcgcagatcacagtcaaatcaatggtgttgttatcctagacaaaaaaaaacccccgcaggaaagcaccccgtangagaaatngcagcatcccggcgttgccactaccaagtag

SEQ ID NO: 2179 - DNA, 178 bp, Zea mays
  unsure at all n locations
  Clone ID: LIB3116-015-H1-R1A
ccccgcccccccgccccctcccggcccccccccgccccccccccctcgccacacgcctcccnctcgctcccccgccttccgcgnaacgcatattcaggacggtcaaatcgctattcagctacgtggcgaacaacttacacggtgtgctcctcacttcagcgaagcacactaccatacc

SEQ ID NO: 2180 - DNA, 436 bp, Zea mays
  unsure at all n locations
  Clone ID: LIB3116-012-Q1-K1-F12
ctagttctagctcgcgatctagaactagttctagatcgcgatctagaactagggcgcgagcgcggagggcacgcccaagaggctgacctacgacgagatccagagcaaaacgtacatggaggtgaagggcacgggcacggcgaaccagtgcccgaccatcgacggcggcgtggagtcgttcccgttcaaggccggcaagtaccagatgaagaagctgtgcctggagccgacgtccttcaccgtcaaggcggagggcatcgccaagaacgccccgcccgagttccagaagaccaagctcatgacccgcctcacgtacacgctggacgagatcgagggcccgctcgaggtcggctccgacggcacgctcaagttcgaggagaaggacggcatcgactacgccgncgtcaccgtgcagcttccggggggcgagcgcgtg

SEQ ID NO: 2181 - DNA, 334 bp, Zea mays
  Clone ID: LIB3116-012-Q1-K1-F2
cgccttcaggaacaaccgcagagacaacgcctaccgcggcgggtggaagggcgggtacgcttgatccaccatcgcgtcgtttaggagcggagccatgcacgcgcgctcggtgctctgctctgctccctgcccgccgctgtcgtcgtacgtacatgtttagtaggctcgttgtagctctgtacaggtgatggagatcgttgttgcggattcttatcgtcttcctggttacatacttacattattgttatgatctgatcagcggtaggttttgtatacgctgctcattgattcgtctgcctgctattttcgtatatcgatgcacttgttttaccaa

SEQ ID NO: 2182 - DNA, 432 bp, Zea mays
  Clone ID: LIB3116-012-Q1-K1-F6
agttgctgagaaagtgttcgccaatgtgggcaagactatcgggtacaaagttggaacaatgattgagatccccagggcagctctggtggctgatgagatagcggagcaggctgaattcttctccttcggaacgaacgacctgacgcagatgacctttgggtacagcagggatgatgtgggaaagttcattcccgtctatcttgctcagggcattctccaacatgaccccttcgaggtcctggaccagaggggagtgggcgagctggtgaagcttgctacagagaggggccgcaaagctaggcctaacttgaaggtgggcatttgtggagaacacggtggagagccttcctctgtggccttcttcgcgaaggctgggctggattacgtttctggctcccctttcagggttccgattgctaggctagctgcagc

SEQ ID NO: 2183 - DNA, 370 bp, Zea mays
  unsure at all n locations
  Clone ID: LIB3116-012-Q1-K1-F7
aacctctgcagtctgcatcaccaactattccactagtaggtctaaattagtagccaagatgacgtcagcagcatcgttccccagcagcctcttccccttcccgaccagagcaagcacgccaccgcttccgtcgtcgtcctcccgaccgtctcactcccgcccccacctccgcatccgatctccgaaacctaataatccaacggtcgcgcccgcgtcctctcggatggaggtggcccagccccaggcgagcaacgcccagggaggggcggagccggccatgaagctactgttcgtggagatgggcgtcggctacgatcagcacggccaagatatcaccgncgccgccgtgcgcgcctgcaaggacgccatc

SEQ ID NO: 2184 - DNA, 448 bp, Zea mays
  Clone ID: LIB3116-012-Q1-K1-F8
ggtggggaaaggttctaggagcattatgtaaatcatgaacagtagtaccactgtaccagctaggtaatagaagaaacgcccatcttataagttgtattcctgctgatgtctattaattgtgggtgacagattgccaacatgataaggtttctggtggatagctacaacaagcccgtccctgctattctggagatcccatccaaggaccatccatatgatccagcgcacgactctgtgctctctcgagtgaaatatctgttctctgcagaatcggtggcgtctgataggcgatgaaggcatccttgcgtagcagtacccttcgatgcatctattttgttatggtattgaaaagaagatggcacgtaccattgtgtgcgagcgagccagcatgaataataatgagctttcaaacaatgattggttggactaaaaccaacacatttttttt

SEQ ID NO: 2185 - DNA, 275 bp, Zea mays
  Clone ID: LIB3116-012-Q1-K1-G1
tgggcgcgggagtcgcctccgactaagtatcgcgctaaagcggtcgctcctcgtgcggccgcattagcgcgctacatatacggtgggatagctaacagcacatgtgggctgtcgtcatcctaggtcgtaccacactttgcctatagtgaagtcgaataaaatcacttgttcggtcgtctgtaatgtgaccatttggtagagcttccaacgcgtttgatgcatatcttgtgtatactatatatgtacctaaataggttggcataattatggtcata

SEQ ID NO: 2186 - DNA, 366 bp, Zea mays
  Clone ID: LIB3116-012-Q1-K1-G10
cggacgcgtgggtggagttcacatatgaattgcacgagttatctggcaggaagcacccagcagtcaaaaccaagatgtacttagagtagaacaagatggaaagacggaacctcacgacgccgttgctgaaacctttgctcagaagctgagcatgtagtgtgcttgttacacccatgatgggtacattgagaccatttatgttgtattggtaatatcttgtttgattgcccaattaacggggtgagctattgtttcatcacaacatcgatgtgttagcagataaccacattgccgttttaagcaaacattgggtgcggaattttgttgtctttgtgaagtccgatgaaagcatcttcttctgatcaa

SEQ ID NO: 2187 - DNA, 441 bp, Zea mays
  Clone ID: LIB3116-012-Q1-K1-G11
gataatagtacatactacatgcttgcacctaagggagagttttataattattctggttgtggaaataccttcaattgtaatcatcctgtagtccgtgaatttatagtggattgcttgagatactgggtaacagaaatgcatgttgatggttttcgttttgaccttgcatctatactgaccagaggatgcagtctatgggatccagttaatgtgtatggaagtccaatggaaggtgacatgattacgacagggacacctcttgttgccccaccacttattgacatgattagcaatgacccaattcttggaaatgtcaagctcattgctgaagcatgggatgcaggaggtctctatcaagttggtcagtttcctcactggaacgtttggtcagagtggaatggaaagtatcgcgataccgtgcgtcagttcatcaaaggcaca

SEQ ID NO: 2188 - DNA, 344 bp, Zea mays
  Clone ID: LIB3116-012-Q1-K1-G12
gtgggggaccgattggataccgatatcctgtttggtcagaatggaggctgcaagactctcctcgtcctctcaggcgtgacttccctgcagacgcttcagagccccgacaactcgatccagccagatttctacacgaatcagatttcagattttctcaccctcaaagcagcaactgtctgaagagcccgcgttccatttgcacagcatgtcagcatcggcctttttttaacgaataaggaaatacaaaggacggatttgttttttttcactcttgtgtaatcatgggatatctttatgtgcaacatcagccatgcaaatatcataaggatgccaagaattaatct

SEQ ID NO: 2189 - DNA, 326 bp, Zea mays
  unsure at all n locations
  Clone ID: LIB3116-012-Q1-K1-G2
cccacgcgtccgnaaaaaaaaaaaaaaaaaaaaaaaaaaaaaaaaaaaaaaaaaaaaaaaaaagaaaaaaaaaaaaaaaaaaaaaaggaaaaaaaaaaaaaaaaaaaaaaaaaaaaaaaaaaaaaaaaaaaaaaaaaaaaaaaaaaaaaaaagggggggggcctttttaggggttcaaagtttatttccgctggcttgcaacgtattagtttttttttggggtcccctaaattaaattaatgggccgtggtttaaaaacgttgggattggaaaacccttggcttacccaaatttaatgggtttgaagaaaatccccttttcccaag

SEQ ID NO: 2190 - DNA, 90 bp, Zea mays
  Clone ID: LIB3116-012-Q1-K1-G3
aataaaaaaaataaaaaaaaaaaaaaaaaaataaacaaaaaaaaaaaaaaataaaaaaaaaaaggtgatataaaaaaaaaaaaaatgagg

SEQ ID NO: 2191 - DNA, 343 bp, Zea mays
  Clone ID: LIB3116-012-Q1-K1-G4
acgctagttctagctcgcgatctagaactagttttagatcgcgatctagaactaaggcgcgagcgcggatggcacgcccaagaggcggacctacgactagatccatagcaaaacgttcatggaggtgaagggcacggtcactgcatatcagtgcctgtccattgtatgttgattgtatgttttcccttttaggttgttttggtctaaattgaataaatatgtcttgtagctgctttatttattttttatattgtttttatcgccaagaacgccccgcccgagttccaaaagaccaagctcatgaaccggctcacgtacacgctggacgagatcgagggcccgc

SEQ ID NO: 2192 - DNA, 429 bp, Zea mays
  Clone ID: LIB3116-012-Q1-K1-G5
gcaagcagatctaagctccaggcagcgtcgcgacagagtgagctagtgagtagcacgacaacaacgatggcttccctgaaggccgcgaagcccagcggagttgcggcgcagggcaaggagccggcgcccaagctcagcgagacggcgacgaagccgtcagccgcgaagagcggcggcgttaagaaggctgagcagaagccccgggaaaccaaaaggaaggtgaagagcagcaaacaggcggcggcggccaaaaagtgacgtacagtacgtgtggagtgtaatggagcttccatgcatgagtgaatccatgccatgttatgaatctagtccttcctttcttgtatcttccatgtgacgcggcgtgtgcgtcccctcatgtgtgatgatgccagatgaatactacaaataagacgttgttgtgactgtgtg

SEQ ID NO: 2193 - DNA, 254 bp, Zea mays
  Clone ID: LIB3116-012-Q1-K1-G8
tcaatcgtgcgctctggatctaaactggcacagcactgaaccctatattgacctactcatatgatgggtgaaggctattgccgttttgggccaaaacgtacaataatgtactgtattatacaaatattagcgcctgatctagcaaaatcttaacgcgtccaatatatgtggcacttctttaggatatgtgcgctggaccacgatttgctatactgatacttcgctcaaatatatatatcgactggatacaataa

SEQ ID NO: 2194 - DNA, 260 bp, Zea mays
  Clone ID: LIB3116-012-Q1-K1-H1
tggccgcgacagacgcgtccgccaatccatccttctttcgcagaaacacctttttcgtctgcccctccttaccgactagacaaggggttctattacgcacaaggaggacatcaccacagaaagatggtctatctggtggatcactagaactcttacctgtgcaagatgacgctcatacacaacaacgtgaacctcaagtccaatatactgtctttcttcacacccaatcacatattcctatacttcaaaaccatcaacgg

SEQ ID NO: 2195 - DNA, 63 bp, Zea mays
  Clone ID: LIB3116-012-Q1-K1-H10
taccaccccgcctaactccccggcgacccactcctcctctccaactatctaacttatgatacc

SEQ ID NO: 2196 - DNA, 264 bp, Zea mays
  Clone ID: LIB3116-012-Q1-K1-H11
caaggacggggcgagggagtacgccaggcgtgaactcgtcggtgacaatgcacctgctgaagctgcaaccgcagttgttgctgcctgaggcatgaactcgtttgaggttgaaatgtgttagttgtttctcagcgatgctacttatgcgatcacaggatactggtggggggcccacaactgttttatcaattttagcacagtcgtgtaattctgtttctgcactattcatgtctgctgagtacaagtagtgtttcacgcttgaac

SEQ ID NO: 2197 - DNA, 255 bp, Zea mays
  Clone ID: LIB3116-012-Q1-K1-H12
gcgcgagcaccagactctatctcactccggtaccccctcatcctgccatccaccagaagcagtgcaagcatatggcgcgccgtgccagcctgctcctcgccgcggcgctgctcgtcgccgtcgctgccgcggcggtgccgccgacgtgcgagcgcatcgagtgcccggcgtacgaagtggtggacagcgccaacgggttcgagatccggcggtacacggacgccatgtggatcaccacggcgcccatcgaggaca

SEQ ID NO: 2198 - DNA, 347 bp, Zea mays
  Clone ID: LIB3116-012-Q1-K1-H3
cgaatcccttcttcttccgcagttccgccttcttcgtcgggccctcctcaccgtcgagaagagatctcctcttcggcacgaggaggacagcaggggagaaagatgggcgggcgggtggatcacgagtactcttacctgttcaagatggtgctcatcggggacagcggcgtcggcaagtccaatatcctctctcgcttcacgcgcaaccacttctccctcgactccaagtccaccatcggcgtcgagttcgccaccaagtccctgcagattgacggcaaaacaataaaggctcagatctgggacacagctgggcaggaaaggtaccgtgcgattacaagcgcctacta

SEQ ID NO: 2199 - DNA, 438 bp, Zea mays
  unsure at all n locations
  Clone ID: LIB3116-012-Q1-K1-H4
cccacgcgtccggtcgacgcgccgtcactgaatcctcagatcacggctagccgtaatcacgccactctgctgactcccggcgagcagtgtaacattttccttcagccatgggcaaggagaagactcacatcaacattgtggtcattggacatgtcgactctggcaagtcgaccaccactggccacctgatctacaagctcggcggtattgacaagcgtgtgattgagaggttcgagaaagaggccgcggagatgaacaagcggtcattcaagtatgcctgggtgcttgacaagctcaaggccgagcgtgagagaggtatcacaattgatattgctttgtggaagttcgagaccaccaagtactactgcactgtcattgatgcccctggacaccgtgacttcatcaagaatatgattactggcacttnccaagctgact

SEQ ID NO: 2200 - DNA, 416 bp, Zea mays
  Clone ID: LIB3116-012-Q1-K1-H5
ggccgctctcgcccagctagatgatgcctccgcgagcccgccgagcgtgatgagctactattagaatcggacaaccgtcacgctgacatgcacgagccggcctagctactgtggccgaccggtactgttccgtgcgcgtatataggaactaggaagaagtgggtgctttgtttgctatatatgaggcactaggtcagggggttttgtgatggggctttatgcaactttgatgtaatggaccgaaaacgacagattgagtgttggcggctagctcccatatgtttagagtctagggaaggaataaataatcgagacaagtcttatccctgtatttttgtagagaggtatttgaaacaagaagttcatcaaatacaagggaaaaatgtcatggcgacaaatatgttagaaatctatgg

SEQ ID NO: 2201 - DNA, 383 bp, Zea mays
  Clone ID: LIB3116-012-Q1-K1-H6
ggccccggccggcttcggccgccacggaggcggcgtccagcagcacgtcgtcaaggagaagttcgaggaggtcgacacggtctcacgcgccggcgccaaccaccaccaccaccaccatggtcaccacggcggccacggcttcgtggtgcgcgagaccagggtcgaggaggacatcaacacctgcaccggcgaggtccacgagcgcagggagagcttcctcgccagggctaactgagccgcccggcggccggcatccacgcccgttcgtgcctgcctgcgtgccttatgtatgtctgtggttgactggttgtgcagggtcatcgtacttggctatcgtacgtgcacgcactcagctcctgtacgaattacgacaataagctcgt

SEQ ID NO: 2202 - DNA, 353 bp, Zea mays
  Clone ID: LIB3116-012-Q1-K1-H7
cgagatcgatctctctcaagggaccttgtttgcttgccgccacccccaccgcagttacagttatagctagggatctgagggctagctgatggacagcaggagggagtcctcggagaccttgaggaacaaatgcgcggcctgcttcaggcagtacaacaggatggagcacctggtggagcacatgaaggtctcgtaccactcggtgcacgagcccaggtgcggcgtctgcgggaagcactgccgctccttggagtcgctcagggagcatcttatcgggccgttgcccaaggtggagtgcgcgcgggtctttggcgtccgcgggtgcagcatttgtctcaacgttttcgacagca

SEQ ID NO: 2203 - DNA, 104 bp, Zea mays
  Clone ID: LIB3116-013-Q1-K1-A10
accaaacaataagtctgaatccctcattcttgcatgcatataatgactgcagcactagtacgtcaattatgtctatgtagaggaggaatgatttatgtactagt

SEQ ID NO: 2204 - DNA, 379 bp, Zea mays
  unsure at all n locations
  Clone ID: LIB3116-013-Q1-K1-A11
gtgagattcgaactcgcaacctctctctcgcgcatacccttctataccactacactactacaccaattatgtttatattacgtttccattccccatgtactataacaaatcgagagtaatttgattatttaaggcaataaatgagttcatttgaaaatgtgaccaactataaagttgcataactttttgagatctaaaagttttattttaatagtttctacatccgagaccgtttataaaatttgaattttaaatttaaaaacttcacacgaaattttcaatgataagatgatttcaaatcaaaaaattgttaactacaaagtttcattacatttcaagacctacaacttttattntggtggtttttccatccgagaca

SEQ ID NO: 2205 - DNA, 382 bp, Zea mays
  Clone ID: LIB3116-013-Q1-K1-A2
gcgatcatcatcttctcgctagtcgagcgagcccttatagttaattaagctagtcgatcgatccaagagaagaagaagaagcagcagacaggaatggcgtcgctctcgatgacgacgagcgcagcggcccgcgcgcagtggacgcctaggcagaacaagctgttcgagcaggcgctggcggtgtacgacaaggacacgcccgaccgctggcacaacatcgcctgcgccgtcggcggcgggaagtccgcggacgacgtcaggcgctactacgagctgctggaggaggacgtcggccacatcgagtccggcaaggtgcccttccccgcctaccgctaccccgccggctacggggccgccgacaggctgaaacagctgaagatct

SEQ ID NO: 2206 - DNA, 125 bp, Zea mays
  Clone ID: LIB3116-013-Q1-K1-A3
ggaaacctatctaaataatgtgtgtggcttctgaaatatgtggtgttattgtactgagctatgctcaatagtaaacaacaaattattgaaatatgtcacgtgtgcgataataaagtgacttcgac

SEQ ID NO: 2207 - DNA, 213 bp, Zea mays
  Clone ID: LIB3116-013-Q1-K1-A4
cccacgcgtccggagcgtcaaggagaccatcgaaagcttgaaagagaaggggttcgctagtttttgactcgagcaagctgtgaaacataagtgttactgtactacgtgatgttgcattgtatacatgcatcggacttcgcagttcccaagctattttggtagctttggtctgtaagattacctaaaataaactgagccacgttgccacgctgt

SEQ ID NO: 2208 - DNA, 125 bp, Zea mays
  Clone ID: LIB3116-013-Q1-K1-A5
gactagttctagatcgcgagcggctgtccttattttgtttagagacttgtggctatgtgattgatgtagcgaaacaaggctgtgatgtgttaactctgccttataatattttggttgaacgtgct

SEQ ID NO: 2209 - DNA, 389 bp, Zea mays
  Clone ID: LIB3116-013-Q1-K1-A7
ggagcaacaaaaccgagagatctcaccatccctggacgtgagctatctggagttcattttgcaatggaatttctccatgcgaatacgaaaagtttactcgacagcaacctggaggatggtaaatatatctccgcccgtgggaaaaaggtggtggttattggtggaggtgatacaggcacagattgcattggcacatctattaagcatggttgcaccagccttgtaaatcttgaactcctgtcaaaaccaccaagcactagagctgctgacaacccatggccccagtggccaagaattttccgggttgactatgggcatcaagaagctgctaccaagtttgggaaggatccaagaacttacgaagtcttgacaaagcgttttattggcga

SEQ ID NO: 2210 - DNA, 57 bp, Zea mays
  Clone ID: LIB3116-013-Q1-K1-A8
atatcatctttatctatagaactcaccatctttttgacgtgagctatctggatctca

SEQ ID NO: 2211 - DNA, 428 bp, Zea mays
  Clone ID: LIB3116-013-Q1-K1-B10
gaattccctgcgattcctctcccctcgcctcctcgtctccccctaggggatcgtcggagaggaatcgcaaagagggccgtctcatccgagttaaggaagccatggagcacaaggaggctgggtgccaggcccccgagggacccatcctctgcatcaataactgtggcttcttcggcagcgcggcgaccatgaacatgtgctccaagtgccacaaggagatgataacgaagcaggatcaggccaagctggctgcctcctctatcgacagcatcgtgaacggcagcgacgccgtcatggagccggttgttgctggcagcaacacggtagtagctggtgcccaagttgagttgcaaacaatgaacgtgcagcagcccgctgatgttgccggacccagcgagggggtggcggcgatcttcaaaggggggaag

SEQ ID NO: 2212 - DNA, 64 bp, Zea mays
  Clone ID: LIB3116-013-Q1-K1-B11
gcgagacgtgcagtctgaatctcttattcgtgcatgcctataatgaccgctacactagtacgtc

SEQ ID NO: 2213 - DNA, 328 bp, Zea mays
  unsure at all n locations
  Clone ID: LIB3116-013-Q1-K1-B12
cggacgcgtgggcggacgcgtgggcggacgcgtgggcgcggccgacggcgcctgggagccctgggcgcgcctcgagtgctggcgcgaccgccgcggcgccggcgcgtccgacagcctgggctaccgcttcgacctcctcgtccccggcgtggaccacgccgncgtcgccctcgccgactcctccatcccctcgtccaagggcggcaagttcgccatcgacctgaccgccgcgcagccgctcagccggggcggcacgccggggtgcagcccgagaggcagcggcgacctgagcaagtggcccctggggaactaccgcggcttcgtcatg

SEQ ID NO: 2214 - DNA, 343 bp, Zea mays
  Clone ID: LIB3116-013-Q1-K1-B3
gaagaatataagggggactatagatgatgatgaatgggatcaggttattggtgctgctataaatgtttatgccaacaagcataaagaaagaccagatcgccttatcgacatgctaatcagcaatcacaggaaagtacttgcttgtgttgtctgtggacgtctaaaaagtgcattccaaatagccgcacgaagtggaagtgtcgctgatgttcaatatgttgctcatcaggcattacatgcaaatgcattgacagtgcttgatatgtgtaagcaatggctcgcacagtacatgtgataccatagatacttgctgagagagttctcacgtgaagacagaaaaact

SEQ ID NO: 2215 - DNA, 322 bp, Zea mays
  Clone ID: LIB3116-013-Q1-K1-B5
cggacgcgtggggttcctgcggcggctgagaacttccgccgccgtccgccggggcgcgaccgacggcggagtcctggccgccgtccgcgccgagctggccaacgagatctcctcctcggctccccctccattccgttccgagctggcgcccgacttcgacaccgtgtctgacgccccgcgcgcgcaggacgtactcctgcgccgccgggccgggtccgaggaggtcctcgtgtcggcgctgctcgccccgctgcggttcgtgggccgagacccgctgcccagggccgcgctcgtcaaggtcttcgtcagtaagcctggcgcg

SEQ ID NO: 2216 - DNA, 322 bp, Zea mays
  Clone ID: LIB3116-013-Q1-K1-B7
gagctgctccagttgctgctgccgcacctgctggtggtgctgcggctgctgctgccccggctgtcgaggagaagaaggaagaggccaaggaggagtctgatgacgacatgggcttcagcctgttcgactgaggagaccccctcacctagccattagcaaatttcacttgtgctgtcaaagactatcttgtcttatgttatgtctctaggcttttgttacaactacccaagttttgagtttttgagatgtggctatggcatgaactcaaaccatcttatgagggtgaaacctgtttctaatttctatattggtgctgttcatt

SEQ ID NO: 2217 - DNA, 337 bp, Zea mays
  Clone ID: LIB3116-013-Q1-K1-B9
aaaccgcggacgcagcagaaaagaggtagaggggcggcgaccgatggcgcggcggggcacggaggcgttccctaacctgggcgcgcactgcgacaagccggactgcaaccagctcgacttcctgcccttcgactgcgacggctgcggcaaggtcttctgcgccgcgcaccggacctacggggaccacggctgcgccaaggcggcggaccagggccgcaccgtcgtcgtctgcccggactgcggcgacgccatcgagaggctggttccggggcagggcgagcgggagatcctggaggcgcacgtgcggtcgcggcgctgcgacccgggcaagaagcgc

SEQ ID NO: 2218 - DNA, 252 bp, Zea mays
  Clone ID: LIB3116-013-Q1-K1-C10
ggctctggctatgggtctggatccggctccggttatggaggtggcaacgacaacggacattactaggctctttttcagagctaggaacatgttatacaaatatgtcaccagacatgagtaggtcttgctgcatgggatgctagttgtgtccatcgtgtgtgtaacaccgcaaggcttgtaatttgtcctgtaaactgcttgctgctttacattactggcaacaactaagtgataaataaaaatcatctatgg

SEQ ID NO: 2219 - DNA, 371 bp, Zea mays
  Clone ID: LIB3116-013-Q1-K1-C11
cccacgcgtgcggcctgtatcccttattctttcttgtatataatgtatgcagtacaggtatgtccccgcagtctttggagaagaagatggatttgtgaagtgatagcacagaaaaaaagtcatcaggcgcttctggtggtagactggagactgggctggagaaatgttggagctggaaggaaacgcacggatggctcctgcttgacaagtgtaaaggcaggcggcaagcacggacgtcgagtcgaggccccggacggctccaagagcttctttctccaatccaatccaatccagaaccctgactgcagtccatggcattgtagcgctaccatttgtccacgtccgatgggtgaagtgaagcatgactgact

SEQ ID NO: 2220 - DNA, 373 bp, Zea mays
  unsure at all n locations
  Clone ID: LIB3116-013-Q1-K1-C2
cccacgcgtncgcgagaatgtccagataatcgttcttggcacgggaaagaagaagatggaggaggaactaacgcagctggaagtgaaatatccaaacaacgctagaggcatagcgaaattcaatgttccattggcacacatgatgtttgccggggctgacttcattatcgtcccaagcaggtttgagccatgtggtctcattcagctgcaagggatgagatatggagtgattcctatctgttcatccactggaggacttgtcgacacggttgaagagggcgtcaccggattccacatgggttctttcaatgtcgagtgtgaaactgtagacccagccgacgtgacagcagtggcgtcaaccgtcacgcgagcc

SEQ ID NO: 2221 - DNA, 349 bp, Zea mays
  Clone ID: LIB3116-013-Q1-K1-C3
ccctatatacgtgatcggagatcctttgtggagatgaacgcgaaatcagcctaacactcgccaagcgttctacagaagagctcccaaaataaagagtgaagattaatatgcagtggttgttgtagaggagtttactccagcgcctgttcatcaagtggtttgagccatctaactgatcatcgtgttagaagtatctagaacctcttctctgcaacaaaagagaagttttattcccttatttttttggttagttacttcatgtggaggccttgaagcttagaatggttatgtatatatcttatggaaaggcttcacccttccaactattttaataagatatgcactttgg

SEQ ID NO: 2222 - DNA, 396 bp, Zea mays
  unsure at all n locations
  Clone ID: LIB3116-013-Q1-K1-C5
cccacgcgtncgcccacgcgtncggctcctgtgaaccccttccagcatctaatggcgacgccggtgatggccaacctgtggacgacgacgatggcgagtagcgcaaacgctgtgtcagcaactgccatttctgagactagcatcgagatcgtctcgctttgacacctggctgcaactgaaaatgggcaggacatggtcaaagctttgattagtttgtccaccggtctctttctccttcggtatgctgatggtgcacgactgcacccgaacggtgaacttaactgttaactcttgcgaagctctaaatgtctntgctgcgttgctttgagctctcaagtctgaactgtgaacatgtgttctcatgcctaactttatacgatgatttgattttttttt

SEQ ID NO: 2223 - DNA, 56 bp, Zea mays
  Clone ID: LIB3116-013-Q1-K1-C8
aaagtcccaaagtggaatttaaaatataaaagaaaatctagaatttagaagtggag

SEQ ID NO: 2224 - DNA, 138 bp, Zea mays
  unsure at all n locations
  Clone ID: LIB3116-013-Q1-K1-C9
attctgtccgtgtcgtaccatgtcaactcctaagtagaagaattgaagaaactaccagcagccgctgtctggtatacacgctgaaacattttttcttgtatggagaaatactaatcatctggatgtagccaggccnaa

SEQ ID NO: 2225 - DNA, 208 bp, Zea mays
  unsure at all n locations
  Clone ID: LIB3116-013-Q1-K1-D1
cccgccatctaaacacaaatcaaaatcagtgtgcgtgcagctgcatgtggccatcctgccgttgccatgtnataggggcggcggggcacaaaaatttttcattatccaccactattcgtatcgaactgctggatattggtgctcgggtcaattatgatggtgattgtgacggagtgcccttgcaaaataattaataattcgcgtgaaa

SEQ ID NO: 2226 - DNA, 384 bp, Zea mays
  Clone ID: LIB3116-013-Q1-K1-D11
gcgaccacgcgtgcggcctgtatcccttattctttcttgtatataatgcatgcagcacaggtatgtccccgcagtctttggagaagaagatggctttgtgaagtgatagcacagaaaaaaagtcatcaggcgcttctggtggtagactggagactgggctggagaaatgttggagctggaaggaaacgcacggatggctcctgcttgacaagcgtaaatgcaggcagcaagcacggacgtcgagtctaggccccggacggctccaagagcttctttctgcaatacaatccaatccagaaccctgactgcagtccatggcattgaagcgctaccatttgtacacgtccgatgggtgaagtgaagcatgactgactgactgcatgg

SEQ ID NO: 2227 - DNA, 89 bp, Zea mays
  unsure at all n locations
  Clone ID: LIB3116-013-Q1-K1-D6
cccacgcgtccgnaaaaaaaaaaaaaaaaaaaaaaaaaaaaaaaaaaaaaaaaaaaaaaaaaaaaggaaaaaaaaaaaaagaagggggg

SEQ ID NO: 2228 - DNA, 203 bp, Zea mays
  Clone ID: LIB3116-013-Q1-K1-D7
cccgccatctaaacacaaatcaaaatcagtgtgcgtgcagctgcatgtggccatcctgcgattgccatgtgtttaatctccgggtcacaggtgttgtcgatgatccaccactagtagtagcgattgcatggagattggtgctcgggtcaataatgatggtgattgtgacggagtgccctgcaaaataattaataattcgtgtg

SEQ ID NO: 2229 - DNA, 266 bp, Zea mays
  Clone ID: LIB3116-013-Q1-K1-D8
cggacgcgtgggggtgggaagcactagatccgctgccccgtccctcgccggcagcgcgggaggacgggtgactttcatggggtccattcaggctgatggcttctgttttcttctgctgttgagctactggagtcatgttactttggtcgttggttttgtacccagacagcaagaaactgtccagcttattgtcttgttcctcgcgtcttgtcataagtaacttcaaacaaaggagtgcatgcattgtgattaaaaacgttttcagc

SEQ ID NO: 2230 - DNA, 405 bp, Zea mays
  unsure at all n locations
  Clone ID: LIB3116-013-Q1-K1-D9
atagaaacgaatattctttccgtttgtttcaatagataatgtaatgtttcttacgtcagctggtcggatgctcaacgagaaataaggaaaacaatgaattgcattggccgtcctgctctatcacatgccattactgattagggatgaatgcatgcaccagctgccgcagcgatgatcttgccgcggcagctcctggtcagggctcctggtcagggacggcgcccacggggacgcagcgagcggtgatgtctggcagtgagttggttgcgattctcggcaaggtagaaacgtagagcagcttggggctttcatattgtgctaacagggaggctacgaggcttttgattgtggcctgtgactcctaanaactaaaaggcanaccaaaagtctgcttttcaaagcagt

SEQ ID NO: 2231 - DNA, 372 bp, Zea mays
  unsure at all n locations
  Clone ID: LIB3116-013-Q1-K1-E1
cccacgcgttcgaggagatcaagaacggccgcctcgccatgttctccatgttcggcttcttcgtccaggccatcgtcaccggcaaggggcccctcgagaacctgctcgaccacctcgacgaccccgtcgccaacaacgcctgggtctacgccaccaagttcgcaccagggtcttaagctagctaccgggccgcggcgtgccaggacattgtgttgtacactactcgtttctgtcgtgatctgtaccatgaacgaatgcaaatattcttgtgctctcccagaaggaacgaactggactagttttgctcttccattccatgtatactctgcttcagcatatatgtagntgtgtctactggtttttgcagttctt

SEQ ID NO: 2232 - DNA, 367 bp, Zea mays
  unsure at all n locations
  Clone ID: LIB3116-013-Q1-K1-E10
cggtttcagccaggagcggctcacgtcggacctcccgctgttccacgagatcgaccccaaggaccccatgaaagccttcggagcttagcttgggccgcacggttggatcagccacgtctgctgcatttgagttcgtcgtcagtatgcaggagggctgctgaggccattacaggaacagtgagctttaataagcggtgttttcagtaccgtttggttgtcagcgcaacacgtgttgttggaacactgtggttccatatatataccatatatgtatctaagattcatcattatccatttaaatgtagacataaaaatcaataactacagtgacctntntcacggaccatggttgaagtgaataatgaat

SEQ ID NO: 2233 - DNA, 404 bp, Zea mays
  Clone ID: LIB3116-013-Q1-K1-E4
cccacgcgtccgtttcccttgcccctaccgtggcggaggaagacaagacgcgcgcgcagaagcacacctgctcgggctggattaggaggacagcttcttcggccggcgacatggcggaggagaagggcgcgttgcagtcggcgagggagtgggtggtcgaccacaagctccgggccgtcgggacgctgtggctcagcggcatcgtcggctccatcgcctacaactggtccaagccgggcatgaagaccagcgtcaagatcatccacgccaggctgcatgctcaggctctcacgctggctgccttggctgggtccgcgctggtggagtactacgaccaccagcaagggtcaggatcgaaagttcaccaatatgcaaagcagttcctttcatctgatagcaatagc

SEQ ID NO: 2234 - DNA, 371 bp, Zea mays
  Clone ID: LIB3116-013-Q1-K1-E6
gcgtctcaacccggtcaagagaaacctcctgtgccgttgttgaaggatgcttttggtgctgagaggaggaaagctaagatgctaaattgctccattgcatatgggaaaacggctcatgggcttgctcgtgattggaaggtttctgttaaggaagcaaaagatacactgaaactctggtatagcgatagaaaggaagttctggcttggcaaatgaagcagaaacagctagcacatgagaagcgtgaagtttatactttgcttgggcgatcacgccgttttccaaatatggctcatgcaacttctggccaaaggggtcacattgagcgtgctgctatcaatgcttctgtacaaggcagtgcagctgatgttgc

SEQ ID NO: 2235 - DNA, 326 bp, Zea mays
  Clone ID: LIB3116-013-Q1-K1-E7
cccacgcgtccgaaaaaaaaaaaaaaaataaaaaaaaaaaaaaaaaaaaaaaaaaaaaaaaaagaaaaaaaaaaaaaaaaaaagaggggataaaaaaaaaaaaaaaaaaaaaaaaaaaaaaaaaaaataaaaaaaaaaaaaaaaaaaaataaaaaaaaaaaggggggggcctttttaagggatcaatgtttaaatccccggttttgcaaagttaaattttttttttggggctaccaaattaaaatcctggggccgatgtttaaaaaggtcgaaatgggaaaaacctgggggttccccatttaatttcttttgaaaaaaatcccctt

SEQ ID NO: 2236 - DNA, 370 bp, Zea mays
  unsure at all n locations
  Clone ID: LIB3116-013-Q1-K1-E8
cggacgcgtgggcgccaggagagccggctcggtcggttcgtcgaagatcccggatctgctctgtcacgaggtctttcggcgggtgttgtctcgcgaggtgtagcgagccaaggtctggtcgcctgttcaggagagtttcgagaagctgaaatggctcctaaagctgctcctgccaagaagggtgatgccaagacccaggccttgaaggttgccaaggctgtgaagtctgggtcagtaaagaagaccaagaagatccgcacgtccgtgacatttcaccgccccaagaccctgaagaaggctagggaccccaagtacccaagaatcagcactaccggaaggaacangcttgatcagtaccaaattctcaagt

SEQ ID NO: 2237 - DNA, 379 bp, Zea mays
  Clone ID: LIB3116-013-Q1-K1-F1
cggacgcgtgggtcaaaatctcgggtgatcacacttccagaagcatcaaatgcataaacataggtgactctacatttacgccagtaactataaatggatgctctttggtctatattccaaatgtgggagacatcacaccagctttgaagtattgcccgtctccattgtgaacactctgcagcatatgtagcagataaatgagtgaaactatttgtactgcctgctctgcaaattagtatgaacacccctcaaaaagatttggcccacactctggtctctctgtttgcagctgggaacagggagctccagagcttgtgaattctatagaataaaggtggttgtccgcacagtatagcaaactgcgaagcctgcaactact

SEQ ID NO: 2238 - DNA, 401 bp, Zea mays
  Clone ID: LIB3116-013-Q1-K1-F10
gttcgcttttttcctcggcttcttctctctcgtccatcaacccagggggaaggagcgggagggagcgagccatggtagtcagcacgttcaatggacccgggattgggatcgggttcggtgtcggctgcgggttcggcgtcgggtgggggttcggaggaatgcctcttaacatgttcggcttgggtatcggtgggggttgtggatttggtcttggactaggatggggctttggaaatgcttttggttgtcagtatcgatcttcaagagttcagttccaaggcattgaatttcagaagaaggcggaaggagatgatgcaccaaaagttgtttcaccggagcttgctcaaaagtctcgtccttatggctagtatgcctgctaccataaaaattcagagactgtt

SEQ ID NO: 2239 - DNA, 420 bp, Zea mays
  Clone ID: LIB3116-013-Q1-K1-F12
cggacgcgtgggccgcactgcccgcgagtcctccactccgaccgcacgatggctgcgctgggcctcgcctccttcaccctccgccccgccgctgccgcggcctccgcctcctccggcgcgaccccagccgcgtccggctccgtctccgtctccttcacccgcgcggcgcgggggctggcctccctccgcctggccccgccccgccgccgcggggacctcgccaggccccgcgccgcggccgaggccgcggcggagagctacgcgtccgcgctgtcggaggtggccgtcgagaacggcaccctcgagcagacggtctccgacctggagaagctggagaaggtcttcgcggacgaggccgtcgccgagttcttcgacaaccccaccgtcccgcgcgaggagaaggccgagctcatcgacgag

SEQ ID NO: 2240 - DNA, 235 bp, Zea mays
  Clone ID: LIB3116-013-Q1-K1-F5
gttcgcttttttcctcggcttcttctctctcgtccatcaacccagggggaaggagcgggagggagcgagccatggtagtcaggggcggcaatggacccgggattgggatctggttccgtgtccgctgcgggttcggcgtcgggtgggggttcggaggaatgcctcttaacatgttccgcttgggtatcggtgggggttgtggatttggtctttgcctatgattgggctttggaaa

SEQ ID NO: 2241 - DNA, 390 bp, Zea mays
  Clone ID: LIB3116-013-Q1-K1-F6
cccacgcgtacgcggagaaccaatgggggcggcgccgacgtccgacgactcgtcacgcgccggagacggccgggctgtggcgagcagcgctgcctctggcactggcactggcagcaacagcaaccaggcccagtcgaagcgggcgccgccgcctcacaagttccacgagatagttgcgcttgcgcaggaggcgacgactgccggcggcggcggcggcggcggcactgctgctgcagccgacctggaggatcaggcgtgcagcaccggggtctacctggctgggaaaaccaagaagtactgggtggacgagaagaccaggtgcaactgcttcgtgctgttcgctagagcgctgtccatcacttggggcgacgatcccagatactggatctg

SEQ ID NO: 2242 - DNA, 415 bp, Zea mays
  unsure at all n locations
  Clone ID: LIB3116-013-Q1-K1-F7
gttcagagcattggatcatggagtggacagaccatcttagatgatgagatcctggatgaagaaaacacaggagtgtctcctggttttgttcccagtctagatgttctgatggacaggaccgctaagttgaaacgatatcttaactccaaggatttccttgatctgtggaggagtatagcggaaggccttgactactacatctacagcagcatacgatgggccgaagtaagtttctctgatcctggaatcacccagctaagagttgatataaaagcacttctccacatctttaggcccttctgttcaagacctgaagcttttctcccttttctaagtgaatccctgagggttgtaaccatganaaaatcagatgcacagtgcttgcttgaaacaactatggatgacacgaagagtg

SEQ ID NO: 2243 - DNA, 385 bp, Zea mays
  unsure at all n locations
  Clone ID: LIB3116-013-Q1-K1-F8
acgacgcatccgcggttcatcggcctcgcaggaaacgagcgtcgagcaaaaggtcgaattctgaactctcaagcaccagcaggaatcgagcgagcgagcgagcagtgtccgccccccatggccatggtcgcgtccacctccttcgcgtaccacaagccgcgtttcgcggtggtgtgcaggaagaacagggacggccgggacagggagcgggacggcaaggagcacaagcaccccttcaaggtcgtcgagatcacgccgccttcgcggtgcctcggcgtccgctgctttcccaccaacatccactgcggcgagagcgtgacgatcgatgggcangcgtacactgtgtcggcggtgacgcaccggtaccagctgcgcaaggggcggt

SEQ ID NO: 2244 - DNA, 75 bp, Zea mays
  Clone ID: LIB3116-013-Q1-K1-G10
tcctttatggaggtatgtcggggttcgggttcgtgggtgagcggatcgagatggcggcgtcggatgttgagtacc

SEQ ID NO: 2245 - DNA, 367 bp, Zea mays
  Clone ID: LIB3116-013-Q1-K1-G4
cccacgcgtgcggccttgcccttcacgaaggcttggtcctcctccttgtatctccactccccccttcacagatccgttcctccagctagggttagcgttcctctgcagcgatggcgatcaagcggactaaggcggagaagaagatcgcgtacgacaagaagctgtgcagcctgctcgatgagtacaccaaggtgctcatcgccctggccgacaacgtcggttccaagcagctccaggacatccgccggggcctcaggggcgactcggtggtgctcatggggaagaacacgctcatcaggcgttgcatcaaggtgtacgccgagaagaccggtaaccacacctttgacccgctcatggacctcctggt

SEQ ID NO: 2246 - DNA, 270 bp, Zea mays
  Clone ID: LIB3116-013-Q1-K1-G6
ctggctcgcccgcctgacgggcccggcctgaatggctcgaccgacccacgcgttccatgaagggggcatgcaagctgtctattgtacaaacatagataagatgggtactcaattagatgtaaagaaattctttgaagaactttgcggtgaggtctctcggttgagacttctatgagacaaagtacatgtccacaggattgctttttgtggacttggacatgctgagggtgccatcattgcttctgaatgcagcgggatgattttgggaac

SEQ ID NO: 2247 - DNA, 110 bp, Zea mays
  Clone ID: LIB3116-013-Q1-K1-G9
cacaagcatgaagaacaaaacgactccactgcgtctattattctaacattcgggaacaaatggaacacagccaacaaccgtggtaaccaacaaaaccacagcgagcgagt

SEQ ID NO: 2248 - DNA, 223 bp, Zea mays
  Clone ID: LIB3116-013-Q1-K1-H10
gcggtttgctagagctagctctcatgcgggacgtgtcatactactaataaggaagcggatagtgaggaagttgaccgctaactcagacacgtataaacttattgcaacatatgtattgagacatttaccattactatctcaaagaaagctagtccaggggtcatataaagatgtcgaatcacatttctcaaacaaaaggagtaaggccaccgcactagaggat

SEQ ID NO: 2249 - DNA, 184 bp, Zea mays
  Clone ID: LIB3116-013-Q1-K1-H11
gttttcttgatctcgcccccacgcggtacctgttttactactctctgtttggtggtttctgaggaagttgcccgtgtacttgtatcgtaaaaaccgagtgggacatctgcatcgtttcatctgccaccactcccccgaggtgtgctgtttcacggctcaaagaaagatgtcgtatcggcaagct

SEQ ID NO: 2250 - DNA, 162 bp, Zea mays
  Clone ID: LIB3116-013-Q1-K1-H12
tcgcccacgcgttcgcaccagacgtattgtgccgaccccgacccatactctgctgctgcagacatggcgacctccgcggggctctctacccccgccaaatccacccagatctgtcggggccccgctcttcttggcaaaccggggaaagggcttgggctgagc

SEQ ID NO: 2251 - DNA, 299 bp, Zea mays
  unsure at all n locations
  Clone ID: LIB3116-013-Q1-K1-H3
tatcctttctgcctccctcactttcccatgtcagcaacccaacccacatccaccggaagatgagagctccagctccagctgctcctattcccgcgctgctctcccgctgctcctcgcctccctcctcggccccgcgccgcctcctctcctcctcccgcacgccagccgcctgctgcccgcctccggcagtcgtccgctctgtctccgtcgatttgctggcggtcgccggggagccggctgtcgcaggcgccccctccgcaacgccgtgccgtcgnctcatcctcctncgtcacggggac

SEQ ID NO: 2252 - DNA, 383 bp, Zea mays
  Clone ID: LIB3116-013-Q1-K1-H6
cccacgcgtacgcggacgcgtgggcttactgcttcaaggattaatgtgtgactgtttagccttcaatccaagcggtatgccactaatctcaaaaattgcttctacgcaatatttacttgacaatttatagatttgttgtttcttagagatattttttcatgtaataggttataaggttgttcatgacataaagaggtttgttggtcataacttatactatatgaagattatgggagtcagccctaaattcacattttctgcaatctacagattcatgtaaaaaagttcaatctacaacagcatttcctcaaaatgtctaacagacttgttttcttcaggctagggacccaggggctacacatcttataactgaaaaacacatg

SEQ ID NO: 2253 - DNA, 334 bp, Zea mays
  Clone ID: LIB3116-013-Q1-K1-H8
gagaaagctgtaaaagcatccgtcaaataactatagtgtatcaatctgaagcttattttcttcactggtacaagatgagcagtgctcttttacggatttcgggctggggcagaagtcgcgaactgcaacttttttgaagcggggttattttgacctagttttcctgttaaacattgccagtgccgaaactttgtcgtctcatgttgataaacatttatcggggccattgggcagctgctagtttggcaattgcaaatcaatttaccttttggttcagagggcataggctgctaccctagtggctaaaaatttcgttgacagggtctacgttgcc

SEQ ID NO: 2254 - DNA, 370 bp, Zea mays
  Clone ID: LIB3116-013-Q1-K1-H9
gtccctctcctctcgaggtggcggcgctccccccgtcttcttcttcttcttcttcctgtactatatagcctcccctcgcaaatcgtcactgacgttcattccgcttgcttgattgttccaggtattagcagtcgaccggttcctcggagcacgatgaagtttggtgctgcctacctgcttgctgtcctcgctgggaacgccagcccctccgctgacgatttgactgccattctggagtcagttggctgtgaagttgacaatgaaaagatggaactcctgctgtcccaactgagcggtaaggacatcaccgagctcatttgccgcggcagggagaagtttgcttcagtcccatgtggtggcggcggtgtcg

SEQ ID NO: 2255 - DNA, 223 bp, Zea mays
  unsure at all n locations
  Clone ID: LIB3116-014-Q1-K1-A1
gctnttagccagcttctataaaattcgttgcggcaaaaaccatccaaaatcaacataaacacataatcggttgagtcgttgtaatagtaggaatccgtcactttctagatcctgagccctataaacaactttatcttcctccacacgtaatcgtaatgatactcagattcttcccacagccagattttcagaaaagctggtcagaaaaaagccgaaacaaaca

SEQ ID NO: 2256 - DNA, 316 bp, Zea mays
  Clone ID: LIB3116-014-Q1-K1-A12
cccacgcgtccgcccacgcgtccggcagaagcagcccttgaggcacgcaagaaacctccagaggacaatggtccccgtattgttggtgaaggccttgtgattgacgaatggaaggaacgaagagagaggtaccttgctcgccagcagatcgaaggtgttgattcggtgtagacacgaggcagccctgtaaactatgcagaatgaacataccgttttatgggcacgcactccagctgtcaaatggatttggagcttgattttgcgaaggttcggatttggagcaatcaagcaacaatgaggcttttgtgtatttggg

SEQ ID NO: 2257 - DNA, 60 bp, Zea mays
  Clone ID: LIB3116-014-Q1-K1-A3
gcggcaaacagagcgcaaagctattactagagtaaagacgacgagaaatttatgtactct

SEQ ID NO: 2258 - DNA, 123 bp, Zea mays
  Clone ID: LIB3116-014-Q1-K1-A6
ctccagcatgagtgtcggtggtagttctgtgcctgtaaaaacttgggatagttgatcgcgtgtgatcagccgtcatgctcctccagtctctatgaacaagctaagctataatagtattttgct

SEQ ID NO: 2259 - DNA, 212 bp, Zea mays
  Clone ID: LIB3116-014-Q1-K1-A8
cgcgcaaagctcttcctcgtgtaaagacgacgagaaatttatgtactctcgcaccacctcacaaacagacctgatcctctccgtttctttttgtttcccttttccctcttccgcgattccgtcgcccggttcaatttggacgcgcgcggcgtaaggcgcccggcggaaaccgccgaattcccctcttcctcgcgcgtgctcagcgattcgag

SEQ ID NO: 2260 - DNA, 271 bp, Zea mays
  Clone ID: LIB3116-014-Q1-K1-A9
cgggaaaaagcttgaagatattgttccttcatcacacaactgtgatattccgcatgtgaaccgtactgagtaccagctgattgatatattagaggatggatttgtgagccttcttacttcagatggcaacactaaggatgatcttagactcccaactgatgagactcttgtggcccagatcaaggaagggtttgaaagcggcaaggatcttgttgtgactgtccagtctgctatgggggaggagcagatctgcgcgctgaaggatgttggc

SEQ ID NO: 2261 - DNA, 173 bp, Zea mays
  Clone ID: LIB3116-014-Q1-K1-B10
caaagatcttggaaaggtgcttcgcccttccctcacttcaggggttatgtaaattggacaggtagctgcagcaactatgcaggggtaaccttttttttttggagctatatattcatgaaacatgaactgggcagcatgtgctatagaataccatgaagaaattagcgggctcc

SEQ ID NO: 2262 - DNA, 180 bp, Zea mays
  Clone ID: LIB3116-014-Q1-K1-B11
cccacgcgtccggagaccaacaagcaacatagaaagtggaatccagtagcaacaacagagcaacaatggcgaccaagatattttccctccttatgctccttgctctttctgcatgtgttgctaacgcgacaattttccctcaatgctcacaagctcctatagcttcccttcttccccata

SEQ ID NO: 2263 - DNA, 403 bp, Zea mays
  Clone ID: LIB3116-014-Q1-K1-B12
gcctgaaatgagttattctataacagatgctcatgtgggcggttgatctgaaacatttggttattattattggggggggcatttcagaagctctctttaaaggcgcattatctaacggatagaacatgggccaaagaccgggttttttaaaatggaccttttggccaaaaaaattaaatattccccttggcatcttgggatcataggtttgggcccgaatccttggcggggggacggccatgacgttgacggggcatatttgggggttaaccatgtaggcattgccaggcttagcgttgacctttaaaatggtcgggttgtaccgtgtaaaagttgctggaagccggtgtaaacgcatgtataatgtatattaatgcatcatgagagcatgtccaagaggctt

SEQ ID NO: 2264 - DNA, 349 bp, Zea mays
  Clone ID: LIB3116-014-Q1-K1-B2
cgtgcgatcctggtacctggaatctcaagtctcaggcaagttgtgcccttgaccacttttattatccaataatgttctttataatcatttattcatgcataggcctaattttgatgggacccaataggtcaccctagactgattatcttgttaccttgtttacccctgaactatttgggtaggtttgctattgctctatatagttttgggttttatattacattatgttcatgttccaattatactgctattttatttattgttcatgacaagatcattattttaattggaacatggagaaacacgtgccaccacaatggtggaatgggatgcccttggctgactaact

SEQ ID NO: 2265 - DNA, 364 bp, Zea mays
  Clone ID: LIB3116-014-Q1-K1-B3
atgaggagaaaggtgtgaggagttgtaaaacgaaacaaaacattaaaagcgcacataccatgccgcaatgcgccaagtgtgtgtcccattaagcctgtggggtgttgcccttgccttgccttgtggatgggctgctctatctcaaatgataccgagaggagtccaaacagaatactaccatacaaacatttcttaatgcttgtgtgtgaacatagccgaggaagctgtcaggaggctaactgggatcaccctcatgctaccgaccgcttttgagaagcccacgagcagcgcgcccctgtcatcatgtccatctgatgcagcttctgcttctgcttctgccgccattgaagacagcgtgaagcat

SEQ ID NO: 2266 - DNA, 309 bp, Zea mays
  Clone ID: LIB3116-014-Q1-K1-B4
gcgggccgcgccctgttcctgggacccttccttccacgaaaaaaagcagaagcagaagctctagctacctgtactaccgacctggatccactcaacccgctacgctaagctccccttcccgttcgacaagtgaagagaagaggttattcatccatctgcgctgcagcctgcaaaggagaaggagaaggaggcgcttgacatgggcaagtacgtggagctgctggacatgggcgtgcgcatcgccgcgcgcttccactcccactgcccgcagaccgcgcgcctctactaccacccgcccgctggcgggcc

SEQ ID NO: 2267 - DNA, 369 bp, Zea mays
  Clone ID: LIB3116-014-Q1-K1-B5
agaatgcaagtcctgagttcttgggtggtaaagattggaactcagatatccctgttgattttgacaatgaccaaacattggacaaaaataagaagggtaaagattccagatcaatgaagctttttaagagtgctattgcagattttgttaaggaagttcttaaaccatcatggaggcagggtaacatgagcaaagaggctttcaaaactattgtcaggaaaacagttgataaggtttccggttcagttcctagcagtcatattccaaaaacacctgccaagattaaacattatgtacaatcctcccaaaggaaggtgaccaaattagtaatggggtatgtcgacaagtatgtgaagccatagagtaatg

SEQ ID NO: 2268 - DNA, 359 bp, Zea mays
  unsure at all n locations
  Clone ID: LIB3116-014-Q1-K1-B6
cccacgcgtncgcccacgcgtccgcccacgcgtccggctctacagccgcctcgcggagcccgggtctgccatgggcaggtaatcaaggaggagagctgctcagctcgcctgtggctgccggattaggggacgacactgatactactgctactcaccaccggactgtcctgtcgtcgtggtcaccacggttacaacacgataggcagaaagattcaggagggagggagacgacgacgatgccggtgctgtataaactttataaggatggatggatggatgatgataccgagcttctgctgctgttcatcatcatcttcttgtgtttttgctagtagcgtgttaattagcaggattaagca

SEQ ID NO: 2269 - DNA, 110 bp, Zea mays
  Clone ID: LIB3116-014-Q1-K1-B8
aaaaaaaaaaaaaaaaaaaaaaaaaaaaaaaaaaaaaaaaaaaaaaaaaaaaaagaggaaaagaaaaaaaaaaagagaggaaaaaaaaaaaaaaaaaaaaaaaaaaaagg

SEQ ID NO: 2270 - DNA, 351 bp, Zea mays
  Clone ID: LIB3116-014-Q1-K1-B9
tcgaaacacatgggactaaagatgatgaaatgatgagctactccgacaaatgatgtggtgagaaggaacctaatgagaggtggaccgatcaagtgccaaaatgaaataatggtcgtcaaatgatcgtcatctaaccaacactaacctagtgttatcccagacaagccccggtgcatttgccacctcattctgttttaaaaagttttatcaccttgaatgatgcattaagtgatattagttgtgatcaaacaattgatgcatttccttccttgattagacaaccctaatacccagattatggaaatttacagatgcttagcccttcttattaatctacgatttggtttttta

SEQ ID NO: 2271 - DNA, 324 bp, Zea mays
  Clone ID: LIB3116-014-Q1-K1-C10
cggacgcgtgggaaaaagaagattgcggccagataccgcctttggtggcaacttaggggaagctgtgaagaagaaactgctgggcctctcttgcttttcccagctttgccttgatgtacctgcgagggccatggcccatgacactggtaggttttttttttcatcgcaactgtaaggtttggtgaagaacggtttcacagtgcactgatatatatgtagctgcttgcttgcttgtgtgatatcagtgtgggtatcgattggttgtatatctctatctgggtaaatagggtccgccttcgaaaagaatacatcaaatgtttgtgc

SEQ ID NO: 2272 - DNA, 283 bp, Zea mays
  Clone ID: LIB3116-014-Q1-K1-C11
cggacgcgtgggcggacgcgtgggcgagaagtcgagagaaaagacgtgtcaacgtcactacgtcagcgtcctctggctgcggcatccatgggcgacaaccgcaaccttccgccgacctgggccaccacgggcggcttcggctttctgaccctcaacttcggggtcggcatctaccgggcgtggggcgacttcgcgttcattctgctggtaacaggctcggacttcggtctggtacttctctttcggtggcttcgggactaccagcgcgcggcgcccgggttcc

SEQ ID NO: 2273 - DNA, 348 bp, Zea mays
  Clone ID: LIB3116-014-Q1-K1-C12
gcggcggcgtaggtagcggcggtgtgcttgtgatctcaatctcaaccccaggcgagctcggctccggtcacccgtcgatccacgcaaccatgtcgaggaggaagaccagggagcccaaggaggagaacgttacccttggacccactgtccgtgaaggagagtttgtctttggtgttgctcacatctttgcatccttcaatgacaccttcattcatgtcactgatttgtctgggagggaaactttggttcggatcactggtggcatgaaggttaaaggctgatcgtgatgagtcgtcttcttatgctgctatgcttgctgcccaagatgttgcacagcgttgcaaggag

SEQ ID NO: 2274 - DNA, 382 bp, Zea mays
  Clone ID: LIB3116-014-Q1-K1-C2
atttctttgtactcaggccgaattggtatcctacacagctatctaatatctactttctaatccatcaaaatgtgggcaaaagctgtgtctatcttcgccttggcgaccaccgccgttgcgcaaaccaagggtttcaactacggcgccaccaacgcagatggctcatgccgtggatacaacgactttgtgcgcttcttcaatgaggcgaagagcctacctggtgcttcaggcttcaacacagcacgcctatacacctcagtccaatgcggcaccgcagccgaccccatatctgccttccaagcagccatcgataccgacacacagattctcgttggtctctgggctagtgccggacgtaccgcttacgagaatgaactcaacg

SEQ ID NO: 2275 - DNA, 386 bp, Zea mays
  Clone ID: LIB3116-014-Q1-K1-C3
cccactctgtactcaagccgaattggtatcctacacagctatctaatatctactttctaatgccatcggaatgtgggcaaaagctgtgtctatcttcgccttggcgaccaccgccgttgcgcaaaccaagggtttcaactacggcgccaccaacgcagatggctcatgccgtggatacaacgactttgtgcgcttcttcaatgaggcgaaaagcctacctggtgcttcaggcttcaacacagcacgcctatacacctcagtccaatgcggcaccgcagccgaccccatatctgccttccaagcagccatcgataccgacacacagattctcgttggtctctgggctagtgccggacgtaccgcttacgagaatgaactcaacgcct

SEQ ID NO: 2276 - DNA, 197 bp, Zea mays
  Clone ID: LIB3116-014-Q1-K1-C7
cactacaccacaccacacacacccgacgacgatcacacacacgtagaagatcgagttcgtgcgatcgtgaccgtgacgcaggaagctataagctagccaagacaggaataataatggcggcgtcgacggtggcgagcctctctgtcccggtgacgacgacgaccttcgcggcggcgggcggcgccgacgtgctgatc

SEQ ID NO: 2277 - DNA, 403 bp, Zea mays
  Clone ID: LIB3116-014-Q1-K1-C8
cggacgcgtgggctcaagatgatgaaatgatgagctactccgacaaatgatgtctgtgaatcaacctaatgagaggtggaccgatcaagtgccaagatgaatatggtcgtcaaatgatcgtcatctaaccaacactaacctagtgttatcccagacaagccccggtgcatttgccacctcattctgttttaaaaagttttatcaccttgaatgatgcattaggtgataggagttgtgatcaaacagttgatgcatttccttccttgattagacaaccctaatacccgctttatgaaaatttagtgatgcttagcccttcttattaatttaggatttgtttttttaaaagatgatatgttacacgggataagggagtttgtgaaataaaatgacttgtgatgat

SEQ ID NO: 2278 - DNA, 310 bp, Zea mays
  Clone ID: LIB3116-014-Q1-K1-C9
aaaaaacataagactcaagatgatgaaatgatgagctactccaacaaaaaaataagtgaaagtgaacctaatgagaggtggaccgatcaaatgccaaaatgaaatatggacgtcaaatgatcgtcaatctaaccaacactaacctaatgttatcccaagacaagccccggtgcattggggccctcattctgttttaaaaagttttatcaccttgaatgatgcattaagtgatagtgtgttgggatcaaacagttgatgcatttgcttccttgattacacaaccctaatgcccgaattatgagaatttccc

SEQ ID NO: 2279 - DNA, 456 bp, Zea mays
  unsure at all n locations
  Clone ID: LIB3116-014-Q1-K1-D1
cccacgcgtccggatcgagagcttcgtcatcgagcacactgctgatagttcagctagcgacgcgcaagctgagtcgcagatccagaggatacagaccttgtagaaccttaatccctttgtttgccacatagagcatcgttgagttatttgtaaaggaatggaagaagggagctaataatccgaagtgtgccgttggctgaaacatcgcctgtcttcactcctggctctgcttctgttcgcttctcatcgtggtttgataccttggtggacatctatgctgacacctcatctcaccaaacatacttgcataccgtcgtcgcccgctcgaacgaagaaacaaagtgccgtttggttcatatatttgtaatgtaatgggtaactgataatgttaaatcatatttgttttagtccaaccgtnatcagataccatactagatatcagtctatatgtaatga

SEQ ID NO: 2280 - DNA, 329 bp, Zea mays
  Clone ID: LIB3116-014-Q1-K1-D10
gcgtccgatgaggagaaaggtgtgaggagttgtaaaacgaaacaaaacattaaaagcgcacgtgccatgcccaaatgcgggggggtgtgtcctattaagcctgtggggcttttctcttggtttgtcttggtgatgggctgaaactaaattaaatgatactgagaggagtgcaaactgaatactaccatacaaacatttattaatgcttgtgtgtgaacatagccgatgaagctgtcaggaggctaactgggatcaccctcatgctatcgaccgcttttgagaagcccacgagcagcgcgcccctgtcatcatgttcatttgatgcagct

SEQ ID NO: 2281 - DNA, 297 bp, Zea mays
  Clone ID: LIB3116-014-Q1-K1-D11
cggacgcgtggggacgcaggaacacttccctactctgaaggactacaacgattatctggaagaagttgaggatatgactttcaacctgatcgaagggatagatgtcgaggagattgaagcaaaaattgcaagataccaacaggaaaatgcggagcagatatacttgtccagagctaaaagggcggaagatcttgcggcagcacttaaagcaagcaggatgaaccccgtaaaggccgaggccaatgatacggctgctgggagttctcaaggtattaagtggcggggcaggagttcaag

SEQ ID NO: 2282 - DNA, 298 bp, Zea mays
  Clone ID: LIB3116-014-Q1-K1-D12
cggacgcgtggggcatagctgctggtgctgtagaggctgttttctgcacaccatttgaacttttcaaacttcgaaaccaagttagttctgtgattccttcaaaagctatgggccctgcaaatgttgctcaagaatcatttccactgctttccaaactggtgcctggatatgttcctgatataagggtgtggaacaacaccatgagccttttatctgatctttcttccaagcattctgacatgttgggtgctctgaaacagcacccatggatgcttacgggctctgggaaaccccccat

SEQ ID NO: 2283 - DNA, 228 bp, Zea mays
  Clone ID: LIB3116-014-Q1-K1-D3
gccacggcaagacggccaaggtgatgcacctgctgctctggggacccaagtgaagcggcggcgagaggccaccgtaccgccgggctctcccgccggcgttgctcgttttgctctgcctgcaatccgccccgcacggactgtactgtacctatacacctatatactacgacgtgcacctgtactacgacgtgctgctgtaccatactaatactagtgcgctgctgctcc

SEQ ID NO: 2284 - DNA, 372 bp, Zea mays
  Clone ID: LIB3116-014-Q1-K1-D4
agcgtgagaaacttcgtggaaaaggggccggcggcaccgtaccagtcgtcgtccagttacctcacgcagcagctcagcagcaacatggcgctgagagccgccgcctcctcctcctcttgtgcgtcaggctacagcgttcagacgaaattcacgtcgctccggccgttgccgccttcggtcgtcccttcccatgcctacagcgcgccgcctcgcggacccgccaccgtctttcacccgtcagctcctcccgtgccgtatccagcgagcaattctggcggtcctggcagcagcggcgcggtgttggagatcgagagcgtgaggtggagcgtggtgggatcgaagcctgagggctcggagcgtctgaggagctgc

SEQ ID NO: 2285 - DNA, 152 bp, Zea mays
  Clone ID: LIB3116-014-Q1-K1-D5
gggttttggccattttaattcattaactcactctgtggccggttggttcctgtccctctctgttttcttcttgctctgtaacctggacctggtacgagtcagcagccagcagcaaactcgcgttttgcctgtaaaatctaaaatctgatatg

SEQ ID NO: 2286 - DNA, 374 bp, Zea mays
  Clone ID: LIB3116-014-Q1-K1-D6
cggacgcgtgggcggacgcgtgggcggacgcgtgggttttttgatcgattcaaaaatgaatggcacaggccatcgatagattgattcatccactgatgacgatacatgcgtctgtgcttagtttacatcgaccgcttacagcaggcagccattgacattgattgatgagcacacatcgatcatgagcatacgccggctggtgcaactactacacgcctacgatctgaacaagtagagtacagagaagaccacactgttcactcgacggacggacgaacgaatggatggatctgatggtagtacacatgtacggcgttgctcagtcagttaggttgccggggacgaagttcgtggcgtatgcccaggcgttgttg

SEQ ID NO: 2287 - DNA, 357 bp, Zea mays
  Clone ID: LIB3116-014-Q1-K1-D8
cggacgcgtgggctcaagatgatgaaatgattagctactccgacaaatgatgtcggtgaatcaacctaatgagaggtggaccgatcaagtgccaagatgaatatggtcgtcaaatgatcgtcatctaaccaacactaacctagtgttatcccagacaagccccggtgcatttgccacctcattctgttttaaaaagttttatcaccttgaatgatgcattaggtgataggagttgtgatcaaacagttgatgcatttccttacttgattagacaaccctaatacccgatttatgaaaatttagtgatgcttagcccttcttattaatttatgatttgtttttttaaaaaattatttg

SEQ ID NO: 2288 - DNA, 392 bp, Zea mays
  Clone ID: LIB3116-014-Q1-K1-D9
cggacgcgtgggctcaagatgatgaaatgatgagctactccgacaaatgatgtctgtgaatcaacctaatgagaggtggaccgatcaagtgccaagatgaatatggtcgtcaaatgatcgtcatctaaccaacactaacctagtgttatcccagacaagccccggtgcatttgccacctcattctgttttaaaaagttttatcaccttgaatgatgcattaggtgataggagttgtgatcaaacagttgatgcatttccttccttgattagacaaccctaatacccgttttatgaaaatttagtgatgcttagcccttcttattaatttaggatttgtttttttaaaagatgatatgtaacacgggataagggagtttgtgaaataaaatga

SEQ ID NO: 2289 - DNA, 399 bp, Zea mays
  Clone ID: LIB3116-014-Q1-K1-E1
ctcatctcgacagcaacctagccgacaagatgagagccaaatggaggaagaagcgcgttcgccgcctcaagcgcaagagaagaaagacgagggctcgctccaaataaactactcgcccctcaatctcagctgccaccccaattctgaacgataacgatcaatgaacgaaacgttgtctacgcactacctttccgcccactcgcaattgctggccgccgcttttcgctacttcggttcaccgggctacgtcattcggcagacacgcgacactgcgagcttgtaagctaccaccatggaaggtcacgcttgtgccggattgaggatcatcaaggctgctggtcaactacacgttgaggtgctcgagagtttacttgactcagatggtcactctaacaccgg

SEQ ID NO: 2290 - DNA, 304 bp, Zea mays
  Clone ID: LIB3116-014-Q1-K1-E10
cggacgcgtgggttttttttttttttttttttcatatcatatatccatccatatatatgcaagggcaaggctagagatacatggtgtttatgcgcgagctgggcacatgtatcatcgatcccagtatcccatgcatgcagatgcagctcgggggcacatcacgagacatgggctgccttttttgcgcgctcatgagctactaccgatgtacttgtcgatgagggtggtgagcgtggacttggggaccgggccgatgacgcttttcttcttcttgccgcccttgaaaatgaacacgggggggatg

SEQ ID NO: 2291 - DNA, 56 bp, Zea mays
  Clone ID: LIB3116-014-Q1-K1-E11
tcgaggacgcgagggttttctttttttttttttttcatatcatatatacatccata

SEQ ID NO: 2292 - DNA, 339 bp, Zea mays
  Clone ID: LIB3116-014-Q1-K1-E12
gggttcgtgaggttctccggggttcgggttcgtgggtgagcggatcgagatggcggcgtcggatgttgagtaccgctgcttcgtcggcggcctcgcctgggccacggacgaccactccctccacaacgccttcagcacctacggcgaggtcctcgagtccaagatcatcctcgatcgggagacgcagaggtcccgcggcttcggcttcgtcaccttctccacggaggaggcgatgcggaacgccatcgagggcatgaacggcaaggagctggacggccgcaacatcaccgtcaacgaggcccagtcccgcggcggccgtggaagcggcggcggtgggta

SEQ ID NO: 2293 - DNA, 387 bp, Zea mays
  Clone ID: LIB3116-014-Q1-K1-E2
tgctggcgtcgctgggcctggccaagtcggaggccgaggcgcgcgacatgctggcgcgcgccgacgccgaccgcgacggccgtctcagcgtcgaggagttcctggacgtgatgaacgccggggagctcggactgggcgcgctcggggcggtgctgcagtcggcgctccccacgctggaggccgcgggaggcgcgctggtcggcgcggacgagctcgcccgggcgctcggcgccctcggcagcgctagcgccgaggactgcgcggctattgttgagtgcctggacggcgacggcgacggcgccatcaccattgaggagttcaggctcatggccgacctgctctaggtctagcttggagctagcccaggctgcgcacgtacgcacgcgt

SEQ ID NO: 2294 - DNA, 306 bp, Zea mays
  Clone ID: LIB3116-014-Q1-K1-E4
aaaccatcacagcacatcatatacaccaactacctctaactgtgatcaaccaagtagctcttgcaaacctttctccctactctcaacaacaacaattgcttccatttaaccaactatctacattgaaccgcgctgcttattttcagcaacatttattaccattcatgcacctatctatttcctactctcaacaacaacaactacttccatttaaccaattagtcgcactgaaccctgctccttattttcttcatctaatactaataccatttatgcagctaacttaaacaagccttgcttactttt

SEQ ID NO: 2295 - DNA, 351 bp, Zea mays
  Clone ID: LIB3116-014-Q1-K1-E7
gtttatcgacccgattgactgaagctcaacaggaagtgcatactcagcctgttcctgatgcaagtatagtccagaaagcctctagtgtcatggaagtattgagggatgtgcttaattctatggatcctaggcaccctgagggagcaacggatgaatttgtgttggatcttgtcgagcaatgtacgtttcagaagcaacgaataatgcaccttgttatgacatcaagggatgaaacgctggtatcacaagctatagagctaaatgaagagctacataaggttctcgtccggcatgacgcgttgctttcagttcatccgacaacagcagtagcttctaatataaaggaagaag

SEQ ID NO: 2296 - DNA, 403 bp, Zea mays
  Clone ID: LIB3116-014-Q1-K1-E8
cttcataacctagcgaatcggattctgatggatggatacattacatacccgcccgctgtgggtctccatgacggtaggagaacacgttcttcaatgtttgtccattcaaggtggtatcaatcaaggctgtggtccttgcaattctttccaaccatatacatgatttaatgctttggaagaaaaagaaataaagaaacacaagtattatggctctacttagcgttttaggaacaaagaaagaggggtttccccttctggctttatatattaaatattaattaaggtaaggctgttgaccttggtgaattaaaaatatcacaaaccttccctttttttttatttccatgattatattttatataatgttttttaatattttttattagaataccctttttaatgt

SEQ ID NO: 2297 - DNA, 245 bp, Zea mays
  Clone ID: LIB3116-014-Q1-K1-E9
gtccggtttatcgacccgattgactgattttcaataggaagtgcatactcaacctcttcgtggtgcaagtatagggcatgggggctctactatcatcaaactattgacggaatagctcaaatctatggatcctaagcaccctgagggagcaacggatgaaatagagttggatcttgtttagcaaagtacgtttcataagcaactaaataattgcaccttcgttattacattcatgtggattaaac

SEQ ID NO: 2298 - DNA, 322 bp, Zea mays
  Clone ID: LIB3116-014-Q1-K1-F11
acaacatggccgcctccgccttcaccgtcttcggcctcgccggcgccttcctggccagccggccggcgttcttcaccagcttcacgcggggcagccgggtgtcggcgaggaaccccctgatgagcaagaacctggagaggaatggcaggatcacctgcatgacgtttccccgggactggctgcggagggacctgagcgtcattggcttcgggcttattggctggatggggccgttcagcgttccgggcattaacggcaacaggcttacggggctcttcttcttcagcattgggcaagagcttgcccactttcccacgccccc

SEQ ID NO: 2299 - DNA, 311 bp, Zea mays
  Clone ID: LIB3116-014-Q1-K1-F12
cggacgcgtgggatcgagccgctagcgccggcgcccggcggcggtatggaggctggtggcgaggagttcgcgatcggcgtggtgctctccgcgaagaccaccctgggggaggagttcgagggccagatcgtcgccttcgatcgacccttcaaccttctcgttatccaagaaggcgtggggagggcggagagcggaaagcggccgaacctgagggtgctgaaggcgaactacattcgggagttctttgtgcttaacaagggagacgaccctttccatcctgccgggtgcatgctggaccttaacttcattta

SEQ ID NO: 2300 - DNA, 357 bp, Zea mays
  unsure at all n locations
  Clone ID: LIB3116-014-Q1-K1-F2
gatgaaatggattcctgttaaagagaaattggttcttctcaagaaaatggtaaaacctaatgtacaaaaaggtatcaacagggggtaaatgaaattcaacctcatattgagattgctaagatgaaatggatttccgttaaggaggaaattggttgtcctcaaggaaaatgcagaaccttatgtacaaattggttgtcttcaaaatgttggtcatgtagctgcaagcctacaacanagagaatcaacaatggtggtgatgctacacatgtagaagtagcaatgttggtcttgtaaatccaagatttggttgtgatgaatgatatctatgataatatatngctaagtatatgtgatgat

SEQ ID NO: 2301 - DNA, 185 bp, Zea mays
  Clone ID: LIB3116-014-Q1-K1-F4
cggacgcgtgggccgacgcgtgggactagttatacatcgtgagcggacgccctgcgcccatttgataacagtatacacccaagagtattgtcaagattggaagatccaggacaacatatatcatggatacaacatctggatcaaagattgtcacataacatatagtggacttgggtgtatgattt

SEQ ID NO: 2302 - DNA, 461 bp, Zea mays
  Clone ID: LIB3116-014-Q1-K1-F5
cggacgcgtgggcaatcagtgttaaatcgaagcctctgcatgccgggttggtctttctgcattgtaccttaaacaaggagcttcatgactttatcagagacacagagggttgttatggctttattggagctacagttggttcaatcaagaggcagattaaaaagccaaaacctattccagttgatgaagttgaatcaattattagagaagagaaggaggaacaagagagagttgacagagaatttgaagaaatggagaatatgggaaacattgagcctttcagtaaacccgttgaagaatctgaacttatgttaatgaataagatcaagaagcagtttaagaaatcgtcctcacagggtggcactagacacagtgctttttcgcctggtgcaactgttcatgttctctccgggccttttgcagacttcactggttccatcctggaagtgaatcgcaaaaac

SEQ ID NO: 2303 - DNA, 307 bp, Zea mays
  Clone ID: LIB3116-014-Q1-K1-F8
cttcagaacctagcgaatcggatacggatggatggatacattacatacgcgccctctgtttttctccatgacgttagaagaacacgttctgcaatgtttgtccattcaaggtggtatcaatcaaggctgtggtcgttgcaattcttccgatccatatacatgattaaatgctttgaaagaaaaagaaaaaaagaaacacacgtattatggcactactagtgtttttaggaacaaggaaagaggggttgcccctgctggctatatatattaaatataaataaaggtaaggctgtagacattggtgaat

SEQ ID NO: 2304 - DNA, 363 bp, Zea mays
  Clone ID: LIB3116-014-Q1-K1-F9
tagcttaattgcatgcatgcatcattagatatagtaacagtgatggatcgttacacgctgcagaagcatgcgcttagtcgttatttgcagacgataataagtagatcgatggagtagtgatcgagcaacacacacgtgacgacgtttgctcttatttacttacacgcacgcacgtgtacggcgctaggggccgtatatatatcgagttctgcatgcatatctcgatcgatgggatgatcagtcgtttcagtcgcagtagtaggagtagccgtgcccgtgcccgtgcccgtgcggcaccctgtgctcctgctgcctgctctcgtagtgggccttcttctgctcgcggtgctcgtggtacgcgta

SEQ ID NO: 2305 - DNA, 355 bp, Zea mays
  unsure at all n locations
  Clone ID: LIB3116-014-Q1-K1-G1
cccacgcgtncgcgctgacagcgaagctgaggagaatcccaagaaacagagctggtgaaattgcattgtcgcaacaggcaagagaagaggagaagaaagaaatggctgcaatacctgcagcgatcccgggctgctgctcttcgtctcgcctgcctcagcttgctggcctccctgcctccacaagcagaaggcgcttcaaggtcacggccatggcgcccaaaaagaaggtgaaccgctacgacgagagctggtcgaagcagtggttcggcgcgggcatcttcgcggagggcagcgaggaggtgtccgtggacgtgttcaagaagctggagcggcgcaaggtgctgagcaccgtgga

SEQ ID NO: 2306 - DNA, 257 bp, Zea mays
  Clone ID: LIB3116-014-Q1-K1-G10
cccacgcgtccggggagttgatttatccgctgcagccatgagtaagttgcagtctgagtctgtcaaggatgccatctcccagattggtggggatgccaaggagaagaataggaaggtcactgagactggggaacttcaaattggtctgaagaattattatccacaaaaaggcaagcctttcaatggctctggtaaggtggcccatattcctcgtcccaagaataaagggtgcattcctggtgattcccaacattgtt

SEQ ID NO: 2307 - DNA, 448 bp, Zea mays
  unsure at all n locations
  Clone ID: LIB3116-014-Q1-K1-G11
ggcttgctgggcaagatcatggacaagatacccggctaccacaagagctcagctgggaagcagaccacaaggcggacgccgccggcgagcacaggaccagctcctaaggtcgcagtcgcagcgcgtgtcctggccgtggccgggccttgggcgatcagaaggtagctagcgttggcatgtgggttcggttctggtttgcttttacaaaagtttgtttcaaggtggatcgcctggtcaaggtccgtgtgctttttaaggtggatcgcgtgactggcagtgagtgttgctgcttgtgtaggacgtggtacgtacgggttttattttggttccaagtcaaaagtcacggtcggtctggatgttgtgtactgggtttgntgaattatgagcagctgcgcgttgaattcggctgggctacctggatgcggtaattattgcctttggttctggc

SEQ ID NO: 2308 - DNA, 302 bp, Zea mays
  Clone ID: LIB3116-014-Q1-K1-G12
cacagcaatccacacaagcacttcgacgtcgcacgggcgctgcacacagacacaccaagcgtcggcaccaatggcttactaccaggaggtggactactgctcggaggaggtgaggtcggtggccccggccggcttcggccgccacggaggcggcgtccagcagcacgtcgtcaaggagaagttcgaggaggtcgacacggtctcacgcgccggcgccaaccaccaccaccaccaccatggtcaccacggcggccacggcttcgtggtgcgcgagaccaaggtcgaggaggacattaacacct

SEQ ID NO: 2309 - DNA, 287 bp, Zea mays
  Clone ID: LIB3116-014-Q1-K1-G2
ccctcgcgttcatattctgcatgggtgaagatggttgggccatcagcagccacaaaaaaaaaaacacaagtatatgccctagttggttcttggtgctttgtgatctctcagaagcactgaattgtgaataccgtcaaaagcaattatcggcaggttattttaccagtcacaatggtgcttcttggattcaaaacaattatcttcagaagaaatcatggaaccatcaaacccagaatatcttcacacagaaatcagaattgaatagaagattatgagcaaggacgaac

SEQ ID NO: 2310 - DNA, 300 bp, Zea mays
  unsure at all n locations
  Clone ID: LIB3116-014-Q1-K1-G4
acgcgtgggcgcgcgtggtgcaaagatgttgggacatcttcttatatatggggtttcgtttatgtgatgtggacaagtgtgtgtagctgcttgcttgtgctagtgtaatgtagtgtagtggtggccagtggcacaacctaataagcgcatgaactaattgcttgcgtgtgtagttaagtaccgatcggtaattttatattgcgagtaaataaatggacctgtagtggtggagtaaatnaataaaaaaaataaatattatctttctataataatttttttatgtctttatttttttaattt

SEQ ID NO: 2311 - DNA, 363 bp, Zea mays
  Clone ID: LIB3116-014-Q1-K1-G6
gcggacggaaagcatctcatgtagcattggaatgtgctcttcagtcacatccaaatatggttatcctaggggaggaggtttctgtgggggaacttacaatatttgatattacaaagcagatatgtgatgctgtgcaggcaagagctgaaaaagacaaatatcatggagttgtacttattcctgagggccttgttgagagtattcctgaactgtatgctttgctccaggaaattcatggactgcataataaaggtgtttctgttgagaacatctcttctcatctttcaccttgggcatctgcactatttgaatttttgcctccaattattagaaaagaagctgctttttcatcctggatctgac

SEQ ID NO: 2312 - DNA, 263 bp, Zea mays
  Clone ID: LIB3116-014-Q1-K1-G8
ctctccccgctcccctcctgcccctttccttcgtcctcagatccgccgattccccgtccctgcgcctccgtctcatgatctctgcgcctctgcgggtgcggctgccggcgccgaaggctgccgccggggggtcgttcctgctcggcgcgtcctccgtcgagtccaatcccaatcccaagcccaagcccagcaggatccgctgcgccgccgccacgctgtacgaggtcctgggcctgcgcgccggcgcgacgggccgggagatc

SEQ ID NO: 2313 - DNA, 306 bp, Zea mays
  Clone ID: LIB3116-014-Q1-K1-G9
cccacgcgtccgcggacgcgtgggccgccgcgtgctcgtcccaaccctgtcgccggcaagccatggcgtcgcgcttccgctccttcactcgcccggccgccgccgccttcctccggtccactgccagccgaagcccctccgcttcccttccccgcaccctcgctcctgtccctagggcttcggccacggggcggcgcatggctctggcgcggtctctgcaaccgctgcacagcgccgtctcggcggcccggctgacgtcgcggctgggggcggaagtggaccgggccgtgtcgcagggtacgctct

SEQ ID NO: 2314 - DNA, 338 bp, Zea mays
  Clone ID: LIB3116-014-Q1-K1-H1
cggacgcgtgggcggacgcgtgggcggacgcgtgggcggacgcgtgggcggacgcgtgggcggagcagaggagatatgtcgcaggggaagggaggagcgtcgaggaaggaggaggtggtcaccagggagtacaccatcaacctccacaagcgcctccacggctgcacattcaagaagaaggcacccaacgccatcaaggagatcaggaagtttgcgcagaaggccatgggcaccacggacattaggattgatgtgaagctcaacaagcacatctggagcagcgggatcaggagcgtgccgcggagggttcgtgtgaggatcgcccgcaagaggaacga

SEQ ID NO: 2315 - DNA, 64 bp, Zea mays
  unsure at all n locations
  Clone ID: LIB3116-014-Q1-K1-H11
cggacgcgtgggttagattaaaaaaaaaaaaaaaaaaaaaaaaaaannnnnnannnnnnnaggg

SEQ ID NO: 2316 - DNA, 244 bp, Zea mays
  unsure at all n locations
  Clone ID: LIB3116-014-Q1-K1-H12
aacggccttgtcgaggtacaacttgcggctgtgacgaagaccaggtgccgagcggcgttgacgccaccaagatctcgcaggagtagtacctcaacgcgccaggcgagacctactccgtcaccctcaccgcgacgggaacctaagggtattactgacagccacaataaagagccgcaatggtcggtaagatcactgtcaactaattaagctagctatcgatcgagatccatntatgtattagctg

SEQ ID NO: 2317 - DNA, 358 bp, Zea mays
  Clone ID: LIB3116-014-Q1-K1-H2
cccacgcgtccgaccgcgccggcacgggcgactgcacggtggcgcggcgcgtcttcgggcccgggtgcttcgcgggggagccgttcttcgtccccgacgacgtggaggggaatggcaacgaggacgacggctacttggtgtgctacgtccacaacgagcgcaccggcgagaaccagttcgtggtgatggacgccaggtcggcgcagctggacatcgtcgccgaggtgcagctgcccgcgcgcgtcccctacggcttccacggcatctttatcacgcaggccgagctccaggcgcagcagcaatgatcaaagcacaggaatccaatccaagagaaacacgccgctggatactgaataga

SEQ ID NO: 2318 - DNA, 356 bp, Zea mays
  Clone ID: LIB3116-014-Q1-K1-H3
gccgtgaccatcttcggcgggcgtggccatgccgggacatggggaaaggcacttggtgcagaggtctatgactgcaacaacatggtggagcaggagctgcctggaggcgggctcctcgtgtaccagagcttctgtgctgctgaagacgctgttgctacctcgcccaaatctgttttccactgctttgacggcgagaacgtggagagtgctcctcctcctatgaagaaggactacaaactggctaatcttctatgctgggaggaggaagcggatgccatggaggagaaggcgggagtgcttgatgagtaagacgggcttctggggtcgatttgcttctgagttggttattttatatc

SEQ ID NO: 2319 - DNA, 102 bp, Zea mays
  Clone ID: LIB3116-014-Q1-K1-H4
tcgccaacacatgttctgacgtatctattgcgatgatgatagaagctatggatgaaacgaacatgctgtctaccgcgattgtcaacgatgaactaactcgac

SEQ ID NO: 2320 - DNA, 120 bp, Zea mays
  unsure at all n locations
  Clone ID: LIB3116-014-Q1-K1-H6
gaacaacgccggcttcccgcacaacgtcgtcttcgacgaagacgaggtgccgagcggcgtcgacgccaccaagatctngnaggaggggggcctttatagaggatgcaaggatatattccg

SEQ ID NO: 2321 - DNA, 351 bp, Zea mays
  Clone ID: LIB3116-014-Q1-K1-H9
cccacgcgtccgcggacgcgtgggccgccgcgtgctcgtcccaaccctgtcgccggcaagccatggcgtcgcgcttccgctccttcactcgcccggccgccgccgccttcctccggtccactgccagccgaagcccctccgcttcccttccccgcaccctcgctcctgtccctagggcttcggccacggggcggcgcatggctctggcgcggtctctgcaaccgctgcacagcgccgtctcggcggcccggctgacgtcgcggctgggggcggaggtggaccgggccgtgtcgcagggtacgctctgcagttcctacccgggagtctgagtctgatacagtagacaggtct

SEQ ID NO: 2322 - DNA, 91 bp, Zea mays
  Clone ID: LIB3116-012-Q1-K1-F10
atccgctgaaggttgtaggaccaattattatattactaactggaaaaccactgctacaggggaggaagaaacaagacgccgtaggaatata

SEQ ID NO: 2323 - DNA, 182 bp, Zea mays
  Clone ID: LIB3116-009-Q1-K1-H7
ctcctctacgtcatcccaccacatttggcttttccaacgaaaatgtcgtgcgccggagcggctgtcctcttctacaggctcgccgtttatgccctcattgcgttcgaggctccggcagtattacctaatgctaggtagtcctgccaaggtaccggccatgttaccgaatgcatgcattcctg

SEQ ID NO: 2324 - DNA, 345 bp, Zea mays
  unsure at all n locations
  Clone ID: LIB3116-009-Q1-K1-H8
ccgacgcgtgggcttgaatacntcgactcggttgatgttgggaccaaaactacagccgcgaaaaatgaggcgttctactagctccacgccgtggctgacctgaagacggaccaggcaccgacggaggcacctgatgcaggcagccctgccaaggcaccggccgagtcaccgaaagcaggcagtcctgcagctactgccaaggcacccgagtctgctgccacgagaactgaccacgctaaggcacctaaagccgccttcactcccgacgatgacgctgccccatcgtcgtcggcgtataggaagtctggtccagctgccgagccgaccaccgacgtctctacaccg

SEQ ID NO: 2325 - DNA, 317 bp, Zea mays
  Clone ID: LIB3116-009-Q1-K1-H9
acataagcagaaatacaaacaaagacatttgactttacacgaggcgctgcacacaaacacgccgagcattaagcaccaatggctgactaccagaaggtggactacttgctcggaagaagtgaggtcggttgccccggacgtcttgggccgtcagtgatgcggcgtccagcagcacgtccccaatgagaagttcaaggaggtcgacacggtctcactctccggagccaatcagcactaccactaccatggttaccacggcagacactgcttcgttttgcgctagaccagtgttgaggaagacatcttttcctgcaccg

SEQ ID NO: 2326 - DNA, 435 bp, Zea mays
  unsure at all n locations
  Clone ID: LIB3116-010-Q1-K1-A1
caaggtcaccgtccacgaccgccagcgcggggtcatccacgaattcgtcgtgcccgaggaccagtacattctgcacacggcggaggcgcaggacatcaggctgccgttcgcgtgccgccacggtttatgcatccgggggctcaagttggatactcgacagcgggtgcacaaaccatatgactggggagaaaagaatgttctcctcatatgagaaaaaccaagatccccaacgagctatcacattcggggatggaaatcaaggtttggtcaaaggacttggttgctgcacaagctgtgcagtccgaataaaatcaggacagataaggcagcctgaagcacttgggatatctgcagaactaaaagataagggctatgctntgttgtgtgttggtttcccatctggcgatgttgaggtcgagactcaagatgaagatg

SEQ ID NO: 2327 - DNA, 273 bp, Zea mays
  Clone ID: LIB3116-010-Q1-K1-A10
gcgagttccaagtgatctgaagaagaatctcatgctttcaaggctcgataagaagctgacacaggcggaacttgctcagatgataaatgagaagccacaggtgattcaggagtatgaatcatgcaaggcaatccccaaccagcagatcattatcaagctcgagagggccctgggaaccaagttgcgtggcaagaaatagctctcctacgagtttgtgtcccggagcatcataatatggggaagacaaggcaagctgtctgcttattttgctat

SEQ ID NO: 2328 - DNA, 259 bp, Zea mays
  Clone ID: LIB3116-010-Q1-K1-A11
aaaacgatacgatttataaatttatcgaataatttcaacaccaccaatatcaacaacccaggcgcatctcgctcaaaggataattgtcacacttccgctcgcgctcttactctttgccgggtcagggcatggcctcgtgaatccggatgcagcccgttctcccaagccccccatccacaatgccatatctgacctaacggacacgatcgtgaaagtgctgggattccatgccaaggggctcaaagtgtccagcttctac

SEQ ID NO: 2329 - DNA, 274 bp, Zea mays
  Clone ID: LIB3116-010-Q1-K1-A12
cgcttctacatgatcttacatgagctgctttactaacaaatgagagtataaccacaccttatattctaccctatttatgaatttctccatcccaaacctcttccttatatttttaatgcctatattgcatcctatctcttttctattccacaaactatttttatctacaacctgcattacctaatctcacaatccacacatatacatagtcacagttccctgcttcaagctccactgaggcaaacaggatcagagaaatgttccataactcact

SEQ ID NO: 2330 - DNA, 336 bp, Zea mays
  Clone ID: LIB3116-010-Q1-K1-A2
aagacgacttgtttcattgattcttgaagagatcgagcttcttttgcaccacaaggtcgaggatgtcttgcaactgcggatcaagctgcggctgcggctcaagctgcaagtgcggcaagaagtaccctgacctggaggagacgagcaccgccgcgcaggccaccgtcgtcctcggcgtggccccggagaagaaggccgcgcccgagttcgtcgaggccgcggcggagtccggcgaggccgcccacggctgcagctgcggtggcaactgcaagtgcgacccctgcaactgctgatcacatcgatcgacgaccatggatatgattattatctatctag

SEQ ID NO: 2331 - DNA, 358 bp, Zea mays
  unsure at all n locations
  Clone ID: LIB3116-010-Q1-K1-A3
cacgatcggagtccaagtccatcccatccagatccactcgaccccgatggcgccgtccatctccgtcggcgcagcggcgcagtcccgggcggcgggcgcgagcacgaagaagagcgcggacgaggtggagctcctgcggcggcggaacgcggagctggagcgggaggtggcggcgctgcggctggagctgggcgcggcgcggcgccgcgccgagacggcggaggaggccgaggagcggctgtgcgtgcagctcggcgacgccgaggtcgaggcgctcgagctcgcgcgcgcctaccaggcccacgtncacgagctcgccagggagctcgtcgncgcgcgcgcggtcccggtacgcccg

SEQ ID NO: 2332 - DNA, 315 bp, Zea mays
  Clone ID: LIB3116-010-Q1-K1-A4
cctgactgaacctccgtaatagtagatggtatcgcgtacaaaggtggaagagctccaagctgatgtagcttctatggatactgaagtttctgctctgatgaagctgttcaggaaaataacagagagtgacagagcccctccacccagggatagaaatgacgatttgtctttggaatgcgagccagttcaccttgatgacacggtagacgacattgaccttgagaagatggagaaggagatgtcagcctacgtctcggctttgtctgccgcgaaggagaaccctaccgacgagttcatgagagcagtcgccgatgc

SEQ ID NO: 2333 - DNA, 377 bp, Zea mays
  unsure at all n locations
  Clone ID: LIB3116-010-Q1-K1-A5
cccacgcgtccggccaaggccaaggccaagccgccccctccctgctctcctctcctctcctgtcctttcctctccactctctggcagccaaaggcgaggccgagatcctgcgcgcggaggatgccttccaggtccatgagccggctgtccgtcgagtccgcctcgggcagcggcggcggcggctgccgggaggccgagccggtgctctgcgcgcctcggccgcgcagggcccagcagcagctggtccacgtgcacccccgcggcgccgacctcatcctcggcccgccgcccttccttctcaacgagagcagcgaggagggtcggtgcagctgggcggccgttcgcggcgggtcgccgncggcgcgcgcgggcaaccc

SEQ ID NO: 2334 - DNA, 94 bp, Zea mays
  unsure at all n locations
  Clone ID: LIB3116-010-Q1-K1-A7
cccaagcataatnnaactcatttttatacttttttacccacaagtgcccttcatttttgggggttcatacgtgcaatctctggcctttgtcact

SEQ ID NO: 2335 - DNA, 319 bp, Zea mays
  unsure at all n locations
  Clone ID: LIB3116-010-Q1-K1-A8
cacacaagcacttcgacgtcacacgggcgctgcgcacagacacaccaagcgtcggcaccaatggcttactaccaggaggtggactactgctcggaggaggtgaggtcggtggccccggccggcttcggccgccacggcggcggcgtccagcagcacgtcgtcaaggagaagttcgaggaggtcgacacggtctcacgcgccggcgccaaccaccaccaccaccatggtcaccacggcggccacggcttcgtggtgcgcgagaccagcgtcgaagaggacatcaacacctgcaccggcgaggtccacgagcgcanggaga

SEQ ID NO: 2336 - DNA, 175 bp, Zea mays
  Clone ID: LIB3116-010-Q1-K1-A9
tcgtccacgcgtacgaccacgcgttcgtccacgcgtgcgtttccccttcaccgactactaaaagccggaggccaccgacccaaaggtgcgcagaccatctacgctatgatccaacgctctctcctcgttagacgacagataatttctctcgtgcacgtgcatgcatcgccgactg

SEQ ID NO: 2337 - DNA, 375 bp, Zea mays
  Clone ID: LIB3116-010-Q1-K1-B10
ctcacctttccttcacttcttcttcaccaaataatgtcccgcccttggcgggcttcttaggtgggacaggagagtcatctccatgtcctctattccggctactaccttctccgtcatcttatccgttcccttctagtgccgaagctgacaccgccatctacaacgaccttcattactacacatttcatgtccgcatctactgcgacacctgccgcgccgctttcgtgaccaatgtcaccaagtacatcgtgttcgccaaggtgaggcttgagtgcaagcacttattcaccggcaagctctagcgctccatcgactgtgtgacctactctaactgcacttacacgatcgatctcaatgacagccactatgaggaca

SEQ ID NO: 2338 - DNA, 333 bp, Zea mays
  Clone ID: LIB3116-010-Q1-K1-B11
cccacgcgtccgctccacaacatctgcgagattcggggcgaggaggtggacccagccatccgctgcgaactggtggacgacgagaccacgccggagaaccccgtgcgctccgagacggccagtcgcgccagggacaacatcgcgcacaacctgctccaccgtggcttgggcggcaacacattcttctgatctcatccgtcaccttcttcttttttatgctttgctagtacagtagtacagaattgggctggaacaagaaagaaataggcattcttttcttttaattacactagaagatgattttggtaggattcttatagaatctatctatct

SEQ ID NO: 2339 - DNA, 268 bp, Zea mays
  Clone ID: LIB3116-010-Q1-K1-B2
ccgcacacaagcacttcgacgtcacactgtcgctgcgcacagacacaccaagcgtcggcgccaatggcttactaccaggagggggactactgctcggaggaggtgaggtcggtggccccggccggcttctgccgccacggcggcggcgttcagcagcacgtcgtcaaggagaagttcgaggaggtcgacacggttttacgcgccggcgccaaccaccaccaccaccatggtcaccacggcgggcacggcttcttggggcgcgagacca

SEQ ID NO: 2340 - DNA, 244 bp, Zea mays
  Clone ID: LIB3116-010-Q1-K1-B5
cccacacgtccggcgagagatcttatctttttcgcccgaacatgagggctaagtggaaggagaagattatgaggaggctgaagaggaatcttcctaagattaggcatccatctaagtagatcctgatgcagtgtccttcatcaagtggaagatagttgattggtctttcatcttcctcttggtttttcctgttatgtctggccctaaaatgcttaggcatctaaatttcctgtttttgaacttt

SEQ ID NO: 2341 - DNA, 391 bp, Zea mays
  unsure at all n locations
  Clone ID: LIB3116-010-Q1-K1-B6
cggacgcgtgggcggacgcgtgggcggacgcgtgggtgagaagagagaggaagacgagagctagaagcgaaggagaaaagcagttcttcagctaggcaggagggcacaggaaggaggagatggcgtcaaagaggattcagaaggagctcaaggatctgcagaaggaccctcccacctcgtgcagtgcaggtcctgttggtgaagacatgttccactggcaggcaacaataatgggtccatctgatagcccatattctggtggagttttcctagttacaatccattttcctcctgattatcctttcaaaccaccaaacgtggcatttcgcactanagtgtntcatccaaacatcaacagcaacgggagcatttgcctcgacatcttgaagga

SEQ ID NO: 2342 - DNA, 375 bp, Zea mays
  Clone ID: LIB3116-010-Q1-K1-B8
cgagaggccgccgatgcttatgccggcggagtgcgtgatcccgacggtggagatcccttcgtggccggcggcgccgcccgtgggcgtggggccgtgcgggtgcccgtgctgcgcgccgtgctaccagggctactacgagggctgcaggtgctactgctgcggcaggctgtacggcacgaccgtccgcccgttgccagcgccgtgcggggcctacaggggctgccggacgttcagcgacgacgacccgtcggcggcgtgtagcgtcatgtgaagaatggtggtgttgctttggatttgacaggaacatgcatggtgaactatactcttggaacgaataaataaatgtgttcattaggcagggggtggcgttttgct

SEQ ID NO: 2343 - DNA, 99 bp, Zea mays
  Clone ID: LIB3116-010-Q1-K1-C10
gacatgtgcagtctctggcgactgatgttcagtgatcttgctgttctattgtttgtatattcgtgtcggattgttaattctgagcagccattgtttgct

SEQ ID NO: 2344 - DNA, 386 bp, Zea mays
  unsure at all n locations
  Clone ID: LIB3116-010-Q1-K1-C11
gctatcggaagaatgaaatcaaattagagtatcgtgtgaggtcaagaaggtactcatggaactggagaaacttcttgtacagaaagcaactgcaccaatggcacgtcagattttgcagctgtttcttgagaagtacaggcttctaccaagatcatcaatccacatatttttgttttgtttttaaaatacatggtagttaaatcgtgtttcaacttgcccttgattaaggcgctacagctactgccaactaaatgtagtattatgtgagctctttttcatcgagaattcctaattgtacctgcttcagataccttnnnnaaaaaaaaaaaaaanaaaaaaaaataaaacaattttnnnntaaaaaaataatatataaaaattataaa

SEQ ID NO: 2345 - DNA, 182 bp, Zea mays
  unsure at all n locations
  Clone ID: LIB3116-010-Q1-K1-C12
nccacgcgttcggcttcttctactacacgacgacaaacatggggaagcctgctaagatcggagagaggggcgaatacgccggctagcgtcgagatccgagggctactccggaccgtctgatcgaggagaaggtcagagtggacaacagaatgctgtatgcgttctatgtccttaatctacat

SEQ ID NO: 2346 - DNA, 306 bp, Zea mays
  Clone ID: LIB3116-010-Q1-K1-C2
gagttcgtgagaggtctaggccgtcgtctcccagtcaactttgggttgctggaccgttgtctccttataatgtaattatttattttgtaaagaactcctattatttagtaaatatgtgacattcgatcctgtgccatgattcatcaaaaaaaaaaaaaaaaaataaaaaaaaaaaaaaaaaaaaaaaaaaaaaaaaaaaaaaaaaaaaaaaaaagaaataaaaaaaattaaaaaaaattaaaaaataaaaacccaaaataaacctattatcaaaattataaaaaatatttatataaagggggggcc

SEQ ID NO: 2347 - DNA, 355 bp, Zea mays
  Clone ID: LIB3116-010-Q1-K1-C4
actggagcaacatcaggtgccccagcaacaacgggcagagcagctggaagaacgcctggaagaaggccggcgcctgctccggcctcagcgagaaagactacttcgagactgccctctccttccgtagccggatcaacccactcgttcgcctcaaagccaaaggtatcgagccggacttcgggctctacggcctcaaggcgatcaccaaggtcttcaagagcggcatcaacgcgacgccggtgatccagtgcagcaagggccccttcgacaagtacatgctgttccagctctacttctgcgcggcggggaacggcacgttcatcgactggccccgcgccgcagcagtacaccctgc

SEQ ID NO: 2348 - DNA, 158 bp, Zea mays
  Clone ID: LIB3116-010-Q1-K1-C6
tcgctaaagggcgtcggcgcttatgcctgcggtttgcgtgatcccgacggccgacatggcttcgtggtcggcagtaccggctgtgggcgtaacactcattctggtagccatgctgggcgccgtgctaccagggctactattatggcctgaggaactac

SEQ ID NO: 2349 - DNA, 256 bp, Zea mays
  Clone ID: LIB3116-010-Q1-K1-C7
cccacgcgtccgggattcttcgtccaggccatcgtcaccgggaagggcccgctcgagaacctcgctgaccacattgccgaccccgtcaacaacaacgcttgggcctacgccaccaacttcgtccccggcaagtgagggaggcgccgccggtgacctttaggtgtccggatgcatgtgagcgcacgctggttttcggtttgtaccatgatgtaaactattgttcaatcgacaaggaataattgtgttcattgtcatt

SEQ ID NO: 2350 - DNA, 208 bp, Zea mays
  Clone ID: LIB3116-010-Q1-K1-C8
ccgcctcgctggtgcacatgtgtgccccacaacatctggcttagcactggaaaacccctgtaggagggcggcgcctgcttctgcctcagggagaaaaactactttttggactggcctttcctttcttatgcccgatcaacccactctttcgcctcaaagccaaatgtattgagccggactttgggctcttcggcctcaaggcgatcac

SEQ ID NO: 2351 - DNA, 352 bp, Zea mays
  Clone ID: LIB3116-010-Q1-K1-C9
gcgtccacgcgtgcgtgattcttgaagagatcgagcttcttttgcaccacaaggtcgaagatgtcttgcgactgcggatcaagctgcggctgcggctcaagctgcaagtgcgggtaatatatatgataatatataagtgcaccgtgcatgattaatttctccagccttcttcttgtctagttaatttccatttatttattttttccattgcgaaacaaacaaacaaacagacaagaacaaagtttatttggatcgagtagttcaatccatttgcgcgctgtccttttcagcaagaagtaccctgacctggaggagacgagcaccgccgcgcaagccaccgtcgtcctcggcg

SEQ ID NO: 2352 - DNA, 446 bp, Zea mays
  Clone ID: LIB3116-010-Q1-K1-D10
aaattcttttataagatggatacacaaaagaaattttctgaattccgaggccagcttagtggcatggtttttcatgaaaaacttgggacaatgctcgataaaatgacacgtgtcgagaataccgttgctgaattggcccttattcttggaataaatgagagaacggtcccaattatcaaagatgcggctgcattggctatgtcagatcttgccacttctattgtcacagaatttacttcacttgctggaattatggcacgccattatgctttgagagacagcatccctgaagagattgcagaagcactatttgagataacactccctcggtcttcgggtgatgtgtttccaagaacagatgctggtatagttcttgcggttgctgatagattggatagcctagttggattgtttggagctggatgccagccaagttctaccaatga

SEQ ID NO: 2353 - DNA, 455 bp, Zea mays
  Clone ID: LIB3116-010-Q1-K1-D11
cagcaatccacacaagcacttcgacgtcacacgggctctgcgcacagacacaccaagcgtcggcacgaatggcttactaccaggaggtggactactgctcggaggaggtgaggtcggtggccccggccggcttctgccgccacggcggcggcgtccagcagcacgtcgtcaaggagaagttcgaggaggtcgacacggtctcacgcgccggcgccaaccaccaccaccaccatggtcaccacggcggccacggcttcgtggtgcgcgagaccagggtcgaagaggacatcaacacctgcaccggcgaggtccacgagcgcatggagagcttcctcgccagggctaactgagccgcccggcggccggcatccacgcccgttcgtgcttgcctgcgtgccttatgtatgtctgtggttgactggttgtgcagggtcatcgtacttggctatcgtacg

SEQ ID NO: 2354 - DNA, 307 bp, Zea mays
  Clone ID: LIB3116-010-Q1-K1-D12
cggacgcgtgggcggcggtggcggaggaggagaggctgctcgcggctgcacagcatcatcaggcgtcggcggtggcggatgcggcggctatgggggaggaggtgcgactggcggtggcggagtgccccgtgctcgtggtggggaagcgcgggtgctgcctcatccacgtggtgaagcggctgctgcagggtctcggggtcaaccccgccgtgcacgaggtcgccgacggcgccgaggcgaagcttattgccggggtcgtcgacggcggcggcgacgttgcccttccggccgtgttcgtcgggggcag

SEQ ID NO: 2355 - DNA, 189 bp, Zea mays
  Clone ID: LIB3116-010-Q1-K1-D4
tcgaccacacgtttcgattaaaaaaaggagggttttttttttgaaaaaaaaaggccttccctaggggaatggaaaaaaaaaaaaaatttcacatgcattaacacatattattgaactaaggataaatgggcgtcccctctaaaacaacaaagtttacgaaaatcgtattccgaccttttgaaaattttt

SEQ ID NO: 2356 - DNA, 335 bp, Zea mays
  Clone ID: LIB3116-010-Q1-K1-D5
gaaaaccgagagcttcaactctataggatccaacaagccatccgcgtgcgcaacataccttgatcaccctagattgaacactagacagcacctaactttggtgcagtcatacggcgcaaaccatgagggcacagcagctgcaccaactcgtgctacctgtgatcaacacaagtagttctggcagaacctttattactactctaagcaacaacagttcgttccattcaaccaactgtctacattgaaccgtgctgcttatctgcatgaacaactattaccattgaggcagctagctactgtactactctcagcaacaacaactctttccatttaac

SEQ ID NO: 2357 - DNA, 305 bp, Zea mays
  Clone ID: LIB3116-010-Q1-K1-D6
cccacgcgtccgatgtttcaggattagaggggaggaaggtcaagcttcaacattccaattcactgaagaatatataatgtacgtttaggactgttaggttgtaaatcgtcaaagtgtctatgtaatgcttcttcttggcatgctacactatatagtactaatattgatcctttaacaaaaaaaaaaaaaaaaaaataaaaaaaaaaaaaataaaaaaaataaaaaaaaaaaaaaaaaaaaaatacaaaaaaaatattaacattaaaaaactataaaaatataaaaaatagggggggcccctttta

SEQ ID NO: 2358 - DNA, 193 bp, Zea mays
  Clone ID: LIB3116-010-Q1-K1-D8
cccacgcgtccgctcctgtccacctgagtacctgaccggcatccttccccctcctgcccgatccctcgaggcggagatccctaggctgtcggccgggatggcgggggcgctggccctcgcggcgttgctcgccgtcgcgtcactccatgcttaggcggtgttgctggacatgctccactcggggtctaagtgc

SEQ ID NO: 2359 - DNA, 179 bp, Zea mays
  Clone ID: LIB3116-010-Q1-K1-D9
ctgttgcctatagcttgttttgatagaaagcctttgtagcacgtcttaaccataaaagagacgactattttatccgatggatgggctattacaaatcatttgtgcattatgtattattttcaaatatttcttagatatttcctttcttattagatggatttaaaaatgacacttgttat

SEQ ID NO: 2360 - DNA, 365 bp, Zea mays
  Clone ID: LIB3116-010-Q1-K1-E1
ttcctgtatctgctgaggtacttgattctagcttctgccttccgattggaaaggctaagatagagcgacaagggaaagatgtcactatcactgccttctccaaaatggtgggatatgcccttcaggccgctgatatactggccaaggaaggtatcagtgccgaggtaatcaatcttcgctcaattagaccgctggatagagctactattaatgcatctgtgaggaaaaccaatagattggtaaccgtagaagaaggcttccctcaacatgggattggtgcggaaatatgcatgtatgttgtagaggacagctttgagtatcttgatgcaccagtcgagaggattgctggagctgatgtgcccatg

SEQ ID NO: 2361 - DNA, 511 bp, Zea mays
  unsure at all n locations
  Clone ID: LIB3116-010-Q1-K1-E11
cagtccgcgtgacgcccgtggtgcggacgccccgtggtgggggattaccatttggattgaatcccttaagggaagacactatcacaagagagaaatataaggcgtaatagtatagcgccctcctttgcctttgtgtttagaagcaataacaagaattctctgttgtcacncnngaggaaaagaagagatacgttctggataacattgtacaatcgtcatacttgaaattgactatattcagttgccgcctattccaacattatatgggagtacaatttatgctttctcgctttacgaaatatgatatttttttggacaatttctatataatagcaaagccttattcctatttntggtacttttggatttcaaggacttttagnccccggtttagtgataggaaccagagaagcctttctagnttatgaaatcgggtattagaacccatggtngggggccttggttaccaattccgaataccgctattacattgtttagcgctagttttttg

SEQ ID NO: 2362 - DNA, 158 bp, Zea mays
  Clone ID: LIB3116-010-Q1-K1-E12
tgaatccttaacgaacacatcttggacgaagatatttaagcttaagtgggcgctccttgcctttggtttgagcataacatattcttttttcaccgaggaaaagataaaacttctggatatatagaccctgttcactcgaattcactaattcagtttcc

SEQ ID NO: 2363 - DNA, 427 bp, Zea mays
  unsure at all n locations
  Clone ID: LIB3116-010-Q1-K1-E2
atcaaatgttcactcgcatcaaggaggtgcatgatagggaaaaagaggtgcataccttgggatattcagatgagcagatatctgagttgaaggaggagattcatagaactagggatgaacagcttgcacagataaccagcatggtcgaggaaaagctaaaccgcactgtggagaagctgcaacagcagctcatggaggaacagaacgcaaggctggaggccgagaaggtggcgcatgaagctatgcggaaatcagaagcgcacatccaggagctgaaggagagactcgagaaggctcgactggaaaacgaggagttccggaggatggcgcanagcagtaaatgtgctatcctatagtacttgctagaaaaactctgtgcggctatcgtgctgacgcgtctctttttttttgtctggagcaccctttt

SEQ ID NO: 2364 - DNA, 370 bp, Zea mays
  Clone ID: LIB3116-010-Q1-K1-E3
cccacgcgtccggtcgatgggtggagcactggtggctgtgtcagtatggctcaataagctttatgacagactagtagaagatgaagatcttccacagttagcatctgttgttgtattgagaggagaaatggagaaaagcacagttacaagaggactgccaatcgccaaagttgtctactcctttctaaacgatacactatcagcgtccttccattttccaaaatggaacaagggacgaatcatatgcttgaagtcccaactaaaaaggctgcagtcggccgtagactcctcaaatgggtctcttgcagctggttttgtcgacatgacaaactcccgtctgccggctcccggttccaagatatacacaagc

SEQ ID NO: 2365 - DNA, 325 bp, Zea mays
  Clone ID: LIB3116-010-Q1-K1-E4
gcgatggcgtcgctcaccatgatggcgtccttcgccgccgtggcggtggccgcgccctcgcgccgaggcaccttcgccgtgggcaggtccgccaaggtcgaccgctgccaggagcccgccacgctagcagcaaccgaggccaggcccgccgccgacggacgccgcgccggcatgctcgcggctgctgcggcggccgtggcagccatcggcggcgccggcgccggcatggcgggccccaagaacgggacccccgaggcgaagaagaagtacgcggccatctgcgtcaccatgcccaccgccaaggtctgccacaactgagcacgcc

SEQ ID NO: 2366 - DNA, 373 bp, Zea mays
  unsure at all n locations
  Clone ID: LIB3116-010-Q1-K1-E5
catatctgcaggttgctagcagcattggaagcgaatcaaacgcgccactgtctggaagagtgcagctggctactgagagcatcccatcctcccatgtgccgctgatcattccatctgctgctccagcacatcagctacccccttcagtagcttcatcagctccaccattgcccatccacgacactaatgcccacactagccggtcaacaaatcttgtaacgccagatttctttgcgcctccaccatcctcttctactccactggctccaccgggcgcatccgtgattcctactgccccgcctcttcaccctacttcggcatctgttcagcgctctcaatatggcgccccactgctncaggcncttttcaccgc

SEQ ID NO: 2367 - DNA, 202 bp, Zea mays
  Clone ID: LIB3116-010-Q1-K1-E6
acggatatcttcacgttgatagcagcatttgttatttgaatgaaacgcgccactctctgggggcgtgcaactttctactgagagcattccatcctcgtatgttcctttcatcattccatcagctcttccagcacatcagctacgcccttcagtagcttaatcacctcccccattgaccatccatgacactaatgcccacact

SEQ ID NO: 2368 - DNA, 444 bp, Zea mays
  unsure at all n locations
  Clone ID: LIB3116-010-Q1-K1-E7
atcacgtaccctgcgggggtgatcctggagctccccgtgatcgtcgtccaccacgaccccgacgtctggggcaaggacgcgcacgagttcaggccggagaggttcgccgaggggatctccaaggcgaccaaggaccagcagccggcgttcttcccgttcggctggggcccgaggatctgcatcggccagaacttcgcgctgctcgaggccaagatggccctcagcatgatcctccagtgcttccagttccgcctgtccccttcctacacgcatgcgccgtacaccgtccttctgctgcatcctcagcatggcgctccaattattttcaacaggatctgatttcccttgcatgacatcgtcgatcgttgtcagcatgtcacagtgcaaataaactcgtatgaataatanntatgtagggagatgagtctacgtctgtgtatctga

SEQ ID NO: 2369 - DNA, 290 bp, Zea mays
  Clone ID: LIB3116-010-Q1-K1-E8
tgataccgaccaagcccatggtggtggagacgttctcagcgtatcctccccttggtaggtttgctgtccgtgacatgaggcagacggttgctgttggaagttatcaagagtgtggagaagaaggacccgaccggcgccaaggtgaccaaggcggctgccaagaagaaatgatgcgatcctgcgcctgctttagcaatacctagttttcatcatcacaagttttgtttgtgatcgttgctgttatcgtgtgaactgttgagatctgttagcatgtgcacttttatctattt

SEQ ID NO: 2370 - DNA, 330 bp, Zea mays
  Clone ID: LIB3116-010-Q1-K1-E9
gtccgatctctatgtccaactgctattacggactcttttttttcattcagaacttcacggtcatcaccgtcttcaactgccacttgagcaggcacaactacgtcttgctcttctgtgccagctactcctggccgcaagaccagatcatgcacatcaccgtcgtcttcaaccacttaggcaggggcctgatgcaacggatgccaaagtgcctctggggcttcttccacgttgtcaacaactactacacgcactggctcatgtactccatttgctggtgctacgcgccatccattattaaccatagcaacccctacatatcacctccaaaca

SEQ ID NO: 2371 - DNA, 365 bp, Zea mays
  Clone ID: LIB3116-010-Q1-K1-F1
acgcgccacgcttatttgcagcacaactattaccagttttctgttagctactgacgactttcagcaagaacaaggtttttcattcaacgactcgggcgaactgaaccccgatgcttatttgcaggagctgaatactactaccattgagccagcttgctgcggcataccgtgcttccttcttgacacagtatccgttgctgactttctaccagcagtttgaggctaacctggcctccctatgacacctacaagatttgatgtccttcggtcaacttgctatacacaagcgcaccggcctcttaccaacaacacatcattggtggtgccctcctttaaattgcttattaattggaatccaataataa

SEQ ID NO: 2372 - DNA, 423 bp, Zea mays
  Clone ID: LIB3116-010-Q1-K1-F11
ccagcggcgggagccccaccaccaaggcagcgtgggggcagcagcatctgcttcacggggtggaggggccccgggtcgccgggaagccggcggcggcgcggcggcggtcccgcgcgtcgcggcgggcgcccgtgacgctgctcaacacggacgccgtcaactttcgcgccatggtgcagcagttcacgggcgttcccgcgcccctcgccggcgcgttcagggtcggggacggggccccggtcatcagcttcgccgccgactacggcttcccgcccgcttcttcttcctcggccgtcaacgtgtccttcttcgaccaccagctccaccggagccaacaacaccctgcagcgccgccggtccacaggcagcagcagcagtacgccggcgcgtcgccgttcggcggctacagcagcggcctggtgc

SEQ ID NO: 2373 - DNA, 348 bp, Zea mays
  Clone ID: LIB3116-010-Q1-K1-F12
taccccaccaccaaagcacttttgtgtctaaatcatcttctttacaaattggaagaaccctttttcacctataatcctgcttcctttcgcattaattccccatcttttttacggtctccctgtacccttctaaacactaaccccatcaacttactctccatcctacaaaaatttactgacattcccactcccctattcaaatcaattcagggtcgtctatctagaccatccaatcatatttacccgcgactactacttcatagctcctttattgtttctcttacattaacttttctttcttttaccatcaaatctaccgaatccaaaaacactctttttccccaactt

SEQ ID NO: 2374 - DNA, 413 bp, Zea mays
  Clone ID: LIB3116-010-Q1-K1-F3
gcttatttgcagcaacaactattaccatttagccagctagctactgcctactctcagcaacaacaacttcttccatttaaccaattggccgcactgaaccccgctgcttatttgcagcagcaaatactactaccatttagccagctagctgcagcaaaccgtgcttccttcttgacacagcaacagttgctgcctttctaccagcagtttgcggctaaccccgcaaccctcttacaactacaacaattgttgccctttgtccaacttgctttgacagacccagcggcctcctaccaacaacacatcattggtggtgccctcttttagattgcttattaagtgaattcaataataaaagtttttggatgatgtatgtggccaaccaaaaataaagaagtacattttcagattct

SEQ ID NO: 2375 - DNA, 404 bp, Zea mays
  unsure at all n locations
  Clone ID: LIB3116-010-Q1-K1-F5
ggtggtcaagaagggcgacgtcttcgtcttccccaaggccatgatccacttccagatgaacctcgaccacgacaagcccgccgcggcgctctcgtcgctcagcagccagaaccctggcgtcatcaccatcgccagcgccgtcttcggctccaagccgcccatctcggacgacgtcttggccaaggcgttccaggtggagaagaaactcatcgactggctccagtctcagttctgggataccaactactagctgcctagctagctagtaatatacttgcttgcttatttgttgcatgcatgcaccaccaacacaagccttatattaattacgtacgtacatctatgtataatattgaataaatggccggtatgcatgtggaggagtgaaacttnttaaataaaaa

SEQ ID NO: 2376 - DNA, 362 bp, Zea mays
  Clone ID: LIB3116-010-Q1-K1-F6
cccacgcgtccgcagcaatccacacaagcacttcgacgtcgcacgggcgctgcacacagacacaccaagcgtcggcaccaatggcttactaccaggaggtggactactgctcggaggaggtgaggtcggtggccccggccggcttcggccgccacggaggcggcgtccagcagcacgtcgtcaaggagaagttcgaggaggtcgacacggtctcacgcgccggcgccaaccaccaccaccaccaccatggtcaccacggcggccacggcttcgtggtgcgcgagaccagggtcgaggaagacatcaacacctgcaccggcgaggtccacgagcgcagggagagctttctcgccagggctaac

SEQ ID NO: 2377 - DNA, 380 bp, Zea mays
  Clone ID: LIB3116-010-Q1-K1-F8
cccacgcgtccgcggacgcgtgggggctgctgacagctgagtttgtagttcaccctcaggccggctacaatacattggaggacttttgggatggtgaaatataaaagcatacaaatttgttcagaataaaagagccaggcgaggaaacaaccacaaaaaaggggagatcgaatgcataggccccaatacgatgaatttgggggtttacgtgattgctgaacacaagtattgtgtgactaatctgtgttttgatgtggtaaatgtaattgggttagtcacaataagagataagtgtctttgccacaagacttttggttcattggttgaagcatgatgtaaaccgtaaaggatattcatgaaaactaaggacgctatagagc

SEQ ID NO: 2378 - DNA, 326 bp, Zea mays
  Clone ID: LIB3116-010-Q1-K1-G1
tgatcttgcaacgcacaggctctcaacatatcttcaagaatttgattggttctttcagtctgaccatctgtctgcgggtgataagctgaactgaaattcagatgcgtgcccaaggcttcatgcaactgctgccagaaatgagaggtgaactgcgttcctctgtctgacactatcttctttggcacaccatgaagacaaacgatccgagacatatacaattctgccaatactgcactgttgtagttggtcttgacaggtatgaagtgggctgacttggtcaagcggtccactactacccaaatggaatcgtagccggctcgagtgcg

SEQ ID NO: 2379 - DNA, 454 bp, Zea mays
  Clone ID: LIB3116-010-Q1-K1-G10
gctcagcacgatcatcgacacacacacatatcgatcgatcgtgtcacgccagcagagcacgagcacggtgctccaatccagagccatgtcgaagccagcgtcttcgtcgtcgttcctcctcctcctgctgctgtcggcgacgctgctcgccaccgtctgccgcgccgacccggacccggtgcaggacttctgcgtggccgtggcgccgggcggccacaacaacgcgtcctcctcctccagcacctacccgggcttcccgtgcaagccggcgtcgacggtggtctcggacgacttcttcttcgcggcgcacgcgggcggcgcgagcacggacaacccgatgggcgcgggcgtgacgccgggcaacgtggaggcgttcccggtgctcaacacgctgggcctgtccatcaaccgcgtcgacctcgcccccggcggcgtcaacccgctgcacacccac

SEQ ID NO: 2380 - DNA, 384 bp, Zea mays
  Clone ID: LIB3116-010-Q1-K1-G11
gcggctcagcacgatcatcgacacacacacatatctttttatcgtgtcacgccagcagatcacgagcacgttgcttcaatacagagccatgtcgaaaccaccgtcttcttcgtcgttcctcctcctcctgctgctgtcggcgacgcttctcgccaccgtatgcctcgccgacccggacccgatgcatgacttctgcgtggtcgcggcacctggccgccactacaacgcgtccttcttctccagcacctacccggtcttcccgtgcaagccggcttcgacagtcgtcttcgaccacttcttcttttaggatcacgccgtctgcgctagcacggacaaccctgagggcgcgggcgtgactccgggcaacatgcaggcgttcccggg

SEQ ID NO: 2381 - DNA, 389 bp, Zea mays
  Clone ID: LIB3116-010-Q1-K1-G2
gatttgggaaacaagaatggtgcaccaaaaactgttgaagagagaatagaggaatataataaagcacgagcacgcatcttcaatggttctgtttctgcagattctgatgctgcaagtgttttgggaactctttgcactggcagagatgagtcagtaaatgttgaaccttctgttgatgaaatcaaagtcagcacgatgaacaaccgttccagagttgctgttttcaaggatactcaaaaggatcgcagtgacccagattatgatcgaaactacaaaaggtatgttaggagcccagttcctgacttcaacttgagcccaggtgccttcaactttgtgcctcagtttatgcagtatggcgttggttatgtgcaatctcctggcatgtctac

SEQ ID NO: 2382 - DNA, 324 bp, Zea mays
  Clone ID: LIB3116-010-Q1-K1-G6
acggcgctcttgcaaaggcgcacgtacaaaagggcaatctaccagcccagaaggccctacggtctgttcatgtgtggctgccgctacctgctaaccactcaaaccaatccaatccaatggaacgcacggtgattgacctcatgaacccgctcgcttttgtaccccctgaagaacgtggggctgttgctcatctggtgctacaaccatatacactcgatccaccccaccccgcattgggcgttagggtacatatacaacaacccggaccataacaagaagggcgctgctcctgggcttatgcttacgtcaccccagaaccaaagt

SEQ ID NO: 2383 - DNA, 346 bp, Zea mays
  Clone ID: LIB3116-010-Q1-K1-G7
gcttcgcctcgccgccagccctgccgacctagacctgcctcaggcggcgccggcgccggcgccggctcagttgaccatcgtgtacggagggcgtgtgctggtgctcgctgacgtccccgccgacaaggcggcgggcctgcttcgcctcgccgccggcgcagcagcggaacgtgcagaaacagaggcgatcggtgccaagcgccgcgaccatgtctccggctctgcgtctgcgggcgctgacctgccagttgcgaggaaggcgtcgctgcagcggttcatggagaagcgcaaggctcgggtcgccgccgtccgcacggagccgtaccgacggccggacgtcagcgac

SEQ ID NO: 2384 - DNA, 312 bp, Zea mays
  unsure at all n locations
  Clone ID: LIB3116-010-Q1-K1-G8
agcagctccgctcgtcgatcagctctcggctgaccactcaccgccagtgggtgcctgccgaccaggtctcgccaccgccgccgccgccgcggtagagaggggagggagagggagagggagaaaaaactggcccagatcgagaggtacagcacgaaaaagagaggcaagagagataggggaccggagggcggcgggccggggcccaagaccgaggggctcgtgcgcaggaagctgatgaggctcctgtcgctcgtccccttcggctgccgtgctggacccatcgacgacgcgccgncgnccgtggaccacgct

SEQ ID NO: 2385 - DNA, 398 bp, Zea mays
  Clone ID: LIB3116-010-Q1-K1-H10
cccacgcgtgcgacgaaaagatagaccagttcagtgcatgggtggagaaacacccaaaccgcagaagccagatctgcctctcctttttcgacgagaaacacagacaccctggttggtttgtcaacaaaacagagcgcatctattgggagcaatggttcatcaatttgcaagtcatgttccccaaaagatacagcaagtcaaacagctccaaagggctgacaaacatccaaggtaattttgttaactaaagtttcacagacgtcatgaggctaccataagcatatagaatgtagcagtaacattttgtgcaatatgctcctagcaaatgccgtggaggagaccagcacaaggcgtgctgcattggaagcgtcgattaacgaagtgctgttccagatcat

SEQ ID NO: 2386 - DNA, 349 bp, Zea mays
  Clone ID: LIB3116-010-Q1-K1-H11
ggcttcagaatctggtgatgcaaaatgtggaccaggctgcgggagatttcattggtcttttgcaagggctcctgaagtatgacccagcaagccgtttaacagcacgagaagcactgaggcatcctttcttcaccgaagggtttgggcgaagaagatgatacgtccttgaagcagaccttgtttgtcctctgtctctgaccaaactgtatataaagctgaaatggagctgtttcaatcttgtttgaaacgtcgtgtaactatagttgtatcacaagggaagtcagacggatactttttactaatcctgacttgtttgagttttgcaagccaattcaatgaaagtttgggt

SEQ ID NO: 2387 - DNA, 279 bp, Zea mays
  Clone ID: LIB3116-010-Q1-K1-H4
cgctactgtagcgctagaagccaatgactagctgatgtggaggcaccgaacaggtggtccagtggcgcaccggactggtccagtgcaacgcagacagaaaaattgtagattcctccaatggctacaactgagtgggggtagagatgtacagaaggcttgcggtccaaaagcacgaacggatgcacgctttaccgggccagcacgactcgctttgaccgggttcatgccagaccgaccccgattggcgtgccgggcttgtgtacagtacacaacctgttg

SEQ ID NO: 2388 - DNA, 376 bp, Zea mays
  Clone ID: LIB3116-010-Q1-K1-H5
cccacgcgtccgcctttcaaaagaaacttggctgggtgttgacgcacgcagccggcggcaacctgtgcggggagcgccaagggctccaggaaagaatcggccgcgggctcgcgatcgggaaggggagcggggcgcatgcgcgagcactggcacggcgacggcgacggcgaggacgagcatgagccccagccggggtgcggggagggcgcggggcatgcggcggcgaactgcgcggcggtgtgctgctgctgcccgctggcgctgctcgacgtgctgctgctcgtcaccgtccggctccccgcgggcgtcatgcggcgggtgaggaggaggagcccgcgccttccggggcacggaggtgcctgagccaaccggaaga

SEQ ID NO: 2389 - DNA, 157 bp, Zea mays
  Clone ID: LIB3116-010-Q1-K1-H6
gtgtgaagttaaatataagatgaccacacgtggacaggccgcattaggcctcattcgtttggctaaaaaaaaagcgccaagggctacaaaaaaaaataaaacgaagacataagaatcggaaaagaaaacggagctcatgcacaaagcactgacacag

SEQ ID NO: 2390 - DNA, 389 bp, Zea mays
  Clone ID: LIB3116-010-Q1-K1-H7
cccacgcgtccgctagagctagctttttgctttgctcaccagacaaaccgcagcagatggcgtcgacgatcatggccgccacctcccgcatcgtcgcggccaagacgccgtttcttggccagggtcgcgccgccgccgccgccgccaatgccagccccctccgcgacgtcgccgccgccgctgctggcggccggatcaccatgggcaacgacctgtggtacggcccggaccgcgtcaagtacctgggccccttctccgcccagacgccctcgtacctgaccggcgagttccccggcgactacggctgggacaccgccgggctgtccgcggacccggaggcgttcgcgcggaacaaggcgctggaggtgatccacgggcggtgggcgatg

SEQ ID NO: 2391 - DNA, 342 bp, Zea mays
  Clone ID: LIB3116-010-Q1-K1-H8
ggctactgtcacgctagaagccaatgactatctgatgtggaggcaccgaacaagtggtccagagggggaccggactgatggagtgcaccgcacacagaaaaattgtcaatacctccaatggctaccactgagtgggggtcgagatgtacagaaaggtcagcggcccaaaagcacgaaccgacggacgcttcaccgggacggatcaacattgcttaaacacgtgttcataccatcccgaccccgataagcctctcggccctgagacaaccaaacaacctcttacctaaccggacacgaacaggctattagggatggtacacctgcaggctctttaaaaagccg

SEQ ID NO: 2392 - DNA, 346 bp, Zea mays
  Clone ID: LIB3116-010-Q1-K1-H9
aaggtcgacatcccctcctccggcgtcatctacttctacgtcggcgtcgtcaagaagcacctcccggtcgccgtcttcgacgcgccgccggcctgcacgcccgacccgctcctgcaacggctggaggacgtgggcgagggcggattggccgtggtgggcgccgcggcgtcccggcgatgatgggtggaggagaacggaggagggttcgacggcgccggcgagccatgatcacgagcgcagttttgagaggagaacgggcgatcgccggccttcttcgatgcacatagatagcgtgggcatttccatctgtgtgcttttttctgctttctactagtggctacactag

SEQ ID NO: 2393 - DNA, 407 bp, Zea mays
  unsure at all n locations
  Clone ID: LIB3116-011-Q1-K1-A1
cccacgcgtccgagcaacatagaaagtggaatccagtagcaacaatagagcaacaatggcgaccaagatattttccctccgtatgctccttgctctttctgcatgtgttgctaacgcgacaattttccctcaatgctcacaagctcctatagcttcccttcttcccccataccttccatcaatgatagcttcagtatgtgaaaacccagctcttcaaccctataggctccaacaagcaatcgcagcaagcaacatacctttatcacccttgtttcaacaatcgccagccctatctttggtgcagtcattggtacaaaccatcanggcacagcagctgcagcaactcgtgctacctgtgatcaaccaagtaactctggcaaacctttctgcctactctcagcaacaac

SEQ ID NO: 2394 - DNA, 361 bp, Zea mays
  Clone ID: LIB3116-011-Q1-K1-A2
cccacgcgtccgagcaacatagaaagtggtatccagtagcaacaatagagcaacaatggcgaccaagatattttccctccttatgctccttgctctttctgcatgtgttgctaacgcgacaattttccctcaatgctcacaagctcctatagcttcccttcttcccccataccttccatcaatgatagcttcagtatgtgaaaacccagctcttcaaccctataggctgcaacaagcaatcgcagcaagcaacatacctttatcacccttgtttcaacaatcgccagccctatctttggtgcagtcattggtacaaaccatcagggcacagcagctgcagcaactcgtgctacctgtgatc

SEQ ID NO: 2395 - DNA, 370 bp, Zea mays
  Clone ID: LIB3116-011-Q1-K1-A3
cccacgcgtccggccgctactggaccatgtggaagctgcccatgttcggctgcaacgacgccacccaggtgtacaaggagctgcaggaggccatcaaatcctacccggacgccttccaccgcgtcatcggcttcgacaacatcaagcagacgcagtgcgtcagcttcatcgcctacaagcccccgggcagcgactagaccgcgcccgccggccgccccccgccggctagctagctagctagctcctgcgtgagctagtagctagtgccatgcgtcgtctctgtcgttcggttttgcttcgggtcaccgggtaccctttgcttgcttggtttcttctttccttttttcctttttttttcttcttttccccg

SEQ ID NO: 2396 - DNA, 57 bp, Zea mays
  Clone ID: LIB3116-011-Q1-K1-A4
ctcacgcgtgaggacgctactggaccatgttgaagctgcccatggtaggctgtaaca

SEQ ID NO: 2397 - DNA, 278 bp, Zea mays
  Clone ID: LIB3116-011-Q1-K1-A5
ggccccgggagcaagacgaaccgcattcatggcgtcaagagcggcccaagcggggggatcaacgggggcgggggcgggcgctacaaggacaagaaggacgtggaagacgcgcaggggacggggggcacgaacgccgacaccacgaacggactgcgcagcaaggcggacgaggactgcaagcggacgcacaagggcagcacggggctgtacgagggcaacaccagggacaagggcgacgcaccccagcatcagtggaccagaaggacggggcccaacaa

SEQ ID NO: 2398 - DNA, 431 bp, Zea mays
  Clone ID: LIB3116-011-Q1-K1-A6
gttgcgtatgccctgtctcagggactaaaggtcattgcatgtgttggtgagacccttgagcagagggaggctgggtctaccatggatgttgttgctgcacaaacaaaagcaattgctgagaagatcaaggactggagcaacgtagttgttgcctatgaaccagtttgggctattggaactggtaaagttgccaccccagctcaggctcaggaagtgcacgcctccctgagggattggctaaagaccaatgccagccctgaggttgctgaatctactaggatcatctacggaggctctgtaactgctgcgaactgcaaagagctagcagcacagcctgatgtcgatggttttcttgtcggtggagcttctttgaagcctgagttcatcgacatcatcaacgcggccaccgtgaaatccgcttaagatgctac

SEQ ID NO: 2399 - DNA, 193 bp, Zea mays
  Clone ID: LIB3116-011-Q1-K1-A7
acgagacatgagacgcctaggccatttcttgagcctagagcagcagcagaggctggacctgaaactccacccgccgtggcattcacgcccgctacggcctgctgcaaggcttccctggcgctggcaccgtggccgtcgacccgcagcccggcggtctgcgcacatgcggcgcttctatgcacgccctccacct

SEQ ID NO: 2400 - DNA, 402 bp, Zea mays
  unsure at all n locations
  Clone ID: LIB3116-011-Q1-K1-A8
tgaagattacttggcttctgtagccaagggtgggttgagggaggcttttgcacatccagggttaggttatgttgatattccaaatgcacagataagaaaggttactgcaaatcgcttgctagcatcgaaacagaccattcctcattactacttgacagtagatgcacgtgttgacaaacttgtccagttgcgaggtgaactgaacccactgcaggatgcttctggtggaaagaaaatatcaattaatgatcttgtcatcaaggctgcagctttggcccttcgaaaggtccctcagtgtaacagctcatggatgaatgattttattcggcaataccacaatgtgaacatcaacgtggctgtacagactgaacatggattggttgttccagtaattanggatgc

SEQ ID NO: 2401 - DNA, 114 bp, Zea mays
  Clone ID: LIB3116-011-Q1-K1-B1
tgccgctttgaagttgatcttgttgaaatttgccacccgaataactgcaactgtggacggcttgcatacctccccgtggccggagtggttctcactgcgaaggatcttgacgct

SEQ ID NO: 2402 - DNA, 411 bp, Zea mays
  unsure at all n locations
  Clone ID: LIB3116-011-Q1-K1-B2
tgccgctttgaagttgatcttgttgaagtttgccacccgaataactgcaacgttggactgcttgcatactccccgttggctggtggggttctcactgggaagtatcttgacgctaacgctgacatctcaaagagcaggctaaatctcttccctggatacatggcacgctacaatgactctttggctaaagaagcgacattagagtacgttaagcttgccaagaagcacgggctaactccagtccagcttgcccttggcttcgtgcgtgatcgtccattcaccgctagctccatcattggagcgaccaccatggagcaggtgaaggagaacatcgacgcgtttaccagcactccacgggctctaccacaggaagttcttgacggcattgangatctttttatgagatacaaa

SEQ ID NO: 2403 - DNA, 349 bp, Zea mays
  Clone ID: LIB3116-011-Q1-K1-B4
gtgcgctgagttctgcctggcttttcgtcatatcctcgcatttcaactttcccatagagagttaagaaggatccacacgtgcagcagcacgtgtgggcttgtaggagctttatgatttgaggcaattagggacaactcttatgtcattgttgcttgcttctgtggagtcgaacagatgtttcgctaacataattcgacttgagtgatgaaagcctcaataaaaaaaaagagataattttttggaaatttcaattaaggttaaatatttgctggggattttgggacatatgtttgtgcaatataaaataataatataaaaaggggggggcgctttaaaggatccaagttt

SEQ ID NO: 2404 - DNA, 229 bp, Zea mays
  Clone ID: LIB3116-011-Q1-K1-B6
acgcgccgctttgaactagatctcgttgaacattgctttccgaataactgcaacccacgacgggttgcgtactatccggaggcgtggggggttctcactgggagagatattgacactaacgctgacaatctaaaaagcacgctaaatctttgtcctggatacatggggcgctacaaagactctttggcttaagaaacggcatttgagtacgctcagcttgccaagaaac

SEQ ID NO: 2405 - DNA, 299 bp, Zea mays
  Clone ID: LIB3116-011-Q1-K1-B7
ccacgcggccgccagcaacgcccgacgcctccctttccccaaccctccctccctctccgggggggccgccagaggcaagggggccctctattcgaccccgaatcggccgcccgcgaccgggattccctccgccaagcgcggatctgaacgctgcgctccggggcgccgctcgaatccgccatgaagggggccaaagccaaaggcgccggcaaggccgatgccaagctggcggagaaaagcaagggggcggagaagcccgccaagggcaggaaagggaaggccggcaaggaccccaacaa

SEQ ID NO: 2406 - DNA, 360 bp, Zea mays
  unsure at all n locations
  Clone ID: LIB3116-011-Q1-K1-B8
cgtgtccgaaaacttgagaacaattagttactagtggctaggaatacccttgccatttgtgagcaaacttgagcagtcaataagaaagcaaaagagagtcatcgactctcaattttattctctctacgctgtcttttgcctgtggcaatgaatagcgcattagcatcatagaagtattagcttggtcaatggaagttgttcatgcgcttcttcattgctgaaagtgttgtcatcttgtcgaactcacaataagcttagataagtgctgggtttgtgggaacatcgtttgtgcaatataaatgagatcttgcgcctgnnaaaaaaaaaataaaattaataaatttaaaaaatatatttttt

SEQ ID NO: 2407 - DNA, 353 bp, Zea mays
  Clone ID: LIB3116-011-Q1-K1-C1
cccacgcgtccgcctgcagcgcccgtcgcctccctttccccttccctccctccctctccccgcgggccgccagaggcaatttcgccctcgattcgaccccgattcgtccgcccgcgaccgggattccctccgccaagcgcggatctgaacgctgcgctccgtgtcgccgctcgaatccgccatgaagggggccaaatccaagggcgccgccaaggccgatgccaagctggcggtgaagagcaagggggcggagaagcccgccaagggcaggaaagggaaggccggcaaggaccccaacaagcctaagagggctcccagcgctttcttcgggttcatggagggaatttcgcaag

SEQ ID NO: 2408 - DNA, 327 bp, Zea mays
  Clone ID: LIB3116-011-Q1-K1-C2
gtttcattgattcttgaagagatcgagctttttttgcaccacaaggtcgaggatgtcttgcaactgcggatcaagctgcggctgcggctcaagctgcaagtgcggcaagaagtaccctgacctggaggagacgagcaccgccgcgcaggccaccgacgtcctcggcgtggccccggagaagaaggccgcgcccgagttcgtcgaggccgcggcggagtccggcgaggccgcccacagctgcaactgcggtggcaactgcaagtgcgacccctgcaactgctgatcacattgatcgacgaccatggatatgattattatctatctagc

SEQ ID NO: 2409 - DNA, 128 bp, Zea mays
  Clone ID: LIB3116-011-Q1-K1-C3
gtttcattgattcttgaaaagatcgagctttttttttaccacaaggtctaagatgtctggcaagttctcatcaagctgcgggggcccctcaagctacaagttcgtctagaaataccctgacctttatg

SEQ ID NO: 2410 - DNA, 306 bp, Zea mays
  Clone ID: LIB3116-011-Q1-K1-C4
attctcgtctcccgtctcgagagattgcagggggcggcgctcgaagctggaggaagcggacgggttcgcgatggggtccgagggatcctcgggtccggtcgtcgttcccagaaactttaggctgctagaagaactagaacgtggtgagaagggcattggtgatggaactgtgagctatgggatggatgatgctgatgacatatatatgcggtcctggacaggaactatcattggtcctcccaatactgttcacgagggacgaatctaccaattaaagctggtttgtgatacggattatccagatta

SEQ ID NO: 2411 - DNA, 347 bp, Zea mays
  Clone ID: LIB3116-011-Q1-K1-C5
ctcacgcgttcgcctgcaacgcccgtcgtcttttttttcccttccctccctccctcttcgcgggggccgtcagaggcaagggcgccctcaattccaccccgattcgtccgcccgcgaccgggattccctccgccaagcgcggatctaaacgctgcgcttcgtgtcgtctctcgaattctgcatgaagggggccaaatccaacggcgccgccaaggccgatgccaagctggccgtgaagagcaagggggcggagaagcctgccaagggcaggaaagggaaggccggcaaggaccccaacaagcctaagagggcttccagcgctttcttcgtgttcatggaggcatttc

SEQ ID NO: 2412 - DNA, 406 bp, Zea mays
  Clone ID: LIB3116-011-Q1-K1-C7
agaatcaatacctaccccatggagaagctctcttctcgtcgctattcccggccggcgatgtccctgctgatcatcgtggccatcactatctcctgctccgtcgtccacagttcggaggctccagcccaagaagcagcagtacctcgtctggacggagaccatcagggccaagcgccgccgccaccggatgccggcaaacctcgacagccacagccgccgtgctgtcttcggcacggcgcttaacgtcctaaaatggacagggaggacggaggatacttaagatcaaccaggccgcgacgacaataagtttttaaattttattaggactagtttaggaaccctatttttttaatggatttttattttatcaaaaaaaattgggttcccaaactagttcttaacaata

SEQ ID NO: 2413 - DNA, 391 bp, Zea mays
  unsure at all n locations
  Clone ID: LIB3116-011-Q1-K1-C8
ggttgggcatcatatgatgcagggagaacggccctgacgacgtgacgatcaaggtgcaggactgcggcatgtgccacacggacctgcacttcatcaacaacgactggggcatcaccacgtacccgctggtcccggggcacgagatcacgggcgtggtcaccaaggccgggcgcaacgtcacgggcttccgcgtcggcgaccgcgtcggcgtgggctgcatcgccgcctcctgcctggactgcgaccactgccgccgctccgaggagaactactgcgaccgtgtggcgctcacctacaacggcgtcttctgggacggcagcgtcacgtacggcggctactcgcgcgcgctggtggcggacaagcgcttcgtggtgcgcgtncccgacgcgct

SEQ ID NO: 2414 - DNA, 177 bp, Zea mays
  Clone ID: LIB3116-011-Q1-K1-D1
gcggccactagcccacacgtagtccatgcaaataagaagacatcagccgacaacgcagaggcttcctatgccaacaaaatccaggacgacttctggtcgacgctacgcgatggcattaaagctacacacctccacacgtgcaacgagttctggcccctctctcaacatcccaacctg

SEQ ID NO: 2415 - DNA, 307 bp, Zea mays
  Clone ID: LIB3116-011-Q1-K1-D2
cagattccaattccagtccgatcgtgagcttagctcagctccgctagtcctctccccgcacgcacgaccaccaccagcagtgcagcaccatgggcggcgccctgatcgtcgcgctcctcctcgcgaccgtgcccctctccttgggcggcggcgcgcacccgggctactccgacgccgactagagcgcgtgcacggtggacgcgggcgcggagctgctgctgcggctggaggagcgcgggcccggcgggcgcatcattatcgacatcacgcaccctgtcgtgccggacctggctgcgttcgccacggg

SEQ ID NO: 2416 - DNA, 402 bp, Zea mays
  unsure at all n locations
  Clone ID: LIB3116-011-Q1-K1-D3
cacacaagcacttcgacgtcacacgggcgctgcgcacagacacaccaagcgtcggcaccggtggcttactaccaggaggtggactactgctcggaggaggtgaggtcggtggccccggccggcttcggccgccacggcggcggcgtccagcagcacgtcgtcaaggagaagttcgaggaggtcgacacggtctcacgcgccggcgccaaccaccaccaccaccatggtcaccacggcggccacggcttcgtggtgcgcgagaccagggtcgaagaggacatcaacacctgcaccggcgaggtccacgagcgcanggagagcttcctcgccagggctaactgagccgcccggcggccggcatccacgcccgttcgtgcttgcctgcgtgccttatgtatgtct

SEQ ID NO: 2417 - DNA, 85 bp, Zea mays
  Clone ID: LIB3116-011-Q1-K1-D4
gcgcacacaaacactgagacgtcacacgggcgttttgtttcatacacaccaagcgtctgcaccgggggggtactaccaggagggg

SEQ ID NO: 2418 - DNA, 371 bp, Zea mays
  Clone ID: LIB3116-011-Q1-K1-D5
caactagcaacatagaaagcacaatatgtgtaccaacaatggcagccaaaatattgggctgccttatgctccttgggcgttctgcaagtgctgctaccgcgaccattttcccgcaatgcttacaagctcctatagcttcccttcttcccccatacctctcatcagcggtgtcttcaggatgtgaaaacctaattcttcaaccctacaggatccaacaggcaatggcagcaggcatgttacctgtatcacccttgcgcctccaacaaccgacatgcctattacagctgttacctttggggcatttgttggcacaaaacattactgcacaacaactacaacaacttgtgctagcaaaccttgctgcctactct

SEQ ID NO: 2419 - DNA, 426 bp, Zea mays
  Clone ID: LIB3116-011-Q1-K1-D7
cgaccgaatctaatcccggccgaccgaccacacaagacctttgacctaacacgggcactagtctcagacacaccaaacatcggcaccggtgggttactaccagcaggtgggctactgctcggaggaggtcatgtccatggcccccgacagctttagccgccacagggggcccgtgcagccaaacctcgtcaacgagaacttcgaggacgtcgacacggtctcactcgccggggccaaccaccaccaccaccatggtcaccacggcggccaccgcttcgtggtgcgcgagaccaccgtcgaagaggacatcaacacctgcaccggcgaggtccaccagcgcaaggagagctttcttcccaaggctaactgagccgcccggcgggcggcatccacgcccgttcgtgcttgcctgcgtgccttatgtat

SEQ ID NO: 2420 - DNA, 373 bp, Zea mays
  unsure at all n locations
  Clone ID: LIB3116-011-Q1-K1-D8
tgaacggcaaggagctcgacggccgtaacattaccgttaaccaggcccagtcccgtggcggtggcggtggcggcggtggctacngcggcggtcgcggcggcggcggcggttatggtggcgggcgccgtgactgcggttatggcggcggtggcggctacggcggtcggcgcgaaggtggcggcggcggctactgaggcggtggcggctacggcggtcggcgcgagggtggcggtggcggctactgcagcggtggctgctgctgctggagggactgatgtgtgggcccatcctggcttcgggcgagttatcttatctattcatagtatcgatgtaccggtcgcttctgtcaccgtggtagtgtccgttctacctt

SEQ ID NO: 2421 - DNA, 414 bp, Zea mays
  Clone ID: LIB3116-011-Q1-K1-E3
cccacgcgtccggcttcccttcttcccccgtacctctcaccagtgttgtcttcagtatgtgaaaacccaattcttcaaccctacaggatccaacatgcaattgcatcaggcatcttacctttatcacccttgttcctccaacaatcatcagccctattacagcagttacctttggtgcatttattggcacaaaacatcagggcacaacaactcgtgctagcaaaccttgctgcctactctcagcaacaacagttacctttggtgcatttgttggcacaaaacatcagggcacaacaactacaacaactcgtgctagcaaaccttgctgcctactctcagcaacaacagtttctgccattcaaccaactaactgcattgaactctgctgcttatttgcaacaacaactagtacta

SEQ ID NO: 2422 - DNA, 318 bp, Zea mays
  Clone ID: LIB3116-011-Q1-K1-E4
cccacgcgtccgcggacgcgtgggttttttttttttttttaaagaaaagctcagatttgcttcggcacaaattacatggacgtaactgaattattcacataatgtggaatcttcaccatcgtcgtggtggtaagaaaagaaaaaaagaaaggggaaagaggcaagaattatcccatctagcgagagagcaccaccgggtcagcagccgaagaagaacaagcggtgtcgaatgtcgatccttcctctgattcctggccgttctcgggagctagaggcggagtaatgtgtcgtaacgggcacccatctgatgggtctcaa

SEQ ID NO: 2423 - DNA, 423 bp, Zea mays
  unsure at all n locations
  Clone ID: LIB3116-011-Q1-K1-E5
cggacgcgtgggcggacgcgtgggcgagagcggcgccgccgtgacgctgcagaacctggacgggaagacgcccatcgacgtggccaagctcaacaaccaggatgacgtcctcaagctgctggagaagcacgccttcgtatagacgtcccacgccgccggccggcccgtcttgctcgtctgctcttgtcgccgctgcggccacgtcgcttgcctctgctactgctgctgccgtcgccgccattaatgctttgttgatttctctcctggtcgagacaacgcangttccttcatcacttcactgttgagtatttgcattgggtgtgtatgtatcggattttgctttgcgtgatcacggtaccatatttatttatcggactcctcgttcatcaggtggaggttttcgtaatgaataaggatgaaatt

SEQ ID NO: 2424 - DNA, 78 bp, Zea mays
  Clone ID: LIB3116-011-Q1-K1-E6
cgtcacccgaaccgggacccgacgcttggttttttttttttcaaaaaaaactcaaaatagggtggggacaaataccac

SEQ ID NO: 2425 - DNA, 377 bp, Zea mays
  unsure at all n locations
  Clone ID: LIB3116-011-Q1-K1-E8
cccacgcgtccggaggcaggcaacctgcgatgactggtgtagatgctgatgctaacatgggaaggccagcttttagtgcatccaagctccggggaagatgcggatcacgacggcacggcgagatcagttcccaccgaggcatacatctttcttcgatcatcagttcgtcttcggtcctcaagcaaccttgcacgccgcagagtttaccagagcagcagtcctagaaccatagtagtgttcctaaacgtcgatggcttcgctgagattgtatatgtccccattacttcgttgtgttcgattccgtcctcttctgcttgttttctaaccttagagaaacggtatanggcaggctcgcagttgcaccggcatttgtcgat

SEQ ID NO: 2426 - DNA, 159 bp, Zea mays
  Clone ID: LIB3116-011-Q1-K1-F1
aatggctagaacgatcgaccccaacgagattatatatcatctacctccgagccaccagaggtgaggtcggagcttcgtccgctttggcccccaacatcggtcctttgggactttcgcccaagaaggtcggtgaagacattgccaaggccaccggtgact

SEQ ID NO: 2427 - DNA, 331 bp, Zea mays
  Clone ID: LIB3116-011-Q1-K1-F2
aatggcccccaagatcgaccccaacgagatcaagatcatctacctccgagccaccggaggtgaggtcggagcttcgtccgctttggcccccaagatcggtcctttgggtctttcgcccaagaaggtcggtgaagacatcgccaaggccaccggtgactggaagggtctccgagtcaccgtccagttgaccattcagaaccgtcaggccaaggtcagcgtcgtccccagcgcttcgagtttggtcatcaaagccttgaacgagcctcctatggaccgaaagaaggagaagaacatcaagcacactggtaacgtttctttcgacgagatcgtc

SEQ ID NO: 2428 - DNA, 141 bp, Zea mays
  Clone ID: LIB3116-011-Q1-K1-F3
cgcgcaggctgtgtatgcaagtggaggaaaagcacatggaatgttcattttgttagcttacgacatccactcgggccgggttaaggttcggcgtggaggggccccaagatctgctgctcttatcttccgtccctccactca

SEQ ID NO: 2429 - DNA, 300 bp, Zea mays
  Clone ID: LIB3116-011-Q1-K1-F4
cccacgcgtccggactgttcttcttcttcctcaagctgtagcctgtgggaggagaggccggagaggcctcccatggagttcccccactcatcacttcttgttggtcccctgctagctgttcgttcctctcagcaggtagctagagatgatcttgctttaattttgtgctgatctcttactcgtcgtgtacgctcatatatatgcatggggcgacggatttgtctctgatcgttcccatgccgcctcttgtatcttgacttggatctatatatcaatgcaaataaatcatcgatgggtgac

SEQ ID NO: 2430 - DNA, 444 bp, Zea mays
  Clone ID: LIB3116-011-Q1-K1-F5
cctcaggctgtgtatgcaagtggtggaaaagcacatggaaggtacacaatgtttgcttacgtcatcgactcgagccaggtgagggttcggcgtggaggttcgtcgaggtctgctgctcgtagctcccgtcgctccactcaagatccagcagaagtggagcaaccacgagaagaacttaggcgacatcaggattacttgaagcaacaagctacgcaacatgaatattatgctacacagattcaacaatagcaaacactcatacaacaactagcacaggcccaagggatacacgtcccggtgcccccaccaccaccacctctcgttcattatccttggtcttcacctccaccaacacctacatctccacctaccgaacatcagacccctccagctacgctgccaacgcatgaacgagaagacgggttagactttgttgaaaccctc

SEQ ID NO: 2431 - DNA, 416 bp, Zea mays
  Clone ID: LIB3116-011-Q1-K1-F6
cactcccaccaccctccgcctccgcctgcgccacagctgccgattcgaaagccctcgtgctgacccctcgcaaaaccctagctccaaccaccatgaagggcaaggccaacgcctccaagaaggatgaggccaggctccgggccggcggcggcggcgccggaaagcgcaagaaggccgccgcgagcggcaagcccaagcgccctccctccgccttcttcgtcttcatgtctgaattcaggcaggagtaccaggcgcagcaccctggcaacaagagcgttgcggccgtgagcaaggcagcaggggaaaagtggcgctctatgtcagagcaagagaagcaaccctatgtggaccaagctgggcagaagaagcatgactatgagaagactaaggcaaatattgagaaggaaagcacaagc

SEQ ID NO: 2432 - DNA, 354 bp, Zea mays
  Clone ID: LIB3116-011-Q1-K1-F7
caacaagcaacatagaaagtggaatccagtagcaacaatagagcaacaatggcgaccaagatattttccctccttatgctccttgctctttctgcatgtgttgctaacgcgacaattttccctcaatgctcacaagctcctatagcttcccttcttcccccataccttccatcaatgatagcttcagtatgtgaaaacccagctcttcaaccctataggctccaacaagcaatcgcagcaagcaacatacctttatcacccttgtttcaacaatcgccagccctatctttggtgcagtcattggtacaaaccatcagggcacagcaactgcagcaactcgtgctacctgtgatc

SEQ ID NO: 2433 - DNA, 401 bp, Zea mays
  Clone ID: LIB3116-011-Q1-K1-F8
agcaaggggatcgaagcggagagcaagggagcggtcgagcgggtgacatcatcgtcatccagggtttctcaatcggcagcgatggcgaccagggcggcggcgaggttcctgcagcgcaggtttctgtcttctggcggtaaggtcctcagcgaggaggagaaggccgccgagaacgtgtacatcaagaaagtggaacaagagaagctggagaagctcgcacgcaagggccccagctcaggagagcaaccctcgtcaaccacaggctctgcagcaagtgatgtgaaggccgatgctgggccaacggagtcagcatctgcaagtgtgtcgacggacaagaacaggaactatgctgttctggcaagcgcagttgctgccctgggtggctggggttggtatctatt

SEQ ID NO: 2434 - DNA, 167 bp, Zea mays
  Clone ID: LIB3116-011-Q1-K1-G1
aatggcccccacgatcgaccccaacgagatcaagttcatctaccttcgaaccaccaaacgtgaggtcagagcttctcccgctttggccctcaagatcggacctttgggtctttcgcccaataaagacggcgaagacattggcaaggccaccggtgactggaaaggtc

SEQ ID NO: 2435 - DNA, 270 bp, Zea mays
  Clone ID: LIB3116-011-Q1-K1-G3
ctcccaccggcgacgtctacgtcggtggaaccactgggcttctgatctgggccgtcacggtcgctgggatcctcggcggcggcgccctcctcgtctacaacaccagcgccctctccggctaaggatatccaatgcatgcgcttcttgcgattcgtcgtgtaaaatcagggtgtctgtctataatctagcctccatggatgctcaaccttcgtcatgtaacaataatcagtgctactcttcattacataattttgatgctatatatatatg

SEQ ID NO: 2436 - DNA, 377 bp, Zea mays
  Clone ID: LIB3116-011-Q1-K1-G4
atttccacccgcgcctaccctcccaccaactacgtgtacatctctcgaaccactttgcttctgatctaaacacccaccctctgtcttatcctcagggggggcgggctactaatctacaacaccaacgccctcttctggtaatgatatccaatgcattctcttcttccgattcatccttaaaatcacattgtttgactataatctaacctccatggatactcaaccttccacatgtaacaataaatagctctcctcttcactacataatcatcatactatatctgtataaaacaactcaacattaaaaacatacagccttcccctttatatgattcattcttacataactaatacattcctcctctttatttctttta

SEQ ID NO: 2437 - DNA, 294 bp, Zea mays
  Clone ID: LIB3116-011-Q1-K1-G5
ggacattgtgagcggatgcacggaccccatctccgacatgttcgacccgctagccaccgtcgacgacggctcctgccccctcgagtctgattccgaggaatgatggtggagcttcatctcaatccgagggagggaggcagcagcagcaaacgtgatccacacatacatcatatacagatgtctgtcaagtttgtcatcatgtgatacatgaagcatacctgtatttagccagaataccacagtaaaaacgcattaatgagcaagatggtctggatacttggtatccatctttgc

SEQ ID NO: 2438 - DNA, 314 bp, Zea mays
  Clone ID: LIB3116-011-Q1-K1-G6
agaacctcgctgaccacatcgctgacccagtcaacaacaacgcatgggcctacgccaccgacttcgtccccggcaactaagctcaacggctatgctatgcaacttcattgtctttcggatcggagagggtgtacgtacgtggattgattgatgctgcgagatgcatgtgtgtcttttgtttcacgttgcattgcataggcaagtcgagatgatgagttggcgttgtacactaagatgaaccatgtttgtgcaatagtggtggtttttgtttcctgctggttaattgttgatatccattaatttgtttttcttct

SEQ ID NO: 2439 - DNA, 396 bp, Zea mays
  Clone ID: LIB3116-011-Q1-K1-G7
ctccagggagctggcgcacgcctgaagaccctgatccatccatgtctgtccaccacgctatgtacgtatgtgtagcagatggtttacatctacgtgttagaccaacttcagcagcactccgtatgcggctccggatccctattttgcggagcctagctcactattcatcagtccagcaagctccgcatcctgctccgtaaaacgcacggcctgtacctgcactccccattttcacgctttctctctcctgtccgcagctctctgcgtgcgcgcgcggctgctcgcgggccccaggtgtcatagactgcatgcggagtgtgatgtggcgtgttgctggaaactgagacggatacggagaggagagagaaactgttggtcgcgcgttttaaggatacg

SEQ ID NO: 2440 - DNA, 419 bp, Zea mays
  Clone ID: LIB3116-011-Q1-K1-G8
cgtaagttgatgctcagtctcgtagctgatttccagcaacagaaaacactggttctaaatccgaaatttgttgatgggattagatcaattctgcgcaacacaagcttggataaggaattcattgcgaaagcaataactttgcctggtcaaggggagattatggatatgatggaagttgcagatcctgatgcagttcatgctgtccgtaactttattaagaaggagcttgccgtgcaacttaaagatgatcttcttgcggctgtgaaaagcaacaggagttctgaggcttacacatttaaccatgatagtatggctcgccgtgcattaaaaaatacatgccttgcataccttgcgtcattgaatgagccagatttcgttgagcttgcactgcatgagtacaagtctgcgactaacatgac

SEQ ID NO: 2441 - DNA, 59 bp, Zea mays
  Clone ID: LIB3116-011-Q1-K1-H1
accgcatgtcccgcaagagcgtgcccaacgcgatcaacatcatattcttatatagccac

SEQ ID NO: 2442 - DNA, 342 bp, Zea mays
  unsure at all n locations
  Clone ID: LIB3116-011-Q1-K1-H4
gggggccacgccncccggcaaaacctcttattttaactgtttttaatgatgctgaaaccgaaacaacacactccgtgattaaaatacggtggtggggcaaccctttattaatttaagctgtccagctaacgccgcaagcaacatgatggatggtccaaaacttcggcctccaagccaaatacaagtcggcgcgcatcatgtaccccgacttctactccgccgtctacgacatggtcaaaaatccaagcagctacggggtcaacacggcgttccatacgtgctggcggttcggaagcggcaagtacaactaccaaaacaacgcgcggtgcgacatgccgggcg

SEQ ID NO: 2443 - DNA, 109 bp, Zea mays
  Clone ID: LIB3116-011-Q1-K1-H5
tggcccggcacgctgcgggcggaatctccagggggggggacttataccataccacatgaactgcctgtgcagctaatgatatccaataaatgctcttctagataaagac

SEQ ID NO: 2444 - DNA, 403 bp, Zea mays
  Clone ID: LIB3116-011-Q1-K1-H7
cgatcacgaacgagaaggggcggctgagccaggaggagatcgaccgcatggtgcgggaggcggaggagttcgcggaggaggacaagaaggtgaaggagcggatcgacgcccgcaaccagctggagacgtacgtgtacaacatgaagaacacggtgggcgacaaggacaagctcgcggacaagctggaggcggaggagaaggagaaggtggaggaggccctcaaggaggcgctggagtggctggacgacaaccagtcggccgagaaggaggactacgaggagaagctcaaggaggtggaggccgtgtgcaaccccatcgtgtcggccgtgtaccaacggtcgggcggcgcccctggcggtgacggtgacgctgacggcggtgttgacgacgaccacgacgagct

SEQ ID NO: 2445 - DNA, 368 bp, Zea mays
  Clone ID: LIB3116-011-Q1-K1-H8
ggcaaaacctcttattttaactgctctgagtgatgctgaaacggaaacagcacactaattaattaaaatccgatgctgtaccaaccgtttattaatttaagctgtccagctagcgccgcaagcaacatgatggatggtccagatctccggcctccaggccaagtacaagtcggcgcgcatcatgtacgccgacttctactccgccgtctacgacatggtcaagaatccaggcagctacgggttcagcacggcgttccagacgtgctgcgggtccggaggcggcaagtacaactaccagaacagcgcgcggtgcggcatgccgggcgccttcgcgtgctccaacccggcggcgcacctcagctgggacg

SEQ ID NO: 2446 - DNA, 265 bp, Zea mays
  Clone ID: LIB3116-012-Q1-K1-A1
tccaagacctacgagctcacctgggctattcgtctcgcttccgaggcttcgcgtgcgcccaaggcctaagcgtagaaggctaggtagagtggcaggtcaggtagtgtacaggtgattgaacagacgacatcggaggccttagtggctttctatactctctcccaattttcgattcacaacatctgctccacacaccatttattattggtgatgtgaggctgaatgccaaaagcaagaacgatgcatacatgtatgatgaccctca

SEQ ID NO: 2447 - DNA, 266 bp, Zea mays
  Clone ID: LIB3116-012-Q1-K1-A2
agagggcagatgttccatgcctatgcaaatatgttaacaaggaagtagagaaggtatggtgcatggagaaggttgtgtacgtcgccaactattgtaagaggccgtttcaacctggctacaagtgcgggagttatacagttcctcttagtatgtaaaaggagtggttgggacatgtggtactctctcctagaactttaatttgagatttgtaacatgtgagagactattgagaataatatgtatggagtaatatgcttccttctttt

SEQ ID NO: 2448 - DNA, 316 bp, Zea mays
  Clone ID: LIB3116-012-Q1-K1-A3
ctcgtcgcccaccgccccattagcgccgccctcccttatccgacccaacgccgccgccgccgccgcatagacctcgccggcgcctctgcgccgccccgtggcctccggaggtgctattcgcgcgcgatccgccgctgcgtccgtcgctctggcatcgattcggcggcgctgggagctgtagaagcgagttggttggagatcagaaacaggctacccaacttgaagatggcactgcgacaggctctaggatggtcggaaggggaggttatgcgaccagagtcaaagccctgctcccggttaatgcggcagactgcgg

SEQ ID NO: 2449 - DNA, 350 bp, Zea mays
  unsure at all n locations
  Clone ID: LIB3116-012-Q1-K1-A4
gaaataaagcagacaagaaattgaagggaaaaaaccctcctcttgctcggccgtgggcaaaggcccccggccgacgttcctgcccatcgatacccctctctaatccctcaccgatctagcgaccataacagagatgcttttcaggtcgtctcaaataggctagcactcctggcttgtggttgttggttgccagtttgctgcctctgttttctccttaagttatgttagtggtgtatcttgtaagtgtgtcttgggcgtgtgtttttagggttactttacttcccattgtactctcttctttcttaatgaaatgatacacaattctcttannnaaaaaaaaaaaaaaaata

SEQ ID NO: 2450 - DNA, 423 bp, Zea mays
  Clone ID: LIB3116-012-Q1-K1-A6
gcgaagtgatgggagatgccatagatgatgctttggaaggagatgaggaggaagaagaaactgaggagcttgtgaatcaagtacttgatgaaattggcattgatatcaaccaagagcttgttggagccccgtcggccgctgttgctcaacctgcttcagcgggaagggttgcccaggctgaaagtgctgggaatgctgacactggaatcgacgccgatttgcaggcaaggctggacaatctgaggagaatgtaggtgctacaccagcaaaagagtagtgccttctagctctgttgcctgcgaatgtgaatacctagtcaatcaaagcaaaacgtttacaagccagtgtgtatgttgaaatgaatgaagcgttcgatatgccggtagtaatgaccaaatgtaaatatacatatttacaatttct

SEQ ID NO: 2451 - DNA, 302 bp, Zea mays
  Clone ID: LIB3116-012-Q1-K1-A7
gacccgacccacacatcctctcgtcctttgaggacgctaccaagacctacgagctcacctgggctattcgtctcgcttccgaggcttcgcgtgcgcccaaggcctaagcgtagaaggctaggtagagtggcaggtcaggtagtgtacaggtgattgaacagacgacatcggaggccttagtggctttctatactctctcccaattttcgattcacaacatctgctccacacaccatttattattggtgatgtgaggctgaatgccaaaagcaagaacgatgcatacatgtatgatgaccctc

SEQ ID NO: 2452 - DNA, 127 bp, Zea mays
  Clone ID: LIB3116-012-Q1-K1-A8
actgggtacagtctgggaatatctacatggcacgaagttgaatgaagaccccggcttcgaagttctacctcgatgagcgggcagatggcgttggggcgctataccattatctatgagattacgaatc

SEQ ID NO: 2453 - DNA, 371 bp, Zea mays
  Clone ID: LIB3116-012-Q1-K1-A9
aggagcaacacaaggatgagccacacgaggtccggagggtgccactaccaaagaccaggcacctaagcccagagggagcggggagctacatgatctcgatgctcccacgggagtcatcaaagcacactggctttgccttcgactccccaagatacgagtcgttcttcgcctcgcagcaaggcatcggcgtgccacacaagccgtgggatgtagcccggagagcgagcatgaaaccgcaacgagcaggaaaatcctagtcgggcgaacacctctccgctgtgtaaagtcttgtatatctggtttcttgaccacaggagtttttgtataggtagcagtactgtagcccttttttcgtgtttgtcacccatatg

SEQ ID NO: 2454 - DNA, 56 bp, Zea mays
  Clone ID: LIB3116-012-Q1-K1-B1
cggacgcgtgggcgagatcgtgcgcctcacgcgcgaggtcgtgcccggcatgatcg

SEQ ID NO: 2455 - DNA, 408 bp, Zea mays
  Clone ID: LIB3116-012-Q1-K1-B10
gactggcttgccatacatctggcacagcaaggctagcaaccccttcgttaacttgaagaaggaatacaagggcatcttctggcaggaggacatcatccccttcttccagaacgtgaccattcccaaggattgcgacaccgtccagaagtgctacatctacctctctggacaggtgaaggagaagcttggcaagatcgacccctactttgccaagctcggtgacgccatggtcacctggatcgaggcctgggatgagctgaacccggctggccccgcggctgggaaagacaaggccaagtagatgggagtccctgggggtgcattcacttccctgctgaagtgaaaagaaagtatgattgggtccagcctaggctcccccatagatatagcttcttttgagaggggaga

SEQ ID NO: 2456 - DNA, 292 bp, Zea mays
  Clone ID: LIB3116-012-Q1-K1-B11
gccagatcactgcattggtgatccggtcacttcaattctttcctatccaaggtcacaggtttgtttgtgagcttgcgaaccctgttttttttccctgtgaagccatatttgttctatttttttgttgaaaaaactagagtcccgagataatatgggatatatatgtgatgtaatttagacgacagagcatgctgtacaaaagagtttggaaaatgttattttctgtgggcttgttgttttgttacttatattataaaatataataagggcgggtcgtcttttgaggtatcca

SEQ ID NO: 2457 - DNA, 256 bp, Zea mays
  Clone ID: LIB3116-012-Q1-K1-B2
cgcgtccgcggacgcgtgggcgagatcgtgcgcctcactctcgaggtcgtgcccggcatgatcgtcaccgggagggaggtctcagagatcgggggcgccccgaggatgggcccgacgttcggcgccatgatgatcttcggccagaaggcggtgcacctggcgctgaaggcactgggcaggccctaccccgtggacgggaccatcccataggtgtcttcggcgctgcgcgaggagttctggagtgcgtccaaggacg

SEQ ID NO: 2458 - DNA, 366 bp, Zea mays
  Clone ID: LIB3116-012-Q1-K1-B3
cgcctgatgaatacgattaagtcaaggctcggtccactcaagggatgtgatctcgcctcgcccgagcccagtctcgggcaagggcagccgaccccggaggatttacgtctcgtccgaggaccccctcaagcaacggacacaccttcggctcgcccgaggcccagtcttcgccaagaagcaaccttggccaaatcgccacaacgaccgaccgtatcacaggagcatttaatgcaaaggtggcctgacaccttatcctgacgcgcgcccttcagtcgactgatctgaagtgatcgcagtcacttcgccgctccactgaccagtctgacaagaagacagcgccgcccgcgtcgcttcgactacaggcga

SEQ ID NO: 2459 - DNA, 202 bp, Zea mays
  Clone ID: LIB3116-012-Q1-K1-B4
aaaaaaaaaaaaaaaataataattaaaaaatatttaataatataatataaatataaaataatagggggaaaaaataaaataaaatggtggaaaaaaataaaaaaataatttttaatataataatttattttatattaaatggggggggcttttttatgggatcaaagttattattcccgtccatgcgaatatttattttttt

SEQ ID NO: 2460 - DNA, 293 bp, Zea mays
  Clone ID: LIB3116-012-Q1-K1-B6
ctggcttctcctccccctcttaccaagtccttctcgggttagggttccttagggtattgtggaggggcgatggctgcggctgatgtggagtaccgatgcttcagttgcgggcttgcctgggccaccagcaacgagtcgctggagaatgccttcgccttctacggtgagatcctcgactccaatgtcattaccgaccgggagactggggagtttccgtgtcttatggcttctttaccttttcttttgagaactccatgcttgtcgctattgtgatcattatctgtaatggtgtt

SEQ ID NO: 2461 - DNA, 432 bp, Zea mays
  Clone ID: LIB3116-012-Q1-K1-C1
cccacgcgtccgcccagacccaggtgcgtgtttgattccgaggcggggatgacgagcccaatggtggccaccccggtccagttccacacaaccggccgcctcagcttctgctccttttcctttcccagcgcatcagggaggcggcgattcgcggcggtgagggcgtccgcggagacgatggcgacggagaagctgggcatcaaggtggagcgcaacccgcccgagtcccgcctctccgagctcggcgtccgccagtggcccaagtgggggtgcgagaagagcaagttcccgtggacctactccgccaaggagacgtgctacctgctgcaggggaaggtgaaggtgtaccccgaaggccacggggaggagttcgtggagatcggcgcgggagaccttgtcgtcttcccaagggcatgagctgcacctgggacg

SEQ ID NO: 2462 - DNA, 440 bp, Zea mays
  Clone ID: LIB3116-012-Q1-K1-C10
cggacgcgtgggcggacgcgtggggtcctggaacaaagccagttgaaactgctgagttgctccagagtcagggagacaagctagccgaggaagggaagtaccatgaagcacttgctaaatgggaggctgctctgatcttgatgcctgataatgcgatacttcatgagcagaaagctcaggttttacttgaagtgggagatgcatggcgtgcactgacagcagcaaccagagcaacagaactggatccattttggcctgaggcttgggttacacttggtagagctcaattaaattttggggagccagattcagctatactgacttttgacaaggcgttagctatgaagcctgactacaccgacgcataagctgaccgtgaaactgctgctcgcctagtcaagaaacgaggacagctgcatacgtcaggtttaagtgctaac

SEQ ID NO: 2463 - DNA, 427 bp, Zea mays
  Clone ID: LIB3116-012-Q1-K1-C2
cgagagacagagccttcttacgaggagcgcatatcgaaagtcaaagcgaagctggctgataatctcaagtagagccaccgttttcaattgttacaccaatacttggaagagaacttatggaactgtagaaggtttcttccaaaagcctatatcttggcaggtttatgacgtgcgctttttttatggcaaaattggatctgttaacatgtggagatggaaattacccggaaacatgagcttagcgtggattttaccattttgaggtgttagaaaagcgtgctgcctattttagactagatatacagactaaaacatatggagccccacatttcgggtattgtcaagttgtgcgttttactttcaaaatagtgtaagggccttgggttttttttcttcttttgaatttggtggaaaaatattctagcat

SEQ ID NO: 2464 - DNA, 354 bp, Zea mays
  Clone ID: LIB3116-012-Q1-K1-C3
cacagatcaagccttatcaagtcttatcaagtgtttgaagagcgaccatagggttctcaagaaggaggcatcatgggccatgtcaaatatagcagcgggcagttttgagcacaaaaaactgatatttgctagtgaggcgactcctttgctgatgcacctcctcaggactgcacagtttgacatccgcagggaagcagcatacacgctgggcaacctgtgtgttgtcccagcaggcagtggtaaccccccaagtataatcgttgagcatttagttgccatcgtagatggtggagcccttccaggatttataaatttggtgaggtcggccgatatagagagtgcgagacttgggct

SEQ ID NO: 2465 - DNA, 213 bp, Zea mays
  Clone ID: LIB3116-012-Q1-K1-C4
aagacctcacgacacgacaccaagtgcaggtgttctagagggcaccaataaaggcccccaaggggggcaacctcggtggacttaagcacaaccaggcggctcaccatgtcgcccttgcctaatcgcaggcctaaagggagctgctgatttggcgcgatgagcgcctccccgaaaaccatggcctcgcagaagctttgcataaaagtggagcgc

SEQ ID NO: 2466 - DNA, 279 bp, Zea mays
  Clone ID: LIB3116-012-Q1-K1-C7
attatattattttatattttttattattttttaattattatataatatttttttttttttattattatatatttattataaaaatttataaataaaaaattttttattaaaagtttttttttaaaattatatattatatatttttatttatattatatataattttatatattttagtagatattaaaaataatttattaattttgattaaattttatttctttattattatatttattattatattatttattatattaaattttatttcctaaaatt

SEQ ID NO: 2467 - DNA, 347 bp, Zea mays
  Clone ID: LIB3116-012-Q1-K1-C8
tgcccagagcacgccggagataccaccgaagaagaaccctccggtgaacttggcccagccgtgggcggtctgcagcttgtcggcctccttcttccggccggtgagcgtgagcgtgggcatacttcctcctctacgtgctcgacctcccctactacttcaagtagaatacaaattcataaagatgcatatatataatatagctccgcctccgatcctcctctctgcgtgcaaaggtatgccatttcagcagtgacgagcatcgtggatacatgcaattcctctgcacatggatggattgggatgtaacttggaactggtaattttcttttactttgatttggatgcaa

SEQ ID NO: 2468 - DNA, 222 bp, Zea mays
  Clone ID: LIB3116-012-Q1-K1-D11
cgaatatttgttggccattagtttatttttaaactaaaacatgacataaaaaagaacggagggagtatcttagttcacttgtgcatttggtgttgaacatatgtttttttttcaccgcttaattttattattattctttcaaaaaaaataaaataatataaatataaaaaaaataaaatatttaaaaaaaaatatataatataaaaaaaaaaaattataatg

SEQ ID NO: 2469 - DNA, 452 bp, Zea mays
  Clone ID: LIB3116-012-Q1-K1-D12
cccacgcgtccgaaaaaaaaaaaaaaaattaattaaaaaaaaataaaaaaaaaaaaaaaaagggggtaaatataatatcatttgggataaaaaaatatttattaatatatttttatttattattatattataatatatttaattttttttaataattaattattttatataatattatatatttttaatattatatttaataaataatatattttttttttttttttttatttttatatattttattatttttataatttattttatttctttattttatttattattttatattttattttttatttatttttattatgttttttttataaaatattttattaattttatattatatattatatattatatatcttatttttatatatttaaatattatttttatttttataattttatttttatctctttataattattatattatattt

SEQ ID NO: 2470 - DNA, 429 bp, Zea mays
  unsure at all n locations
  Clone ID: LIB3116-012-Q1-K1-D3
tccttttgcagtcattcgtgctgttttggacatttgcttatgacattgttcacatcttctgacggacatagaaagagctacactccggaggaaacacggaatcgtcgacgatgaacattcccaattggctttttgtacactcaatttttgtattggtaattgatatagtctgtagtgagactatatcggtgtagacctaagcaaagctcatgaactttgcatttccttggatgatccgtagcagttgcaatttttcatttcaagtgaaaaatatntaaacttaattatatattttttaatttacttttttaatctaatatatttttttatttaattttttttatatcttatatgttcctatgtttctttccctcttatccttattttttgtgcgtctcatttttttttttcttattatattattttatt

SEQ ID NO: 2471 - DNA, 81 bp, Zea mays
  Clone ID: LIB3116-012-Q1-K1-D4
aagactcgtcggcatgtccacaagtcttgttttttgtgagtagcccacccatggtcttttgagggactatctttgtggtac

SEQ ID NO: 2472 - DNA, 401 bp, Zea mays
  Clone ID: LIB3116-012-Q1-K1-D5
cggacgcgtgggcgagtacagaaggctcaaagtctctgataagcgcacccgtgtgcttttgagggactacctgtatggaaggaaggaccgtggtggcgggcagaatggaaagaagaagcgggtcccgttctgtggttgtgttcgttcgaaatcaagaacagagccgtagcctttttgttctcgcacccctgcgcgttggaagaggtgaaggtgtcctttaggatggatcccctttgtaactgagttcagtattctgatgaagaagcctatgtactaagatttttggtttcctgtctaaatgaggccgttcttttagccagtttaatctcaggtattactgtgatgtatcaaggacttgttttttttatattttaaaattaccttttttgttggtttaaaat

SEQ ID NO: 2473 - DNA, 317 bp, Zea mays
  Clone ID: LIB3116-012-Q1-K1-D8
ggtgaaggagctcaagaacggccgcctcgccatgttctccatgttcgggttcttcgtccaggccatcgtcaccggcaagggcccgctcgagaacctcgccgaccacctcgccgaccccgtcaacaacaacgcatgggcctatgccaccaactttgtgcccggcaagtgagggggtggaggcgccaccgcccaccggccaccgctgcggatatctaggtgttcggatgcacaagagcgcgcactggttccagtttgtaccatgatgtaaattacttaccgtaccagggttcaatcggcaaggaagaattgttgtgttc

SEQ ID NO: 2474 - DNA, 343 bp, Zea mays
  Clone ID: LIB3116-012-Q1-K1-D9
cccacgcgtccgcagcaatccacacaagcacttcgacgtcacacgggcgctgcgcacagacacaccaagcgtcggcaccaatggcttactaccaggaggtggactactgctcggaggaggtgaggtcggtggccccggccggcttcggccgccacggcggcggcgtccagcagcacgtcgtcaaggagaagttcgaggaggtcgacacggtctcacgcgccggcgccaaccaccaccaccaccatggtcaccacggcggccacggcttcgtggtgcgcgagaccagggtcgaagaggacatcaacacctgcaccggcgtggtccatttgcgcagggagagctt

SEQ ID NO: 2475 - DNA, 244 bp, Zea mays
  Clone ID: LIB3116-012-Q1-K1-E1
cccacgcgtccgggcctaacaagcaagcaggaagccctgtttctagagcagatcacggggtagaggataatcgttaggcatggcatggttagagatacctaccacagctgggcaggagaattttacacactatacttgcaccatttcgccagtgaaaactcggtctgtcaaattggttggattggtcgaagaaaggttaaaaattcttttgtggcgccatgtgtcgtgacgcattgcgctttgc

SEQ ID NO: 2476 - DNA, 425 bp, Zea mays
  Clone ID: LIB3116-012-Q1-K1-E10
gggttggcttctcctccccctccggttcgggttcgggttcgtgaggttctccggggttcggtttcgtgggtgagcggatcgagatggcggcgtcggatgttgagtaccgctgcttcgtcggcggcctcgcctgggccacggacgaccactccctccacaacgccttcagcacctacggcgaggtcctcgagtccaagatcatcctcgatcgggagacgcagaggtcccgcggcttcggcttcgtcaccttctccacggaggaggcgatgcggaacgccatcgagggcatgaacggcaaggagctggacggccgcaacatcaccgtcaacgaggcccagtcccgcggcggccgtggaggcggcggcggtgggtacggtggtggccgtggaggcggcggctaccgcggtggcgggcgccgtgatggc

SEQ ID NO: 2477 - DNA, 453 bp, Zea mays
  Clone ID: LIB3116-012-Q1-K1-E11
aggataactgcaaaggcgccataccaacaagtcaacagctctgttgttggcgtcgaggcgtcgaagcaggcggctggagctggggtggaaaaaccttggctggggctgggccaagaagcgacaacagcgaagctggagatgtgatgaatgttgcccgacaagaaggtgcagtgcacgagattcacggatggtgcaggtcgtagcttcaggttaaggtgaaggataacttaccgtcgggtactctactcactttactgctctactactactactgctggtgacgaagttagcaagaaacgttcttctgctaccggtgggtcggtcggtcagccgttcgttggcgagattgtttgctgctggagacggacgtgctcgcagcagtttcgctggtccgtgaccgcgccatatgttgccacgaatggttgggtgttcggtacgttgaggaacgatgtg

SEQ ID NO: 2478 - DNA, 359 bp, Zea mays
  Clone ID: LIB3116-012-Q1-K1-E3
cggacgcgtgggcggcgcagagcgcgctgggtggctaaataagcagggcgagtacatcaagacgtggaggcggcggtggttcgtgctgaagcaggggaggcttttctggttcaaggaccctgcggtgacacgggcctcggtgccccgcggcgtcatccccgtcgccacctgcctcacagtcaagggcgccgaggacgtgctcaaccgccagttcgccttcgagctctccacgcctgccgagaccatgtatttcattgcggactccgagaaggacaaggaggagtggattaactccatcggtcgctccatcgtccagcactcccgctccgtcaccgacgcagaggtcggtgactacgaca

SEQ ID NO: 2479 - DNA, 137 bp, Zea mays
  Clone ID: LIB3116-012-Q1-K1-E5
gggttggcttctcctccttcatcatttttttttcgggtactagagcgtttccggggttcgggttcgtgggtgagcggatcgagatggctgcatctgatgttgagtaccgctgcttcgtcggcggccttgtctgggcc

SEQ ID NO: 2480 - DNA, 391 bp, Zea mays
  Clone ID: LIB3116-012-Q1-K1-E6
cgatctgcaagtctcgctacgtagcagtgcaataaaaaaaaagcagccgcaatggcgagcagcaccatggccctcctccacggccttcgccggcaaggccgtgaacgtgccgtcgtcgtccgccttcggcgaggcccgcgtgacgatgcgcaagacggcggcgaaggccaagccggcggcggcgtccgggagcccgtggtacggccccgaccgcgtgctgtacctgggcccactgtccggcgagccgccgagctacctgacgggcgagttcccgggcgactacggctgggacaccgcggggctgtcggcggacccggagacgttcgccaagaaccgggagctggaggtgatccactcccgctgggccatgctgggcgcgctcggctgcgtc

SEQ ID NO: 2481 - DNA, 318 bp, Zea mays
  Clone ID: LIB3116-012-Q1-K1-E8
gaaagaggagctcggacaaggcagagcgccatcgttcggtttccttgctgaattcccgagtggctcgctcgctcgaaaagagagaagctagcttttagcatggcgtctctggcgttcggcagcaccgtagcggcggccgtggcggcgacctcggggaggacgcggccggcgcgccggtccgtgctggtcgtgccgcccgctgccagcaggggcggcccggcgccggccaaggaggagaagggccttggcgagaccatctttcgcttcatcttcaagaaagaccaactggtggagacggaccctttcctcaacaaggtc

SEQ ID NO: 2482 - DNA, 393 bp, Zea mays
  Clone ID: LIB3116-012-Q1-K1-F1
gcttctacaaatatgggttcaaccctgaagttgggtctgtaggggttccagttgccgcaacagttagggccacaatgcctccagtaggatggagcattccgattttaaagaaaagaattgatgggtacatcgaagaagtaccaaatccaatatgggactaccacaagtatattccatactcaaaaccagggaaggtccatgatcagattgaactatatggagccccaaaagacctggatgatttttgtgaaaaggcacagctggtgaactatgttcagtacagagcacttttggaaggatggactttcttcatgtggacaaagtttacaggtgtcctaatttggaagacgcagaatcctttgactggactaagggggccattctatgatcacc

SEQ ID NO: 2483 - DNA, 198 bp, Zea mays
  Clone ID: LIB3116-009-Q1-K1-H6
gcgtcgcgtgggcttgaatcttttgacttgggtaatgtagggtccaaaactacagcaaaggagaaagaggcgtcccacaagcaccacaagaagccccagcggaagaaggatcggtcctggagggttggcaatgatggtggcgacggaacagcagttgtaagagtgtaccagaaacccgcagttaatttgtccacggtc

SEQ ID NO: 2484 - DNA, 344 bp, Zea mays
  Clone ID: LIB3116-007-Q1-K1-E1
cccacgcgtccgcccacgcgtccgcccacgcgtccgccagcgtctacgaggatgggtctgtgttcagccctgaggtgcttgacctttctgaggaggacctaattgagaagttcgccactggtgtctccatggtcgcttctctttccctggcattatcgtacccgacccttgctgctgtgccccacatgtttatcaatgggtacaagaacgtgcttgctgttgctgtggagactgactactcgtacccacacgccgacaagatcaaggagtacctcaaggacccgagcaagtttgctgttgctgctcctgtagctgctgcggactctagtgctgctgctggcccc

SEQ ID NO: 2485 - DNA, 359 bp, Zea mays
  Clone ID: LIB3116-007-Q1-K1-E2
cccacgcgtccgcccacgcgtccgcccacgcgttcgccagcgtctacgaggatgggtctgtgttcagccctgaggtgcttgacctttctgaggaggacctaattgagaagttcgccactggtgtctccatggtcgcttctctttccctggcattatcgtacccgacccttgctgctgtgccccacatgtttatcaatgggtacaagaacgtgcttgctgttgctgtggagactgactactcgtacccacacgccgacaagatcaaggagtaccttaaggacccgagcaagtttgctggtgctgctcctgtaactgctgcggactctagtgctgctgctgcccccaaggaagaagtagaa

SEQ ID NO: 2486 - DNA, 301 bp, Zea mays
  Clone ID: LIB3116-007-Q1-K1-E3
tcgcccacgcgttcgcccacgcgtccgtccacgcgttcgccagcgtctacgaggatgggatctgtgtgcaaccctgaggtgcttgacctttcttgtgatggcctaattgatgaagtcgccactggggtcgccatggacgcttctctttccctggcagtatcgtacccgacccttgctagtgtgccccacatgtttatcaatgggtacaagaacgtgctagctggtgctgtggagactgactgctcgtacccacacgccgacaagatcaaagagtaccttgaggacccgagcaagtttgctg

SEQ ID NO: 2487 - DNA, 343 bp, Zea mays
  Clone ID: LIB3116-007-Q1-K1-E4
gctcgccaacatgacggagaggtacgaggcgatggagcggcggccgggagctgccgcgctgcggaggcggcacgcggagagggagcacgcggagtacgcggtggcaaggaacgccgccctgggcggggccgggctggcggagaccggggtgcacgggtggcgccgcccgttcgtgacgcacttcacggggtgtcagccgtgcagtgggcagcgcaacgagcactactccggggacagctgcgaccagggcatgcgccgcgcgctcaacttcgccgacgaccaggtgctgagggcgtacggtttcaggcacgccagtttggctcaatgacgacgtgcaagcact

SEQ ID NO: 2488 - DNA, 346 bp, Zea mays
  Clone ID: LIB3116-007-Q1-K1-E7
gtcaacctggtggcctgcgagggcgaggagcgggtggagcggcacgaggtgttcggcaagtggaaggcgcgcctcatgatggccgggttcaagccgtccccgctcagcgcgctggtcaacgccaccatcaagacgctgctgcagagctactcgccggactacaagctcgccgagagggaaggcgtgctctacctcggctggaagaacaggcccctcattgtttcatcggcatggcactagtgttgacttcgagagaatgttggtctcgtggagaatgtttcttgtgactttctacctcgttgttagtatagatatgattggctgagcactaaaactatatatatag

SEQ ID NO: 2489 - DNA, 299 bp, Zea mays
  Clone ID: LIB3116-007-Q1-K1-E8
tcggtcaacctggtggcctgcgagggctttgagcgtctggagcgagacgaggtgctggggaagtggtaggcgctcctgaggatgcccgtgttcatagccgttccttctcagtatacttgttaatttcactattaatactctgctgcagagctactcggtctactacaagcttgactaaagggaatgcgtgctatacctccattggaagaacatgccccgtattgttttatcggtatgtgctttatgttgacttcgagagaatgatcgtctcttgcaaaatgattcttgtgactttctac

SEQ ID NO: 2490 - DNA, 327 bp, Zea mays
  Clone ID: LIB3116-007-Q1-K1-F1
cccacgcgtccgggactgctcgcgcctctcgcctccgtgttcacatcgccctacccgccgtaccacatgccagacgctggccaccggctccgccgccgcagcgactacatcgggggtgtgcagcctcccatcagactcccgccagcgccaaacccttcgactcggcgatggccacaccggagaagaagtcatacccacctgccatggtcgcggaggaggtgagggtgtgaggctgactggcgattggacccgtccccccattccacccgccgtcgccgacgtgtctgtccaaggtgagtccgccaacgagtacatataaaattcatc

SEQ ID NO: 2491 - DNA, 276 bp, Zea mays
  Clone ID: LIB3116-007-Q1-K1-F11
gcgaccacgcgttcgacctgacatggaaaaagtgaaaaactacggctaaggcaattctaccggaccgccgactcctgcatcatcataaatatatatactataactatactactacggacctaccgatatgcacccgaacaatgtgaatgcgtcgagtactatctgttttctgcatctacatatatataccggatcaacaatcgcccaatgtgaatgtaataggcaatctcatttggtacaatttttcattcctaacgcggaccttttatatgccta

SEQ ID NO: 2492 - DNA, 346 bp, Zea mays
  unsure at all n locations
  Clone ID: LIB3116-007-Q1-K1-F12
aagatggtgtactacgaggagcgcgcggagatgtacgtcggcgacgacgtctctcccgacttctacggctgggtgttccccaagtgcgaccacgtcgccgtcggcaccggcaccgtcacgcacaaggccgacatcaagaagtttcaggccgccacgcgcctccgcgccaaggacaagattgagggcggcaagatcatccgcgtcgaggcgcaccccatccccgagcaccccangcctaagagggtgtccgggcgggtgacgctggtgggcgacgccgcggggtacgtgaccaagtgctccggcgagggcatctacttcgcggcgaaaagcgggcggatgtgcgccg

SEQ ID NO: 2493 - DNA, 380 bp, Zea mays
  Clone ID: LIB3116-007-Q1-K1-F2
ccacgcgtccgcccacgcgtccgggactgctcgcgcctctcgcctccgtgttcacatcgccctacccgccgtgccacatgccagacgctggccaccggctccgccgccgcagcgactacatcgggggtgtgcagcctgccatcagactcccgccagcgccaaacccttcgactcggcgatggccacaccggagaagaagtcatacccacctgccatggtcgcggaggaggtgagggtgtgaggctgactggcgattggacccgtccccccattccacccgccgtcgccgacgtgtctgtccaaggtgagtccgccaacgagtacatataaaattcatcagggaagggtgttcgcccaaagccttaccaggacttcggtga

SEQ ID NO: 2494 - DNA, 271 bp, Zea mays
  Clone ID: LIB3116-007-Q1-K1-F3
cgcgttcgtccacgcgttcgggactgctcgcgcctctcgtctccgtgtcacataggccttcgcgacggagcacatgccggacgctggccaccgggtgcgtcggcgcagcgactagcatcaggggtgtgcaggcgcccatcagactcccgccagcgccaaacgcttcgactcggcgatggccacaccggagaagaagtcatacccacctgccatggtcgcggaggacgtgagggtgtgaggctgactagcgattggacccgtccccccattc

SEQ ID NO: 2495 - DNA, 351 bp, Zea mays
  Clone ID: LIB3116-007-Q1-K1-F6
cgatgcttggcttccgtgggtgcaggcttggtatatcgtaccctgaattgacagagatgcaagcccgggccatttttgaagctgctatagcaatgaccaaccagggtgttcaagtgttcccagagataatggttcctcttgttggaacaccacaggaactggggcatcaagtgactcttatccgccaagttgctgagaaagtgttcgccaatgtgggcaagactatcgggtacaaagttggaacaatgattgagatccccagggcagctctggtggctgatgagatagcggagcaggctgaattcttctccttcggaacgaacgacctgacgcagatgacctttgggtaca

SEQ ID NO: 2496 - DNA, 356 bp, Zea mays
  Clone ID: LIB3116-007-Q1-K1-F8
cgacaccatgagctccacggagtgcggcggcggcggcggcggcgccaagacgtcgtggcctgaggtggtcgggctgagcgtggaggacgccaagaaggtgatcctcaaggacaagccggacgccgacatcgtggtgctgcccgtcggctccgtggtgaccgcggattatcgccctaaccgtgtccgcatcttcgtcgacatcgtcgcccagacgccccacatcggctgataatatataagctagccgctatttcctttccttgccccagaacttgaaataaatatatatacgatgaaataacgcgggcatgccgaataatggatgtgtgaattctcactaattaagtaatggcata

SEQ ID NO: 2497 - DNA, 333 bp, Zea mays
  Clone ID: LIB3116-007-Q1-K1-F9
gattcttcgtccaggccatcgtcaccgggaagggccttctcgagaacctcgctgaccacattgccgaccccgtcaacaacaacgcttgggcctacgccaccaacttcgtccccggcaagtgagggaggcgccgccggtgacctttaggtgtccggatgcatgtgagcgcacgctggttttcggtttgtaccatgatgtaaactattgttcaatcgacaaggaataattgtgttcattgtcaaaaaataaaaagaccgaaaaaacaaatataaagtaaaattaactatctcttttttttttataatttgaaaaaaataaaaaaaaattttttat

SEQ ID NO: 2498 - DNA, 64 bp, Zea mays
  Clone ID: LIB3116-007-Q1-K1-G11
cccacgcgtacgcggacgcgtgagcgaaacaacaagtttttttgggtttccctttccttttccc

SEQ ID NO: 2499 - DNA, 217 bp, Zea mays
  Clone ID: LIB3116-007-Q1-K1-G2
atggctaatccagcaaggcttaccaagtgcgccttgggtatatggttccttaaggatatcgagggggggccattctagaggatgcagtcttacacccgcgctcatgcgacggcctagcctgggtaaacagccacctaaatgcaatagaatgcccgtcgcttctaaacggagatactggaaaaaacgtgatgatacgacacacttagaccgcatgcat

SEQ ID NO: 2500 - DNA, 320 bp, Zea mays
  Clone ID: LIB3116-007-Q1-K1-G3
cccacgcgtccgcacagcaatccaccaagcacttcgacgtcacacgggcgctgcgcacagacacaccaagcgtcggcaccaatggcttactaccaggaggtggactactgctcggaggaggtgaggtcggtggccccggccggcttctgccgccacggcggcggcgtccagcagcacgtcgtcaaggagaagttcgaggaggtcgacacggtctcacgcgccggcgccaaccaccaccaccaccatggtcaccacggcggccacggcttcgtggtgcgcgagaccagggtcgaagaggacatcaacacctgcaccggcga

SEQ ID NO: 2501 - DNA, 341 bp, Zea mays
  Clone ID: LIB3116-007-Q1-K1-G5
cctccgtgcgtgccccgggggccttgatcgcgcgcaccggtcagctcagcccgtctgattcgcgtgctgccagccctccgccgatcgtgaaacacaaccgtcggtggtttgcttgcttgatcgccgatcctcgcggacgctcacggtcatggcgcctcagcctttgcgcgctccgaggctgagcgcccccgctggccacgcggcgtgcaggtgctcggccgcgccgctattcgggaagcgggcgccccccgtcgtcgcgttcccccgcgcccgtagcggtggcgccgtcgcctcgtgctcggccgtgcaggagtcgtccaccttcaccactggtagcaaga

SEQ ID NO: 2502 - DNA, 219 bp, Zea mays
  Clone ID: LIB3116-007-Q1-K1-G6
tcgccttcgtgcgtgccccgggggccttgatcgctcgcaccgagcaactcagaccgtcgtgattcgcgtgctgccagccgtgctgcgagcgcgaaacacaagcgtggagggattgctagcttgatcgacgaagctcgtggacgctgactgtcatggctcctgagactatgcacgctccgaggctgatcgccaccgttggacacacagggtgcaggtgct

SEQ ID NO: 2503 - DNA, 273 bp, Zea mays
  Clone ID: LIB3116-007-Q1-K1-G7
tctgcctggacgacctgcgcgcgatggacagtctctacaagcagattaaggtcaagtcgtcgcgcaagggctacattgtgctctaacggatgatgattgccaacacgcaccactgcttcgcatcctgcgccggcctgtgcctcggcgacgtcaacggtttcaagacgtacgcgattcagaacgggtaccagtatgcaggctcgcggttaggccacagagcactgcaactgcaactggaggaaggcgcttttgttactgcctagggtcactgaa

SEQ ID NO: 2504 - DNA, 95 bp, Zea mays
  Clone ID: LIB3116-007-Q1-K1-G8
tcgggcccttcttcaagtagtgaggaccacgaagacaatgcattactagtaggaatgggctgctacgtggcattcagaatgcgtttgggaaatac

SEQ ID NO: 2505 - DNA, 190 bp, Zea mays
  Clone ID: LIB3116-007-Q1-K1-G9
ttctcacataacaaaaatgtaattttatggcttaagcaaatttacccgcccgggtactgctttattattataaagatatatactataacgagcctactacctacctaccgatatgcacgccggcaatgttaataattcgaactactattttttttctggctcttcctacttattccgcgatcaacaaatg

SEQ ID NO: 2506 - DNA, 353 bp, Zea mays
  Clone ID: LIB3116-007-Q1-K1-H1
aataagacgacttgtttcattgattcttgaagagatcgagcttcttttgcaccacaaggtcgaggatgtcttgcaactgcggatcaagctgcggctgcggctcaagctgcaagtgcggcaagaagtaccctgacctggaggagacgagcaccgccgcgcaggccaccgtcgtcctcggcgtggccccggagaagaaggccgcgcccgagttcgtcgaggccgcggcggagtccggcgaggcccgccacggctgcagctgcggtggcaactgcaagtgcgacccctgcaactgctgatcacatcgatcgacgaccatggatatgaataataaccaactaacctgggggggtggg

SEQ ID NO: 2507 - DNA, 263 bp, Zea mays
  Clone ID: LIB3116-007-Q1-K1-H10
gaaacccacagcagccgctgctagccgtacgatggcatacaccggtgacgtcgccgccgttgctgctgccgcggctgccgccgccgccgaggcttcggcgcgaccggcgggcagcagcagcacccaaccgctggcggggcgcgtggcgatcgtgacgggcgcgtcgcggggcatcggccgcgccatcgccacgcacctgtcctccctcggcgcgagcctggtgctgggctacgcggcgcgcgccgacgaggcgggcgcgctgg

SEQ ID NO: 2508 - DNA, 193 bp, Zea mays
  Clone ID: LIB3116-007-Q1-K1-H11
cacccgttcgataaatgcccatcccattttgcacccggattttttatttattgtactactgaacattactggggtggtttcgctgcaaaagagtgttatatataaatagcaagaatgatattattatcatcatcttactcctcattctttttgtactaacagctgtcttttttatcccaatatcacaaaataa

SEQ ID NO: 2509 - DNA, 265 bp, Zea mays
  Clone ID: LIB3116-007-Q1-K1-H12
gggcgacgacgcgtacgagctagcgatggctggagcccgggcactgttcatcgtcctcgcggctgccgtcgcggtgggggccgcgcggccggcgtctgcaagcgggggagccgcggcggtggcggacatctgcatgaagactccgtcccccgacctgtgcaccaggacggcggggaagcacgccaacaagtacaaggtggtggacgcggtgacggtgctagagatgcacgtggacgcgttcaagaaacgcgtgaaagcggcgcgg

SEQ ID NO: 2510 - DNA, 272 bp, Zea mays
  Clone ID: LIB3116-007-Q1-K1-H2
ggcccttcttcaagtagcgaggaccactaagacaatgcagctctagaggaatgggctggtactcgcattcataatgctgttcggcaatacaaggcatggaataccctgcgttgtctcaagggagtcacaagattgtgcgttgtacgtaaagcgaatcccgataagaacgagactgctgccacgctgagttacaatacagtcttggaacaagtttgcagtcggcgataagaaacccacgtgctttcatggtcactgaaggacgcaacacgact

SEQ ID NO: 2511 - DNA, 243 bp, Zea mays
  Clone ID: LIB3116-007-Q1-K1-H3
ggaactacctgctatcgatcgccctctcgctgacgacactcatggacgacaacgcgatcggcaccaactgccggtgtatcccgctgcccttcatatatacccagctccagcgccagcaccgtgccactcttcatacccaacgtcgcctccaagcgtcacgaagacgacacggagaccgttaaaggttgcggctcgaaacctcggggcgagcccactaacctggcgacggatggcatcttcatc

SEQ ID NO: 2512 - DNA, 344 bp, Zea mays
  Clone ID: LIB3116-007-Q1-K1-H4
gattgtttcacttcagcttccgggagctgataatatcgggaggttagtacttcgtagtgtctcttagtcatctgtatgtattccatcttttataatttattattcaattgggtgttttagtgtggctgtggaaaaggtgtattggtctgaatgagggcttgtatttgtttcccatgaattgtttgtttctggaaaggaaactcccatagtttccaaacaacatcattttttttcttgaagtttttcacttgatacctgatgaaatccgaagaaaatgcaaagcaacgagaagcattgtctttgcagaactgtaaaaaaaaaactaaaaaaaaaaaggggcggcc

SEQ ID NO: 2513 - DNA, 262 bp, Zea mays
  Clone ID: LIB3116-007-Q1-K1-H5
ggacctacctgctatcgatcgccctctcgccgacgacactcgatgacgacgacgcgaacggcagcaactgccggtctatcgggctgggcttctcatatacccagatccagcaccagcaccgtgccatctacatacccatcgtcgactacaaccgtcacgaagacgaccaggagaccgttgaaggttcccgctcaaaacctcggggcgagcccactagccaggcgcccgatgacatcttcatgtcggcgctcttcaaggacgc

SEQ ID NO: 2514 - DNA, 356 bp, Zea mays
  Clone ID: LIB3116-007-Q1-K1-H7
cggacgcgtggggttttgcttcgggtcaccgtgtaccctttgcttgcttggtttcttctttccttttttcctttatttttcttcttttccccggccatggctcctttgctttccagcagttctctgctggatgtgatgtatccattgttgcaatcatggccttgcattggctacctctatacctgctacaaaactactgcaacgcctatatatacttggggtgaagaacatgtgaatgcaacttccggctataatttccatgaaattgggtaccaactttatatataaattcggccaagcgccgacaatactatacgacaccgggtaagttatatataactggtgctttttattta

SEQ ID NO: 2515 - DNA, 355 bp, Zea mays
  Clone ID: LIB3116-008-Q1-K1-A10
cggtccagcactttcacgctcagctccagcaatggctgcctccaccatggcgatctcctccacggcgatggccggcacccccatcaaggtgggctccttcggcgagggccgcatcaccatgcgcaagaccgtgggcaagcccaaggtggcggcgtccggcagcccctggtacggccccgaccgcgtcaagtacctcggccccttctccggcgagcccccgagctacctcaccggcgagttccccggcgactacggctgggacaccgccgggctgtccgccgaccccgagaccttcgccaagaaccgcgagctggaggtgatccactcccgctgggccatgctcggcgcgctcggc

SEQ ID NO: 2516 - DNA, 353 bp, Zea mays
  Clone ID: LIB3116-008-Q1-K1-A11
acgcggacgcgtactttcacgctcagctacagcaatgggtgtctgcaccatggcgatcttctccacggcgatggccggcaccccgatcaaggcgggctacttcggcgagggccgtatcaccatgcgcaagaccgttggcaagcccaaggtggcggcttccggcagcccctggtacggacacgaccgcgtcaagtaccttggccccttctacggcgagcacccgagctaccttaccggcgagttccccggcgactacggctgggacaccgacgggctgtccgtcgaccccgagaccttcgccaagaaccgcgagctggaggtgatccactcccgctgggccatgctatgctcgc

SEQ ID NO: 2517 - DNA, 233 bp, Zea mays
  Clone ID: LIB3116-008-Q1-K1-A4
tccacgcgtccgggagggtccaaaactacagcaaagaagaaagaggcgtcccacaagcaccacaagaagccccagcggaagaaggatcggtcctggagggttggcaatgatggtggcgacggaacagcagttgtaagaatgtaccagaaacccgcagttaatttgtccacgggctctttaagtggcaaggtctgatgccctaacttttactgctcgcgcaaccccggcacaca

SEQ ID NO: 2518 - DNA, 239 bp, Zea mays
  Clone ID: LIB3116-008-Q1-K1-A5
tcggccacgcgttcgcattttgccacaatgctcacaagctcctatagctttccttttttccccgggcctctgaccagcagtgtcttggggttgtgaaaacccaattctttaaccctataggatccaacaggcaatcgcaagtggcatcttacctttatcaacctgtgttgcttcaacaatcatgaggcctattacaagaggtacctttgggggctttattggcacaaaacataagggac

SEQ ID NO: 2519 - DNA, 201 bp, Zea mays
  Clone ID: LIB3116-008-Q1-K1-A9
cggacgcgtgggcggacgcgtgggggagagacgccgcacgacgactgaggccccctgaccgccgccggccggtggcggaggcggatgatggtgtatatgcatgcatgtgcgctttgcttcagaaacgtacggggctgcctggcctaggcctagctgattttggtctcaaaaaaaaaaaagttacgttcatttgctcctttt

SEQ ID NO: 2520 - DNA, 120 bp, Zea mays
  Clone ID: LIB3116-008-Q1-K1-B1
cccactcgtgcgagctcttcatctgtatcaacgaggaccatcgtagccatttgcgattcaggtgacaacaagataacgatttgaatgcgaatatcatctaccgctactggtaactgctct

SEQ ID NO: 2521 - DNA, 61 bp, Zea mays
  Clone ID: LIB3116-008-Q1-K1-B10
accggtcacgcgtcgcggcatcgtaaatgccctattcgagatgcatttgtagccatcatgg

SEQ ID NO: 2522 - DNA, 89 bp, Zea mays
  Clone ID: LIB3116-008-Q1-K1-B11
tccacgcgtccgacatgttttgcacttctgatttcattagtgccatcatctgtggctgatccggtcgctaatatgggacctgagattag

SEQ ID NO: 2523 - DNA, 338 bp, Zea mays
  Clone ID: LIB3116-008-Q1-K1-B12
cgccttcttcttctggatactgatgacctatggattggagtcctgcttcatggaccatatcggtttcctggtgcccaggctcgttctcggggtcgtcattcagcttctctgcagctacagcacgctgccgctttatgcaattgttacccagatggggagctactacaagaaggagatcttcaacgagcatgtgcagcagggcgtgctgggctgggcacagaaggccaagaagagatcgggggtgaaggaggtcagctcgccgtccgaacccatgcacggcgaaaatgcggcctaagattgggatggcgagggtaacgggtagctggcgaagacaatga

SEQ ID NO: 2524 - DNA, 180 bp, Zea mays
  Clone ID: LIB3116-008-Q1-K1-B3
ctggacccgaggaggatgagcgcgctcaggccgtatagaaacttgcagcatgtcgttaaccacccaagggttcgggcctccaggtacaggcggtggtggacctattacatcgtcaacgatactgatcaattgagtaaagctctgaaccgacatgatcacctggtactacctgcctacata

SEQ ID NO: 2525 - DNA, 146 bp, Zea mays
  Clone ID: LIB3116-008-Q1-K1-B5
cccacgcgtccgagcactccagctgcatcgacaaggaccgccgtagcgatttgcgaagcaagggacggcagaggaacccttggaaggcgaaaatgatctaccgcaactggtcgctgctctcgttcacagtcgtcatttggggcggc

SEQ ID NO: 2526 - DNA, 113 bp, Zea mays
  Clone ID: LIB3116-008-Q1-K1-B6
tcgctcacacgttcgagcactccagctgcatcgactaggaccgccgtatcgatttgcgtaacaagggactggatgaggaacccctaggaaggcgaaaatgatctaccgcaact

SEQ ID NO: 2527 - DNA, 65 bp, Zea mays
  Clone ID: LIB3116-008-Q1-K1-B7
actgacgcaccattccgggattgacgcacgcatccacgcgaccgacgaggcggagcgcgctcagg

SEQ ID NO: 2528 - DNA, 360 bp, Zea mays
  unsure at all n locations
  Clone ID: LIB3116-008-Q1-K1-B8
cgtcatcatcagcactgggatcaaccccaaggccaagccatactacctctttgacggctatgcccacctgtcgtctggccttgcctgtggtcttgctgggcttgctgcaggcatggccattggcatcgttggtgatgctggtgtcagggcgaacgctcagcagccgaagttgtttgttggcatgatcctcatccttatttttgctgaagcgcttgccctctatggtctcatcgtcggcattatcctctcgtctcgtgccggccagtcccgcgcagattagaggcacgtttcagatgtcaacaccgtgccgncgacagttgcctggtcgtagctgggtcatgttctatatccatgagacaa

SEQ ID NO: 2529 - DNA, 350 bp, Zea mays
  Clone ID: LIB3116-008-Q1-K1-C10
ccataacaaataacggcgacacgccatccccaccgaaccctacccctacccgcgacttagctcagcttccgccgatcggcttgccccggcgatttcgccaacccctcgacccgatcggctccattgatcgtacctcgtcgtccggttgtcgatggccaggacctgtttcaaaatggagcacgacctcgagaaaaggcagtccgaatctgccaggatcagggataagtatcccgacagaattcctgtgattgttgagaaagctggcaaaactgatgtcccccaaattggtaagaacaagtaccttgtccctgctgatctcactgtcgggcaagttgtctatgtggtgagga

SEQ ID NO: 2530 - DNA, 381 bp, Zea mays
  Clone ID: LIB3116-008-Q1-K1-C11
cggaacggcagtgccgactcaagcgacgcgtacgaggtatcacggcgacgcgccatcctccagcgaccccacctcacgccccgccctgacgtcagccgcgcgcccacgactaggcgccgcgccgtgcctgcaaagatctgctgcatcggatgggaccccgagaggcatcctgggcgcgccgcaaggcggacacatcgcgcgcctagagatccggcgccgcctagagagggactccgaggcgcgcgaggccttcaagcgccaggtgcgcgaggagaaggagcggcgccgcaacgagcgcgaggcgcgggtgatcccggacacggacgccggcctcgtcgagttcgttctcgacaccgacgcgcgcgagatcgagatcgagat

SEQ ID NO: 2531 - DNA, 201 bp, Zea mays
  Clone ID: LIB3116-008-Q1-K1-C3
aatcgactggaaatagatatctggtcatttggatggtttttattgtagatgcttacactttagatgccttaccaggtacttgctggcactggaatatatgatctgatactgaggaagaaacatgaggcaaggctaacttaggaactataagcattctggacaatggatgagccaggtacgagactcaagttagggatcaca

SEQ ID NO: 2532 - DNA, 276 bp, Zea mays
  Clone ID: LIB3116-008-Q1-K1-C7
atggactggaaatagatatctggtcatttggatgttttttattggagatgcttacgcttcagatgccttaccagggactttctgacactgaaatatatgatctgatactgaggaagaaacagaggccaaggctaactcaggaactagaagcattctggacaatggatgagccagctacgagactcaagttagggatcacatctgatgctcatgcagataaattgagacacctgatagatctcttctaccagtgtaccagaggacatgcatccaggc

SEQ ID NO: 2533 - DNA, 212 bp, Zea mays
  Clone ID: LIB3116-008-Q1-K1-C9
ggccgaccatatatggcgactcgccatcctcaccgaaccctagccgtacacgcgacttaaatcaggtcatcgaccatcggttagacaccgtcgattacatgaaccactagaacagatcgggtacattgatcacacctcgtcgtccgagagacggaagccaggacctttggcaaaatggagcaggaactcaaggacaaggcaaaccgaatctg

SEQ ID NO: 2534 - DNA, 214 bp, Zea mays
  Clone ID: LIB3116-008-Q1-K1-D1
atggactggcaatagatatctggccatttggatggccattattggagatgcttacgcttcagcaggccttaccagggactttctgacactgaactatatgatctgatactgatgaacaaacagaggccaaggctaactcaggaactataagcattctggacaatggatgacccatctacgagactcaagtcagggatcacatcttatgctcatg

SEQ ID NO: 2535 - DNA, 338 bp, Zea mays
  Clone ID: LIB3116-008-Q1-K1-D10
gcgagagcgagagcgacagctagagcgagagcgactagagcgactgcgaggaggcgttcctgccgcacggcggccggacgcctcaaggacgcgtgcagcacagctaccgataccgcggccgcgcgtacaagcacgaggctgacaacctacacggcttgcgccgttaccagtcctactacagccgcgaggatctcggcgggcgactccgttacgagacctaccagagcaccatccagtacaccggctccgcgaccaagaaccggcacgtgctacgctacctcgcgtaggcatatatacgctctcatccaggtgcattgcagcacgtgcacctacgcata

SEQ ID NO: 2536 - DNA, 349 bp, Zea mays
  Clone ID: LIB3116-008-Q1-K1-D11
gccacacctacagcgacacctagagctagagctactagagcgactgttaggaggcgttcctgcggcacgggtgccggacgccgtagggcggcgtgcagcacagctacggctacttcggctgagcgtacaagcacggggcttgcaacctcagctgcttgcgccgctaccagtcgtacaagagccgctaggatctcggcggctgacgccatgttcgagacctaccaaagcatcgtccattacaccgcctgctcgaccaataaccgtcacgtcctacgctaccgcgcgattgcatatatacgctctgatgcaagtgcattgcagaacgtgcacctacgtatataggtattcc

SEQ ID NO: 2537 - DNA, 330 bp, Zea mays
  Clone ID: LIB3116-008-Q1-K1-D12
cccacacatccggacgaggccgcagggcaggcagacgaacaggaagaccgctacggttgggccatcggcggcgacgccgcgggcgggcgcgcggactggctggcggcgtaccgcgcccgcgcggcgccggcactggcggggctacgccggaactcggccgacttgtcggctgccgagaccgccaggttcctccgcgcctgcgggctctgcaaccgtcgcctaggacccggccgcgacaccttcatgtacaggggcgacacggcgttctgcagcctcgagcgccggcagcagcacattacgatcgaggagtggaaggagaagtgcgcgctc

SEQ ID NO: 2538 - DNA, 170 bp, Zea mays
  Clone ID: LIB3116-008-Q1-K1-D2
cggacgcgtgggaaaaaaaacaaatcttcagtttagaataaaagtagctataacacaagcaccagcatgaagcaaacatggaaagaaggatccagtactgcaaggttgaaaagagaaagttagatcgtaacaagaaaaaaaaagggggggccatttaaagggttccaatt

SEQ ID NO: 2539 - DNA, 112 bp, Zea mays
  Clone ID: LIB3116-008-Q1-K1-D5
tcgactgattgacagcccaagggatactccaaagctggccaacaatattgaaaagcttggtggagcgcgctacatgtttttgacccagattgatgacgtatcatatcacagg

SEQ ID NO: 2540 - DNA, 357 bp, Zea mays
  Clone ID: LIB3116-008-Q1-K1-D9
gtgacaggtcgagctacacggggccatactgcaacgacagcaactgagacccggcctgactcccgccgagcgcgcacgagcaggcgcggggccctgcctgcagagatctgctgcatagcatgggaccccgagggcatgctgggcgcgccgcagggcgggcacatagcgcgcctcgcgttacgccgccagcctcgagagggactccgaggcgcgcgaggccttcgagcgccaggtgcgcgaggagaaggagcggcgccgcagcgagcgcgaggcgcggacgatcccggacacggacgccggcctcgtcgagttcttactcgacaccgacgcgcgcgagatcgagatcgagatcggcag

SEQ ID NO: 2541 - DNA, 146 bp, Zea mays
  Clone ID: LIB3116-008-Q1-K1-E10
acacggtccggaactgaagtttcgactcaagcgacgcgtccgaccacgcgtacggaagaaggcgaaagtgtatgtttcaaatcaggaagaccactacaggtgggggatagaaggatacgaaagaaggcgaaaacaaagggtgggtg

SEQ ID NO: 2542 - DNA, 343 bp, Zea mays
  Clone ID: LIB3116-008-Q1-K1-E11
ctgacgcgtcgaccgtgtgacacagctagtggcttgcgagcgatcgggtttggacttgggtggcattatggaagcctacttcttgggggacagcgtagagggcgtacgagttctcgtacgcggcgtaggaggacgacattggctcgccttgggattccgaaccgtgatactcgtacacgagcagggagtacgtgggctcctgaggcatagttcgacaactactacagctactacggcttcagctcctgctcggaccgcttccagaacttcgtactcatgaccgagttcccttattttcagcggggcctgtccaggttgttccacgtgcagttgcagatcttcg

SEQ ID NO: 2543 - DNA, 396 bp, Zea mays
  Clone ID: LIB3116-008-Q1-K1-E12
tgccgtaccggaactgcagggtcgacccaagcgacccgtccgaagttcgacgacaagtacggcgcgaacgtcgacggatacaggccaatctacaacgaggatgggtggtctcccaccggcgacggggacgtcggtggaaccactgggcttctgatctgggccgtcaccctcgctgggatcctcggcggcggcgccctactcgtctacaacaccagcgccctctacggctaaggatatccaatgcatgcgcttcttgcgattcgtcatgtaaaatcagggcgtctgtctataatctagcctccatggatgctcaaccttcgtcatgtaacaataatcagtgctactcttcattacataattttgatgctatatatatataccccatccctgcctaaa

SEQ ID NO: 2544 - DNA, 348 bp, Zea mays
  Clone ID: LIB3116-008-Q1-K1-E4
acatgttccaggacgacctggacggcgccgggttcttcggcgggcttccgacgagccgcagtgcccagggtcctagcagcacctcgttgccaccgtcgacgtcgccattgcggccgacgccttctgcaagaaagaagggtgcgcaaacaccgtcgtcggttaacggcgctgggaggcggggttcgacggcgaagcggccgaggaccggttgggctgggctggaaccggatctgggcctctctggattctgtttcatggtgagcaagtcgaaagagaggcccgcggcatgggcgtgcgacggcggtgacgagaggagcggcagcaagcagaggctgtcaacgagccgcg

SEQ ID NO: 2545 - DNA, 118 bp, Zea mays
  Clone ID: LIB3116-008-Q1-K1-E5
aaaaaaatattaaaaataaaaaattttaaaagattataataaaaaatttaaataaataataaatggaaaaaaaaataaaatatattgaaaaaaaaattaaacataatataacacacat

SEQ ID NO: 2546 - DNA, 450 bp, Zea mays
  Clone ID: LIB3116-008-Q1-K1-E6
cctgtctatctccttcggccgtgccctccaggcgagcaccctcaaggcctgggctggcaaggtggagaacttggagaaggctagagctgccttcctcgccaggtgcaaggccaactctgaggctaccctcggcacctacaagggtgatgctgccgccgacaccgagagcctccacgtcaaggactacaagtactgagttgcttctctttgcgtgcccgttttggaactcctgcctacgagctaggttgcggagtgtggtttgctcgttagagcttattttcggacatccaaaaaacatgcttcctatgtgggatgatggttatctttatattcgaatgtaattaatctctttgctggaaaattcgtgtaagttggttctgccaatggagaatcgagcaggcccctttttttgttctatcaactatgcctgaaagctggctatgtatcggc

SEQ ID NO: 2547 - DNA, 215 bp, Zea mays
  Clone ID: LIB3116-008-Q1-K1-E8
cccacgcgtccggctggcttctcctccccctcttaccaagtcctcctcgggttagggttccttagggttttgtggaggggcgatggcggcggctgatgtggagtaccgttgcttcgtcggcgggcttgcctgggccaccagcaacgagtcgctggagaatgccttcgcctcctacggcgagatcctcgactccaaggtcattaccgaccgggaga

SEQ ID NO: 2548 - DNA, 334 bp, Zea mays
  Clone ID: LIB3116-008-Q1-K1-E9
ctcacgcgtgcgccgagtcacaccgttagtacgattgctttgtgatcggccatgcaatcaatcgagcatcatgagttgcagactcattgtgtcacaagcttgatgtcgcacaagttctggtgctcagatcaagaggaggacatagtgttgcccgtttactgggaaatgctctacacgttgacgtccagggagttcgtttgctggccgaccgagcttgacgactactccaagtactccgtatccagctccggcttggaccgcttcgaaaagtccggtctcatgacgcagctgcctatgttcaagcggtgtctgagcatgatgttcgacagcaagt

SEQ ID NO: 2549 - DNA, 224 bp, Zea mays
  Clone ID: LIB3116-008-Q1-K1-F1
cttgtgtccatcgacactctaattgaggaccaccttacgcatgagcccatcaatgagtacgtgcatagttgcgacattgtggcttttaacaagatctagagttcagtttctgagtttgggcaacggcagcggctcagctctgcaagtttgtgctgtgatgccagtttatgccttttagtgtattacagaaacgttgttcggagctgagtctattataaacatct

SEQ ID NO: 2550 - DNA, 355 bp, Zea mays
  Clone ID: LIB3116-008-Q1-K1-F10
accacgcgtccgagaagaagcagatagagcacacagtcgagtgtaaaccatccaaccaatcatggcttcgagttccaggagcaccgtgttttcacttcttctcctggtggcgctgctgctcagctgcagcggcctgagcatcgcggctcgggtgctggaagaggcgccgaccaaggtggagcacccacatcctgccgtgcccgagctgccagaacctgagctgccggcgaaccctaccgacgtcgtgccgtctgagctgcccaaaccagacttaccaccgcacctggccgatgtccccgagctgccgaagcctgaggtgcctcatcaggtgccggagcagccaaagcccgagctg

SEQ ID NO: 2551 - DNA, 255 bp, Zea mays
  Clone ID: LIB3116-008-Q1-K1-F11
ttcacgcgtccgctgagatgcacacagacgcttctgcgatgtgcgggcactgcacacaatcatgggtagcgtcgtcacgaaaggcttattaccactagttggtctactgctcgttggatttaacgtcatgggcccgtgcagcgttctgccgccaatgaagcagcctccagtactgcttgaacaaccacatcttttaggacgtttactcgatgtaactcacctggcgcaagcaccttcacgcactaccatggtcac

SEQ ID NO: 2552 - DNA, 252 bp, Zea mays
  Clone ID: LIB3116-008-Q1-K1-F3
cggaatcgaccgcacgcgatcccacgcatgcgtccgcgcgccgtaccacgacggcgtctgcacggagctggcgcacgcctgaggacgctgatgcatccattgctgcccagcacgctatgtgcgtatgagtagcacatgggctacatctacgtcgtacagccctggcagctggacaagctaactcgcgagattacagaataccagtagacaagcaaagtgaacagcgtgaatataatatgcatgccttgggtt

SEQ ID NO: 2553 - DNA, 257 bp, Zea mays
  Clone ID: LIB3116-008-Q1-K1-F4
gaaaattcttgtacacaaagcaaccgcaccaagggcacgtcagatttttgcagttgtttcttgagaagtccaggcttctgtcaagatcaccaatccacatctttttgttttaaaatgattgacagctaaatcgtgtatcaccttgcctttgcttaaggcgctacaggtactgccaaactaatgtatgtgcttttcttatcgaaaaacctaaatgtatgtgcttcagatatcttgaacatctctgctgtttgcgtcaa

SEQ ID NO: 2554 - DNA, 229 bp, Zea mays
  Clone ID: LIB3116-008-Q1-K1-F7
ggagcgcggcgcgccacatgcgtgcaagcgcaaccaatcgcctcgccgtgcgctcggctttgcattcctcgataacgtgagtaacctgggtggctgatcaaggctttgacggcggcaacaaccttcttccctaggcgcctcactgcgtacatccgcacagcgcccactcgtacataacccaccaccgcgtacagcgcgtctctctacacgcccgccgtgagctacccca

SEQ ID NO: 2555 - DNA, 330 bp, Zea mays
  Clone ID: LIB3116-008-Q1-K1-F8
ggttggcttctcctccccctccggttcgggttcgggttcgtgaggttctccggggttcgggttcgtgggtgagcggatcgagatggcggcgtcggatgttgagtaccgctgcttcgtcggcggcctcgcctgggccacggacgaccactccctccacaacgccttcagcacctacggcgaggtcctcgagtccaagatcatcctcgatcgggagacgcagaggtcccgcggcttcggcttcgtcaccttctccacggaggaggcgatgcggaacgccatcgagggcatgaacggcaaggagctggacggccgcaacatcaccgtcaacga

SEQ ID NO: 2556 - DNA, 218 bp, Zea mays
  Clone ID: LIB3116-008-Q1-K1-F9
aacacgcgtcctagacgaagcccgtcgagcacacagtcacgtgtaaagcatgcaaccactcatggcttggagctctaggagcaacgcgagggtacttattgaccttgcggcgctgctggtcagacttagcgcgctgagcagcgccgcgcacgttgatgcaagacgcgcccgtcatggaggctcggccacatccagccacgccggagcttctgaaacct

SEQ ID NO: 2557 - DNA, 357 bp, Zea mays
  Clone ID: LIB3116-008-Q1-K1-G10
gccacgcgtccgaccacgcgtccattgacgcgtggtcaccgagtaacacacctgcctcagcatacctaacggccgctccgagctcgccggctaagaggtctcttgggggcttgcacgcttcgccggcatgtaacaggacaacgggcttgtgccgatcgtggagccgcagatcctgctggacggcgagcaccgcatgaatcgcacgcttgaagtggctcagaatgcgttggcctaaaccttctacgccatggcggagaacaacgtactgtacgaaggcatactgctgaagccgagcatggtgacgcccggcgcggaggccaatgacagggccaccccggagcaggtggccgcgtacac

SEQ ID NO: 2558 - DNA, 357 bp, Zea mays
  Clone ID: LIB3116-008-Q1-K1-G11
cggacgcgtgcgcagacatgcacacagacgcttggacgtcgcacgggccctgcacacatgcacacctagcgtcggctccaatggcgcactaccagtaggtggactactgctcgcacgctgtgacgtcgtgggactgggccgccttcggccgccactgatgcagcctccaacactacttgatcacggacaaggtataggacgcagactcgatctgacgcacctggtgcaaccaccaacactactaccatgtgtcaccacagcagcacacctatacgtaggcgctccagatcaaggtcgaagaggacatcaacacctcggccggcaaggtccaggagcgcaaggagagcttgctcgcca

SEQ ID NO: 2559 - DNA, 358 bp, Zea mays
  Clone ID: LIB3116-008-Q1-K1-G12
caacgaacgatcacgtgaagttacatgctagaagccaaaggtaacgctacaagaaagtgatcattacagccgtagaaagagaaaatgtgataaagttttttttctctcgaacgtacaagaaaactactgactcattatattaagataggaaaatgtgacaaagttcatgtgctcttcaatctttcagctatgtgcaaacgatgatacagttattaaagttgactataaagtggaaactgccatgagaaaacgtctagctccggatccagatgttttttttttcacgagaagagataaagatgtgtgtgtttttttgctggatttggtttagtgtacaagatggatctaaatggaatca

SEQ ID NO: 2560 - DNA, 90 bp, Zea mays
  Clone ID: LIB3116-008-Q1-K1-G2
cagcttgcaaatggagtgctgaactagccgcagcttgtgaaatatggaaggagatcaaatttgatggtttcaaagcgatggataccatat

SEQ ID NO: 2561 - DNA, 342 bp, Zea mays
  Clone ID: LIB3116-008-Q1-K1-G3
cggacgcgtgggcggacgcgtgggcaaaatactagtagtgcataatataatatagtaatccggtccataacaacgccggcaggacctgtcttcggtgacaatacagctttcatcataaactaaaaaggtcccggcgcaaaaactatttacaaaaatgcccgtcgtcgacgtcgtctgtcggaggagagcgtctctcagcttagtagtaccgaattttcctcgagcgacggctggagcggcatggcctgcatgggcgcctgcgcgtcgctgctgaaggactcgacggtgctgctggtgctgctccggcaaccggctgcggaaaggggcccgcccaaggggtaa

SEQ ID NO: 2562 - DNA, 147 bp, Zea mays
  Clone ID: LIB3116-008-Q1-K1-G5
tgcctatggcatttggaggttcccatgagccagcagcttatggggtgccggtttccatcggaggccttaaccctgagtgtaacaagaagcttcaggctggcatcgattttatcctggagctaaaggtgtctgttaccaaatcacgct

SEQ ID NO: 2563 - DNA, 350 bp, Zea mays
  Clone ID: LIB3116-008-Q1-K1-G8
ctggagaacatcatgagggcctgcgttgggctggccccagagaacaacatgatcctggagtacaagtgagccaagtggcgtgccctgcagcgcgaggttagctgctggaagggaactagaaaggcgagattagctgtgggattgtgttgggcttgtcgtgttttcttttgcgttctttcctagtcattgctgttgcgcttttgtatttgtcggacccgtaactaccagggctctgctattagcggcacggagcctgtaattgtattgtatgataatgtgatcgagggtgctacttcccctcggcattcctagtgttggttaaaagtcgttcgacagcaacttatcgaccc

SEQ ID NO: 2564 - DNA, 220 bp, Zea mays
  Clone ID: LIB3116-008-Q1-K1-G9
atcacgagcgggcgcgctttttcattgatgcgttttcacggtagtacaaggatggaactggagtccaaccggcagcagagaacacgcacggaatccacaccatgcgtagtctaatccaatcgacgtcggcagattgccagccgtcgtatagcagacagagagagagtgagactgcattgatggatagtaacgaatagagggcgatcacgcaggacgcagc

SEQ ID NO: 2565 - DNA, 357 bp, Zea mays
  Clone ID: LIB3116-008-Q1-K1-H10
acgcggacgcgtgggcagcaatccacacaagcactttgacgtcgcacgggcgctgcacacagacacaccaagcgtaggcaccaatggcttactaccaggaggtggactactgctcggaggaggtgaggtcggtggccccggccggcttcggccgccacggatgcggcgtccagcagcgacgtcgtctaggagaagtttgaggaggtcgacacggtctcacgcgccggcgccaaccaccacgaccaccaccatggtcaccacggtggacacggcttcatggtgcgcgagaccagggtcgaggaggacatcaacacctgcaccggcgaggtccacgagcgcaaggagagcttgctcgcc

SEQ ID NO: 2566 - DNA, 344 bp, Zea mays
  Clone ID: LIB3116-008-Q1-K1-H11
cggacgcgtgggcagcaatccacacaagcacttcgacgtcgcacgggcgctgcacacagacacaccaagcgtcggcaccaatggcttactaccaggaggtggactactgctcggaggaggtgaggtcggtggccccggccggcttcggccgccacggaggcggcgtccagcagcacgtcgtcaaggagaagttcgaggaggtcgacacggtctcacgcgccggcgccaaccaccaccaccaccaccatggtcaccacggcggccacggcttcgtggtgcgcgagaccagggtcgaagagggcataaacacctgcaccggcgaggtccacgagcgcagggagagc

SEQ ID NO: 2567 - DNA, 345 bp, Zea mays
  Clone ID: LIB3116-008-Q1-K1-H12
cccacgcgtccgcggacgcgtgggtctatccacaacagttgttactgctcaccaattgttttttgtttgtagtttcaaatgcaacttcttagtttagaagaagtttaacaataggcaacgctaacaatcacctaccctgaataacttggtttgagaattgagacggcagccctttttgtcactcgaacctttttagtctgtatacctgaaatggcatttcacataaatcctatttcctccaagggcgtctgcgtggtcctatgctaacacaattattgctctagagcctggagagatgaaatccaagcaactggagtcttcagtggagactgagactgaagtccg

SEQ ID NO: 2568 - DNA, 248 bp, Zea mays
  Clone ID: LIB3116-008-Q1-K1-H4
aaaaaaaaaaaaaaaaaaaaaaaaaaaaaaaaaaaaaaataaaaaaaaaaaaaaaaaaaaaaaaaaaaaaaaaaaaaaaaaaaaaaaaaaaaaaaaataaaaaaaaaaaaaaaaaaaaaaaaaaaattaaaaaaaaaaaaaaaaaaggggggccctttttaagggtccaaattttacttcccggtgtttgcaacttaaaagtttttttaaggggcccccaaaatcaatttaatggcccgctttttaaa

SEQ ID NO: 2569 - DNA, 291 bp, Zea mays
  Clone ID: LIB3116-008-Q1-K1-H7
agagcaggaagcaggggctagacgcggatcggcgagcatgaggggcggcggcggcggcgggatgatggacgatgaagagagggtgggccatgcggagatcccgaccagtttcggtcccgagctgcgcgcctgccttcgatgccgcctcgtcaagacctacgaccagttcagggagaacggctgcgaaaactgcccgtttctagagatggacagagagcacgacaacgtcgtcaactgcaccacccccaacttcactggaattatctctctgatgggccccattaggagctg

SEQ ID NO: 2570 - DNA, 110 bp, Zea mays
  Clone ID: LIB3116-008-Q1-K1-H8
cggacgcgtgggcggacgcgtgggtttttttttttttttttttttttttttttttttttttgttttttttaattttttttttgatttttttatttttatatataatttat

SEQ ID NO: 2571 - DNA, 343 bp, Zea mays
  Clone ID: LIB3116-008-Q1-K1-H9
cccacgcgtccgcaactcgctggtcgccagagcacgcgtcgtcgctgtctccgccgactaccggctcgcgccagagcacccgctcccggcagcctacgacgactcctgggccgcgctcaagtgggcggtctccggcgcggaccagtggctgtccgaccacggcgacctcggccgcgtcttcctggtcggcatcagcgccggcggtaacattgcccacaacatggccatctctgtgggcgtgagcggcttgccggccgctgaaccaccgcgcatagaaggcgtgatcctgctccacccttccttttccggcgaacagaagatggatgtagaagaagaggagttc

SEQ ID NO: 2572 - DNA, 415 bp, Zea mays
  Clone ID: LIB3116-009-Q1-K1-A1
aaggagcacaagcacaagcagcacctcggcgaggccggcgccatcgccgccggcgccttcgcactctacgagaagcacgaggcgaagaaggaccccgagcacgcgcacaggcacaagatcacggaggaggtcgctgccgcggcggccgtcggcgccggcggctacgtattccacgagcaccacgagaagaagaaggaccacaaggacgccgaggaggctagcggcgagaagaagcaccaccacctcttcggctgaccgtagtaccggccggcgcgcgaccgagctagctagctccggcgcacacaaccacacacctgtttaattctgtactgcatgcgtgtgtaatttgatggttcacaataatgagtccctcttcggaccttggtagctgcttgcttgtggtgagtgagagtgt

SEQ ID NO: 2573 - DNA, 182 bp, Zea mays
  Clone ID: LIB3116-009-Q1-K1-A10
gcctgcacgtaccggacctgaagtttcgagtcagagccacccgtcagccgtacccgtgaccctaagcttcggtaatagatgtctcccgccttccgatgtcctttgcgggtagtcccctctccgctatcgcggatgactgcatatgaccatgcctgatcactctgctcaagaccgttctcaag

SEQ ID NO: 2574 - DNA, 349 bp, Zea mays
  Clone ID: LIB3116-009-Q1-K1-A11
acggtcgctgctgaactaactgaaccgcatgcgcatctgccagaccgtggtcgccggcctgggcatcggcgccgccgccgtcaacgcgatgtccttcctgtacgaacccttcaccattcgcaagaacgatctcaagcccatcgtcgccgctgtcctcagccacttataccgagcactaccgcatcaaataccttgggcccttctccatcgagctacccgatctaccttaccggcaagttcccctgctactaactctgtgacaccgacgggctgtccgtcgaccccctgaccttagccaagaaccgcgagcatgaagtgatccacttccgctgtgccatgctctgctcgc

SEQ ID NO: 2575 - DNA, 353 bp, Zea mays
  Clone ID: LIB3116-009-Q1-K1-A12
cccacgcgtccgcaaagccatcggaggagcagctggacgaccatggcctcgccgctgctcaagtcgcactctcagctcgccgccgccgccgccctgcactccgtgaggagagccgaccgctgccctgcgacaatacacctgggcaagttccatgaccacgggctcaggtccggccgttctaagacatccgggtcagcgaaggtgggcgccttcccgtcgctggacgtggtgccgctgatggtgacgatggtggagcacgtggacatgtcgcgggactacgtcgtgaccaagtccatctggcatctcagcgacgcagccctcaagagcgtctataccttctacgccatgttcac

SEQ ID NO: 2576 - DNA, 138 bp, Zea mays
  Clone ID: LIB3116-009-Q1-K1-A2
accgtcttgaataaccgggccgacccacgcgttcgaaggagcttacgctcatgcagaccctcggtttggtcttccacataggcttctaatccttgggactgtacgagaagcactaggggtacaatgaccctgtgcacg

SEQ ID NO: 2577 - DNA, 292 bp, Zea mays
  Clone ID: LIB3116-009-Q1-K1-A3
acgcgtgctcgtacgctagagcaggaacttgcttactggtggcacagctgccgcgatgtcctgcaaggtgacgagcaaggtcaggacataggggaggttcttgcacgcattcggactcactatctcatgggggagcgtacttgtagttgtcgtcgaatctatctaagccctgctccatgacgtacagatggagcgtttcggagtcgcaagtaacagcattttactcgggttcatggagacgcttatgacgagtacacgagactgtgggccctgtccatccactcggctgcta

SEQ ID NO: 2578 - DNA, 176 bp, Zea mays
  Clone ID: LIB3116-009-Q1-K1-A5
gggactcgtgggcggacgcatgcgtggttttgctgccgatgagctcatctgcgggggcgcgaaggctatcctcatgccgagcaacatgtatatcgattgcgtacgggcatacctgaccaggtgcagcatcctcatacgtgcggacgacgataagcaagcgtgtctcattgggttca

SEQ ID NO: 2579 - DNA, 335 bp, Zea mays
  Clone ID: LIB3116-009-Q1-K1-A7
gagaggtgagagcaggaaaatgcaggctggcggtactgccggctgcttctccggcgatctgtccggcacggtcatgcctgagagcaggtgcttgcatgcggtccgagtcctcggcacaaggtggagcgtccttgtagctgacgtcgaacctaccgaagtcgctcacaatgactacagctcaagcatctgggtgtcgcccgtggatgacctgtaccggcttggtggcgatgcgcgcgaactgcccatgatctcaggggccatacgagtctactcagttgatgcagcgagcaagagtgtggtcggggtggacagggactacctgtcctacggcgagc

SEQ ID NO: 2580 - DNA, 394 bp, Zea mays
  Clone ID: LIB3116-009-Q1-K1-A8
agcagatcaaacaagtagcgacagctcgacaaagatttgtgagagtgatccggcgctgagaagagatggctaagatcgccgcagccgccgcggcggcggcggcgctgtgcttcgcggccctggtggccgtggccgtctgccaaggcgaggtcgagcggcagaggctcagggacctgcagtgctggcaggaggtccaggagagcccgctcgacgcgtgccgccaggtcctcgaccggcagctaaccggcggcggcgtcggcggcccgttccggtggggcaccgggctccggatgcggtgctgccagcagctccaggacgtgagccgcgagtgccgctgcgccgccatccggagcatggtcaggggctacgaggaggccatgccggctctggagaa

SEQ ID NO: 2581 - DNA, 204 bp, Zea mays
  unsure at all n locations
  Clone ID: LIB3116-009-Q1-K1-A9
tcgcggacgcgtgggcggacgcgtgggggagagacgccgcacgacgacggaggccccctgaccgacgncggccggtggcggaagcggatgatggtgtatatgcatgcatgtgcgctttgcttcagaaacgtacggggctgcctggcctaggcctagctgattttgttctcaaaaaaaaaaaataaaaaaaaaatagaacaatat

SEQ ID NO: 2582 - DNA, 400 bp, Zea mays
  Clone ID: LIB3116-009-Q1-K1-B1
ggcacaagccatggcgtccatgaccggcctctcgcagggcgttctgcccagcaggcgcgccgccaacagggccaggacgggcgccgtcgtcagggcgtccgccgaggcgcaggcgcaggcgggccgccgcgccgtgctcgggctggtggccactggcatcgtcggcggcgccttgtcgcaggcggtgcacgccgagaccgtcaagaccatcaagatcggagccccgccgccgccctccggtggactccccgggactctgaactctgaccaggcgagggacttcgacctccccttgaaggagcggttctacctgcagccgctgccgtcggcggaggcggtggcgagggtgaagacgtcggcgcatgacatcatcaaccttaagccactcatcgacaaggaa

SEQ ID NO: 2583 - DNA, 353 bp, Zea mays
  unsure at all n locations
  Clone ID: LIB3116-009-Q1-K1-B10
cccacgcgtncgcggacgcgtggtcggacgcgtagtcttgctcactatggtcattcgcgacgacatggtcaaagtcatgttctggtacgacaactagaggtgctactcacatacggtcgtctacctctctgacatctgcgccaaccagtggaagtgaagcgctgcattgtaatagcactttgtaacttctcacccttcacaggtcttttggattcaccccgaaatgactaactttcggggaaattcacccgtttcggcgaggtcatccgaatataccggccaaatgtttacattggatttcaattattagtcaactctagagttgaaacaaacatacaagttcttcattcaat

SEQ ID NO: 2584 - DNA, 278 bp, Zea mays
  Clone ID: LIB3116-009-Q1-K1-B12
agaagaggttaaacaaatgggacgacggcaaggctcctctgctgtcagcgcaagaatgaaacaactcgtctctctggtgcccaaccaaagaacaacgagacgtggatatgacctgtacggaactagggacgcccctcggcaggctcagcggagacgtcgacgtagtttgatatcaagtagcaattccaccatgtcctgaaatggacagaaccaggccaaatgcctggaatggacagaaccagatggctgatgaaattctacgtacattccatccggtc

SEQ ID NO: 2585 - DNA, 305 bp, Zea mays
  Clone ID: LIB3116-009-Q1-K1-B2
gaggccgaggagctcgccctaaccgacgcgccgtcaaccgctgccacgacaagcaccccggcatccatcgccggcgagccggttggcatggctgtcgacgacgagccccaggcgctcccggtcttcgagtacacgtcataaatcagggtggtgatcgtcggatcacgatgtgtgggttgggtcgtgttgtgcgtacgaacttcgcactggtgttggatggcggaacccgggcgtaccactaagctcatttatttaacttgaaaatatattgtccttcctgaagaagcaccgggctacaggtccgg

SEQ ID NO: 2586 - DNA, 416 bp, Zea mays
  Clone ID: LIB3116-009-Q1-K1-B3
cccgccgccgcttgctgtctcctctctcgcgcgcaccggtgttcccatcgccgtctccttatctccctcgtgcagccgctgttgtctcctctccacccttgtacccgccgccgcctcctcttcagatttcctcttcttcaccctcgctgcctcctcttcaccctcgctacggcctcctcaaatcgttgagacaactagtacagttgagacaactggtgcgaggtcggacggcggggaccatgcgaacaagctcgttgctgccttctcggctcgtgcaccctcatctcaagaagtgaatcgcctcaggtgatacacaagggattttcatcaacaagtggtcgccagaagaactgaaacatcaagatggcgtttgcttttaggtcatgccattcaggagatgatgttttattattatg

SEQ ID NO: 2587 - DNA, 259 bp, Zea mays
  Clone ID: LIB3116-009-Q1-K1-B4
acgcgtacgcgtggtagctgtcaagacattggttaagccacgccgacccaagcagcggctcctcgatcggacgtcaacagaaggctgagaaggtgtctccactatcgaggacgcacccttatgctccgatgattcagtggcagacactctagttcaccgtgaattaaacgtcttacagaggctataccctacatgagcagcatgcggcagaccttcgaaataggccaacttcacccattggcatctatgcggaccaccg

SEQ ID NO: 2588 - DNA, 155 bp, Zea mays
  Clone ID: LIB3116-009-Q1-K1-B5
cggacgcgtgggcggacgcgtgggctagttctagatcgcgagcgccgccctttttttttttttttggtagatcaaatcaaggaatatttcatatgcctttttggcaactgtttcagttgggtgaatgcctggttaagctttcgcttgtgtttcgg

SEQ ID NO: 2589 - DNA, 390 bp, Zea mays
  Clone ID: LIB3116-009-Q1-K1-B6
gcagaactatgtcaagacatggttcaaccagcccgcccgcaagcagaggcgccgcatcgcacgtcaaaagaaggctgtgaagatattcccacgaccaactgctggccctcttcgtcccattgttcaatgccagactctcaagtacaacatgaagtcaagggctgggagaggctttacccttgaggagttgaaggctgcgggcattccaaaaaggcttgctccaaccattggcatttctgtggatcaccgccgcaagaacaaatcccttgaggggctgcaggccaatgtccagaggcttaagacatacaaggccaagctggttatcttcccaaggcgtgctcgcaaggtcaaggctggtgactctactctggaggagcttaccactgctac

SEQ ID NO: 2590 - DNA, 243 bp, Zea mays
  Clone ID: LIB3116-009-Q1-K1-B7
cccacgcgtccgcccacgcgtccgcacctcgccggcaccgacccgtccgcgtgtcaccgacggtcgacggcgaccatgcttccctcattcctctcgtgcgtggcgtcccctctcctcaccaccgcatgcaccccgaccgcctcgtcgcagcaggcggctgccgcagcccctcccctgcagtcgctgaggctcccgcctcagccagggaacaactacaggcccgtcgctacgacgctggtggct

SEQ ID NO: 2591 - DNA, 390 bp, Zea mays
  Clone ID: LIB3116-009-Q1-K1-B8
tcggctttggccgctcatggggttcattatctgtaccggccgtgccctacccttcatgatcttggctacatgatccttacgcagcttgatatagaatggggttacatcagtgagaccttgcttacattcggattcatgatctccgactcgtgcacactacatcctttcattcttataactacacgctaatacactgtactgatctggcgcatacaacttcgctacttatgagcccctgactttacttcaactaatatcactttatgcacatcacgctttcgcacctactcatcattgtaacgagggctcgcctatggctctattacaacaatgcgcaaacgcaattgaggacgttacgctcactgtagcagcaccttaaattcatcgatt

SEQ ID NO: 2592 - DNA, 109 bp, Zea mays
  Clone ID: LIB3116-009-Q1-K1-B9
ctcaaccgcgctggaggagcgcgctctttcctgatagaaacttgtaacaagtgggtgagcatgtaactgtgacagcatgttcggtattgtcagggatttagcactggca

SEQ ID NO: 2593 - DNA, 413 bp, Zea mays
  Clone ID: LIB3116-009-Q1-K1-C1
cccacgcgtacgtcgacatcgacctattccacgagcaggcgcccaaagccagcaggacgttggcggaggtgccggagcttttcggataccaggcggcgaacgacgcggcgtactacaggccggccaaagccgccgccggcggcggcgctggggttcgccagagcaagaaggcccggatcgaggtcaccgacgacgaggattacctcatagtccctgatcttgggtaaataagagagcgcaggagttacgtttcgtctcctgatgtgtacggtgtaccagagaagaattttactgtgtacaagctagtgtcaagtgttgtgcatctatgactgtagtgtcgctcaattctgaacatctattaagccacttttgttgctatgctaaaaaaaaatatatagtgcacaaaaggggcg

SEQ ID NO: 2594 - DNA, 345 bp, Zea mays
  Clone ID: LIB3116-009-Q1-K1-C10
cggacgcgtggggactagttctcgcgcatcgacgcggacggcgacgggcggatctcgccgtcggagctggcggcggtgtcgcgcgccatctccccgccggcgagctcctcgcacgggcggcgcgaggtggcggccatgatggaggagctggacacggaccgcgacggcttcgtggacctgggcgagttcagggcgttccacgcgcgcggcggcggcgttggcggcgacgacgacgacgacgcggagctccgcgccgtcttcgccgtgtacgacgccgacggcgacgggcgcatcacggcggccgagctgggcagcgtgctcgcccgcatcggcgaggggtgcagc

SEQ ID NO: 2595 - DNA, 353 bp, Zea mays
  Clone ID: LIB3116-009-Q1-K1-C11
cggtctccctccgtggcgccatcctccagcgcccccacctcacgccccgccccgacgcccgccgcgcgcccacgacgaggcgccgcgccgtgcctgcaaagatctgctgcatcggatgggaccccgagggcatcctgggcgcgccgcagggcggccacatcgcgcgcctcgagttccgccgccgcctcgagagggactccgaggcgcgcgaggccttcgagcgccaggtgcgcgaggagaaggagcggcgccgcagcgagcgcgaggcgcgggtgatcccggacacggacgccggcctcgtcgagttcttcctcgacaccgacgcgcgcgagatcgagatcgagatcggcagg

SEQ ID NO: 2596 - DNA, 100 bp, Zea mays
  Clone ID: LIB3116-009-Q1-K1-C2
gtcttctctttgtagtccagcagcatctgtaagcctgcttagttatgcctttgtttgttgtaagttgtaacttgacctggaatcaaattcatttaagatc

SEQ ID NO: 2597 - DNA, 358 bp, Zea mays
  Clone ID: LIB3116-009-Q1-K1-C3
acgcgttcggatccacctgacgcagatgaccttttggttcagcaggcatgacgtgggaaaggtcattggcggctatcttgctcagggcattctccaacatgaccccttcgaggtcctggaccagaggggagtgggcgagctgctgaagcttgctacatactggggcccgatagctaggcctaacttgaaagtgggcacttgtggataacactgtggagagccttactctgaggccttattcgcgaaagctgggctggattacgtttctcgctcccctttcacggttccgattgctatgctagctgcaactcaagtgcttgtctgaagctgcctcttcattggcaaccggattgcctgc

SEQ ID NO: 2598 - DNA, 408 bp, Zea mays
  Clone ID: LIB3116-009-Q1-K1-C4
cccacgcgtccggcgccctcgcgggcggcgcctttgctctgtacgaggggcaccgtgcgaagaaggacccggcgaacgcgcagaggcacaagatcgaggccggcgtggcaacggcggcggcgctgggcgccggcggctacgcgtaccacgagcaccgcgagcagaaggaggcccactacgagagcaggcagcaggagcacagggtgccgcacgggcacgggcacgggcacggctactcctactactgcgactgaaacgactgatcatcccatcgatcgagatatgcatgcagaactcgatatatatacggcccctagcgccgtacacgtgcgtgcgtgtaagtaaataagagcaaacgtcgtcacgtgtgtgttgctcgatcactactccatcgatctacttatttat

SEQ ID NO: 2599 - DNA, 372 bp, Zea mays
  Clone ID: LIB3116-009-Q1-K1-C5
gagccatcgtggctggcggagcccatggtgaaggcggcgttcgagaagttcggcggcaggatgaaggagatcgaggggttcatcgacgagtgcaacaacaacctgtacctcaagaaccgctgcggcgccgggatcgtgccgtacgagctgctcaagcccttctccaagccgggagtcaccgggaggggcatccccagcagcatctccatctgatccatcctcagcatgcattagtccaattaattaaatcgggggttgtactattattgcatgcagaggctgcttgtcgaataaaacgtactatatgtacgattgtattgtacatgtgtgtcaatgcaacaagaggcacgtttgagactttgagttaatacc

SEQ ID NO: 2600 - DNA, 409 bp, Zea mays
  Clone ID: LIB3116-009-Q1-K1-C7
gaacgacctgacgcagatgacctttgggtacagcagggatgatgtgggaaagttcattcccgtctatcttgctcagggcattctccaacatgaccccttcgaggtcctggaccagaggggagtgggcgagctggtgaagcttgctacagagaggggccgcaaagctaggcctaacttgaaggtgggcatttgtggagaacacggtggagagccttcctctgtggccttcttcgcgaaggctgggctggattacgtttcttgctcccctttcagggttccgattgctaggctagctgcagctcaggtgcttgtctgaggctgccttttcattggcaaccggattgcctgctgctggtggatgtggtgatcaacagtattattacagagccatgctatgtgaaccattact

SEQ ID NO: 2601 - DNA, 312 bp, Zea mays
  Clone ID: LIB3116-009-Q1-K1-C8
acgcaaccacctgactcagaggagccttctgtgctctatacgagatgtaccatgcgagaaaggagcctatgaagctgcggacgctcttcaacatgacccctgcgaggacctggaccagacgtgagtgccccagctactcatactagcgacacacaggagcacaagaggtacactacaagagcaggcgggcagatcacaagatgccggacgagcacctgcacatgcacgggtactcctactactgggactgaaacaactgatcatcccatcgatcgagatatgcatgcataactcgatatatataccagccct

SEQ ID NO: 2602 - DNA, 167 bp, Zea mays
  Clone ID: LIB3116-009-Q1-K1-D1
acgcccacgcgttcgcccacgcgttcgcggacgcgtgggttttaacatataagttcgagaaaacgttaaactgtcgtgcagcttgcattttgttggtcggtaagctagcaggctgctagcccatgacaaacctgtgtgacaaaccaaaaaaaaataaatactgactg

SEQ ID NO: 2603 - DNA, 351 bp, Zea mays
  Clone ID: LIB3116-009-Q1-K1-D10
ccaagaccgaggggctcgtgcgcaggaagctgatgaggctcctgtcgctcgtccccttcggctgccgtgctggacccatcgacgacgcgccgccgcccgtggaccacgccgccgccgcgaggaggcgccggaggaggagggccaacagggccgcccagctgctgggggctgctgcgggtgcgccgcagcagtggcgcccctcgctcggcgacatctgcgaggagtacagcagcagcaccgacgccgtcaaggtcaggaaggcggcgtcctgggacctcgcccgggcgctgccccgcgcgcacggcggcaagcagtaccggcaccttgagggcgcgtcgtccctgccagcgt

SEQ ID NO: 2604 - DNA, 322 bp, Zea mays
  Clone ID: LIB3116-009-Q1-K1-D11
cattgttggacgcgttcccctcctgcacgcaacctcatctcgtcctccagatccaggatggccgtcctccttgagaccttgcctgcccgagtgctctcggtgagctactttgtttcgatttatcaggaaatccgtttgcttcatgttgtgcaggctcatatctgattgctggattcggcaaacccgcgttggatcctgtatcgatctggagaaatcgcgaagtcgtcgtcgttcggttcggagcggatctgaggcgacgatagatggaagcggccggatctctcggtctgcagtcctgctccacctcgatggatgatgtctc

SEQ ID NO: 2605 - DNA, 352 bp, Zea mays
  Clone ID: LIB3116-009-Q1-K1-D12
cccacgcgtacggccgaggccgcaggggaggcggtcgagcaggaggacccctacgggtgggccatcggcggcgccgcggcggccgggcgcgcggactggctggcggcgtaccgcgcccgcgcggcgccggcactggcggggctacgccggaactcggccgacttgtcggctgccgagaccgccgcgttcctccgcgcctgcgggctctgcaaccgccgcctcggacccggccgcgacaccttcatggtccaggggcgacacggcgttctgcagcctcgagtgccggcagcagcacatcacgatcaaggagtggaaggagaagtgcgcgcttggcaacgccgccaacggtgcc

SEQ ID NO: 2606 - DNA, 326 bp, Zea mays
  Clone ID: LIB3116-009-Q1-K1-D2
acgcggacgcgtaggcacgggcaacgtcgtagatgccgtgcgcgacgtgcgctgcggcatgggcgacgtacgcgcgctgcgtagcatggacgacgacgaggggttggcctacgccaagcgcatcgacgagcgctacgacctcgtcatgcagaccaagcagctgggccgactccccgtcgtgcagttcgcctcgcggggtgtcaccacgcccgtcgacgccgcgctcatgatgcagctcggatgcgacagcgtcttccgcggctcgggcatatataagagcggtgacaccgtgcgccgagctcgtgccattgtgcaggcagtcaccc

SEQ ID NO: 2607 - DNA, 390 bp, Zea mays
  Clone ID: LIB3116-009-Q1-K1-D3
gccatggcgtccatgaccggcctctcgcagggcgttctgcccagcaggcgcgccgtcaacagggccaggacggccgtcgtcgtcagggcgtccgccgaggcgcaggcgcaggcgggccgtcgagccgtgctcgggctggtggccactggcatcgtcggcggcgccttgtcgcatgcggtgcacgccgagaccgtcaagaccatcaagatcggagccccgccgacgccctccggtggactccccgggactctgaactctgaccaggcgagggacttcgacctccccttgaaggagcggttctacctgcagccgctgtcgccggcggaggcggtggcgagggtgaagacgtcggcgcaggacatcatcaacctgaagccactcattgacaag

SEQ ID NO: 2608 - DNA, 409 bp, Zea mays
  Clone ID: LIB3116-009-Q1-K1-D4
cccacccagaccaaacccaggcttcccgttccctcgcttttgtccggcggccatggcggaggagcagcagcatcagagatggcaggagggccaccgcctgtgcgccaacaattgcggcttcttcggcagccccgcgacgctggacctctgctccaagtgctaccgcgacctataccagcagcagccagcaggcgcggcggcgggcccctccgctcccaccgcgtcggccttccagcattcctcctcggcagtctccggcgcggcggcggtctctcccgatctcgaacctcccgcgacggcccctgctggcgccaaggcgggcaggtgctccagctgccggaagcgcgtgggcctgacggggttcgcgtgccgctgcggagctaccttctgcggcgtgcaaccgctaccc

SEQ ID NO: 2609 - DNA, 382 bp, Zea mays
  Clone ID: LIB3116-009-Q1-K1-D5
gcagctagctctagcaaagcacttgccatctaccgaccggcgcattccaaacagaccgacgagctagcagagcggcaggcacctaccttctaaaggaacatggcccgcatgcagcagatggcaatggcgacggcagccgcggtggccttggtgctgctggctgcctttacctcggaagcaagcatcaactgcaatcagatggcgtgggccatcgtgctctgcatatcctacactcgcggtcagacattggagccctccatcggctgctgcactggcttctggagcctaaacaacgccatccgaaccaccgactaccgtcaagccgtctgtaactagctcaaaaacgtcgacaccggcgtcagccggcataacgccggcaacg

SEQ ID NO: 2610 - DNA, 401 bp, Zea mays
  Clone ID: LIB3116-009-Q1-K1-D6
cagacgcgtggtcacgggcaacgtcagcgaggccgtgcgcgacgtgcgctgcggactgggcgacgtacgcgcgctgcgtagcatggacgacgacgagggcttcgactacgccaagcgcatcgacgagcgctacgacctcgtcatgcagaccaagcagctgggtcgactcccagtcgtgcagttcgccgcggggggtgtcgccacgcacgtagactccgcactcatgatgcagctcggatgcgacggcgtcttcctcggatcgggcatcttccagagcggagaccccgcgcgccgagcccgcgccatctgtgcaggcagtcacccactacagcgaccacaccatactgggcgacttcagcacggagctcgcagaggccatgggccgtatcagacctgaacga

SEQ ID NO: 2611 - DNA, 405 bp, Zea mays
  Clone ID: LIB3116-009-Q1-K1-D7
cccacgcgtccggacaaagtgaagcgaaagagttttctttgtataagaattaggtctatatcatatctaaatagaagggaaatcaaaaagaagggaagtggggattacattggatgaatccttaaggaagacatatcacaaaagaaataaaggctaaagtaagcgctccttgcctttggtttgagcaaaacagattcttgtttcaccgaggaaaagagagaagttctggataaattgacaatgtcaacttgaattgactaattcagttccgcctattccacattaatgggagtacatttatgtttctgctttacgaatatgatattttttggacatttctaataatagcaagccttattcctattttggtattttggatttcaagacttttagccccggttagtg

SEQ ID NO: 2612 - DNA, 393 bp, Zea mays
  Clone ID: LIB3116-009-Q1-K1-D8
cccacgcgttcgcacaaagtgcagcgaaagagtcttctttgcatacgacttaggtctatatcatatctaaatagaagggacatcaagcacaagggaagtggggatcacattcgatgaatccttaaggaagacatatcacaaaagacataaaggctaaagtaagcgctccttgcctttggtttgagcaaaacagattcttgtttcaccgaggaaaagagagaacttctggataaatcgacaatgtcaactcgacttgactaattcaattccgactatcccacattaatgcgagtacatttacgtatctgctttacgaatatgatatatcttggacatccataataatagcaagtcttattcctatatcggtatttcggatttcaggacttgtag

SEQ ID NO: 2613 - DNA, 347 bp, Zea mays
  Clone ID: LIB3116-009-Q1-K1-D9
cggacgcgtgggctgacgcgttggtggataccggcgggttaacgatttgactaaataaaatgctagcttgctggactatgtaccttgtactacgtgcaaagatctgctgcatcggatgggaccccgagggcatcctgggcgcgccgcatggcggacacatcgcgcgcctcgagttccgccgccgcctcgagagggactccgaggcgcgcgaggccttcgagcgccaggtgcgcgaggagaaggagcggcgccgtagcgagcgcgaggcgcgggtgatcccggacacggacgccggcctcgtcgagttcttcctcgacaccgacgcgcgcgagatcgagatcgagatc

SEQ ID NO: 2614 - DNA, 398 bp, Zea mays
  Clone ID: LIB3116-009-Q1-K1-E1
acgcggacgcgtgggcggacgcgtgggttagcagcttgagagcgactgatactactgcatcacgatccgcatgaactgagggattatgcagcccttctgtaccactgtgggtactatgaagactgcctacactacttatcattgtaccaaactgcaaagtctgggaaatccctaaccaatcgattggagatcttggaggacgaatctgtgaatactctcaaagcgcggttaatgcttattttagcagaggatggctggagcacatgtagacctgtggcaaggtactggaccaagaactctgagccggggtaattagagctggccaacgttgcggctgaagcaaataactacagattgtacatagcattttcaactgtggataatgttgacagtcactt

SEQ ID NO: 2615 - DNA, 352 bp, Zea mays
  Clone ID: LIB3116-009-Q1-K1-E11
gaaactacgatggcatttggcaggtcacttgtcactgacagcaacggcaactacaagggaccgctcacactctcactaaagcaagggtccctattggtgatgcgtgggaacagtgccgacatggcgcgccacgtggtgtgcacgtcgtccaaccggcgcgtgagcatcacgtttgcaagggtgaggccatcgacgccggtggatctgagcccactcccgtcccccaccaaggccttgacgccctggcagccgcagccagccacggcctcccaggtgccggcgcccgcgtgcatgacgcagaagcccccggtcagcggcgccatcatcggttatgccccgaccccgcagaccg

SEQ ID NO: 2616 - DNA, 344 bp, Zea mays
  Clone ID: LIB3116-009-Q1-K1-E12
cagttcgtcgacacgtacggcgcgaacgtcgacggatacagcccaatctacaacgaggatgactggactctcaccggagacgtctacgtcggaggaaccactgggcttatcatctgggccgtcaccctcgatgggatcctcagcggcggcgccctgctcgtgtacaacaccagcgccctgtccgggtaaggatatccaatgcatgcgcttcttgcgattcgtcatgtcaaatcagggtgtctgtctataatctagcctgcatggatgctcaaccttcggcatgtaacaatcatcagtgctactcttcattacataattatgatgctatatatatataccccatc

SEQ ID NO: 2617 - DNA, 282 bp, Zea mays
  Clone ID: LIB3116-009-Q1-K1-E2
acgcccacgcgtgcgcagaaacacaccaagcgatgcagattagcgacagcctaacatcaatggctaccaggatgttctgcaggcttgtgcgtctcgcgcgttttgctagcgcaactaatgcgtctattaatacacattgctaacgtgctacaaggtccattattacacagttcctaccaacagatagttgaatgggcaggaaaaacctagctatgctatcatataggctacaatgctcattttcgcagagcatggttcgaccacctatttaccagtggcaac

SEQ ID NO: 2618 - DNA, 341 bp, Zea mays
  Clone ID: LIB3116-009-Q1-K1-E3
tcgcggacgcgtgggcgagctcgtaggctcaggctctggtttctagacttggtacattacgcgctgaacgctattggctgcttgaaagggaacctctcggtttatgcaggaggagttttctgtgcgctgatctttacgtgtattgcaaatgctgatacttcgagatgagctgatcctagcgagagctaggcatgaagatggaccatcacgtgtacacatgatcagagagcatcggcggcaagtgctattcagtcgtattatcactgctgatgatactagctgggatcatcttacaacgggaatggctagagcctttaggacctgcaacgggagtgctagga

SEQ ID NO: 2619 - DNA, 406 bp, Zea mays
  Clone ID: LIB3116-009-Q1-K1-E4
agaagccgccgcccgcgagccaggacgagccggccagggggaagggcgaggcgaagaggaggaagagcggcaagaagaagaagatcgggaggttcctgtccaggctcgttggcgcggagaggcggctgcacaccggcgacggcggcggctacggcgacggcgcccagctcttgcactccagaaccatgaaggagaagacggcgtgcaaatgggtgttcttctgaatcccctcgtcagatcagatgccagcaccatgctgcacacacacgcgcgcttgagggccggtttactcgatcggtcggtatggagctttttccccccactttaagtactcctgtgcttcaatccgctgcagttagttagcatggtttctctttccgactgtgtacacgagacaagccaaaac

SEQ ID NO: 2620 - DNA, 282 bp, Zea mays
  Clone ID: LIB3116-009-Q1-K1-E5
accacgcgtgcgcggacgcgtgggcttcgttcgttcctcaagtgatcttaatcgtcgagaagttaccagctagcggagatcatcggcaatgtcgaacatggggcaatcacttccaggccggcaaggcgcaagcccagggcgcgtgccatgcagagcgcgcagcgcagtgcgtcagggacggtgccggcgccaccgactgcgccgtgaccgacacctactgagccgctgtcgacagcgcgcatctgcaggagcaccgcgccgacggtaccgttattatgctgt

SEQ ID NO: 2621 - DNA, 396 bp, Zea mays
  Clone ID: LIB3116-009-Q1-K1-E6
cggacgcgtgggccaggcccgacatcctgcccttgcacaacgcacgcacgctccacgtcccaatggctcagactctctccgccgcctccgagctggccaccctgaagcgcccgttcggcaacgacgggttcggcgatggcagcaacaacggcagcgcgaccggcgagaagcccaaggcgcggcggcgggaggcggacccggcggcggcgctggccgcggcgcggcacgagttcggcgagcacggcggcgtgaacatgtccatcgaggcgtcggcgacgttcacggtgatggagccggacacgatgcggcggctgttcgcgggcgagctgggccccgaccgcggcgacatgtacatctacagccggcacttcaacccgacggtgctggcgctggggc

SEQ ID NO: 2622 - DNA, 390 bp, Zea mays
  Clone ID: LIB3116-009-Q1-K1-E7
cggacgcgtgggccaggcccgacatcctgcccttgcacaacgcacgcacgctccacgtccgaatggctcagactctctccggcgcctccgagctggccaccctgaagcgcccgttcggcaacgacgggttcggcgatggcagcaacaacggcagcgcgaccggcgagaagcccaaggcgcggcggcgggaggcggacccggcggcggcgctggccgcggcgcggcacgagttcggcgagcacggcggcgtgaacatgtccatcgaggcgtcggcgacgttcacggcgatggagccggacacgatgcggcggctgttcgcgggcgagctgggcccctaccgcggcgacatgtacatctacagccggcacttcaacccgacggtgctggcgc

SEQ ID NO: 2623 - DNA, 395 bp, Zea mays
  Clone ID: LIB3116-009-Q1-K1-E8
gtctgcctctcaccaaccgcggcttgccaaccttctaattagcctttgacccacccccccgccggccgccgctgcagaccatggagcacgcgtccgccttcctcgcgcgcgcgctcaccactccgcttccggcatccgccgccctcccgcggcgccgcccggctcgcgtggccgtcgccgccgcggcgccggagcgcaggccgccgggcgcggtggcgtccaccaccaactacgtcgtgccgctcgacgcggcgccgtccgggatcacgcgcccgctcgtcgagatcctccgcgacctcaacaagcgcgtcccggacgccatcgtgcggccctcctcccggcgcgccttcgacttcgaccccgtcatcccctggtaccatgccaataggatgctc

SEQ ID NO: 2624 - DNA, 349 bp, Zea mays
  Clone ID: LIB3116-009-Q1-K1-E9
acatgttccaggacgacctggacggcgccgggttcttcggcgggcttccgacgagccgcagtgcccagggtcctagcagcacctcgttgccaccgtcgacgtcgccattgcggccgacgcctcctgcaagaagtaagggtgcgcaaacaccgtcgtcgtttaacggcgctgggaggcggggttcgacggcgaagcggccgaggaccggttgggctggcctggaaccggatctgggcctctctggattctgtttcatggtgagcaagtcgaaggagaggccggcggcatgggcgtgcgacggcggtgacgagaggagcggcagcaagcagaggctgtcaacgagccgcga

SEQ ID NO: 2625 - DNA, 327 bp, Zea mays
  Clone ID: LIB3116-009-Q1-K1-F1
tcgttgagaagtatgaactcacactatgattactttacttacaatgttaacactgtccgtgttgggcatgcgatctctactgtgtgtttgtgctaactgatgtaccattatgaggggaaactgttttcttctaggcttatgagccctatgatgctaaatatgcaattttgttagaatgtgctcataaaggcattttatttagattatcgatagttacttttttcttaattttaaccttatattatatctttctactgaattttattgcctatatatttagttgatttgtcattaatcgttttatatttttatgtttctatgtttttt

SEQ ID NO: 2626 - DNA, 353 bp, Zea mays
  Clone ID: LIB3116-009-Q1-K1-F11
ggcgacgagaagtggcgagccccgagagcgggtttagttagaggctacgggcggtcgggcgcggcggcggcggcggccatgagcagcgggagcgagagcactaccgccagcaggtggcccgagctggccacgctgcgcgcgctggcgcgcgacgccgcggagcagcttcggctgccgcgggccggcacgtcggcgtcggcgtcgtcgccgtggcgcgggcgcgaggaccacctccacggccacggcaagacggccaaggtgatgcacctgctgctctggggacccaagtgaagcggcgagaggccaccgtaccgccgggctctcccgctggcgttgctcgttttgctctgcct

SEQ ID NO: 2627 - DNA, 64 bp, Zea mays
  Clone ID: LIB3116-009-Q1-K1-F12
agagcgcgtacacggaccctggttccagcgcctattgctgcaacatagagcctacaaggtggga

SEQ ID NO: 2628 - DNA, 392 bp, Zea mays
  Clone ID: LIB3116-009-Q1-K1-F2
cttatttggacatcttgtttgggctacaggatttatgttcttaatttcctggcgtggatattggcaggaattaattgagactttagcatgggctcatgaacggacacctttggctaatttaattcgctggagagataagcccgtggctctttccattgtgcaagcaagattggtcggattagcccacttttccgtgggttatatattcacttatgcagctttcttgattgcctcaacatcaggcaagtttggttaatttagttatttttttttgtactgtatcagaacccagttcattactcttgatggagagggaggatccgcctttttagatttttgctatttatttttctatctaggattagaaccatatacttggtaataataggaac

SEQ ID NO: 2629 - DNA, 399 bp, Zea mays
  Clone ID: LIB3116-009-Q1-K1-F3
cccacgcgtccgagatcatggtgcagcgcatgagggaaggacagatccctccgagccaaaaggtctactgtccgtatcccaggtgctcggccttgatgtccttgggggaagtgattcatccgatgcaggagtcctcatcaaggcacacggctgctgatgctgccacgttgaggaagtgcgtgaaatgcagaggctccttctgcctgagctgtaaagtcccatggcatgatggcatgggttgctttgagtacaagatgtggtaccccctcgctcacccaggagatgccaagctgcagaacctggcaaggcagaggctgtggcgccaatgcgtgaaatgcaagcacatgatcgagcttgcggagggctgctaccacatgatctgcgtgcggctatgagttc

SEQ ID NO: 2630 - DNA, 402 bp, Zea mays
  unsure at all n locations
  Clone ID: LIB3116-009-Q1-K1-F5
accgcacacctccctcccgagtcccggccatgggacgcggcagtgacctgcttctgcgtcgtggtcgtcgtccgagcacggggaccgaacgcgagcagtagcagcatcccggagcgcaggagcatggcgatggacgacggcggcgacgacttcaccttcgccgccgcccagccgcctcctagtctagtatctgcaggaggcggcggtttcataggcccgccgctgctgtacccagtcttcggccggccgagatcccctccgcgggctgctccggagacggccaccgcgcgggtgccgctaggacggttcctgctggtggacagggatccgtcgcagncgccgncgnctgctcccgcggacgacgacgacggcgacctcgactcggtgcccggcggagatgtt

SEQ ID NO: 2631 - DNA, 384 bp, Zea mays
  Clone ID: LIB3116-009-Q1-K1-F6
ggagaaggtaccgcagccgcacaggcacagctcctgcggcatggcgcagtggagcagcgtggccgcgagcctggaccggtggattgggcttgggcttgggccatgccgctgcggctcaccgccggcaccgtcccgggcggcgatgccacggcgcgggcgtgcgaggaggaacggcggcaaggtcgtcggatgcgcgtccgtcccgcgggagcaggccgagctgccgccgcttgccgtcgacggcaccgaggaagaaggcgtaggcgggtgcggagcgtgcggcggcgcggggtgggtgctctgcgacttctgccagggcaagaagaacaacgtcaagtcggagaccggcagccgggtgtaccgtcgctgccccacctgcaaggc

SEQ ID NO: 2632 - DNA, 202 bp, Zea mays
  Clone ID: LIB3116-009-Q1-K1-F7
gcgggtgcaggttcgttacaaggtaaatgtcaattggacgggcgatgtgcccttggacagccctctgtgtgcatcaggtgcgccggtgcgctggcgactggttctgaacgaagtgaatcagtgcgctctgagactgctgatctggacgtgttaccatacgtgttggatctcgaatgaggaccgcagcatggtttgagctatt

SEQ ID NO: 2633 - DNA, 407 bp, Zea mays
  Clone ID: LIB3116-009-Q1-K1-F8
cgacttgtttcattgattcttgaagagatcgagcttcttttgcaccacaaggtcgaggatgtcttgcaactgcggatcaagctgcggctgcggctcaagctgcaagtgcggcaagaagtaccctgacctggaggagacgagcaccgccgcgcaggccaccgtcgtcctcggcgtggccccggagaagaaggccgcgcccgagttcgtcgaggccgcggcggagtccggcgaggccgcccacggctgcagctgcggtggcaactgcaagtgcgacccctgcaactgctgatcacatcgatcgacgaccatggatatgattattatctatctagcttgtggtggtggttgaacaataataagcgaagccgagctggctgccatacataggtattcgtgtggtgtgtgtg

SEQ ID NO: 2634 - DNA, 348 bp, Zea mays
  Clone ID: LIB3116-009-Q1-K1-F9
cccacgcgtccgcaactgcggcgaggccggccacatcgcccgcgactgccccacgtgaggtgtgtccgcgtccgttcagccagatcagatcggatcgctccaccacctgctggtctgatggcgccgtccccttctagatctcgcttaaaaaaacacccccctctcgctgcgtgtcggcgtaccgctttagttttgccgatccgggcacgagtgcccgctgcctctttcctctcatgcgtaagaggaacccgtgcgccgttttcagatttcgttcggtccgtagaagaactctcaagttaagttaagttatcatggtgtgtgcttggtcgttgttcgtcgtcgtcgtta

SEQ ID NO: 2635 - DNA, 394 bp, Zea mays
  Clone ID: LIB3116-009-Q1-K1-G1
acaagttggggctggatcgttccaaagtaaatgtaaatggaggcgcgattgcccttggacaccctctgggtgcaacaggtgcccggtgcgtggctactcttctaaatgaaatgaagcgtcggggcagagactgcagatttggtgttgtcaccatgtgtatcggatctggaatgagggcagtagctgtgttcgagctatgttcggcctggctggaggtatcgaccatcactcgtcactgtaacccgatggtgatcggcgaccgtaacccgatggtgatcggcgaccgtgagcttccatgttattgcgttctaatacttgagatttttattatgactatgtatgagatattgtctcttattagtactgcatgatgagatgtgtcttattatgacta

SEQ ID NO: 2636 - DNA, 348 bp, Zea mays
  Clone ID: LIB3116-009-Q1-K1-G10
accacgcgtacgtgcgctagctgaggacggtacagcggcacagaggtgcgacgtacgactacgaccactcatgcgcgacacatggcatcccagctctccgccgccgtgccccggttccacggcctccggtgctacaccgcgcccaggtccgcggtggcagcgatgccgtccgtgagggtgggcaggacgaggtcgtcgtcggagggcattcgatgcgactacattggctccgccaccaacctgatcatggtgactacgacgacgctgatgctgttcgctgggcgatttgcgctggctccgtccgcgaaccgcacggcgacggacgggctgaagctggaggcgcgcgac

SEQ ID NO: 2637 - DNA, 350 bp, Zea mays
  Clone ID: LIB3116-009-Q1-K1-G11
atcagcaggaattccatctcagatgcagcttggtttgctttctccactttaccttcgaaggctttttgagcgcatgggtgccacttatatcaagttaggccagtttgtagcatctgcgccaactttgatttctgcacaatatgttgaggaattccagaaatgctttgaccaagcaccagctgtaccatatgacgtgattgaatcaatattacgtgaggagctgcagcggccattacatagtgtgtatgaatacattgatcccgtgccaatagcctttgcctcaatagcacaaggtcatggcgctaggttgaagagctctcagaaagatgtggtgattaaagttctaaagc

SEQ ID NO: 2638 - DNA, 397 bp, Zea mays
  Clone ID: LIB3116-009-Q1-K1-G2
gtgaactacatgacgctagagtttgttacagcgttgctgctgcgagtcagccgtaaatcatcacttaacaagatggactcccgcagccttgctgtggaatttgcgcctttgatcatgtggcggcaaggtgacactggcacagatttgcgtaaccacctcaagtttaccctgaaaccgcctccaaaaattgtggatacaacatcaaatgctgccacatgggacctgttagatgaggatgacgaggatgcttcatcccagatccccttagacgatgcttcaccaccagactacagctccattgaggttatccagtgtctgatcgagcatcacaatgccatcttcaccgacgcaaatgaaaccgtgtggagatgatcggcatctcctctagatctctctg

SEQ ID NO: 2639 - DNA, 377 bp, Zea mays
  Clone ID: LIB3116-009-Q1-K1-G3
gtgtcgtgtagtgtgtagtcgcagcagctagcgcccggccggccagtcgagtgagtccatcctccatcgccatccaatggccgccaccgccctgagcatgagcatcctccgcgcgccgccgccctgcttctcgtccccactcaggctcagggtcgcggttgccaagccgctggcggcccccatgcggcgccagctgctgcgcgcgcaggccacctacaacgtgaagctgatcacgccggagggggaggtggagctgcaggtgcccgacgacgtctacatcctggacttcgccgaggaggaaggcatcgacctgcccttctcctgccgtgcggggtcctgctcctcctgcgccggcaaggtcgtctctggctccgtcg

SEQ ID NO: 2640 - DNA, 319 bp, Zea mays
  Clone ID: LIB3116-009-Q1-K1-G4
acgcggacgcgtgggcggacgcgtggggcatcgactgctctagaaagtgttcagctagaccgcaaatctcggaatctgccaacatcttggaggcattcaggggatggcgccgagtaacaacaaggctttggagctggttgcttgacttgaccctgtatcatgtaatttgtatgccaatcatttgcagtgatacgatgcttggattgctgttatcttagagaagtggtaaactggttatgcgtgtttgtcttgtaacgaacaaaacaactttagtgttagtttcatgttgcaattttcaaagctctcatgttggaactgc

SEQ ID NO: 2641 - DNA, 88 bp, Zea mays
  Clone ID: LIB3116-009-Q1-K1-G5
gcggctacacgtaatgtaccatagcgatcgcgtttagacgcgctattgcctttgcacgctcggtgggtgtaacaggtgcattgtgcgt

SEQ ID NO: 2642 - DNA, 394 bp, Zea mays
  Clone ID: LIB3116-009-Q1-K1-G6
acgctgacgcgtgggagggccgcgacgccatggcccgcgtgtgccgcgccgacacgcgcagctccaggaccttcacgggcgccggggcggttggttgcatggtttacgagtaataacaagtctttgtagtttgtttgttgacttgaccctgtattatgtaatttgtatggcaattatttttagtgatactatgctttgattgctgttattttatataaatggttaactttgttattcgtgtttgtctttgtactaacaaaacaactttagtgttagttttatgttgtaattttttaagctatcatgtttgaactgtttaataaaaataattatttttttttatttttatttttattattattttttttttatttaataaatggttgttcttttt

SEQ ID NO: 2643 - DNA, 400 bp, Zea mays
  Clone ID: LIB3116-009-Q1-K1-G7
atcctcgctctctccaggcaaaagctccctcacctgcctggcacctcgatcgagggcgtggagaagggcgggtacaccatctccgacaactcgactggcaacaagcctgacctcattgtgatgggcaccggctccgagctggagatcgcggccaaggccgccgacgagctgaggaaggagggcaagacggtccgcgtcgtctcgttcgtctcctgggaactctttgatgagcagtcggatgagtacaaggagagcgtcctccctgctgccgtcacagcgaggatcagcattgaggctgggtccactcttggctggcagaagtacgtcggagcccagggcaaggccattggcatcgacaagttcggcgcgagtgctcctgccgggacgatctacaaggagt

SEQ ID NO: 2644 - DNA, 359 bp, Zea mays
  Clone ID: LIB3116-009-Q1-K1-G8
ctgcgacactacttcagacgtaccagtagctccattaaggttcgacatggccacgctcgtcaggcaccttatcctgagctcctactcatcatcgcaatgccgccggcgcacaatgacgctcgacaccatcgtggtagactagaccatgaatcatgtaatgcgcatgccaatcattcgcagagataccatgctctgattgctgtcatcttagagaagttgtcaactgcttatgcgttgttgtcttgtaacgaacaaaacaactttagtgttaggttcatgttgcaattttcaaagctctgatgttggaactgcaaaaaaaaaaaaccaagccgagctggggaaacaattactacgagcgc

SEQ ID NO: 2645 - DNA, 366 bp, Zea mays
  Clone ID: LIB3116-009-Q1-K1-H1
attcggaattcgagggcacgcgtacgcgtccgatcctcgctctctccaggcaaaagctccctcacctgcctggcacctcgatcgagggcgtggagaagggcgggtacaccatctccgacaactcgactggcaacaagcctgacctcattgtgatgggcaccggctccgagctggagatcgcggccaaggccgtcgacgagctgaggaaggagggcaagacggtccgcgtcgtctcgttcgtctcctgggaactctttgatgagcagtcggatgagtacaaggagagcgtcctccctgctgtcgtcacagcgaggatcagcattgatgctgggtccactcttggctggcagaagtacgtcggaaccc

SEQ ID NO: 2646 - DNA, 357 bp, Zea mays
  Clone ID: LIB3116-009-Q1-K1-H10
gcatctcgacctcaccggcgtccggcggtggtatcacgatggtggcgttgctgggccggcggatcggggtggctgcggcagctgccgcgttcatcgccctcgtggcgttcggatccgcctcatcctcgcccaagtccttcgtgaagtccaccgtctccgcccacgacgtcgtcatcttctccaagtcatactgcccgtactgcaaaagagcaaaggccgtgtttaaggagcttgagttgaagaaagagccatatgttgtggagcttgatcagcgagaggatggctcagagattcaggatgccttacttgagatagttggcaggcgtactgtccctcaagtttttgtccatggaaagc

SEQ ID NO: 2647 - DNA, 331 bp, Zea mays
  Clone ID: LIB3116-009-Q1-K1-H11
ctgtcgagtactgtcacgctcagctacagcattgggtgtctgcacgatggcgatctcctacacggcgatcgtcggcacccacggaaggtggcctccttcggcgagggccgcatcacgcatgcgcaagaccgtgggcaagcccaatgtggcggcgtgcggcagccgctgatacggtcccgaccgcgtcaagtacctaggacccttatacggcgagcccctgagctacctaaccggagagttaccaggatactacggatgggacaccgccgggctgtccgcccaccccgagaccttcggcaagaaccgagagctggaagtgatccactcccga

SEQ ID NO: 2648 - DNA, 339 bp, Zea mays
  Clone ID: LIB3116-009-Q1-K1-H12
cccacgcgtccgcggacgcgtgggtctatccacaacagttgttactgctcaccaattgtttttggtttgtagtttcaaatgcagcttcttagtttagaagaagtttaacaataggcaacgctaacaatcacctaccctgaataacttggtttgagaattgagacggcagccctttttgtcactcgaacctttttagtctgtatacctgaaatggcatttcacataaatcctatttcctccaagggcgtctgcgtggtcctatgctaacacaattattgctctagagcctggagagatgaaatccaagcaactggagtctttagtggagactgagactga

SEQ ID NO: 2649 - DNA, 198 bp, Zea mays
  Clone ID: LIB3116-009-Q1-K1-H4
cggacgcgtgggcttgaatcttttgacttgggtaatggagggtccaaaactacagcaaagaagaaagaggcgtcccacaagcaccacaagaagccccagcggaagaaggatcggtcctggagggttggcaatgatggtggcgacggaacagcagttgtaagagtgtaccagaaacccgcagttaatttgtccacggtc

SEQ ID NO: 2650 - DNA, 371 bp, Zea mays
  Clone ID: LIB3116-009-Q1-K1-H5
ctcccctccgtcaccccaccacattcggcctgcccaacgaaaatgtcgcgcgccacagcggcggtcctcttctacatcctcggcgtcgctgccctcagcgcggccgaggcaccggcagagtcaccgaaggcaggcagtcctgccaaggcaccggccgagtcaccgaatgcaggcagtcctgcagctcctgccaaggcacccgagtctgctgccacgagaactgcccccgctaaggcacctcatgccgtcttcacccccgccgctgtcgctgccccatcgtcgtcgtcgtctaggaagtctggtccagctgccgtgccgaccaccgtcgcctctacactcgtcttctttcacggacgatgacgtgagccctt

SEQ ID NO: 2651 - DNA, 376 bp, Zea mays
  Clone ID: LIB3116-007-Q1-K1-D9
cggacgcgtgggcggacgcgtgggcggacgcgtggggtgaggttctccggggttcggtttcgtgggtgagcggatcgagatggcggcgtcggatgttgagtaccgctgcttcgtcggcggcctcgcctgggccacggacgaccactccctccacaacgccttcagcacctacggcgaggtcctcgagtccaagatcatcctcgatcgggagacgcagaggtcccgcggcttcggcttcgtcaccttctccacggaggaggcgatgcggaacgccatcgagggcatgaacggcaaggagctggacggccgcaacatcaccgtcaacgaggcccagtcccgcggcggccgtggaagcggccgccgtgggtacggtggt

SEQ ID NO: 2652 - DNA, 317 bp, Zea mays
  Clone ID: LIB3116-004-Q1-K2-E3
actagttctagggtcgactacgagaagaatgtatgaagcaccacaagcacatggagaagctcggcgagctcggcgccatcgccgccggcgcgtacgccctgcacgagaagcacaaggccaagaaggacccagagaacgagcacgggcaccgggtcaaggaggaggtggccgccgtcgccgtcgtgggctcctgcggctttgctttccacgagcaccatgagatgaaggactcctagaagcacgcccactactgattcgatttatggtagttgttcatttgtttctttcagcctgtgttttttttatttgttgccggt

SEQ ID NO: 2653 - DNA, 289 bp, Zea mays
  Clone ID: LIB3116-004-Q1-K2-E4
tggacgcgtgggcggacgcgtgggcggactctttgtctgacgcgtgggctgcactctagtggacttacgttgaaaatgcattcgcagaggtgttaactcacatctaccgtattgtgagcaagagagcatttgaagcatgcgaagatgcagcatctgggcctggcaagggcgagaagatttacatataggatgattgttcggtggtgaagaatggtggctgctgctctagctgagctgtcctgctgtattttttggagtagtggtgatgtatcctatggtacggtatttt

SEQ ID NO: 2654 - DNA, 283 bp, Zea mays
  Clone ID: LIB3116-004-Q1-K2-E5
cggacgcgtgggcatgggcctacgccaccaacttcgtccccggcaactaagctcaacggctatgctatgcaacttcattgtctttcggatcggagagggtgtacgtacgtggattgattgatgctgcgagatgcatgtgtgtcttttgtttcacgttgcattgcataggctaagtcgagatgttgttgttggttgttgtacactttatatgtacttatttttgttgctattgttgtatttttttatttttgttttgttattattatttatttgttttattttt

SEQ ID NO: 2655 - DNA, 274 bp, Zea mays
  Clone ID: LIB3116-004-Q1-K2-E7
ggagactcactcactcgggagtcgggtccttctcgactcagctcctccacaaacaaagccaccaccatcccaacccaaacacatcggccgaccacgggcgccgccatgtccaccgctgacgcggcgagcccggccctggcgccggactgggacgcgccggcgggcgaaggcctggccctggcccagttcgccgcgggctgcttctggagcgtggagctggtgtaccagcgcctcccaggcgtggcgcgcacggaggtggggtactcgcagggcc

SEQ ID NO: 2656 - DNA, 431 bp, Zea mays
  Clone ID: LIB3116-004-Q1-K2-E8
cgccgccggttcatctgccgccgccaccatgccactaccctactcaaccgccccggcctcagcctcatccccagccacacccatgcccgtgccaacagccgcatccaagcccgtgccagctgcagggaacctgcggcgttggcagcaccccgatcctgggccagtgcgtcgagttcctgaggcatcagtgcagcccgacggcgacgccctactgctcgcctcagtgccagtcgttgcggcagcagtgttgccagcagctcaggcaggtggagccgcagcaccggtaccaggcgatcttcggcttggtcctccagtccatcctgcagcagcagccgcaaagcggccaggtcgcggggctgttggcggcgcatatagcgcagcaactgacggcgatgtgcgggctgcagcagccgactccatgcccctacgct

SEQ ID NO: 2657 - DNA, 350 bp, Zea mays
  Clone ID: LIB3116-004-Q1-K2-F4
cggacgcgtgggcggacgcgtgggcggacgcgtgggcggacgcgtgggctgcactcgagtcgactaacgttgaaaatgcattcgcagaggtgttaactcagatctaccgtattgtgagcaagagagcagttgaagcaggcgaagatgcagcatctgggcctggcaagggcgagaagattaacataaaggatgatgtttcggcggtgaagaagggtggctgctgctctagctgagctgccctgctgtattttttggagttgtggtgatgtagcttatggtacggcatttccagcgaccgagaactggtagtggcattagcagcttctatgttacctagagagtttattgtc

SEQ ID NO: 2658 - DNA, 392 bp, Zea mays
  unsure at all n locations
  Clone ID: LIB3116-004-Q1-K2-F5
gaaaacctttccttctttgggactatactgtcagtctccagtggcggtacaacaaacaaagtgaaatgtgcaaattgcagtaccgagctggaatatgactcaaaatctcgggtgatcacacttccagaagcatcaaatgcataaacataggtgactctacatttacgccagtaactataaatggatgctctttggtctatattccaaatgtgggagacatcacaccagctttgaagtattgcccgtctccattgtgaacactctgcagcatatgtagcagataaatgagtgaaactatntgtactgcctgctctgcanattagtatgaacacccctcaaaaagatttggcccacactctggtctctctgtttgcagctgggaacagggagct

SEQ ID NO: 2659 - DNA, 221 bp, Zea mays
  Clone ID: LIB3116-004-Q1-K2-F6
acctcgccggccacactcgtctttctcacgagccacagcccacaggcacaggcaggctctggagctcagtccacccatcgcaggggatggcgtcgtcgctcgccgtggcaacggtcccgtctctggcaggcctggcatgcataaacctgtgcggcggcacctcgtccctagtggctatgaacggctgctgtttgctctatgggctaaacgtggtggacatg

SEQ ID NO: 2660 - DNA, 374 bp, Zea mays
  Clone ID: LIB3116-004-Q1-K2-F7
cccacgcgtccgcccacgcgtccggaccaacaccactccactccctccatttccctcacctcccgcagcagctagccgccgccagccaacaaccgaaccaaccaaccaacccacagcgagcgaggaaagcgtccaatggtagcgatggcggccgtgcagcagcagcgccgcgacgcggaggcggagctcaacctgcccccgggcttccggttccacccgacggacgaggagctggtggcgcactacctctgcgcgcgcgccgcggggcgccgcccgccggtgtccatcatcgccgaggtcgacctgtaccgcttcgacccgtgggacctgccggagcgcgccctcttcgggcgccgcgagtggtacttcttcac

SEQ ID NO: 2661 - DNA, 223 bp, Zea mays
  Clone ID: LIB3116-004-Q1-K2-G5
cgaagagcagcccaggacgacaggtctgttcttccataccgaggtggtaccgtcaccgccaaggcgagtacgataggtcgagatggaggacaaggtgcacatgccatcagcacctcgggaggccggagcatctgccctgcgccttacgactctacgagaagcaccaagcgaagaacgacccctagcacgcgcacagacacacgatcacggatgaggtcactgc

SEQ ID NO: 2662 - DNA, 99 bp, Zea mays
  Clone ID: LIB3116-004-Q1-K2-G6
gagagcacccagcgagattcgattctttcagaccgaatggacaccgtcaccggcgagagcgagtacgataggtacaatatggagatcaaggagcacatg

SEQ ID NO: 2663 - DNA, 438 bp, Zea mays
  Clone ID: LIB3116-004-Q1-K2-G7
caagagctacagcctgccgccgcacgagtgcggctaccccggcagcgtcttcaacccgctcaacttcgcgcccacgctcgaggccaaggagaaggagctcgccaacgggaggctggccatgctggcgttcctggccttcctgatccagcacaacgtcaccggcaaggggcccttcgacaacctgctgcagcacctgtccgacccatggcacaacaccatcatccagaccctgtcgggttgagtcgacggtccatcaggtcatgtggtccgagctgaaaggccgagactcgaagacagttcgtgtgatgcgttcttaatcgactgagggctaaggaatgtgacgtactggtatatgtacattagttgaagcggaggctataaagggtgtagagattgtttcatcagtgtatatcatctgtcccgatgggttttgttttg

SEQ ID NO: 2664 - DNA, 441 bp, Zea mays
  Clone ID: LIB3116-004-Q1-K2-G8
cggacgcgtgggcacggcagaaagatggaccattcgcacatggatcacggcggccacatgggccacgacatgcctggcatgggcggcgacgggcccaagtgcaacatgaacatgttgtttacgtgggacacgaccgacctctgcattgtcttcccctcgtggcatatctcgggcaccggctcactcatcttttcgctactcgccgtagtcctgctcacagctgggtacgaagctatccgagaaatatcaaggcgctatgaggcgtactcaaagggtatcatggagggacccagagacgacgcagatgaatctagctcattacttggcccagggagaaacggaggcgttgggcgtagtgccgagcagcagatgaagatgatcaaggctgtcttgtatgctgtgcaggttttctattcgttcttcatcatgctgcttttcatg

SEQ ID NO: 2665 - DNA, 397 bp, Zea mays
  Clone ID: LIB3116-004-Q1-K2-H1
gccgtgaacgtgtccctggagaacctcaagactctaccccttcgtcaaggaagggcttgcaaatgggaccctcaagctgatcggcgcccactacgactttgtctcaggagagttcctcacatggaaaaagtgaaaaactagggctacggcaattctaccggcccgccgactcctgcatcatcataaatatatatactatactatactactacgtacctaccgatatgcacccgagcaatgttaatgcgtcgagtaccatatatctgatttctgcatctacatatatataccggatcaatcgcctcatgtggatgtaataagcattatcattttctaccacttttcattcctaacgctgagctttttattgactaaatcttatatgatgaaatttttt

SEQ ID NO: 2666 - DNA, 436 bp, Zea mays
  Clone ID: LIB3116-004-Q1-K2-H2
cccacgcgtccgtgtccctcccggagaaccagaaggctacccaccctccaaggcaggggaggggccatggacgaccccgtcgagcgcttgaaggacgggttccacaagttcaagaccgaggtctatgacaagaagccggagctgttcgagcctctcaaggccggccaggcccccaaggaggccgttaacctgtccctggagaacctcaagacctaccccttcgtcaaggatgggctggccaacgggacgctcaagctggtcggcggccactacaacttcgtgtcaggggagttcctcacatgggacaataagcagccatcatgaatctatatatatacactaatgcatcatgtacgttttcagcatgcagctacatacatatatataccggatcacccaatgcaatgtgtgaatgtgtaataagcaataccatata

SEQ ID NO: 2667 - DNA, 304 bp, Zea mays
  Clone ID: LIB3116-004-Q1-K2-H3
cacgcacgcacgtgtacggcgctaggggccgtatatatatcgagttctgcatgcatatctcgatcgatgggatgatcagtcgtttcagtcgcagtagtatgagtagccgtgcccgtgcccgttctcgtgcggcaccctgtgctcctgctgcctgctctcgtagtgggcctccttctgctcgcggtgctcgtggtacgcgtagcctccggagctcagcgtcggcgtcggttgcactccggcctcgatcttttgcctttgcgcgttcgccgtatcctttcttgtacggtgcgcttcttacatgagc

SEQ ID NO: 2668 - DNA, 361 bp, Zea mays
  Clone ID: LIB3116-004-Q1-K2-H4
gtaagatcacttctcgaaaaatcttaaagttattgcgttcggcatgcataactggaacgggggaagcatcagtgggctgggtcatttattaaggatttgtccgtgccgatagcccttggcacgtgtcgggtatattttgtctctttacagtctggacatttatgcacatattcagcatgctagggtatgatgacccacgcaccgttgaataataaaaagaagcctttatcgaccagatgccctcgatcatcttctgcccagccaagatcctgaggctctgggatgacatgggcagcgcagaggtcgtcgttagttcatcgaaccatacactacatatactagcttgttaattaaatgcttt

SEQ ID NO: 2669 - DNA, 436 bp, Zea mays
  Clone ID: LIB3116-004-Q1-K2-H5
cggacgcgtgggtgctgatgaaagctcactgttgaattgtgtcccgaaagaggactttggaggtggtcatccggatcctaaccttacctatgcaaaagagttggttgaacgcatgggtcttggaaagtcatcctcaaatgttgagcctcctgaatttggtgctgcagctgatggagatgctgaccgcaacatgattcttggtaaaagattctttgtgacaccgtcggactctgttgccattatcgcagccaatgctgttcaatcaattccttactttgcttctggcctgaagggagttgccaggagcatgccaacatctgctgcccttgatgttgttgcaaagaatatgaaccttaagttctttgaggagcctactggatggaagttttttgggaatttgatggatgctggaatgtgctcaatctgtggagaagaa

SEQ ID NO: 2670 - DNA, 232 bp, Zea mays
  Clone ID: LIB3116-004-Q1-K2-H6
ggaagatcactccaagaaaattcaaaaagtgaatgtttttgtgtctacaaaactatgatattggatgcttttgtaatcttaattaattagaacggaggcatttggatgatattttggcatatgtatggattgttgacattaaacttgttattgtgcttgctgttatgcttctgtatgggattattgacatttggatgacatttgggcttaatatttaaatcaaacttgctat

SEQ ID NO: 2671 - DNA, 443 bp, Zea mays
  unsure at all n locations
  Clone ID: LIB3116-004-Q1-K2-H8
catggatctaaccctgtcaatcgtcttaggaaagcatgggcggtgttgttcgacggtttcatggttgaggcgagatggctagcgaccgaccaagtccctacggcggaggactacctacgaaacggcgtcatcacatcaggagtgccgctcacatttatgcacatattcagcatgctagggtatgatgacccaagcaccgaggaagaagaagaagaagcgatcatcgaccacatgccctcaatcatctcctgcccagccaagatcctcaggctctgggatgacatgggcagcgcagaggtcgtcgttagttcatcgaaccatacactacatatactagcttgttaattaaatgcttttacctttaaattttgcaatccaatcgtacttgatgtgtgcatgggctttgcaggatgaggctcangaaggattcgatgggtcgtaca

SEQ ID NO: 2672 - DNA, 264 bp, Zea mays
  Clone ID: LIB3116-005-Q1-K1-A3
caccggcgaccaagcgcccggggagacgtggcacatggtcttcagcacagaaggcgaggtcccctacagagagggccagtccatcggcgtcatcgcggatggcgaggacaagaacggcaagccgcacaagctcaggctctactccatcgccagcagcgccctcggagatttcggcgactccaagacggtgtcgctgtgcgtgaagaggctggtctacaccaacgattagggggagggtcgtaaaagagtctggtcgaactttct

SEQ ID NO: 2673 - DNA, 461 bp, Zea mays
  unsure at all n locations
  Clone ID: LIB3116-005-Q1-K1-A6
gcattctcgaattccgattcccaatccagcaaaccctaccagccttttgcaaactcagagagggacccgatggcacccaaggcggagaagaagccggcggcgaagaagcccgcagaggaggagcccgcggccccggcggagaaggctcccgctgggaagaagccgaaggcggagaagcggctcccggcgggaaaatccgccggcaaggaaggcggtgttgacaagaaggggcggaagaaggccaagaagagcgtggagacgtacaagatctacatcttcaaggtgctgaagcaggtgcacccggacatcggcatctcctccaaggccatgtccatcatgaactccttcatcaacgacatcttcgagaagctcgccggcgaggcggccaagctcgcccgttacaacaagaagcccaccatcacctcccgggagatccagacctccgtccgnctcgttctacc

SEQ ID NO: 2674 - DNA, 307 bp, Zea mays
  Clone ID: LIB3116-005-Q1-K1-A8
acgcaccggcgaccaagcgcccggggagacgtggcacatggtcttcagcacagaaggcgaggtcctctacagagagggccagtccatccgcgtcatcgcggatggcgaggacatgaacggcaagccgcacaagctcaggctgtactccatcttcagcagcgccatcggagatatccgcgactgcaacacggtgtcgctgtgcgtgaacaggctggtctacaccaacgatcagggagaggtcaacggcacgagcctgctggaacttcctcagtgactcgaagccagacgctgaagtgaagatcacatg

SEQ ID NO: 2675 - DNA, 295 bp, Zea mays
  Clone ID: LIB3116-005-Q1-K1-B1
ccaaaatagatccccatgggttccataatgtttggtcccttttgagcagtttgccgaacccgccatttgaaggcggctttcaacgttccttgcctttaccggcccattcttcttaatggtaggtttaaacttaactttggctgctttggaccctggattctcacgtcaagcgttgtaccacataatgatggagatacagaggtgcactttcttgaacacttcttacgtgcaatcattagcattgacagtatagtcttacactaacttatactgcacgatcacctgatgagataca

SEQ ID NO: 2676 - DNA, 350 bp, Zea mays
  Clone ID: LIB3116-005-Q1-K1-B2
aaaggcagtacactcagctatccagcaaaagagatcgagacgcaggagtcatggccaccgtcagcgccgtcgtggtgaccaccatcgttgcccgcgccgcgatcgccatgcccaatgctctatggctgcctgcgctgagggcgaggagcgagagggtgcggtgcagctacgccaaggacgcggccccagtcagcaccaagggcgcaagcgcgttgctgctcgacgcagctgtcgcggtgaccgcgtctgcggagcccgcgctggcgctcgtggactagcgcatgttcacggagggcaccgggctgagcctcgggctcagcaacaacctgctggggtggatccttctgggg

SEQ ID NO: 2677 - DNA, 272 bp, Zea mays
  Clone ID: LIB3116-005-Q1-K1-B3
ccttccgaattaccgactcgacccaacgcaccagtcgcttctcaaccaggccctaagtatttcatccgagggacctgctctcgctcgggggcactaacctcgaggtcaacaagcacgctcgcctgtgctgtcacgtcatcctcactccggagctgtattgcatggtcgtctctgtcccccaacctaatacccgggaaattccctaatggccttcctcgaccaatgtcaaagtgcggcttttgactctgtgagccttcctttatttccctgtc

SEQ ID NO: 2678 - DNA, 271 bp, Zea mays
  Clone ID: LIB3116-005-Q1-K1-B4
cgtgagcatgccaaattcagattaggcttgctttgcctttgtcccctctttttgtatcctggggacgcggatcttgtgagtatggccaaagaaatgtttactactttagcagtgttggaaacgcgtgacatcactggttacgagtagttttagccgtcttctgtctagcggtgtggccggtagtggcagcatgcgtctgcagagaacatatctggtacacataaaagtttagtgcacatgatttatatattaaattatcactatctatttt

SEQ ID NO: 2679 - DNA, 353 bp, Zea mays
  Clone ID: LIB3116-005-Q1-K1-B5
cacgcacggaggacaagcctcagccggcacctgagggccgccttcctgatgccaccaagggttctgaccacctgacgcaagtctttggcaagcatatgcttttgagtcatcacgacatcgttgccctctctggtggccacaccttgctaaggtgccacaaagagcagtctgcttatgagggtgcctgtactacgaaccctttgggctttgactactcttacttcaagggacttatgaccggtgacaagcagggccttattcagctcccaagtgacaaatccctgctgagcgaccctgtctttcgtcctctcgtggagaaatatgctgcagatgacaaagcattctttgatgac

SEQ ID NO: 2680 - DNA, 461 bp, Zea mays
  Clone ID: LIB3116-005-Q1-K1-B6
agaaagtggaatccagtagcaacaatagagcaacaatggagaccaagatattttccctccttatgctccttgctctttctacatgtgttgctaacgcgacaattttccctcaatgctcacaagctcctatagcttccctttttcccccataccttccatcaattatagcttcagtatgtgaaaacccagctcttcaaccatataggcttcaacaagcaatcgcagcaagcaacatacctttatcgcccttgttgtgtcaacaatcgccagccctatctttggtgcagtcattggtacaaaccatcagggcacaacagctgcagcaactcgtgctacctgtgatcaaccaagtagctctggcaaacctttctccctactctccgcaacaacaatttcttccattcaaccaactgtctacactgaaccctgctgcttatttgcagcaacaactattaccattt

SEQ ID NO: 2681 - DNA, 433 bp, Zea mays
  Clone ID: LIB3116-005-Q1-K1-B7
gcaggagtggatcgacaagctgcctccaccgtactactaggagcggtacttgctcacgcgcgcgtccaggaaccgtgagctcaacaagctcgcgcgcctgggctgccaggtcgttcttacgccggagctgcatggcatggtcggcgctgtgcccgagcctaagccgagggacattccgtaatggcctgtcatgacgaatggcaaggtgcagctttcgacgctgtgagccttgcttcattcccctggctcggtcaagcttgtgcgcctctgccatacccttttatgttacggatttgatgaagaataatagcttgatgggaaaaacctggcattggttaacttttgtcttttgaatgtggagtgtaatggatgcctgtatgtggaattcccttggaattaccgcagttcaatgtttcatggggttgagttttgt

SEQ ID NO: 2682 - DNA, 267 bp, Zea mays
  Clone ID: LIB3116-005-Q1-K1-B8
catacgcgtgttcgactaggccagatttaatgtccgccgattgttctgtgctagggggcacgcgcatcgactgtgatgggtcagactgaactgttaagcctggtcgccatcgttcgtacgtgcgttcgatgcttggcgctgttgatcgctccgtatcatccaactgatggtggtgtatctagaccgatggcttaatgattagagtacataaacaactaacggtgcatggcccatgacttacttatcttaatggagtcatcgattatg

SEQ ID NO: 2683 - DNA, 295 bp, Zea mays
  Clone ID: LIB3116-005-Q1-K1-C1
gcgtcgcgcaggagtggctcgacaagctgccgatcaccgtttacgaggagcggtgcgtgctcacgcgcggggtcagaaaccgcgagcgcaacaagcacgcgcgcctgggctgccaactcgagctcacgccggagctgcatggcatggtcgtcgctgtccccgagcctaagccgtgggacatgccgtaatgggctgccacaacgaatggcaaggtgcggctttcgacactgtgagccattcttcattgccctgggtccggcaaacttgtgcgcctctgccatacccctttatgcta

SEQ ID NO: 2684 - DNA, 451 bp, Zea mays
  Clone ID: LIB3116-005-Q1-K1-C2
cggacgcgtgggttctgctgaagattctggtgtgccggtgtctgagatggacaaatgcaacgagatgccgaaggatgctccgacacttacagcagcaggtgcaaatcctgctgaagacgaagcttccctgaaagacctctctgtgcagacagagaacaaggcttcttctgcctccccagctcctgatgatccgaaggccagcgacgagaagacgctggcagaagagaaccagaagctgaaagagcttctgcaaaagcttctggcgtccggcaacgatcagatgggggtcatcacggacctaagtgagaaggtcaaggtgctggagcggaggctggcacgcaagaagagaccaaaggtgaaggtgcacaagccatccaggcatgcttcctgtgtccactgaaaggataagtctgtagggtttgagggtttatcgtgtatggatcctcatgtt

SEQ ID NO: 2685 - DNA, 258 bp, Zea mays
  Clone ID: LIB3116-005-Q1-K1-C3
attccagttcgaggccacgcgtacgcgcaggcggacgcttctgccgtacttgcggatgtcccttcatcacccggcatgctaccgcccgtaccagagatacatgtgtactgatcatggttaagcacgtactccgatccattcccatcccatgaagccatgataatgatgatatgatccatggaccatgcatggtgctctggtcgatgccgtacgtgtgtccctgatacaatactattgtagtactgatgacccataaaa

SEQ ID NO: 2686 - DNA, 448 bp, Zea mays
  Clone ID: LIB3116-005-Q1-K1-C4
cacaagatcgaggagaagctccacatggggggcgaccacaagaaggaggatgagcaccacaagaaggccgaggagcaccacacgaaggaggagggggagcaccacaagaaggacggcggggagcataaggaaggcatcgcggagaagatcaaggacaagatcaccggcgagcacggcgacaagtccggcgaccacaaggaaaagaaggacaagaaaaagaagaaggagaagaagaagcacggcgagggccacgaccacgacggcggccacagtagcagcagcagcgacagcgactgagatctggtgtcgcagcacaggtgcaacacaagtatgcttgctggatggaggattcataccagctgatgctgatgtagtgtttcactggtgtcatgcatgcatgtatcgtgctattataatcaaaaagaaaaaagaaataacagtcagggat

SEQ ID NO: 2687 - DNA, 334 bp, Zea mays
  Clone ID: LIB3116-005-Q1-K1-C5
agcagccgtccggtgctccctctctgcagatctcccttcgcagccgccgaggaaccccttcacagcgcggaagatggctgaacaggaggccccagtcgtggttgaggcaccaaccccagttcttggggagcctatggacttgatgactgctctgcagctcgtgatgaagaagtcaagtgctcatgacggacttgtgaagggtctccgtgaggctgtcaaggccatcgagaagcacgccgctcagctttgcgtgcttgctgaggactgtgaccagccagattacgtcaagctggtgaaggcactctgcgctgagcacaatgttcacctggtcact

SEQ ID NO: 2688 - DNA, 224 bp, Zea mays
  Clone ID: LIB3116-005-Q1-K1-C6
acgatcacggataggctcctcatctggtgatacttcatgattgcagacgtgcgctccaggatgggcgcggagctcatcacgagatacgcgtaggagctccccatgacggacaacgtgatgcacattgtatgcatagagtgtacgatccagtgctatatcacctttgagcactgctacacgtaccacgactacttcgtgtatacgtacattaattcgacgacggg

SEQ ID NO: 2689 - DNA, 158 bp, Zea mays
  Clone ID: LIB3116-005-Q1-K1-C7
gcgagcagccggtcggtgctccctctctgcagatttcccttcgcagtcgccgaggaaccccttgggagggcggaagatggctgaacagttggccccagtcgtggttgaggcaccaacccctatttttggggtgcctatggtcctgatgactgctctgc

SEQ ID NO: 2690 - DNA, 206 bp, Zea mays
  Clone ID: LIB3116-005-Q1-K1-C8
gcacgtaccggtactaattcggggacgacgtacgccaacattacgcgaagctcacatgtggggtcgcttcaagatggaggatgagcaccacaggaagggcgatgagcgcctcatgatcgtggtgggggagctccacaagaaggtctccgtggagcatattgatggcatctcgtagaagatcaagggcacgatcaccggtgagcact

SEQ ID NO: 2691 - DNA, 444 bp, Zea mays
  Clone ID: LIB3116-005-Q1-K1-D1
atgctcgtcaccgtaacttggaggctaacgttcttgttctgaatgcaaactgtgaccttgggatatgtgattgtgggctagctcgtaccacctcagacactgattttatcactgaatatgtcgacacaagatggcttacagcaccacatcttgagatgaactcctcagaatatactgctgccatcgatgtgtggtctgagatctgaatatttatcgaactgatggaccgtaaacccttgtttcctggaagagaccatgtacatcacctacggcatctaatgtagctgattgacacacctaatgagggtgatcttgaatctgtaaatgaaaatgcaagaagatatatccgccaacttcctcgtcaccctagacagtccttacctgaaaaatttccacatgtacaacccttaacaattgacctggtggaaaagatgctgacttttg

SEQ ID NO: 2692 - DNA, 427 bp, Zea mays
  unsure at all n locations
  Clone ID: LIB3116-005-Q1-K1-D2
cccacgcgtccgcacacagcaatccacacaagcacttcgacgtcacacgggcgctgcgcacagacacaccaagcgtcggcaccaatggcttactaccaggaggtggactactgctcggaggaggtgaggtcggtggccccggccggcttcggccgccacggcggcggcgtccagcagcacgtcgtcaaggagaagttcgaggaggtcgacacggtctcacgcgccggcgccaaccaccaccaccaccatggtcaccacggcggccacggcttcgtggtgcgcgagaccagggtcgaagaggacatcaacacctgcaccggcgaggtccacgagcgcatggagagcttcctcgccagggctaactgagccgnccggcggccggcatccacgcccgttcgtgcttgcctgcgtgccttatgtatgtctg

SEQ ID NO: 2693 - DNA, 397 bp, Zea mays
  Clone ID: LIB3116-005-Q1-K1-D3
agataccgtcttacttttcccttgtaattcgaagccttgctgttttagaaggtatcgcaatcagcttcaatccaaagtataaagttctggggagttcatatccatggattgcaagaaaagttctcactgacagttcgctaaagcttcgatcaactttgcagactcttctttataaggatggcactttccaaattgatcgcctggaatctttgttaactgagtcacttcgtgcaagaacagagcaatcattggtcagaaatgaacaagatgtcgacagtacgagatatgcaattaagcaagccttgtcattcacactcgctgaccagggtgcctttgtgaaggacttacttcttcaggagattgctaagggaatagatgcacttggtgtagccacatt

SEQ ID NO: 2694 - DNA, 341 bp, Zea mays
  Clone ID: LIB3116-005-Q1-K1-D4
gtaaccgtggtatatcgagtgatacttaaaggaactgatggagaggcatatagagatgccacgggcacaacacagttccatgaggggcgcagggaagatgctgatgcatccgcagaggaagctgcattcaccaaagcttgcgcatggttcggacttggcctgcatctgtaccaccaggatgaatctcattacgacgaccacttgcattgaggctcaatctgcaaatgagttgatcatcagatgtaacatgcgtcggatatgcccctagaaaacttcgtatctagaatcaattttaggtctccgcgtagtatcatactcataacacagagaagtgaacctat

SEQ ID NO: 2695 - DNA, 309 bp, Zea mays
  Clone ID: LIB3116-005-Q1-K1-D5
atccaaagtataaagttctggggagttcatattcatggattgcaagaaaagttctcactgacagttcgctaaagcttcgatcaactttgcagactcttctttataaggatggcactttccaaattgatcgcctggaatctttggtaactgagtcacttcgtgcaagaacagaagcattcattgggcagaaatgaacaagatgtcgacagtaccaaatgtgcctgatacgaacgcctattgatggagatcatgtatcagtaaatgaaaatgcaagaagatatcttcaggagattgctaagggaatagatg

SEQ ID NO: 2696 - DNA, 434 bp, Zea mays
  unsure at all n locations
  Clone ID: LIB3116-005-Q1-K1-D6
ggcggagggcgtcgcgcggcggggttacaccgccgtcaccttcgacatgcgcggcgcgggccggtccacggggcgggcgtcgctcacgggctccaccgaagtcggggacgtcgtcgccgtctgccgatgggtcgcagagaacatcaagccgcgcggcatcctcctcgtcggatcctcagctggggcaccaattgccggatctgcagttgataaagtggatgaagtgattggttacgttagcatcgggtacccctttggtctgatggcctcagtcctattcggaaggcataatgatgctatactcaagtctgaaaaaccaaagcttttcatcatggggaccaaagatggcttcatcagtgtgaaacaactgcaaaacaagctcaaatctgcagctggacgggctgatacacactngattgaaggagctgggcact

SEQ ID NO: 2697 - DNA, 459 bp, Zea mays
  unsure at all n locations
  Clone ID: LIB3116-005-Q1-K1-D7
caaccaagtagctctggcaaacctttctccctactctcagcaacaacaatttcttccattcaaccaactgtctacactgaaccctgctgcttatttgcagcaacaactattaccattcagccagctagctactgcctactctcagcaacaacaacttcttccatttaaccaattggccgcactgaaccccgctgcttatttgcagcagcaaatactactaccatttagccagctagctgcagcaaaccgtgcttccttcttgacacagcaacagttgctgcctttctaccagcagtttgcggctaaccccgcaaccctcttacaactacaacaattgttgccctttgtccaacttgctttgacagacccagcggcctnctaccaacaacacatcattggtggtgccctcttttagattgcttattagttgtaattcaataataaagttttttggatgat

SEQ ID NO: 2698 - DNA, 342 bp, Zea mays
  Clone ID: LIB3116-005-Q1-K1-D8
cggcatatagcgtggtgcctccaggaactcttggctgagcagcatcgagatgctgggggcgcccaacagtttactgtggggcgcactgaagatgcgcatgcacacccataggaagctacactgatcgcaactggcgcatggtaccaacatcggctgcatctatataaccagtaggtctctcagatccacaactgactattatcgtgggtcaatatgcgtaagagttgatcatatagcttaacatgcgcttgacatctgcctgtaaaacttcctgtttataatcaatgtactagggtttgtgtagtataatacttcataacacaaaaatttcaacatatgtag

SEQ ID NO: 2699 - DNA, 375 bp, Zea mays
  Clone ID: LIB3116-005-Q1-K1-E1
cggacgcgtgggttttgggggtttcctgccaaggaactctttcttttatataatctcaaaaaagttgtttttttttggtatgggctgggttctatcaagggtttgttaaggctattagtttaccatgtagcagaaaaactattgggacgtgaagttttttcacgtacattgtaatactttggtatttttgtctaccagatgaaactggaagtccagagcaaaaacttttttaaaaaaaaaaaaattaaaaaaaaaaaaaaaaaataataaatataaaattaattatatattataaaaaattaatttgtaatatatataaaaatatttataactacttataattttattaatttataaaaaaagggggggcctttt

SEQ ID NO: 2700 - DNA, 403 bp, Zea mays
  Clone ID: LIB3116-005-Q1-K1-E2
ggtgaaaggagttaaacaaggaaggtggactgataagttcatctcacgaatacaatttaaagatgatatagtaatctcgtcacctgatgtatctctggtagagcttggaccagacgtggaatttgttctgttagcaactgatggtctttgggattacataaaaagctctgaagctgtagcttttgtcagagaacaactccgtcagcatggtgatgtccagttggcctgcgaggcacttggtcagaaagctctggatcaacggtcccaagacaatattagcatagtcatagctgacttggggaggacaaactggaaggcgttgcccgatgaaaggccgaacttgttcttggaactaagtcaagcagtcgcgactgtaagggttgtctcaataggaatttgggtc

SEQ ID NO: 2701 - DNA, 424 bp, Zea mays
  Clone ID: LIB3116-005-Q1-K1-E3
acgcgtgcacggagttaaacacggaaggtggactgatcacttcatctcacgaatacaattcaacgatcatatagtaatctcgtcgcctcgggtatctctggtagagcttggaccagacgtggaatttgatctgttagcaactgatggtctttgggattacataaaaagctctgaagctgtaccttttgtcagagaacaactccgtcagcatggtgatgtccagttggcctgcgaggcacttggtcagaaagctctggatcaacggtcccaagacaatattagcatagtcatagctgacttggggaggacaaactggaaggcgttgcccgatgaaaggccgaacttgttcttggaactaagtcaagcagtcgctactgtaagggttgtctcaataggaatttgggtctcggcgttccttgggtta

SEQ ID NO: 2702 - DNA, 412 bp, Zea mays
  Clone ID: LIB3116-005-Q1-K1-E6
caagccgtcgcctgaggcgcgcgaggaggccagagctgttgcgacggactggaagcgaggcaagcggatcgggacggagacgatgtttaagcaggagacgttcgccttcttgcatgtcgtgggagttgttggggctcgtggaggatgcgggcggttccagcgaggtgcttgatcttgtcgtgtcgatctcaggttgtgagcgcgccgtttatgcattcgtcgtcctgggcctggacctcgaccagcatatgccaagtaagtgacatttatctctttcttggacaaggaggaagtcggtaaaatgtcttgtttaaccagattagtgaatattaggatgcctatgagggataaggtaacgggtgaattctgtgtcttggtcttgtgagtaagctattgcttaaaaatgatcaac

SEQ ID NO: 2703 - DNA, 462 bp, Zea mays
  Clone ID: LIB3116-005-Q1-K1-E7
cccctccgagcctcagttcgcatccacgcgcgccgccgccgcctcgccggtcgacgctcaccgcgcagccatggcggaacagactgagaaggctttcctcaagcagccaaaggttttcctcagctcaaagaaatctggcaagggtaagaagcctggcaagggcggcaaccgattctggaagagcattggccttggcttcaagactcccagggaagcaatcgaagggacctacattgacaagaaatgcccattcactggaactgtttctatcagaggcagaattattgctgggacatgccacagtgctaagatgaacagaactatcattgttcgcaggaactacctccactttgtaaagaaataccagaggtatgagaagaggcactccaacattcctgctcacatctctccatgcttccgtgtgaaggaaggtgaccatgtcatcattggccagtgcaggcc

SEQ ID NO: 2704 - DNA, 447 bp, Zea mays
  unsure at all n locations
  Clone ID: LIB3116-005-Q1-K1-E8
aacttcgacgccttccacggcgacaaggctcacggcggcgtccatgacggtaccgagatcgtgctctggaagtggtgcgagggcgacaaccagcgctggaagatcctcccttggtgaacgaacgaaagaaactactagctggtaccctaataataattctgctggctgcggcgatccccaaataaaagaggcagggtgcgatgcatcgcggtcttctcgactctcgagtggtgtttgcgttagacagccagccactgtgtggctagtgttccaacatttgtcagcctgcttgcgcgaggaagtgggggtgactgactcaagagaagggcctggtcataggctgctgcattatgaatttctgatcatgtcttatgtctgtactctgaatcaactatgtatgagatctcatctnctttcttctactgaatgaatgaatcattattggct

SEQ ID NO: 2705 - DNA, 463 bp, Zea mays
  Clone ID: LIB3116-005-Q1-K1-F1
cccacgcgtccgcccacgcgtccgcccacgcgtccgcgcaactgcctctttgcggcggcgggaaaggggaaacactgacacgtcttctctcaggttgcgagcacggtcggaggagctagggtttcgccgcggcgagatgtcggcgtacgacgaggtggagatcgaggacatggagtggaacgcggagctgaaggcgtacacgtacccgtgcccctgcggcgacctcttccagatcacgctcgacgacctccgcctcggggaggagattgcgcgctgcccctcgtgctccctcttcctcaccgtcgtctacaacgccgaggatttcgccgactccaaggagccgacccagaagccgtccccgaccccagtcgccgtcgcctgatgtggcccgttcgaggctagatggacgaatggaatggatctcggagcaggaaaaaaggaacgagttcatgtttgacacaca

SEQ ID NO: 2706 - DNA, 357 bp, Zea mays
  Clone ID: LIB3116-005-Q1-K1-F6
gactagaccttgagaggaggtggacaggtcttaggacacatgctgagatcagtctgtatgcggcgatgtctcttacggacggggctacatcgccacgcttaactagggccgcgcctacgacatcaagaactgtcaaaacagtgccgttcaggaatttaatagcgtcttagccgatcacattgtgatgatctgcaagcttaacaacgagtgtttcatggatctcctatggtactgcttgcacgacgtgaaccgaatgctgaactatcagtgctgcacaacgggatgcgcggacaacatactacacacgaacaacggagtccatggcgtggagaccggtctagtgctcaactggtttta

SEQ ID NO: 2707 - DNA, 351 bp, Zea mays
  Clone ID: LIB3116-005-Q1-K1-F7
actagttctagatcgcggtcggggtcggggacgttgagcatgctagctgcttttggaaattgcattgcgtgcatctgcagtgtaatctacattcctatcaattgtacgaagtatgcctttgattatgcaaccatgtatcaattgtttttttttgccgtggatttatgttgatgaggttaccatgtgatcatatgttctttccctagaacttttaagaacaattaaatactatctttaagacttctctagacacatcacacatagctcttgttatgcactttagatatacaacgtacaattatgtatctatttagatatacattatatattgatgcagagtatcatatatct

SEQ ID NO: 2708 - DNA, 415 bp, Zea mays
  Clone ID: LIB3116-005-Q1-K1-F8
cccacgcgtccgcggccggcttcggccgccacggcggcggcgtccagcagcacgtcgtcaaggagaagttcgaggaggtcgacacggtctcacgcgccggcgccaaccaccaccaccaccatggtcaccacggcggccacggcttcgtggtgcgcgagaccagggtcgaagaggacatcaacacctgcaccggcgaggtccacgagcgcagggagagcttcctcgccagggctaactgagccgcccggcggccggcatccacgcccgttcgtgcttgcctgcgtgccttatgtatgtctgtggttgactggttgtgcaaggtcatcgtacttggctatcgtacgtgcacgcactcagctcctgtacgaattacgacaataagctcgtgacctgaataaaacttcttcgtaatact

SEQ ID NO: 2709 - DNA, 235 bp, Zea mays
  Clone ID: LIB3116-005-Q1-K1-G1
actgagcggagcttatcaagcaatacattcagcttgacacagtttgtgggacatgtatacatggtggtgtcggatgacttgtatcgaatattgggcctgatttacattcactattcgaaaatagtacagatatgtaatatggctctgctgcgtgtacatcttacagacagttgtacgaagaaatattgtccgacagtttgtgcaaccagcgcattatctgtgggactgttatagc

SEQ ID NO: 2710 - DNA, 120 bp, Zea mays
  Clone ID: LIB3116-005-Q1-K1-G2
tgccacttaccgtctctctattccgcaatacattgtgccagttacaccgtcgtagcacatgtctacatggtcggggcaaatgacttgggtcccagattgcactatgattcacattcacta

SEQ ID NO: 2711 - DNA, 455 bp, Zea mays
  Clone ID: LIB3116-005-Q1-K1-G3
atgtgatcgttctatatgcctctatctacaaggatgtccccatggtggttaatctctctggccggtttcatttggagaaaggcattgaggagcgcctaggcaaagagtttatggatagaataaacaaggaaggctacatcgatgtcaaagacaaattaggaaaggttttgtacagagtaaccaaggagagcttgatggaacggctgagccatgatatgcacgcaacgagcctttccatcagcaaagagtgcaggttctttacaattcacggttcagctgatgagatcatacccgtggaagatgcgtacgagtttgcaaggcttataccaaaccacaagctgcgtgtcatcgagggagcaaatcactgctacactgctcaccgtagagaactttctgatgccgtagtagaagccatcacatccaatgaggcatgggagaccacaacctagatctga

SEQ ID NO: 2712 - DNA, 329 bp, Zea mays
  Clone ID: LIB3116-005-Q1-K1-G4
actagttctagatcgcgagctagaactagtccaagttccactagaacgtggtgcatcagcatacctgctgctgccgccgccgccgccagttgtttgctgtggaaagctagatgcatgcgtgttgtaaaggaacctgaagcgttgcatcggtcatgattcatgcatggccagcctgctgcctgtaacaacaaactagtattgatcttattgagaccggaaactgtaaaaaaaaaaaaaaaaaaaaaaaaaaaaaaaaaaaaaaaaaaaaaaaaaaaaaaaaaaaaaaaaataaaaaaaaaaaaaaaaaaaaataaattaaaagaataata

SEQ ID NO: 2713 - DNA, 278 bp, Zea mays
  Clone ID: LIB3116-005-Q1-K1-G5
ctagatcacattctctgtggcacctttcttttccaaccctcatgtgcatgtttcgcgttcggtttcattgaccagggtgactcttttctccatcttccacgtttctcaatcgaaatcgatcacttctacaatatatttctcttatatgtacattctaaagcaagcttatctatatatcatcataacacagttatcacgacctgttccattaccaatctcctgttaacccttccaataatcctttatctagctaatgatctatctattttactatcttc

SEQ ID NO: 2714 - DNA, 455 bp, Zea mays
  unsure at all n locations
  Clone ID: LIB3116-005-Q1-K1-G6
gtcttcgacgccgacggcaacggcctcatcacgcccgccgagctcgcgcgcgtcctgcgcggcctcggggagtccgccaccgtcgcccagtgccgccgcatgatccagggcgtcgaccgcaacggcgacggcctcgtctccttcgacgagttcaagctcatgatggccgcgggcggcggcggcggattcggcaggatcggtgcctaggaacaaggatcctgtgcctgtcctgctctgcctctgctttgctccgctcccacaaattggatttctttcattttatgtatgtacatatactacactggaatcacacggacagcgccacgtanaaaagacccctttttcatttggtttatgtgtactatacaatgcaaatctgcatccatggtactgctatggatgttcaatggaattggttcggctttcatcaatngcagtctgctagtagttcgaag

SEQ ID NO: 2715 - DNA, 452 bp, Zea mays
  Clone ID: LIB3116-005-Q1-K1-G7
cccacgcgtccgtgattcttgaagagatcgagcttcttttgcaccacaaggtcgaggatgtcttgcaactgcggatcaagctgcggctgcggctcaagctgcaagtgcggcaagaagtaccctgacctggaggagacgagcaccgccgcgcaggccaccgtcgtcctcggcgtggccccggagaagaaggccgcgcccgagttcgtcgaggccgcggcggagtccggcgaggccgcccacggctgcagctgcggtggcaactgcaagtgcgacccctgcaactgctgatcacatcgatcgacgaccatggatatgattattatctatctagcttgtggtggtggttgaacaataataagcgaggccgagctggctgccatacataggtattgtgtggtgtgtgtgagagagagagaaacagagttcttcagtttgctatctctctctgcatg

SEQ ID NO: 2716 - DNA, 424 bp, Zea mays
  unsure at all n locations
  Clone ID: LIB3116-005-Q1-K1-G8
caaatggctgcgcatgaatgcgacgtgtccactctgcaagtataacattctcaaaggcagtgacagtgcatgaccaacttattctgacataacttccgtacacagcttcctttcaagtggcgttctcaaagcaatgctgttttcacagctgtgttattaagtgacagtgatctgtgtttttctgtttaggatgtggtgataacctgtagatggatgaaaccttatttacaattgtccttgttaatatcgcttgtaaatacctttcgagttgttttctacgtatgatggaattggaattgctgaaaaaaaaaaaaaaaaaaaacaaaataaaaaaaaaaaaaaattaaaaatctaataattttacataaaaatttaaatttacatanttatatttatatattttttttaaaaataattatttttt

SEQ ID NO: 2717 - DNA, 407 bp, Zea mays
  Clone ID: LIB3116-005-Q1-K1-H1
ggaacagatttagagggtggaacagatttagagggtgtttgatttttatggactaattcatagtttgtctattatattctattgtacactctaagttgacaaatacggaaactaaaatatagattttaggttctgtatttggtaatttagtattcagtaatttagagactaaaatgaaataacatgaagaagctaagcattagtacttagaatccatacactgccttaaagtacgtgctggaactgtgaatggttcgtatactaaagcctggattagcccttttatgagattctgcgtttgcatggcaattgcgaggactgacaattgtatcataaagcacgaaatcttggttgtacgattgagctatgctgcatgcgatacttgtggcgcttgtttagcgaccgca

SEQ ID NO: 2718 - DNA, 447 bp, Zea mays
  Clone ID: LIB3116-005-Q1-K1-H2
ccgaggcggggatgacgagcccaatggtggccaccccggtccagttccacacaaccggccgcctcagcttctgctccttttcctttcccagcgcatcagggaggcggcgattcgcggcggtgagggcgtccgcggagacgatggcgacggagaagctgggcatcaaggtggagcgcaacccgcccgagtcccgtctctccgagctcggcgtccgccagtggcccaagtgggggtgcgagaagagcaagttcccgtggacctactccgccaaggagacgtgctacctgctgcaggggaaggtgaaggtgtaccccgaaggccacggggaggagttcgtggagatcggcgcgggagaccttgtcgtcttccccaagggcatgagctgcacctgggacgtcggcgaggccgtcgacaagcactacaacttcgagtagccgcccgccgcga

SEQ ID NO: 2719 - DNA, 394 bp, Zea mays
  Clone ID: LIB3116-005-Q1-K1-H3
ccgaggcggggatgacgagcccaatggtggccaccccggtccagttccacacaaccggccgcctcaggttctgctccttttcctttcccagcgcatcagggaggcggcgattcgcggcggtgagggcgtccgcggagacgatggcgacggagaagctgggcatcaaggtggagcgcaacccgcccgagtcccgtctctccgagctcggcgtccgccagtggcccaagtgggggtgcgagaagagcaagttcccgtggacctactccgccaaggagacgtgctacctgctgcaggggaaggtgaaggtgtaccccgaaggccacggggaggagttcgtggagatcggcgcgggagaccttgtcgtcttccccaagggcatgagctgcacctggga

SEQ ID NO: 2720 - DNA, 448 bp, Zea mays
  unsure at all n locations
  Clone ID: LIB3116-005-Q1-K1-H6
cccacgcgtccggtcattttctttcgtgccatgccaaataaataaataaaaacaggatctttgagatcgcgccgggtgccaagcagatgttctccttcctgcgcgacgccggcgacgcgccgctggagaaacaccccaagctcaaggcccacgccgtcaccgtcttcgttatggtcagccacctcgatctatctctgtactgtacgcatgtttctatcctcatctagctacctgctgctttaatttgctttaattggcgttccaggcttgcgagtcggcgacgcagctgaggagcaccggcgacgtgaaggtgagggaggccaccctgaagcggctgggcgcgacgcacgccagggcgggcgtcgncgacgcgcatttcgaggtcgtcaagacggcgctgctggacaccatcagggacgcggtccccgacatgtggacgctggagatg

SEQ ID NO: 2721 - DNA, 351 bp, Zea mays
  Clone ID: LIB3116-005-Q1-K1-H7
cccacgcgtccggtcattttctttcgtgccatgccatataaataaataaaaacagggtctttgagatcgcgccgggtgccaagcagatgttctccttcctgcgcgacgccggcgacgcgccgctggagaaacaccccaagctcaaggcccacgccgtcaccgtcttcgttatggtcagccacctcgatctatctctgtactgtacgcatgtttctatcctcatctagctacctgctgctttaatttgctttaattggcgtaccaggcttgcgagtcggcgacgcagctgtggagcacctgcgacgtgaaggtgagggaggccaccctgaagcggctgggcgcgactcacgc

SEQ ID NO: 2722 - DNA, 451 bp, Zea mays
  unsure at all n locations
  Clone ID: LIB3116-005-Q1-K1-H8
aagaaccaaaggtagctagctagccgcgactcgttggctagacgattcaagcagcagcgcaggatggtggcgccggtggtgattgcgtcggccgggctgggcatgctggccggcgtggcgatggccaaccggtccctcgggaacgggctcccggcggcctccaggtgggacgcgcgcccgcgctgcgccacgtgcggcggctccggccgcgtggagtgcatctgcaaccgctggtccgacggcgactccggctgccggacctgcgctgggtcggggaggatgccctgccgcagctgcggcggctccggcacgggccgaccgctccctgcacggctcaccgtccagcaccagaagccgncgncgncgncgncgnccggctacaactgatcgatgggggatgattaggtatccggatccgtggattatatacttctcgcggcgatttgcgatg

SEQ ID NO: 2723 - DNA, 316 bp, Zea mays
  Clone ID: LIB3116-006-Q1-K1-A1
cccacgcgtccggcgacgcgccgtggtggccgcgcctgtcgacgcccgcggacctggcgtcgctgctgacgacgctgctgtggctcacctcggcgcagcacgcggcgctcaacttcgggcagtacccgctgggcggctacatcccgaaccggccgccgctgatgcggcggctggtgcccgccgagggcgacccggagtacgcgcacctggtggccgacccgcaccgcttcttcctgtcggcgctgcccagcctgacgcagaccaccacgttcatgaccgtcatcgacacgctgtccacgcactccgccgacgagca

SEQ ID NO: 2724 - DNA, 235 bp, Zea mays
  Clone ID: LIB3116-006-Q1-K1-A10
acaggatggtggcatcgcagtctacgaagggcctgagatggtgtcaccagaaagccaaactgatgctcggaaagaaaacatccattcagatgtcgctgagacagatgaatgcaccaagactcagaaggccgctctagcaggcacagagggagaaaattctgctgaagattctggtgtgccggtgtctgagatggacaaatgcaacgagatgccgaaagatgctccgacacttaca

SEQ ID NO: 2725 - DNA, 433 bp, Zea mays
  unsure at all n locations
  Clone ID: LIB3116-006-Q1-K1-A12
cccacgcgtccgcggacgcgtgggatcctcccctgcgccgacgcggcggtgacggcggaggcgctgcggcggagcaaggaggtgaactaccagctggtctccaagctcaaccagctgctctccaacgtgtcgaacggcaacgtgcctccgcaggccgggcccccgctctactacaaccagtcggggcctcccgtgccgctcctctgcagcccctacagcgccgacctctccgaccggccctgcgccgtcggcgaggtcaccgccgncgacgcgcagcaggtacgtacggtacggtacggcacgaacaaagaacctgtgcgtgcgttgttggcgagatgtctgacgtcgcgtgttcgtttcggtcgcaactcgcatcgcatcgcatctgcaggtctggcagcgctacgtgtgccgcgcggcggcggggtcgggc

SEQ ID NO: 2726 - DNA, 176 bp, Zea mays
  Clone ID: LIB3116-006-Q1-K1-A5
acgggttctccggggttcgggatcgtgggtgagctgatccagatggacgcgtctgatgtctaggaccgctgattccacggtggtcatagcctgggccacggacgaccactgcactacacaacgactttagcacctactgtgaggttcttgaatacaagatcatgctcgatcgggag

SEQ ID NO: 2727 - DNA, 313 bp, Zea mays
  Clone ID: LIB3116-006-Q1-K1-A6
ccctggtcctcatctatccgctcgacattgctcacactcgtcttgcagctgatatcgggcgtacagacacccgccagttcagaggcatccgccacttcatccagaccatctacaagaaaaacggcatcagaggcatatacaggggattaccagcatcgctccacgggatggtcgttcaccggggcctgtactttggcggcttcgacactgccaaggatgtcctggtccctttggagtcccccctgtggcagcgctgggttgcagcccaagcagtgacattcatggcagggctcatttcgtacccactggacac

SEQ ID NO: 2728 - DNA, 443 bp, Zea mays
  Clone ID: LIB3116-006-Q1-K1-A8
cggacgcgtgggcggacgcgtgggcggacgcgtgggcggacgcgtgggcggacgcgtggggacggcggcgactcgtcgtcatccaccacgacgacgacggcggtgaagacaataagaaccaaccaaaaccactacacgaagcatatatacagattactgtcaacgtattgtagaaccaaggatctatgtatatatatgtgcctccatcatcatcggaccggaataaagctagcaatctctcttcttcacgatcgagagatagcgcgcgtgcgtgtaattaagtattatagattactacatactatatatatgtgcatgcatgaagcatgcgtatgtgtatctatatatcatgtgatggcttgtatatgagctagctatagctagagtcgtgtgtaatagcatactacaaactaagcttatacaatatccaaagttgtatattc

SEQ ID NO: 2729 - DNA, 407 bp, Zea mays
  unsure at all n locations
  Clone ID: LIB3116-006-Q1-K1-B10
cccacgcgtccggcggcagcagccagctaataattaagcagccaaattaagtgcgacgatggcgtcgtccatcgccagaaccgcatgtctcctcgtgctcacactgttcgtcgtctccgcggcgatcatcttgcccagctccctgtgccatggagcccgcggcgtcgggttaggtatcggcggcggcgctttggaccctgaccgtccagcgtgcgtcggggtcggggcatgcccagttcgtgggcgcccctttcctatcgtcaaaccgtcccccccatccaacggaggggacccacatcactgatgcctgcctcggatcacgcgccctncgtcgtatcggtctgtctacgatggaacgatgcaccgtgcacgagcacgactgcatgctactagctactagctatctc

SEQ ID NO: 2730 - DNA, 449 bp, Zea mays
  Clone ID: LIB3116-006-Q1-K1-B12
atttaactctttcaagaagattgcaagatccatgggatacggcgaggatgatctccctctagtatcatttcagtctgtctccaaaggatactatggagagtgtggtaaaagaggaggttacatggagattactggcttcagtgctccggtaagagagcagatctacaaggtagcttcagtgaacctgtgctccaatatcactggtcaaatccttgcgagcctcgtcatgaatccaccaaaggttggggacgaatcatatgcttcctacaaggcagagaaagatggaatccttcagtctttagctcgccgtgcaaaggcactggaagatgcattcaacacgcttgagggattttcatgtaacaaggctgaaggagcaatgtaccttttccctcagatccatctgccacataaggcaattgaggctgctaaagctgccaagaaagcacctg

SEQ ID NO: 2731 - DNA, 384 bp, Zea mays
  unsure at all n locations
  Clone ID: LIB3116-006-Q1-K1-B2
aaccaattgccatcaatccaggcatccatccatccacccgccccgctgacggaagcaatggcccggatcgtgctcttcgagtggtgagtggtcgcgccgttacaccgtctgcgcgccggccggggcgccattgcggcgccgtcaccccccgcgctctccgcggcgccgcgccgtcgtcccgcgttcgcgttcattcaccgcgactgggcgctccgcgtnttcgcgcccacccgcctcgccttcggcggcgtcgaggaggacaagccgagcgccgcgcctgggcatgaagaaggcgcagaaaacaggtttatcataacacaaaatgcgataattagttacccgccaaccgactttgcttgttggctatataaatgtacatggggc

SEQ ID NO: 2732 - DNA, 313 bp, Zea mays
  Clone ID: LIB3116-006-Q1-K1-B3
gggatgctctgggattcgtgtaaatgacgcagagaaggttgtgaagattggaggcaatgtgctgcgcgaaggtgagtggctgtcgctgaatggatcgaccggcgaagtgatcctcggaaagcagccgctctccccaccagccctcagtggcgatctgggaacattcatgtcctgggtggatgacgttagaaagctcaaggtcctggcaaacgcggatacccctgaggatgcattggctgcgcggaacaacggggcagaaggaatcgggttatgccggacagagcacatgttcttcgcttcggatgagaggatt

SEQ ID NO: 2733 - DNA, 288 bp, Zea mays
  Clone ID: LIB3116-006-Q1-K1-B4
ctagaactagtcaaggattctcagcggtctgcaccatctgttccggtttcatatagcacatcacatccgacagtggatgcagattcgagaacactttatgttagcaatgttcactttgctgccaccaaggactcattatctcgccatttcaacaagtttggtgcagtactgaaagtagtcattgtcactaatgctgcaacgggtcagccaacagggtctgcctatgtagagttcttacacaaagaatcagctgaacgagcgttgtccgtgaatggcacatcatttatg

SEQ ID NO: 2734 - DNA, 318 bp, Zea mays
  Clone ID: LIB3116-006-Q1-K1-B6
cggacgcgtgggcggacgcgtgggaaaaaaaaaaaaattaaaaaaaaaaaaaaaaaaaaaaaaaaaaagggaaaaaatgggcggccgttgggaaagaatacaaacttacatacgcatacatacaacataataaaatcttatatagagtaacctaaaattaaattggggggccccctttttaaaaatccaagttttcgtacacctctttccaaacccaaattttttttttttgggcccctaaatttatttcactgcccgcgtttttaaaaagagggacttggaaaaaccctttcttaaccaaatttaatcctttttgga

SEQ ID NO: 2735 - DNA, 223 bp, Zea mays
  Clone ID: LIB3116-006-Q1-K1-B7
gtcggtggaaccactgggcttctgatctgggccgtcaccctcgctgggatcctcggcggcggcgccctcctcggtacaacaccagcgccctctccggctaaggatatccaatgcatgcgcttcttgcgattcgtcatgtaaaatcagggtgtctgtctataatctagcctccatggatgctcaaccttcgtcatgtaacaataatcagtgctactcttcatta

SEQ ID NO: 2736 - DNA, 227 bp, Zea mays
  Clone ID: LIB3116-006-Q1-K1-B8
caggatttaatcgacatggacagggaagatgaacgatcaggaagaatggatgaaattcaccacggacttcattctgcttattgccagttcgctgacactgtagatgtgcccttggataaaattgaaatcgttggtggggatgaggagcaaggctctagctcgggtcagtccagtgttaaagaaacgtgcgaggatcccaagaagcacctggctcaccctacactaaa

SEQ ID NO: 2737 - DNA, 341 bp, Zea mays
  Clone ID: LIB3116-006-Q1-K1-C1
cggacgcgtgggcgagcaggaggcggacaaggtaagcagcaatcgcaggaaccctagcgccgccgcacccgcaggaatgggtgtcgacctcgtcgccggtgggaggaataagaagaccaagcgcactgcgcccaagtctgacgatgtctacctcaagctcctcgtcaagctctaccgtttcttggtcaggaggaccaagagcaatttcaacgctgtcattctcaagaggcttttcatgagtaaaaccaaccgaccaccaatctccatgcgccgccttgtcaagtttatggaaggaaaggagaagaacattgctgtcattgttggcacagtcacagatgaca

SEQ ID NO: 2738 - DNA, 430 bp, Zea mays
  Clone ID: LIB3116-006-Q1-K1-C11
agaggcttcctctcgagtccgcagtctctcttccctacgaagttcagaagttgtcacaatgactcgcggcgaccagagggaacgcgaccggcagagggcgcaggcgcggcggcccgcggccaaggggcgcgacgacgggctcaccccggagcagcggcgggagcgggacgccaaggcgctgcaggagaaggctgccaggaaggcggcgcatgccgcgggaggcgcctgcgccaagggcggcaagaacaccggcaagaagtagccggggtctttactctttagttcgcaggatctgctcgtgttggaagatctgtatttgcctagatctggaatgcaatgcgatttcgtgggcgttgtctcgagcagtgctgaaacaacggttcacagtaaaatttgtagcaaagatttaaaaagaacgagggcgttggca

SEQ ID NO: 2739 - DNA, 433 bp, Zea mays
  Clone ID: LIB3116-006-Q1-K1-C12
agaggcttcctctcgagtccgcagtctctcttccctacgaagttcagaagttgtcacaatgactcgcggcgaccagagggaacgcgaccggcagagggcgcaggcgcggcggcccgcggccaaggggcgcgacgacgggctcaccccggagcagcggcgggagcgggacgccaaggcgctgcaggagaaggctgccaggaaggcggcgcaggccgcgggaggcgcctgcgccaagggcggcaagaacaccggcaagaagtagccggggtctttactctttagttcgcaggatctgctcgtgttggaagatctgtatttgcctagatctggaatgcaatgcgatttcgtgggcgttgtctcgagcagtgctgaaacaactgttcacagtaaaatttgtagcagagatttaaaaagaacgagggcggtggcactt

SEQ ID NO: 2740 - DNA, 353 bp, Zea mays
  Clone ID: LIB3116-006-Q1-K1-C2
cgatccaattgtcacttgctctccctccaacaagctaattaaggccggtcgtcatccctcttctagctcgttttattatccatggcggaggagaagcaccaccaccaccacctgttccaccataagaaggacgaggagcaggaggagcagctcgccggcggcgggtacggcgagtccgccgagtacacggaggccacggtgacggaggtggtgtccacgggcgagaacgagtacgacgagtacaaggaggagaagcagcataagcacaagcagcacctcggcgaggccggcgccatcgacgccggcgccttcgcactctacgagaagcacgaggcgaagaaggacccggagca

SEQ ID NO: 2741 - DNA, 389 bp, Zea mays
  Clone ID: LIB3116-006-Q1-K1-C3
cggacgcgtgggtggaggaaagcctgtgcgccgtggagaagcgcgggcgggtgcacgtcatcaccctcaccggcgcgggggagcaccgcctcagcccggccctgctctgcgccctccgctccgcggtcgcagacgtccgccgcgcctaccccggtgcgctcgtcctggccggcgagggcaagttcttcagcaacggctacgacctcgcgtgggcgcgcgcggggccgggcccggcgccggagcaccgactctgcacgatgcgcgccgcgttccgcggcctcgttgacgacctgctcgcgctccccgtgccaacggtcgcggacgtcacgggccacgcaacgggcgctggctgcgcgctcgcgcttgcggacgacggcgtcgccatgcgc

SEQ ID NO: 2742 - DNA, 109 bp, Zea mays
  Clone ID: LIB3116-006-Q1-K1-C5
aaaaaaaaaaaaaaaaaaaaaaaaaaacaaattaaaaaataaaataaaaaaaaaaaaaaaagagaaaaagaaaaaaaagaaaaaagaaaaaaaaaaaaaaaaaaaaagg

SEQ ID NO: 2743 - DNA, 232 bp, Zea mays
  unsure at all n locations
  Clone ID: LIB3116-006-Q1-K1-C7
actacttctacatcgcgagcgtccgccctttttttttttttttttttttttcgctttttttttttttttttttccgccttccccccttttttttccccccattacccctcctcccttttccccccnnttnnntcccaaaaaaaatcaaaaaaaaaccaaacaaancaaaactcttaaaaaacaaaaaaaaaaacacccaaaaaaaaaaaacccccaaatttaaaaaaaccaa

SEQ ID NO: 2744 - DNA, 369 bp, Zea mays
  Clone ID: LIB3116-006-Q1-K1-C9
catcaacccgtcggcgttcaggcactatcttgtcatacccattgatcatataccaactgtaaatagcctccgcaaaaccaaagatgatcaccagttagtgagccacatggtgaaggtggggaaagacttcctcaatcaagatgctccaaattctgaggaacacaggtttgggttccatcagcccccatttaatagtattgatcaccttcatcttcattgcctggcactgccatttatccccagttggaggcaagtaaaatatacccctctgggacctttaggggggtttatcgcagcagaaaagctattggaaagaataaaaccagaagcagaagcatacagttagcatcaatatttttactgatacct

SEQ ID NO: 2745 - DNA, 434 bp, Zea mays
  Clone ID: LIB3116-006-Q1-K1-D1
cgagcaaccgataatccgccggcgctgagatgttggtttatcaagacctcctatctggcgacgagctcctgtcggattcattcacctacaaggagctcgagaacggcgtcctgtgggaggtcgagggaaagtgggtcacccaaggtcctgttgatgtagacattggtgccaatccatccgccgagggtggtgaggatgaaagcgttgatgacacagccgtgaaggtggttgatattgttgacacattccgtctacaggagcaacctccttttgacaagaaatcatttgtctcttacataaaaaaatacatcaagaatctcactgctgtgttggagccagagaaagcggatgagttcaaaaagggtgtcgagggtgcaaccaagtttctccttagcaagctgaaggaccttcaatttttttgtggtgagagcatg

SEQ ID NO: 2746 - DNA, 267 bp, Zea mays
  Clone ID: LIB3116-006-Q1-K1-D10
cctttgccccttccccttctgtaacccttcgtccgtagcagaccaggaacgcccaaggcgctagcgtctccaagatggtgctgcaaaacgacattgacttactcaatccaccggcagagcttgggaagctaaagcacaagaagaagcggctagtccagtcccccaactccttcttcatggatgtcaagtgccagggctgtttcagcataaccactgtgttcagccactcccagactgtggttgtgtgcccaggctgccaaactgttc

SEQ ID NO: 2747 - DNA, 444 bp, Zea mays
  Clone ID: LIB3116-006-Q1-K1-D12
cccacgcgtccgcggacgcgtggggtcgcagctcgccggcctctccctctccgccggcgttgcaactccaaccgccgtcgccctcctccccaagaggcagcagctccagcccattgtcgcgcggcgtgtgtgcccgttcacggacaagaagacgaaccgggcgaacaaggtgtcgttttccaaccacaagacgaagaagcagcagttcgtgaacctgcagtacaagaagctgtggtgggaggccggcaagcgcttcgtcaagctgcgcctttccaccaaggccctcaagaccatcgagaagcacggcctcgacgccgtcgcgcgcaaggccggcatcgacctcaacaagaagtgagcaagaagtgagcccatccgatgagcagccaaactagtgtgggtggcactagcttagcattcacgttcgcagggtcgtctcgtctgtct

SEQ ID NO: 2748 - DNA, 396 bp, Zea mays
  unsure at all n locations
  Clone ID: LIB3116-006-Q1-K1-D6
taccgtccngcatcccggtcgaccacgcgtccgccaacgttcgggacgcgtgggcggacgcgtgggggacggagccgaagatttgtattcgcgacagggtcttcggccgaagaagccggagctgctgtcgagcacttcaacggttatgcatttcaaggaagacaactgagggtgaactgcgggccaccgccacctagagatgaatccacaccaagagcaccaaagggtggtggtggcggctgcggcggcggctttgtcgattcacctaacaaggtctacgtggggaaccttgcgtggggcgttgacaactccactctggagaacctgttcagtgagcaagggcaagtgcttgatgcttaggtcatctaccacagggattagcggcaggtcaaaggg

SEQ ID NO: 2749 - DNA, 344 bp, Zea mays
  Clone ID: LIB3116-006-Q1-K1-D7
gcaggaaatggtgttccgtggaactgacaccgtcgccgtgctgatggagtgggtgctggccaggctcgtgctgcaccctgacgtgcaggcccgcgtccacgacgagctggaccgcgtggtcgggcccgaccgggccgtcaccgagtccgacacggcgtcactggtctacctgcacgccgtgatcaaggaggtgctcaggatgcacccgccgggcccgctgctgtcgtgggcgcgcctggccacgtcagacgtgcacgtcgacgggcacctcatccccgccgggaccaccgcgatggtgaacatgtgggccattacgcacgacccagacgtgtgggccgagccga

SEQ ID NO: 2750 - DNA, 300 bp, Zea mays
  Clone ID: LIB3116-006-Q1-K1-D8
cggcacagcttggtcctggagacagatgaactccgatgaagggaaactggccagaacatatcagcttgtgcccagtaagacggactattgaatattgcaggctgggcatctttgaggagtgacaacctgcggctgttgtgtgcatctaatcacatcatactttttattaagttgtaagtattgtagttttatcacctctctaaaagtattgtagttttgtatcatcactcctttcatgcttggactttgcattctccatgctttgtcaatggtcaatggaggacatgctcatgatgctgt

SEQ ID NO: 2751 - DNA, 278 bp, Zea mays
  Clone ID: LIB3116-006-Q1-K1-D9
ctctcttcgatcactgtactgaagataccatggccaagtcgaccgcgatgtttgtagccgccctggccctggtggtggtgatggcgacgacgagcacaggcggtggcagggcggcagcggcgtgcgatcccaagccgctggtggtgtgcgatccggcgttcatggacggagcgaaacccgcggcagcatgctgctccaccctgcgtgcgcaagaagcatgcttgtgcgtgtacgccaaagaccccaagtttgcaaaatacattaacaaccccaacacc

SEQ ID NO: 2752 - DNA, 407 bp, Zea mays
  unsure at all n locations
  Clone ID: LIB3116-006-Q1-K1-E1
atgttaacccttcaactccccatgtgccccatgcaccccagcaaccagaggaaactatgccttatgcaccagctcagagctatccacctaatgcaatcgctgcaccttatatgcaaccacctagtggacctgctcctccttactatgggcagcaaaaccctagcatgtatgaacctcctgcaggccgggctaaccctgggccaccatcatcctacggttctggtgggtacgggccacagggtggaggtagtttctctgaatcttatggttacactggatctccttcccaccgtggcaatgctggaatgaagcagtcttcaccttttgctcaatcctctggaagaagcggcagctatggcaagggcaagctccctactggccagatgcttncacaagcagtgccgatc

SEQ ID NO: 2753 - DNA, 365 bp, Zea mays
  unsure at all n locations
  Clone ID: LIB3116-006-Q1-K1-E10
cggacgcgtgggcggacgcgtgggggttgctctagatccgttcatcctggtggttttgtgaggtcgaaagcggcgagcgaattagaagatgctggacaagctgtgggacgacgtggtggccgggcctcgcccggagacgggcctcgagaagctccgcaaggccaccaccgcccgtccgcccgtcatcaacaaagacgcggacggcggcagctacaagcgggcgcagtcgatgccgtcgaccccgacgacgccggtgacgccgtcgtcgtcgtcgtcgtcgacgacgccgcgcggcgccggcaacgtgtggcgcagcgtcttccacccggngagcaacctggccaccaagggcatgggcgccaacc

SEQ ID NO: 2754 - DNA, 52 bp, Zea mays
  Clone ID: LIB3116-006-Q1-K1-E12
caggtgttgatgtcctcttcgaccctggtctcgcgctagttctagatcgcga

SEQ ID NO: 2755 - DNA, 380 bp, Zea mays
  unsure at all n locations
  Clone ID: LIB3116-006-Q1-K1-E2
cccacgcgtccgccagcctcaagttccactagaacgtggtgcatcagcatacctgctgctgccgccgccgccgccagttgtttgctgtggaaagctagatgcatgcgtgttgtaaaggaacttgaagcgttgcatcggtcatgattcatgcatggccagcctgctgcctgtaacaacaaactagtattgatcttattgagaccggaaactgtattgcacatggtaaatcaatgtacanaaaaaaaaaaaaaaaaaaaaaaaaaaaaaaaaaaaaaaaaaaaaaaaaaaaaaaaaaaaaaaaaaaaaaaaaaaaaaaaaaaaaaaaaaaaaaaaaaaaaaaaataaaaaaaaaaaaaaaaaggggggccgttttaaaggat

SEQ ID NO: 2756 - DNA, 189 bp, Zea mays
  Clone ID: LIB3116-006-Q1-K1-E5
caacaattgctgccattcaaccaacttgctttgacaaacctagcagtgttctaccaacaacccatcattggtggtgccctcttttagatttcttatgagttatagttcaataataaagctttttgtctgatgtttgtggcttcccagaaataagaaagtacatttctaaaaaaaaaaaaaaaaaggacg

SEQ ID NO: 2757 - DNA, 393 bp, Zea mays
  Clone ID: LIB3116-006-Q1-K1-E6
gccaaccatctaccagcgactcagcgagcgagagcagcacacactgcacgcagctagctaggagcagcagcagcggcggcgatggcggcctccatgatctcctcgtcagctctggcggtggcgcctcagggcctgccgcccctcggccgccgcgcctcctccttcgccgtcgtctgctccaagaagaagatcaagaccgacaagccctacgggattgggggtggcctgaccgtcgacgtcgacgccaacgggagaaagggcaagggcaagggcgtgtaccagttcgtcgacaagtacggcgcgaacgtcgacggatacagcccaatctacaacgaggatgactggtctcccaccggcgacgtctacgtcggtggaaccactgggcttctgatc

SEQ ID NO: 2758 - DNA, 285 bp, Zea mays
  unsure at all n locations
  Clone ID: LIB3116-006-Q1-K1-E8
gccaaatcagtcgcgagcggcggcggtaacgagaacgagacgcgcgcgctagctgaatcaggagcagggcccagggaggagagtggagagccgccggcgagcagcaatgccttactgcgaggtgggcaggtacgcggacggcgacaagtggagggcgtccgcctcttctaccgccgctacggcagcggcgccaccaaggtgctcctcgtcatcggattggcggngacgcacgactcgtggggcccgcagataaaggggctgaccgggtcgctggagccctccgac

SEQ ID NO: 2759 - DNA, 433 bp, Zea mays
  unsure at all n locations
  Clone ID: LIB3116-006-Q1-K1-E9
cccacgcgtccgcagcaatccacacaagcacttcgacgtcacacgggcgctgcgcacagacacaccaagcgtcggcaccaatggcttactaccaggaggtggactactgctcggaggaggtgaggtcggtggccccggccggcttcggccgccacggcggcggcgtccagcagcacgtcgtcaaggagaagttcgaggaggtcgacacggtcttacgcgccggngccaaccaccaccaccaccatggtcaccacggcggccacggcttcgtggtgcgcgagaccagggtcgaagaggacatcaacacctgcaccggcgaagtccacgagcgcaaggagagcttcctcgccagggcttacttgagccgccggcgggcgggcatcacgcnccgtcgtgcttgcctgcgtgccttatgtatgtctgtgggtgactg

SEQ ID NO: 2760 - DNA, 394 bp, Zea mays
  Clone ID: LIB3116-006-Q1-K1-F10
cccacgcgtccgccaacgcgtccgccaacgcgtccgccaacgcgtccgcccacgcgtccgttgattcgtggaggggtagatcgagaaacagtgagaacttttcagcacacaggtcaaggaggaagcgaagtcggagcaaggagtctggttagttgtaaatagttagcctctttttggagcacatgaattcgtaggaatcgtgcagaaatttacaggaatcgtttaacttcgcacgaaaaattcccgcactccgaacatgcggagtggcttctgatatctactgatgcttcaccgttcgctacagttctgtactgacactgcgtagtgcggtcatagcatgtcaattcgacccgtctcagcgtctgctatgtaatacaggatatttccgtgctat

SEQ ID NO: 2761 - DNA, 230 bp, Zea mays
  Clone ID: LIB3116-006-Q1-K1-F11
tcgcctgccttcttcttcttcttcttcttccccggtcttcctctgctgcgcctctggccaaaagcctgtcgctgacgaggaaccgcctgcagcccgcggatgaccctgctccggaggttcccgctcccgcccagcaaggtgcgggtgctggtgcttgtgccgtgggagctccagaccccggccgccaagtggccgtgaggattgacattgaagtcaacgactaccctggg

SEQ ID NO: 2762 - DNA, 382 bp, Zea mays
  Clone ID: LIB3116-006-Q1-K1-F12
cctgcctcctcctccttcttcttcttacccggtcttcctctgctgcgcctcgggccagaagcctgtcgctgacggggaaccgcctgcagcccgcggatgaccctgctccagaggttcccgctcccgcccagcagggtgcgggtgctggtgctggtgcggtgggagctcgagaccccggcggcgaggtggcggtgaggatggacatcgaggtcaacgactaccctgggtccggtgccaacaaccgccatgaaccgagaagccctgggaggccattaccataacgattgaaagcttgaagctagcgtacgtttcagacaggaattaagaatgaagaccatggcatggagctgctgctgctgtcttgagagtttttatagtagcg

SEQ ID NO: 2763 - DNA, 414 bp, Zea mays
  Clone ID: LIB3116-006-Q1-K1-F2
catcgacgaggtctggtcctccggcgcgccggccttcctccccgccgacgctcacgcccgcgccgtccagcggttctgggcgcagtacgtcgacgacaagctgccttgggcgatccgcatactgaagggaacggacgacgacgggggcaaggagcaggcggcggggcagctgtccgcggccctgcagctcctcgaggaggctttcgcgcagctcagccaggggaagcgctacttcggcggggacagcgtcgggtacctggacatcgctctggtgtcgcatgtcggctgggtgaaggcggtggagaagatcgccggggtcaccctgctggacaaggccaaggtcccgaacctggtggcgtgggctgatcgtctgtgtgcccacctggcccgggtcgacgccatccctgacgcgga

SEQ ID NO: 2764 - DNA, 411 bp, Zea mays
  Clone ID: LIB3116-006-Q1-K1-F3
gccggttcgaggagatcacgttccaggccgacgaagagcaggtgcggttccagggctctgggtgcagctccgacgacggaggcgggcaggctgagcagtgcgccggggacggaggcagtactgtaactgaacgttcagaccagccatgacctggttcctcgcaggagcaactcctgttttaaaaatctgaaaatgtcaccagtgcagccgcacagctgcttgtaagtgaacttttttgtggctctggttgagcatacgatcgttaagacggatatagtttgaagtttcaacaggcaagtgctttccctgatctttggtggtggttttttttccactctaaaactggtttgtagaactcacacagaatgacagaatagtgtattataaatagataaccaaagacagttggat

SEQ ID NO: 2765 - DNA, 415 bp, Zea mays
  unsure at all n locations
  Clone ID: LIB3116-006-Q1-K1-F5
cccacgcgtncgactagttctagatcgcgatctagaactagtctgaagatccatgttctgtgtgccttgaaaatccttctgtgggagatactatccgccatttgccttgctttcacaagttccataaagagtgtattgacgagtggcttangagaaagaaactgtgcccagtctgcaagtttgggattaactgaagtttgccgtaccagtctacagtggagttctacttggtagtggcagcgacgaggtgctgcaatttctcatacgggatgctttcctgcagagatttttttttgtctaagataaaaaaaacaatgtattgctgtgatctgcgcttttgggcatcattttgtatgcacgcacgttttcttgctatttttggtggtcgaatccaccaattcccatgaattgggta

SEQ ID NO: 2766 - DNA, 357 bp, Zea mays
  Clone ID: LIB3116-006-Q1-K1-F6
gcaaccggtccagcactttcacgctcagctccagcaatggctgcctccaccatggcgatctcctccacggcgatggccggcacccccatcaaggtgggctccttcggcgagggccgcatcaccatgcgcaagaccgtgggcaagcccaaggtggcggcgtccggcagcccctggtacggccccgaccgcgtcaagtacctcggccccttctccggcgagcccccgagctacctcaccggcgagttccccggcgactacggctgggacaccgccgggctgtccgccgaccccgagaccttcgccaagaaccgcgagctggaggtgatccactcccgctgggccatgctcggcgcgctc

SEQ ID NO: 2767 - DNA, 445 bp, Zea mays
  Clone ID: LIB3116-006-Q1-K1-F8
cccacgcgtccgcttcctctctggtggacagagcgaggaggaggccacccgcaacctcaatgccatgaacaagctcagcaccaagaagccgtggtccctgtctttctccttcggccgtgccctccaggcgagcaccctcaaggcctgggctggcaaggtggagaacctggagaaggctagagctgccttcctcgccaggtgcaaggccaactctgaggctaccctcggcacctacaagggtgatgctgccgccgacaccgagagcctccacgtcaaggactacaagtactgagttgcttctctttgcgtgcccgttttggaactcctgcctacgagctaggttgcggagtgtggtttgctcgttagagcttattttcggacatccaaaaaacatgcttcctatgtgggatgatgggtatctttatatttgtatgttaattagtct

SEQ ID NO: 2768 - DNA, 441 bp, Zea mays
  Clone ID: LIB3116-006-Q1-K1-F9
cccacgcgtccggaggtcattgtgagtggaaagctcagggctcaaagagccaagtccatgaagttcaaggatggctacatgatctcatctggtcagccagtgaatgagtacatcgactcagctgtgagacacgtcctcctcagacagggtgttctgggtatcaaggtgaagatcatgcttgactgggacccgaagggcaaggttggcccgatcacccctcttccggacctggtgaccatccataccccgaaggaggaagacgagctgcgccctcctgtcttggcagctgaggtctaaggtcccaacagcgtcctcgaaatggcagtttgatcgggtcctagctaggtttgatcttatgataagggcagtgctaagacagttcgttccgtgtcacttcttgttaaattaagttttgccgagacaagctatatgtaccggatg

SEQ ID NO: 2769 - DNA, 344 bp, Zea mays
  Clone ID: LIB3116-006-Q1-K1-G2
gagattcagatccactcgtcacacatccgcgttaccccctctcccttggtttcctctcccaccaccaacccccatcccggttatctccgccgccgcccgctttgggaaggcgcgacgaaggcaggcgagaggctccagccggacgaggaggaaagaggagcagcagggccggaggagagatgttcctgtgggactggttctacggggtgctggcctccctcggcctgtggcagaaggaggcgaagatcctctttctcggcctcgacaacgccggcaagaccacgctgctccacatgctcaaggacgagcggttggtgcagcaccagccgacgcagcacccgacg

SEQ ID NO: 2770 - DNA, 352 bp, Zea mays
  Clone ID: LIB3116-006-Q1-K1-G4
caaaagcatacaggcatttgcatggcaaggacatgacccaggatacaacctttgagtttgagaggaagaggaacaggcccgagcgttacgaccgcaatttgacggagcagactctgaaggctatcccgcttattacaaagattaggcatgaccgtatgggaaaacacatctcaaacagacataaacctggtaaacgcaaggagatggaaaaggattccaaggagctggagcaggacatcggcatgctcccgaagaagcttattatcaaccatctcgcggctgagaaaacgaaggtcaaggttgaagttgttcagcagcagacagaagataacgcgatggaagagtagtgcgt

SEQ ID NO: 2771 - DNA, 413 bp, Zea mays
  unsure at all n locations
  Clone ID: LIB3116-006-Q1-K1-G5
cccacgcgtncggcttttctttccctcccgttccccgtctgcctccctctcgtcgcatcgcgcaccgcttccccagctcccccaccttccgttgcctcctcgaactcaacccccgcccccgtcgcggatcgtcatggccgccggcctcgccttccccgtcgcctcctttcaactcgcctgcgtctcctcacatccccaccccgggcaccgcatctgctgcgcgatcccgtcgtcgtcctcgcgccgcatcgtcaaatcctcgccgctccgcgcgactaccgtcctcttcagggaacgacggggcacgggccgtggcgcgtccgtagtgtgcgccgtccaaggccaggacacgaccatnccagtnccagatgtgacaaagtcaacatggcaatcactcgtgatcgagagcgagc

SEQ ID NO: 2772 - DNA, 255 bp, Zea mays
  Clone ID: LIB3116-006-Q1-K1-G6
tggtaaccaaataattagaggtgtacgaggattgtcacaggatccatatccgtgttactagttttaagatgtttcatttcaggtctctagattagtgttgatttttttttctctccaaatgaggctaggaacagccagcagttcatttctgtaagttgaatgcagacatctctgtgttgcatatcaacttgcaaggatgtgtcagcctgttgagaacccgaaattatcttttatttgaattttatttattactcc

SEQ ID NO: 2773 - DNA, 438 bp, Zea mays
  unsure at all n locations
  Clone ID: LIB3116-006-Q1-K1-G7
cggacgcgtgggccactctccggtatgaatcccgcgtgcgcttacacgaagattggtaatagtggcgacccagtcgcagccgtggaccttctcctcctcatcgcttgctcgttgtcgtcttttgcctacgtctgcacccgacgctgctacccttcgctcacctgttcatcatcctttcagatctgctgtcgtgacctcatccagccgtgctgtggcagtggatcgaagttcgctccagctctgattgggggaaaatgactagggtatcaagtggaaaaacataatggtccaggttctactgcggcacctctttcaggctaagcatctanacaacaatatgtaaaatatcctttttcaataaaatacatgcttaaatcgtggctgctaggcgaatggtcctactttggtcatcaaatgcaggaatttcactactatatg

SEQ ID NO: 2774 - DNA, 240 bp, Zea mays
  Clone ID: LIB3116-006-Q1-K1-G9
agcgcagatacccatgctcggaagccacagcctcttgtaaatatgtaaatgtgcccgggcatggtgtttctgagtagcagcaaagagatctaccatgtataggagtttctccttgtaaataatagtagcacgccaggagactccatcccaagttccgtactgcttgcgcgaccagatgctgtaaactagccagatacttgaagaccaatataaatggatatgtctaaaagagtgtttcgg

SEQ ID NO: 2775 - DNA, 282 bp, Zea mays
  Clone ID: LIB3116-006-Q1-K1-H1
cggacgcgtgggcgcgagtgagtgaacaccagccgtattgtcccgaccccgaccgatcctcgcctgctgcagccatggcgacctccgcggcgctctctaccgccgccaatcccacccagctctgccggtcccgcgcttcgctgggcaagccggtgaaggggcttggcctgagcatgggccgcgagcgcgcccagcggagcattgtgtgccaagcggcgagcagcatcttcgccgaccgcgttcccgacatggagaagcggaagctgatgaaccttcttcttc

SEQ ID NO: 2776 - DNA, 420 bp, Zea mays
  Clone ID: LIB3116-006-Q1-K1-H10
tcggcggagcaggtaaacccaaccgtaatccaccttttcagaaatgaaattgggcggtggagggcggctccatgttctactactctgcaccccaaactcgaatccacctgcaacggagacattatatggctgtttgttggacctttcatctgggagtggagctcctattctggatgcacaacaggtgtttgagtggttgcttcaaccccacacagataaaggtaaaaaggtcggtcttcctcttcaatctcctccaaagagggttaaacaaggatcactacacatcaacgattctaccagctaaaaggatttgcttaatgcagaatgcctcaccttatgttatcgatcctaccttaacccttcagtcatgcctgttacatacaactcgtgtgctgatgcttatgttaacctcagatgacg

SEQ ID NO: 2777 - DNA, 195 bp, Zea mays
  Clone ID: LIB3116-006-Q1-K1-H12
tcggaaacacttgtaatcactctcttcatctttacaccagcaacgttcaaaaacacgctattcgtgcctattacctaaacaccatttcgggaccattctatgcacaaatggaacatcacgatgcttcaaaatctacaactatgcaggcagaaacacttgtaatcactctcttcatctttacaccagcaacgttca

SEQ ID NO: 2778 - DNA, 360 bp, Zea mays
  Clone ID: LIB3116-006-Q1-K1-H2
ggtgctggcaaagcctggctctatcacaccgcacaccaagtttgaggctgttgtgtatgtgcttaaaaaggaagagggtgggcgacactcacctttctttcctggttaccgcccacagttctacatgcggacaactgatgtgacagggagtgtgactacgattatgaatgacaaggatgaggaggcgaaaatgtgcatgcctggtgaccgtatcaaaatgattgttcagctcattcaacctgttgcttgtgagcaaggtatgaggtttgctattcgtgagggtggtaaagaccgttggtgccggtgtcatcaacaaaatcattgagtaaactggatataacatatccaccatgagaattt

SEQ ID NO: 2779 - DNA, 257 bp, Zea mays
  unsure at all n locations
  Clone ID: LIB3116-006-Q1-K1-H3
ggggagtctaacaactgcacttgctgccattgtcggggagtgcgtgtgtgtagtgcancagctattaacaccacagtttgagtgtgctagcggcgtgtgtttttatttaggcgacattgtcgattaaattcttgtgtcgggattattacctttaccttacgtgctggtttagtttggcaccctgtatctgtatctgtattggatcacgcccacccttggcttaaatcagcattagaaaattctccatgtttgctgtt

SEQ ID NO: 2780 - DNA, 419 bp, Zea mays
  Clone ID: LIB3116-006-Q1-K1-H4
aaaggttgaaagacttccctagaccattttggctagctcttttcgtcgagggtactcgctttactccagcaaagcttctcgcagctcaggaatatgcggcctcccagggcttaccggctcctagaaatgtacttattccacgtaccaagggatttgtatctgctgtaagtattatgcgagattttgttccagccatttatgatacaactgtaatagtccctaaagattcccctcaaccaacaatgctgcggattttgaaagggcaatcatcagtgatacatgtccgcatgaaacgtcatgcaatgagtgagatgccaaaatcagatgaggatgtttcaaaatggtgtaaagacatttttgtggcaaaggatgccttactggacaagcatttggcaacaggcactttcgatgaggagatt

SEQ ID NO: 2781 - DNA, 250 bp, Zea mays
  unsure at all n locations
  Clone ID: LIB3116-006-Q1-K1-H6
ccantnnngaaacantngnnatcactctcttcatctttacaccagcaacgttcaaaaacacgctattcgtgcctattacctaaacaccatttcgggaccattctatgcacaaatggaacatcacgatgcttcaaaatctacaactatgcaggcagaaacacttgtaatcactctcttcatctttacaccagcaacgttcnnnanaaaaaaaaanaannnaananaaaanaaaaaannnnnaannnnnnna

SEQ ID NO: 2782 - DNA, 377 bp, Zea mays
  Clone ID: LIB3116-006-Q1-K1-H7
caagggggccaaggggagccagctcgagaccaacaagaaggccatgagcatccagtgcaaagtgtgcatgcaaacattcatgtgtaccacgactgaagtgaagtgcagggagcacgccgaggccaagcatcccaagacagacgtgtaccagtgcttcccccatctgaagaagtgaaaggcctgaacttagcaaccagtgctggtttggccaggggcgttccttgtgttgagggtgttcattccgtgttatcttcccgtcagtcatgcgtcctgtcctatgttaacctacataagaaagtgatgtggtgtccacttctagtgaaactactgtctgcttgtaaaacctggttggtttcagaacgatgattttcgtgtgc

SEQ ID NO: 2783 - DNA, 374 bp, Zea mays
  unsure at all n locations
  Clone ID: LIB3116-006-Q1-K1-H8
ctttcacaatgcctcttatgaagcttgcttgcactgcattggagagagttcctttgacacgcagaaaagtgattgacaatttgatgaanaaatttcatcaagatttggtattttgccgctcacctgctgatagtgaactgaccattggagttcatcaaaagcagaaggagaaaatcgatccgattctggagtgggtagacactgaatttgggttcaaacccgttgtctacacaagcttctttggggggaagcaagacgagggccttgctaaagctgtagaaactgttctgaagaaagcaactgactgtgagttggcatccattgatgctatggctgcagcagcccattccttggtgatccctcttgcaatattt

SEQ ID NO: 2784 - DNA, 326 bp, Zea mays
  Clone ID: LIB3116-006-Q1-K1-H9
atcgcacaagtaaacccaacctttatgcattttcttaaaaatgaaaatatccggtggaaggcggatccatgatggactactcggcaccccaaactcatatacacctgctacggagacataatacggctgatcgttggaccatttatgtgggagtggagcttctattctggatgcacaacacgagtttgagtggttgctacaaccccacacagataaaggtaaaaaggtacgacttcctcttcaatctcctccaaagagggttaaacaaggatcactacacatcaacgattctaccagctaaaaggatgtcgcttaatcgcacaatg

SEQ ID NO: 2785 - DNA, 350 bp, Zea mays
  Clone ID: LIB3116-007-Q1-K1-A1
ggcacaagccatggcgtccatgaccggcctctcgcagggcgttctgcccagcaggcgcgccgccaacagggccaggacggccggcgtcgtcagggcgtccgccgaggcgcaggcgcaggcgggccgccgcgccgtgctcgggctggtggccactggcatcgtcggcggcgccttgtcgcaggcggtgcacgccgagaccgtcaagaccatcaagatcggagccccgccgccgccctccggtggactccccgggactctgaactctgaccaggcgagggacttcgacctccccttgaaggagcggttctacctgcagccgctgccgccggcggaggcggtggcgagggtga

SEQ ID NO: 2786 - DNA, 354 bp, Zea mays
  Clone ID: LIB3116-007-Q1-K1-A12
cccacgcgtccggcaaattttgatgcttttgaccggctgtcaatacatgactgctattttggaccggagtagttgatcatgaaccagccgtgtcagtaaacgcttggcagttgccaatggattttttcagtagttggcacctccaggtcggcatcaataacaaaagaatgctgcgaaacaactcaatgatccatatttgacgagtatttacaaattccttgattcaatagtttttcactgtctgggtcctccgaatctgcatcaacagaataacctggaaagcaaattaaggatgcgtacctgatatgcatcggaggatctttttttttttgttccaatggtattataagcatc

SEQ ID NO: 2787 - DNA, 354 bp, Zea mays
  Clone ID: LIB3116-007-Q1-K1-A3
cggacgcgtgggtgcaggcacgagccaggaagctaaatcaaaatcatgattttttgcaaatgctcatacaacaaaatggtggctgaagtaaagaagtacggagaaaaccttgctgtcttgagttcaggcgaataccttctgtctccaaggtttagccttcaacctaagggaatctaaaaggtaaacatgatggactcatcaaggagccacaacacgttcattcttttagaatgttcggttattaggtgaagtatacagagctgtaaactggtgatgcacattcatgcttcatctaaaacaaccgaacgttatggcttctgatagcggatagcctactcgacgcaaatcggtaaa

SEQ ID NO: 2788 - DNA, 313 bp, Zea mays
  Clone ID: LIB3116-007-Q1-K1-A4
tcggtcacaggtgttgtcgatgatccaccactagtagtagggatggtcatgaacgggctgcccatcagcgtgtacgcgccggagacggtggggtgcgcggtggtggacgcgacgggggcctgcgcggcggccacgtccacgggcgggctcatgaacaagatggccggccgcatcggggactcgccgctcatcggctccggcacctacgcgtgcggcgcctgcgccgtgtcgtgcacgggcgagggcgaggccatcatccgctgcacgctcgcgcgcgacgtggtcgtcgtcatggagtacaaagggcttgccc

SEQ ID NO: 2789 - DNA, 340 bp, Zea mays
  Clone ID: LIB3116-007-Q1-K1-A5
tcgcggacgcgtgggtgcatgctcgagccattaagctaaatttatatcatgattttttgctaatggtgatactacaaaatggtgggtgaagtaaataagtactgataaaaccttgctgtcttgagttcatgcgaataccttctgtcttcaatgtttaaccttcatcctaagggaatctaaaaggtaaacatgatggactcatcaaggagccacaacacgttcattcttttataatgttcggttattatgtgaagtatacagagcttgttactggtgatgcacagtcattgcttcatctaaaacaaccgacgggtattgcttctgataacggatattctac

SEQ ID NO: 2790 - DNA, 345 bp, Zea mays
  Clone ID: LIB3116-007-Q1-K1-A6
cccacgcgtccgcgtgcttctccgccgtcgaggccgcgtcccagtgcgaagagaccacgactcagatggccagccgctgggtccggcccgaggtgtacccgctgttcgcggcaacgggcgtggccgtcggcatctgcggatttcagctcttccggaacatcaccggcaacccggaagtcagggtaaacaaggcagggagggcagctggtgtgcttgagaaccatgaggaggggagacgttacgccatgcatggcctaagaagctttgtgcacgacaaggactctgggaatattgcttgaatttacaaggtctttaatgacccttagttgagcatggtgattggca

SEQ ID NO: 2791 - DNA, 341 bp, Zea mays
  Clone ID: LIB3116-007-Q1-K1-A7
gccacgcgtgcgcgtgcttctacgccgtctaggccgcgtgccagtgcgaagagaccactactcaaatgggcaggcggtgggtgcggaccgaggtgtacccgctgttcgcgggaactgacgtggacgcctgcatgtgccgatgtcagatcttccggaacatcgccggctacccggaagacatgatggacacagcagggagggccactagggtgcttgagaaccatgaggaggggagacgttacgccatgcatggcctaagaatctttatgcacgacaagacttcatgtatcatgcccgaaggtaacaggttctgaactgaccctaactgaagcatgctgatt

SEQ ID NO: 2792 - DNA, 104 bp, Zea mays
  Clone ID: LIB3116-007-Q1-K1-A9
gtggcaacaccggcaaatggttgtttgaccatgaaaacctgtgttataactcacaggagacgatggtctcgcttcattgtgcaaagaaaggggagagttctaat

SEQ ID NO: 2793 - DNA, 188 bp, Zea mays
  Clone ID: LIB3116-007-Q1-K1-B10
ctgtcgcgtgagcactcacgtgcagggggatagtgtaatacactattctacttactgatctgcacatgctaacgactggggagtgaaagtcatatgtgaaacaaatcgggatgacgcgatggataaatagaaatattttgcattgaaacatgatgatttttgagatcagctctatgattgaatatctc

SEQ ID NO: 2794 - DNA, 244 bp, Zea mays
  Clone ID: LIB3116-007-Q1-K1-B11
gtaggacacagcacaacacacctggaatgaacaagcagccaacaccggagctgacaatcacgctcatgggaaagctctcacccgttaaccttgctacacttgcgcacacacacattgggtatatgcaaacgtaacattacacaggagcagccgcggctgcgtcctgcagcgtgtgcttcaaggactacctcccggtgataagggagccgatagataatgactggctgatgcggaacatgacaag

SEQ ID NO: 2795 - DNA, 153 bp, Zea mays
  Clone ID: LIB3116-007-Q1-K1-B12
gccgctcgccggactgacaccagagacagactacgttgtgttcctggaggacagcaccacgccggggggggcctaccgaggcgtgagctaccccaaccacgagaccgccgcagcctggggcggaccgaccgtcattcgccacgccgtgtgcct

SEQ ID NO: 2796 - DNA, 308 bp, Zea mays
  unsure at all n locations
  Clone ID: LIB3116-007-Q1-K1-B2
acgacgcaaccgatccccaaatcttcccagttcccccctcccgctcgacccagatcgaggcctcgatccaccggccatggcgctggagtgggtggtgctgggctacgcggcgggcgcggaggcggtcatgctgctgctgctgacgctgccggggctcgacggcctgcgccggggcatggtctccgtggtgcggagcgcgctcaagcccatgatgtccgtggtgcccttctgcctcttcctgctcatggacatctactggaagtacgagacgcggnccacctgcgacgacgagcacgcctgcaccccct

SEQ ID NO: 2797 - DNA, 353 bp, Zea mays
  Clone ID: LIB3116-007-Q1-K1-B3
ctcgattctcctcgctcctcggccctcgcccacctctcgctagtcgctccccacttcccagtctctgtggccggacgccgcggcgagatggcctcgacctgcttccgcgccgccgcccgcgtggcctccgccgccagtcgctcggcggcggcctaccgctccgctccctccgcggcacgcgccgtggcaactgccgcccaccgcatatcgtgcttctccagggtgccggtggagctcgggtgctgcgcgggattgtcactgctgccgctgcacagtgcggtggcgtcagccaggctgacgtcgcggctgagcacggcgtcgagctgccgtgctctctctcagcagatgggtca

SEQ ID NO: 2798 - DNA, 311 bp, Zea mays
  Clone ID: LIB3116-007-Q1-K1-B5
gctatccaatgaactagctcagtctcagtatatatgctttagacctgagggtaatggacaggagaacaggagtggggtaaatgcacaagcagagagacaggatctgtagaggtaggcgagagatactccggtgtactctgtacatggttctaaaaaattgggcagaaactggattgtccagaccgttcatatacgttgtactagccagttgttgtactagccagttgcgctacggttgtttgttatatattatactaggtgtgtgcccgtgcgttgcaacggaaacatataatatcataataacttatatt

SEQ ID NO: 2799 - DNA, 258 bp, Zea mays
  Clone ID: LIB3116-007-Q1-K1-B9
gaggaatgataccgtttcggaggaagctgctggtgctctggctctgctgatgaagcagcctagcatcgtgcaccttgttggtagctcttaaacaatgatcaactaccttggtggggttaatgaggcgtgggactccaaagggcaaggaaaacgcagggtcagctttgattgaaatatgccggaaaggtggatcgacattggcacagcgcgtggcaaggatacccgggttgaacacggtaatgcagaacatcacgctac

SEQ ID NO: 2800 - DNA, 332 bp, Zea mays
  Clone ID: LIB3116-007-Q1-K1-C1
cagcaatccacacaagcacttcgacgtcacacgggcgctgcgcacagacacaccaagcgtcggcaccaatggcttactaccaggaggtggactactgctcggaggaggtgaggtcggtggccccggccggcttcggccgccacggcggcggcgtccagcagcacgtcgtcaaggagaagttcgaggaggtcgacacggtctcacgcgccggcgcctaccaccaccaccaccatggtcaccacggcggccacggcttcgtggtgcgcgagaccagggtctacgaggacatcaacacctgcaccggcgaggtccacgagcgcagggagaagctt

SEQ ID NO: 2801 - DNA, 217 bp, Zea mays
  Clone ID: LIB3116-007-Q1-K1-C10
cccacgcgtccgtggttattgtcaggattgttctaatttggactgtcccgatccgaggttttggttcgccggccattggtactagaagctaacagcactagttgtagcactgacgatgaacttacctgtaaatatggccacagaggccttggcttcttcctgccgaaggtcgtggacctgatgaacattttgaatgtagccttcatcttttgggcgc

SEQ ID NO: 2802 - DNA, 247 bp, Zea mays
  Clone ID: LIB3116-007-Q1-K1-C11
cccacgcgtgcgtggttattgtcaggattgttctattttggactgtcccgatccgaggttttgggtggccggccattggtactagaagctaacagcactagatcgagcactgaccatgaacttacctgtaaatatggccacagaggccttggcttcttcctgccgaacgtccgggacctgatgaacatttggaatgtaaccttcatcttttgggcttaagaaaaacctcgaggacatgatttcttac

SEQ ID NO: 2803 - DNA, 317 bp, Zea mays
  Clone ID: LIB3116-007-Q1-K1-C2
gccgctggccgcgctgacgccggcgacggtctacgcggcgttcctggtgtacggcaccgcgccggagggggcctaccgcggcctgagctacccggaccaggagacggccgtggccgtgggcgggcgggtcgtcgcgcgccacgccgtgtgcctccgccccgacgacgccgaggcgcgcaagttcaggggccgcggcgccggggaggaggcgaggaggccgagcctgcgggctgacgggtgggaggagatggagatgggacgcctggcgcacgccgccgtggaaagcggcggcggggggggcgacgtctgcgtggtgc

SEQ ID NO: 2804 - DNA, 292 bp, Zea mays
  Clone ID: LIB3116-007-Q1-K1-C3
cactgatccagtgccgcgtctacctgtccaagccggggcggcggtcgtgatcgatgatggctcgtggctgtgagagaccgaagagagaagaagatgatgggagggggaatagtgcccattttgggtcggccgtcgaggtctcccgccggcagtcggccggggcagtggccattatgatgatgatgacggcggggtggctgctatgtatgtaaatctatccagacatgtagggatgttctaatccgtaatataaatggtattttcagttccaaaaaacatggaaagcacaaag

SEQ ID NO: 2805 - DNA, 352 bp, Zea mays
  Clone ID: LIB3116-007-Q1-K1-C4
cccacgcgtccgctggactacctcgggaacccgagcctcatccacgcgcagagcatccttgccatctgggcctgccaggtcgtgctcatgggcgccgtcgagggctaccgcatcgccggcggcccgctcggcgaggtcgtcgacccgctctaccccggcggcagcttcgacccgctcggcctcgccgacgaccccgaggccttcgccgagctcaaggtcaaggagctcaagaacggccgcctcgccatgttctccatggtccggattcttcgtccaggccatcgtcaccgggaagggcccgctcgagaaccctgctgaccacattggcgaccccgtcaacaacaacgcttgg

SEQ ID NO: 2806 - DNA, 355 bp, Zea mays
  Clone ID: LIB3116-007-Q1-K1-C5
cggacgcgtgggctctgctcgagcaagtggaggaggagaagcagcgcgtgcctcaggtcccggaagagcctaacgctattaccttcaggaagaaatgatgatcgttctattatctgccaaatggacaccgacctagcttgtttatagcatagcttcgccttcaatagctagctccatcgatattttaagatctgtacaatacgccccgctaagccactagtgctgtcaaacatgaaattatccattttctgccgcgcgccgttatgggacaataccgtagcaccaagaaccaaatccgttctttgagatatcattgtcgttgtaactatatcatccgcaaagctacagtttgggg

SEQ ID NO: 2807 - DNA, 363 bp, Zea mays
  Clone ID: LIB3116-007-Q1-K1-C8
cggacgcgtgggcggacgcgtgggcggacgcgtgggcggacgcgtgggggcgggttggcttctcctcccccaccggttcgtgttcaggttctggttcgtgggcgagagggaagagatggcggcgtcggacgttgagtaccgttgcttcgttggcggcctcgcctgggccaccgacgaccactccctcaacaacgccttcagcacctacggcgaggtcctcgagtcgaagatcatcctggatcgggagacgcagaagtcccggggcttcggcttcgtcaccttctccacggaggacgcgatgcgcagcgccatcgagggcatgaacggcaaggagctcgacggccgcaacatcaccgttaacga

SEQ ID NO: 2808 - DNA, 386 bp, Zea mays
  Clone ID: LIB3116-007-Q1-K1-C9
gtggatcaccacggcgcccatcgaggacatctccttcgtcgccgccacgcgcaccggcttcctccagctgttcgactacatccagggcaagaacgcgtacaacgagacgatcgagatgacggcgccggtgctgacgcgggtgtcgcccaacgacgggcccttctgcgcctccgccttcgccgtgagcttctacgtgccggccaagaaccaggcggacccgccgccggccgagggcctgcgcgtggaccgctgggccggggccaggtacgcggccgtgcgccgcttcgggggcttcgtggcggacgtcgacgtcggggagcaggcggcgcgcctcgaggccagccctccaggcacccggtgggccgccgccgtcaacgacgcgcgca

SEQ ID NO: 2809 - DNA, 455 bp, Zea mays
  Clone ID: LIB3116-007-Q1-K1-D11
gccgacccacgcgtgcgcaggggatgaaaaccgacgctgatgtatttttaagtggtggctggacactcccctccgtgggctgctagccctgctcctgcgctcccaatagccaacaccaatgggacgccacaaaagccgcctcctattcctgcctctgccttctacatgcccaaaccaaacctccggggccttaacaagcccaagtgcatcttgtgtggtaacatcaaccgctcccggtgcccattccagtgttgcaagagctgctgctacaaggctcagaatacttgccacatccatgttctgaagcagacaaacacattgtcagataaaccgtcacctgcaactgctcctgcaacaacagaacatcaatctaacaatttacctgcaaccactttaccgtcaaggctggctggcctgcaaaaacttccccagcaccttttgaagtttctccaaac

SEQ ID NO: 2810 - DNA, 294 bp, Zea mays
  unsure at all n locations
  Clone ID: LIB3116-007-Q1-K1-D12
cgggccgcgtcgctgaagaagtacgcgcccgacagcgcccccgcgctcgccatcaactgccaccatcgagaagaccaagcgccgggtgcgagaactacggcaagttcgggctgctgtgcggcgccgacngcctgccgcacctcatcgtcagcggcgaccagcggcactggggcgagttcgtcaccccgggcctgctcttcctctacatcgccggctggatcgggtgggtcggcaggagctacatcgccatcagcggcgagaagaagcccgccatgagggagatcatcatcgacg

SEQ ID NO: 2811 - DNA, 313 bp, Zea mays
  unsure at all n locations
  Clone ID: LIB3116-007-Q1-K1-D2
cccacgcgtccgcccacgcgtccgcccacgcgtccgcccacgcgtccgcccacgcgtccggaaactcggttctcaacctgatctcatcttgatccacaaccctttcgtgcctcccaagggcaagctcgtcgaattctggaagatcctcgaagagatgaaagattctggagaacttacggcgtctctcggagtatcgaacttccgccctcaagatttcanagagttgttatcggccgacatcaagtataaacccgtttgtaaccaactcgaataccacccctacgtactagaagctctcgaaccccgtttcaaa

SEQ ID NO: 2812 - DNA, 360 bp, Zea mays
  Clone ID: LIB3116-007-Q1-K1-D3
cccacgcgtccgcccacgcgtccgcccacgcgttcgcccacgcgtccgcccacgcgtccggaaactcggttctcaacctgatctcatcttgatccacaaccctttcgtgcctcccaagggcaagctcgtcgaattctggaagatcctcgaagagatgaaagattctggagaacttacggcgtctctcggagtatcgaactttcgccctcaagatttcaaagagttgttatcggccgacatcaagtataaacccgtttgtaaccaactcgaataccacccttacgtactataagctctcgaacccgttttcaaaatccaacaagaacatggtatcctcacggaagcttacggaccttcttt

SEQ ID NO: 2813 - DNA, 323 bp, Zea mays
  Clone ID: LIB3116-007-Q1-K1-D4
tcgcccacgcgtgcgttagaaagaaagttgggtaactaaacaatatatatggcaagtgctatcaagaaacaaatagaaggaaaaatacaagaagcaagtatgatggacctgatcgcaagacctattggtgagctgatggttgcgtgagtaatgtgacgtcagaaaaaagaatcaactactacataaactatgtatagaagcggcagattcacttcataagatgtagcacctgtctttactaaaagagtgtatggattgaggaatgaaatgatccatgttatgctgcactgaaggaatcgaaagtgtgcaccgctttcttggac

SEQ ID NO: 2814 - DNA, 401 bp, Zea mays
  Clone ID: LIB3116-007-Q1-K1-D5
cccacgcgtccgcccacgcgtccgcccacgcgtccgcttcctcgctccgccaccgccacgctgaaaacccacgcgctaagtgcaccccgccaggtctaccagacgctctccggagcggcacgcgcgcgccaatggcggggccttgaggtgctcgtggggtgagggagggaggacggcgctggttagtgagggcgttaagcggcggctcggcgcggcgggccgggaggatgatacggcaccagatacggaacgagtatgggctggcggatccggaggtgtacgcggccccgggggaggaggatgacccggaggcgctcctcgaaggcgtcgccatggccggcctcgtcgggcgtggctcccgggccaggcttcgggggggggggaaaatttcctttttgggg

SEQ ID NO: 2815 - DNA, 203 bp, Zea mays
  Clone ID: LIB3116-007-Q1-K1-D6
gcgtccacgcgtgcgtccacgcgtccgtccacgcgtgcgcttcctcgctccgtcaccggcacgctgaatacccacgcgctaagtgcgctccaccaggtctaccagacgctctacggagcggcacgcgcgcgccaatggcagcgccttgaggtgctcagagggtgagggacggacgacggctctggatatagagggctttaagc

SEQ ID NO: 2816 - DNA, 219 bp, Zea mays
  Clone ID: LIB3116-007-Q1-K1-D7
gcgtccacgcgtgcgtccacgcatgcgtccactcgtgcgatttctcgttcgtccaccggcacgcttaaaacccatggacggagttcacgaggacatgtttaccaaactctctactgaggggtgcatgcgcgctaatgtctgcgcctcgttgtgctacccgagcgagggtggtaggaccgacctggttattgatggcgacaagcaccggcttggtgctgc

SEQ ID NO: 2817 - DNA, 281 bp, Zea mays
  Clone ID: LIB3116-007-Q1-K1-D8
ggacagccgggactaccctccctacagggacggcagggactactctcctccccacagggaccctcgggactactacgaaagcaggggtggccggggctactcgccgcctccttatggtggtggtaggtcaaggagggaccgatcgcctccaccgtatcggatgcctgctaggtgctccagtggtagcagctgcgtattcacttcatcagttgtagcacctcgtcattactaaaatgtgagttgtcttgaagaacgaagggatccatcttcttcgtcacaaa

SEQ ID NO: 2818 - DNA, 408 bp, Zea mays
  Clone ID: LIB3116-004-Q1-K2-E2
actagttctagggtcgactacgagaagaaggagaagcaccacaagcacatggagaagctcggcgagctcggcgccatcgccgccggcgcgtacgccctgcacgagaagcacaaggccaagaaggacccagagaacgagcacgggcaccgggtcaaggaggaggtggccgccgtcgccgccgtgggctccgccggcttcgctttccacgagcaccacgagaagaaggacgccaagaagcacgcccacaactgatccgtcgcggttgctgttccatctgttcttccagcctcgtcttcgtctactgtgtgccggccaggccttgatttgggctaccgatatttgcatggacgtatgaactgtgttggtcggtcctcggcgttcttgtatcaagatcaaatcaggccttga

SEQ ID NO: 2819 - DNA, 435 bp, Zea mays
  Clone ID: LIB3116-001-Q1-K1-B12
atgcgtccacgcgttcggttatcaagaactggaactacaccggtctggtggaagcgttccacaatggcgggggctactgctacacagcgaaggatcgaacagaggaagatctgacagaggatctggaagcagatctacgacctaagaaagacatgcttatgcttcatcgaggtcatcgtgcgtaaggatgacaccatgaaagagcttctcaagtggggatctaggctttctgatggcattatgcgaccacctaatgctcagtgcatacatcaggtctcctagaattgacctgaaacccgaacgcttactggcgacgatcatgacacgaaggctatacgatgacatgctgccgacttccgaattgatcgtcactgtgattcactgaaggtgcaagtacttgatggaaaactcgaaatccacttgcatgaatcatgg

SEQ ID NO: 2820 - DNA, 463 bp, Zea mays
  unsure at all n locations
  Clone ID: LIB3116-001-Q1-K1-B2
ccagaaagcaggaaaccaaacagtgtcatcatcaacttcttcgatgaggatgaacattcgcagccctacttcaagcctccccatctggacaaccccatttgcactcttctgctgtctgaaactacgatggcatttggcaggtcacttgtcactgacagcaacggcaactacaagggacctctcacactctcactaaagcaagggtccctattggtgatgcgtgggaacagtgccgacatggcgcgccacgtggtgtgcacgtcgtccaaccggcgcgtgagcatcacgtttgcaagggtgaggccatcgacgccggtggatctgagcccactcccgtcccccaccaaggccttgacgccctggcagccgcagccagccacggcctnccaggtgccggcgcccgcgtgcatgacgcagaagcccccggtcagcggcgccatcatcggttatgccccgaccccgc

SEQ ID NO: 2821 - DNA, 356 bp, Zea mays
  Clone ID: LIB3116-001-Q1-K1-B3
gatatctacagaatgcacccttactagcagccgcctcggtcttttactctttgacccaacaaaaagaaaatggaacattgtcacatgataaacagacataaagttacatgagatctctcttactatccttgttcctagttcttagcttttcaccgtagcgaatcatccgtgtcttgcaacgccgtggttagagatctttaccttttcctctcactacgtggttcaaggcgataactgtcaaactaactgcttcaaccgtatcataacgctcaacagtcaagtccaaacccttgaggaccatcatggcgtttgccatttcattaaaaatgctatctcaagagtctctttctctttta

SEQ ID NO: 2822 - DNA, 449 bp, Zea mays
  Clone ID: LIB3116-001-Q1-K1-B4
ggtgggttggcttctcctccccctccggttcgggttcgggttcgtgaggttctccggggttggggttcgtgggtgagcggatcgagatggcggcgtcggatgttgagtaccgctgcttcgtcggcggcctcgcctgggccacggacgaccactccctccacaacgccttcagcacctacggcgaggtcctcgagtccaagatcatcctcgatcgggagacgcagaggtcccgcggcttcggcttcgtcaccttctccacggaggaggcgatgcggaacgccatcgagggcatgaacggcaaggagctggacggccgcaacatcaccgtcaacgaggcccagtcccgcggcggccgtggaggcggcggcggtgggtacggtggtggccgtggaggcggcggctacggcggtggcgggcgccgtgatggcggtggcggctacggcggtggc

SEQ ID NO: 2823 - DNA, 435 bp, Zea mays
  Clone ID: LIB3116-001-Q1-K1-B5
cccacgcgtccgcgcgctcgtcggcgagccgcgccgcaagaacctctggatcgtgtgcaggaagacgagcatcgacgaggacgtgtacaaccagctggtggagcgggccaaggaggaaggctacgacgtgagcaagctgcacaggacgccgcaggacgacccgccgccggagagcgacgccgcgcccaccgacaccaagggggtgtggtggttcaagtcgctcttcgggaaatgactgcccgtcaccgcacgcgcgcgtgctccggtacggtgcttgcagttgcagcaaataaaaccaggcctgagtgagtgagggttggtattttagctttgtagtatctgtctcgctatctgtgtgtgtggaactgtggactgtgctgttacgttatacgtgcatgtatttttaagatttctctagctaattgcatcgatcgg

SEQ ID NO: 2824 - DNA, 294 bp, Zea mays
  Clone ID: LIB3116-001-Q1-K1-B9
accacacgatcgaccacgcaagatcccatttaaatacgatcataacatcacaaagcgtttgcatttatatcatattaggatcatcctataatcgtacctgtctcaaattagctatcaacctaagtgactatttattacacgctcacaaatcgatatacgatgccatacgcaaaatcatacacactaatacacaaccatacacgaatagatctctggcacattttcgcacttccaagaccagaacctatcaacgtagacacatagatccctacatatagatcatataatattctc

SEQ ID NO: 2825 - DNA, 439 bp, Zea mays
  Clone ID: LIB3116-001-Q1-K1-C11
cccacgcgtccgcccaggcaaattctgaggtgtctgctcttcttggacgtatcccatctgctgtgggataccagccaacccttgccactgatcttggaggactgcaagagcgtattacgacaacaaagaagggttctattacgtctgtccaggctatatatgtgcctgctgatgacttgacagatcctgctcctgctactacctttgcccatcttgatgctacaactgtgttgtcacggcagatctctgagcttggtatttatcctgctgtcgatccactggattccacatcaagaatgctttctgcccacgtgctgggtgaggatcattacaatactgctcgtggtgttcagaaggttcttcagaactacaaaaatcttcaggatattattgctatcttgggtatggatgagctcagtgaggatgacaagttgacggt

SEQ ID NO: 2826 - DNA, 384 bp, Zea mays
  Clone ID: LIB3116-001-Q1-K1-C12
tgcttcatggctttctacgactctcgtatttcaatctactgcaactaccgtgcacactctagtcaacgcccgcgggaaggcggaatcagaaattagatctgccctttctctgaccttgtgtatgcctgcgaacagagctgatcctgtacgaactatgacctacttcatctcctgtaacatccacggaagaataagccatgcaaggagtgatcacaaagttcgcggttacatccatggtgatgtggatggccccggttgcaatcggttatcggttttactaaccacacgttaccaactctgacttgcaagtcattctctgtgcaaacactcaccaaaagtcaactgactgtcatatcggttaaaatggtgatactgttaaacata

SEQ ID NO: 2827 - DNA, 461 bp, Zea mays
  unsure at all n locations
  Clone ID: LIB3116-001-Q1-K1-C2
ggtaaagaaagagcacgcctcggtgccgttcgatgaccagtgctccattctcgagaaggaggccgtgaacgtgtccctggagaacctcaagacctaccccttcgtcaaggaagggcttgcaaatgggaccctcaagctgatcggcgcccactacgactttgtctcaggagagttcctcacatggaaaaagtgaaaaactagggctaaggcaattctaccggcccgccgactcctgcatcatcataaatatatatactataactatactactacgtacctaccgatatgcacccgagcaatgtgaatgcgtcgagtactatctgttttctgcatctacatatatataccggatcaacaatcgcccaatgtgaatgtaataagcaatatcattttctaccacttttcattcctaacgctgagctttntatgtactatatcttatatgatgaataataatatga

SEQ ID NO: 2828 - DNA, 467 bp, Zea mays
  unsure at all n locations
  Clone ID: LIB3116-001-Q1-K1-C4
agagcgtgtggatttgggggagcttcttcactggagagtggagagctccggtagcgaggcgaaggaaggaagagggaggaggggaatcagagaggtctccccgatggcggactggggccccgtgatcgtagcgacggtgctgttcgtggtcctcacgccggggctgctctgcacgctgccgggccggggccgcgtcgcagagttcggcagcatgcacaccagcggcctggccatcctcgtccacgccgtcctctacttcgcgctcatcaccatcttcctcatcgccatcggcatccacgtttacgcgggctagtagccgcccggagcaggatgcgatatacggagtagtaggttgcgccgncgncgtgatccagatcaagatgtgttttttttctttggtccttttcgctctctctctctctctgccctcctcctcggatttgctgccagtatggacgaaatcattg

SEQ ID NO: 2829 - DNA, 456 bp, Zea mays
  unsure at all n locations
  Clone ID: LIB3116-001-Q1-K1-C8
cccacgcgtccgcggacgcgtgggcggacgcgtgggcgggccgtgacagactggagcccgtgcgccggcttcgccgggccgcctccgcctcctccatcgcacgccggctccgctgcctccatccgcgcacgtccgcctccactgtctccatccgctcgggagccgccgccctccgcgctaggcctcgcctccgtctggtctggattcttcgacacctgggcgctccgcgtcgccgacttctcgcaggcggagagtgagcatccttgatagacctgatggctatcgcagagagctgtgttgatgcggtggtcatggagatggtagcagtctactgcggtggcctctacaccgncaaaccagagcttgctgcccgccgcatcgaggccatcggctttcaagtcgggcaccagctctctgagagatataccatggagcgccctcgatttagtgatcatc

SEQ ID NO: 2830 - DNA, 318 bp, Zea mays
  Clone ID: LIB3116-001-Q1-K1-C9
taccggacctacgaccgctatgtgccatacttgattgcaaagatggataaataggctataggtggggaagaccaacgatctagggggccctatcttacatacgcttgcatacgaatttaatccttctgtataccgtgcctctaaatacaattgaatgacctacacttgacacacaggatggactgttaaaaccctgccattacccacctctaaacctactcatgacatcactgtttccccagatgacactatagccataagacccaatctaatagcttttgataacaatatctcaatctgaatggcaaatactactcc

SEQ ID NO: 2831 - DNA, 294 bp, Zea mays
  Clone ID: LIB3116-001-Q1-K1-D1
tggaggacttctgcaaggacaaccccgagaccgacgagtgcaaggtgtacgaagcatgagggcagggttctttccacgacgaaacgtacagcacgggcgcgagggttctttccatagagaataatatacagattattcgcccaaagagacgtatgttatatatatgagttgtatgcagtcaccgaactggtacaggcttccgctttccatttcctgttgggagtcgtgtagtgtaatcctggggtgtgtatttgtttcatcaatcatgccagccgatttgaatctcgtttcacc

SEQ ID NO: 2832 - DNA, 376 bp, Zea mays
  Clone ID: LIB3116-001-Q1-K1-D10
gttctagatcgcgagcgacaagggtgtgatcgaagaggagcactgagggacaattagttgttatcggttgagttggagttggtgtttggcttgcaattttctcaaggagaactttgtaatccgttaggatgtgttgcggaccattatcttatcctactttattatcgcatccgttgaagactgttgacgcctataatggcaactgaagactctttagaatccatgctaacgaacacgtacatgcgccagcatcgcctctctctaggcgcacccaaactcaatggccgtgcccgttaaaaaaactcggcttcctttctaaaggcacccgacttacttgcccttgtatggcgtgacctaaatttcatttacggcccct

SEQ ID NO: 2833 - DNA, 362 bp, Zea mays
  Clone ID: LIB3116-001-Q1-K1-D11
attgccccggccggcagcccatgcaatcgcattgcatctatctcatcgatctacttacgtggctgcaccacatgcgtgataataatctgcagattgacctggctactagctggtatattgccaccgtgattgtattaagtttatgtttaacaaaagggtagaagtcgaagtccgagccggcgaaagaaaaaatactggagaaaaaaaaaagagtgcacgaaggagacggaggcgagcgaacaggctggcctaatttcatttgtatgctaatgttacgtgtgtcaatgatgatggagtggttaaattattagtaaaaaaaacttaatcgacttgcaaaacattccaattatagacaactggag

SEQ ID NO: 2834 - DNA, 430 bp, Zea mays
  Clone ID: LIB3116-001-Q1-K1-D2
cccacgcgtccgcccacgcgtccgcatcaaacaagtgccagcgccctctcgcagtcgccggagtggagagcaccttcatcatgatcaagcctgacggcgtccagaggggcctcattggtgagatcatcagccgttttgagaagaagggcttctacctcaaggccttgaagcttgtgaacgtggagaggtcgtttgctgagaagcactacgccgatctcgcctccaagcccttcttccagggcctcgtggactacatcatctctggccctgtggtggccatggtctgggagggcaagagcgtcgtcacaactggccgcaagatcattggcgccaccaaccccctggcttctgagcccggcaccatccgtggcgactttgctgtcgacattggcaggaatgtcattcatggaagtgacagcattgagagtgc

SEQ ID NO: 2835 - DNA, 425 bp, Zea mays
  unsure at all n locations
  Clone ID: LIB3116-001-Q1-K1-D3
aacctcgagtcctcgacaagcacccaaatcgacgaattcttcccccctctccgatctcgacgcgcaccgatgcgggcgatgtcgtcggcggttaatggtatgctgcgggcacggctgcgcggggcagcgcgcgttcgcggcggcggcggcgagggggccgggcggtggacgaccccaggtcacgaggagcgccccaaggggtacctcttcaaccggccgtcgtcgcctccgggggaatctcgcaagtgggaggattgggagctgccctgctacgtgacctccttcctcaccgtcgtcatcctcggcgtcggcctcaacgcgaagcccgaccttacaatcgagacgtgggcgcaccagaaggcgctcgagcgcctncagcagcaggagctcgccgctgncgacacccaggccgagtgatccgcgcg

SEQ ID NO: 2836 - DNA, 446 bp, Zea mays
  unsure at all n locations
  Clone ID: LIB3116-001-Q1-K1-D4
cncgacaagggccgtctgtccaaggaggagatcgagaagatggtgcaggacgcggagaaggacaagtgcgaggacgaggagcacaagaagaaggtggagtccaagaactcgctggagaactacgcctacaacatgcgcaacacgatcaaggacgagaagatcgcgtccaagctggctgccgacgacaagaagaagatcgaggacgccatcgacgcggccatcagctggctggacgccaaccagctcgccgaggcggacgagttcgatgacaagatgaaggagctggagagcctttgcaaccccatcatcgccaagatgtaccagggcgcgggtgccgacatgggaggctccggcggcatggacgaggacgctccggctggaagcggtggccctggccccaagatcgaggaggtggactaagcggtttgtgtcagtctcgtgtgtct

SEQ ID NO: 2837 - DNA, 448 bp, Zea mays
  Clone ID: LIB3116-001-Q1-K1-D7
cgtgtaccaccgcgccctccggccgctgctgcactcgtcgtcgtcgcgctcgggcagccaggccacgcccgtggcgcccactgccgccgacatcaactaagcgactgctcgcttggctgctcgcggtgcagcaggagtgcgcgcagcttcgccgctcggaccagccgcagcgctgtccgcttgagccggagctgcggcactctcgcgggccagacgctggcatgctagccatgccactcctggcctgacccttcttcttgcgcttcgcacctttccgccttgcccacacgaacctctgacgaacctggcttcctttgcgcgcctcgctcctcctctcttacccctctcgcacgcccatcccatatcattccatccggcaccctcttccttccgaaaacgacatactttgctgcgctccacgagtcgaaatgaagccccgtcgtccttg

SEQ ID NO: 2838 - DNA, 460 bp, Zea mays
  Clone ID: LIB3116-001-Q1-K1-D8
gcaccctttcatcagcctgcctgtccactgttggcttggtgacttcctccggtccgctccggtcccctccgctcccgaacgggcgatctttgcatggcagcagcagctggctccaaggggcgggcgatcgctggaagcttcgtcagccgcgtcctcgccggcaaggccgcctcgccgaggagggccgtgcacgcctcggcgtacgacaagaacctggaggaccaggtgcgcccggcgttcgtgccggacgatgtgatcggcagcgccgggagccccgacaagtactggagcccccaccccaagaccggcgtcttcggcccggcggcggtggaccccaagctggccgctggtggcgcgccggacgccggcgcggatgctgcaggaggcacggtgctggaccagaaagtgtggttcccgccgctcgaggacgtcgagaaagccgcccccgccgcgtgagccg

SEQ ID NO: 2839 - DNA, 81 bp, Zea mays
  Clone ID: LIB3116-001-Q1-K1-E1
aaaaaaaaaaaaaaaaaaaaaaaaaaaaaaataaaaaaaaaaaaaaaaaaaaaaaaaaaaaaagaaaaaaagaaaaaaagg

SEQ ID NO: 2840 - DNA, 453 bp, Zea mays
  Clone ID: LIB3116-001-Q1-K1-E2
cggacgcgtgggtccatgcggtttaccgtgttggggatctggaccgcacaatcaagtactggacggaatgctttgggatgaaactgctgaggaaaagggatgttcctgatgagaagtacaccaatgccttccttggctttgggccagagaacaccaactttgcagttgaattgacatacaactatggcgttgacaagtatgacattggaacgggctttgggcatttcgcaattgctaatgatgatgtgtacaagttagctgagaatatcaaatccaagggtggtaagatcacccgcgaacctggtcctgtcaagggaggatccactgttattgccttcgcacaggatcctgatggctacatgtttgagcttatccagagggctgacacacctgagcctctttgccaggtcatgcttcgtgttggtgaccttgagcgttctatcaagttttatg

SEQ ID NO: 2841 - DNA, 301 bp, Zea mays
  Clone ID: LIB3116-001-Q1-K1-E7
cccatacatctgtggcaggcaccttgaccatggtgttctccttgttggatatggtgcttctggtttcgcccccattcgcctgaaggacaagccttactggatcatcaagaactcgtggggcgagaactggggggagaacggatactacaagatatgcaggggttccaacgttcgcaacaagtgcggcgtcgattccatggtctctaccgtgtacgcagtccacgcctcgaaggagtagactctggtcagcggtgataatcgtgattccatatattgtagaactataatccctgctagtaat

SEQ ID NO: 2842 - DNA, 337 bp, Zea mays
  Clone ID: LIB3116-001-Q1-K1-E8
ctgacgcgtgcgcccgtagctctagactatgtagaccatgtgccatatactggagtcctgggtgcgaatcccgtggcaattgatgacctggctggacgagcggattgaagacagaagctgggaggcggcaggccgtgactgctgtatactggagcgcgtgtggaagctgctcgcggacgaagagcacctacaccagctgatagacccagactagctactacggctcaagaaccagatagccgtaccatcaccgctgtgacgtgagttcgcgttattatgtgttccatacacagcgcttctacacgttggtagctccactaaggacctgaggaatcgt

SEQ ID NO: 2843 - DNA, 169 bp, Zea mays
  Clone ID: LIB3116-001-Q1-K1-E9
cccgtcgtgcgtggtctcgttttgtgatgagtgggagagagaggatgacaagatcgatccgttgggaatggagatctcggtagttaggagagctaccgctggaacttggtggttggtaatatatgatccaaccagtgatgaatcaacgcattcacttgtgtacacaaaa

SEQ ID NO: 2844 - DNA, 451 bp, Zea mays
  Clone ID: LIB3116-001-Q1-K1-F1
agttgggccaaatactatgccgtgtcaactgatggtgggcttctttgcttatgctaaatcatgggagatgaacgtggacaagcaggagcttgaaggtgatttttgagacttcattaggaatccaaggctgtttctttcttttgacttggattccattaacttctcttcctgttcctacataattgtttggtcttgctattattattttcttcctctactacgacatagtgtgctgatgttatgtatgcgtctattgcaatcctttggcaacactcttaagcttttatctgagctggttgatgcatgaaacttgatattttacaaaaagattatgtgcaggttatacaccctgaaaatggggcttactttgctgaccctttttagagcatggatggccacaaagcttcaacttggatctcaaatgccatttcttttgtatgcatgcagatgc

SEQ ID NO: 2845 - DNA, 439 bp, Zea mays
  Clone ID: LIB3116-001-Q1-K1-F10
cgcatctctgagtaccttaacctgaacccggaggttgtgataatgcattgggcatgtgagaagataacagcatcaacaactcttccagatacagtccttcttgatggtctgcttgataagctcaggctatgtaaagggatatcatatgctgcagtggcagctcatgcagataacagtggtcgacgaaggttggctgcaatgctcgttgatcatgagtcacagtcctctaagcagatccccttgttgctcagcatcgatgaacaagacaaagcattatcaaaggcaattgaaagtggcgataccgatcttgtgtaccttgtgctattccatatttggcagaaggtagctgtagagaagaaagctcctttggatttttttggtgttataaatgcaaggcctgtggctagagatttgtttatggcatatgcaagacattcta

SEQ ID NO: 2846 - DNA, 330 bp, Zea mays
  Clone ID: LIB3116-001-Q1-K1-F11
cgtacgcgtgcgtaaccacgtgctcgtacgtttaggcggacccgtgggccttgacgggtaggacttgatcgacatgagcgacgcgcaccagatatactagatcgcgtcctgattcgagttaggcacatggaccgctgcaaatatgacgacgctctaggtccttataccttagcctaacagctataatacatctagatctaaggacctcacgatgatgtgttctctgtgacacttacgaactcagacctgctagacagacctggccgtccaaatctgcttacatatatgaactgaccctattattgtgcgtatcgagctgcggcatcctct

SEQ ID NO: 2847 - DNA, 311 bp, Zea mays
  Clone ID: LIB3116-001-Q1-K1-F12
gctatgcatgctccaaacgaccaggctcaggcatccgacaacgtcactgttctatggcgtgggctaaattcaattgatgaggacaacaaagaccaacataacgactgggaaaaccatgacgagaccgcaggatcatacgccttgcagcgcctacgattaccgccagctgacataatagacttcagagcccgaacgcatccagctacacaacgatctcacagcctgaatcgccaacgtgacgcacactctcacgtctcattaaccgccatccggtgtcgtgcatacagcgcagctggctccgctacacttgc

SEQ ID NO: 2848 - DNA, 445 bp, Zea mays
  Clone ID: LIB3116-001-Q1-K1-F4
gcaacccaaccaaacccgcacgacacgacaccaagtcgaggagctcgagggcaccaatcatggccggcgtgaactccagcgtcgtcgggctcaagcccgccgcggcagtgccgcaggccgccgccgcctcatcgccggcgaagcgggtgcagctggccgcgcccgagggccgccgcgccgctctgctcggcctggcggccgtcttcgccgtcacggccaccaccgggtcggccaaggccacgatcttcgatgagtacctcgagaagagcaaggccaacaaggagctgaacgacaagaagaggctggccaccagtggcgccaactttgcgcgcgcctacaccgtggagttcggcagctgccagttcccctacaacttcactgggtgccaggacctcgccaagcagaagaaagtccccttcatcagcgacgacctcgagattgagtg

SEQ ID NO: 2849 - DNA, 461 bp, Zea mays
  Clone ID: LIB3116-001-Q1-K1-F8
atgcggtcgcctcgcggaacgcgaaagtcttagttgttggaaatccctgtaacactaatgcgctgatttgtttgaaaaatgccccaaacataccggcaaaaaactttcatgcattgacgaggttggatgaaaatagagcaaagtgccagctggcactaaaagcaggtgtattttatgacaaagtatcaaacgtgactatttgggggaaccattcgacgactcaggttcctgatttcttgaatgccaaaattgatggaagaccagtgaaagaagtcattaaggataccaagtggttagaggaagagttcaccctcacagttcaaaagcgtggaggtgtgctcatccaaaaatggggcagatcatcagctgcatcgaccgctgtttcgatagtggatgctattagatccctcgtaactcctaccccagaaggtgactgggtttctacaggggtttatacgact

SEQ ID NO: 2850 - DNA, 433 bp, Zea mays
  Clone ID: LIB3116-001-Q1-K1-F9
ttcacctgaactcctgaagcaatggccatgatagctctcccgctgaccccttccaggagctcctcgtttggagctcaccaaaccaggccgagcggcggcggccccagatcagtgagagcttatgcgaagggagacgaggagggcgacaagcagtccctcttcggaagcatcaccgaggcgctggacttctcgcaggtccggtcggagaaggacgccgagctgctgtacgaggccagggagtccaccagaggtggagggaggatgacgagggagcagtacggagcacttaggcggaagattggtggcacctaccaggatttcttcaagtcatatgttgaagtcgacgggcaatacgtggaggagggttgggtcgacaagacctgcaagatctgcaagaaggacacaaggggggagccgaggcaggttgacaagc

SEQ ID NO: 2851 - DNA, 287 bp, Zea mays
  Clone ID: LIB3116-001-Q1-K1-G1
ttattccatggtttcttttgcataacttcacttgtctatttgattaattctctatcctctttatctctatctttcctcttcccatccttcatttttattcaaacccatcaagatatataaataactacctatatataaattataaatacactaaaaatctctcaatttatacattattgaatacataaaatactgctcaacatacaaacatattattttatatactataaaatacttctaaatatattttataattttaaacttttatttaacataaacccttatct

SEQ ID NO: 2852 - DNA, 302 bp, Zea mays
  Clone ID: LIB3116-001-Q1-K1-G11
aaaagaaaagcaaggattactctgatgattctgattatgatgattctgatgattctgatggggaggattcttatgattctgaggagggctatgtattatctcctgactaaggcgattatgattcaagttatgatgatgataccagtgatgatgacgattaataaaccccaactcctaaaaagccatatgcaggcaataagagaggtgctgaaaatgctctgaaaacgcctctttctgataagaaagcaaatgttgctcacaccgtcatcccataaaacaggtgtcaataatggtgccaccca

SEQ ID NO: 2853 - DNA, 390 bp, Zea mays
  Clone ID: LIB3116-001-Q1-K1-G12
ataggttgtgatattcttttaggttcataatatgcatgcacagaaaaactaaaaggattggggtgggattagacgctcaaagaagagatagaggatgtatagatctgatgatggtttggtgtgattcctggaatctcaagacgcctgccatctgaaaaaacttcaaaatggaagtaagatatgatgacaagctgactgcctttgcacaaaggcttgagatttccccaccaagaaggtttgggacttctacttcactatatggggaaaatatcctatgcaatcacttatcctggtgcacacatgcaatcaagcgatctgatgcatctgatctagatctaattatgactgttattttatatttaaccccttccacctaaaacatagtaccta

SEQ ID NO: 2854 - DNA, 369 bp, Zea mays
  Clone ID: LIB3116-001-Q1-K1-G2
acggtgcgttacagcgtgggcgctgcacgcactttctggcatcaaggacaggctcctcgtctgggggcctttgctaccgtcgaagcgggcgctcgcaccactgcccgtgggccgctgtaacacgcgccggactgtgcacgtctgacaatccaagaacgcactggaccaaattgcagtggctgactagaagaactgtgacaggttgctgatggcgtgcgagactccactgctcatggagttctgggcgctctggtgagtaccgtgccaaaagatcgcgccgatgatctacgagctacccaatgactacaccaacaagatcacctgctgtatcgtgaacactgacgacagcttatacatggcgtctaccta

SEQ ID NO: 2855 - DNA, 425 bp, Zea mays
  Clone ID: LIB3116-001-Q1-K1-G3
gtgcttcagagcgtgggcgctgcacgcccccgctggcagcaaggacaggctcctcgtcggcgacctggtgctgccgtcgaagcgggcgctcgcgccgctgtccgtgggccgcgtcgccacgcgccggccgcggcacgtctgccagtccaagaacgcagtggacgaagttgtggtggcggacgagaagaactgggacgggttggtgatggcgtgcgagacgccggtgctggtggagttctgggcgccgtggtgcgggccgtgccggatgatcgcgccggtgatcgacgagctggccaaggactacgccggcaagatcacgtgctgcaaggtgaacacggacgacagccccaacgtggcgtctacctacggcatccgcagcatccccaccgtgctcatcttcaagggcggcgagaagaaggagagcg

SEQ ID NO: 2856 - DNA, 396 bp, Zea mays
  Clone ID: LIB3116-001-Q1-K1-G6
cgttatgtggagttcaaccttgtctacgaccgtggtacaacatttggcctaaggactggaggaaggattgagagcatacttgtgtcccttccacttacagcacgatggcagtatgatcataaaccggaagaaggaaccgaggaatggaaacttctggaagcctgcataaacccgaaggattggatctgattagccgttattcttgagatcttttgttagagttttcccttctgtagggctaagaccacgtgcagtttcattatatattttgcatctgtagaatcgtgaataaatatgatgtagtgatgttgtagctgtttgtatctatctgctgttttcccccatgtgaatgagagaaccattggcttctgtatttacgaaggattcaagtttctg

SEQ ID NO: 2857 - DNA, 430 bp, Zea mays
  Clone ID: LIB3116-001-Q1-K1-G7
gacaccatgggtaattctcattgggcatagaccgatgtactcatcccatgtcggaataccagttaatgtagatctagcatttgtagcctacgttgagccactcttgctcaagcaccaggtggatttgggtctctttggccatgtacacaactatgagaggacttgtgcaatatacaagaatatatgcaaaggcaagccaaagaaggatgaaagtggaattgatacttatgacaacagcaaatatactgcacccgttcatgccactgttggagctggaggatttagcttggacaagttccctaggattgtgttgaacacgtggagcttatcaagagtttcagaattcgggtatgccagggtgcatgccacatgaggtgatatgctggttcagtttgtaagctcaagtacgatggaagttttggaccaattt

SEQ ID NO: 2858 - DNA, 383 bp, Zea mays
  Clone ID: LIB3116-001-Q1-K1-G8
cggacgcgtgggcacagcagcagccatggcggccgagccggagaagcaggcgggccccgcggcacaggagacggccgtgcacatcgtgtacgttgaccgccccgaggacgccgaccctgaggagttccacatccgcaccctcacccccgtcctcggcagcgaacagaaggccagggacgcagtgctctaccactacaagaacgccgccagcggcttctccgcaaagctcaccccccagcaggtcaaggatctcaaggagcaaccaggtgttctccaggttgtgccgagccagacttaccagctacatggtcctgggtctggcactcaccagggcacgacacacaccttgggccttatgtgaaggcgtatgagaatcaagaaga

SEQ ID NO: 2859 - DNA, 408 bp, Zea mays
  Clone ID: LIB3116-001-Q1-K1-G9
taacaacgatcatttttatatagatgaacctgctgactctgatcggggggatcctgatcaatgtaaggaagtccacagcattatgctaccgaccaacatgattattaccatggacatgacgctaaccccattacccatcacactacatacatacaccttgctctagcacacaccacagactcaaagcataggacctcaagatctgtcaataactcctaatctgacgatcgaacgaaggatacaacgctctcaaccgacatctcacttcttaccaatcgcgccatcaatcatccaccatctcacgcatcatacggcaagacctccgatacagcaacaaaccaacacagaagtctacaaaatctgtggtgtacgacagtgcacttgatgcagacagacattatatcgaca

SEQ ID NO: 2860 - DNA, 138 bp, Zea mays
  Clone ID: LIB3116-001-Q1-K1-H11
atacaccgtaccgtcgtctctgtttgcgtttctgtcaagtgtgcatggaataatactgtaactgtgtttcctgccgggcaatgcactgtgatatgatgcccaacgaataaatgtcgcttttatttttattcgacttcc

SEQ ID NO: 2861 - DNA, 284 bp, Zea mays
  Clone ID: LIB3116-001-Q1-K1-H3
cccacgcgtccgtggacgccgcctccgtggcggccgaagccggccggggccaccgacctcagctcctccgagcagtagtccacctcctggtagtaagccattggtgccgacgcttggtgtgtctgtgtgcagcgcccgtgcgacgtcgaagtgcttgtgtggattgctgtggttgactggttgtgcagggtcatcgtacttggctatcgtacgtgcacgcactcagctcctgtacgaattacgacaataagctcgtgacctgaataaaacttcttcgtaatact

SEQ ID NO: 2862 - DNA, 449 bp, Zea mays
  Clone ID: LIB3116-001-Q1-K1-H5
cgccggtccctttgccgcctcttcgccgccgacgagcaccagccaggaagaaaagaagctgagccatggggaagagaaagtcagctgctaagccacctcctaagaagcggatggacaagcttgacactgtattttcctgcccatttgcaaccacgggagtagttttgagtgccgaattgacatgaagaatctgattggcgaagcatcttgtagaatctgtcaggaaaacttcagcacaactattaatgcactcactgagcctattgatatatatagcgaatggattgatgagtgtgaacgtgttaacactgttgaaagcgacgatgatgcgtgagcttgccccatgcggatgaaactgttacctacaatcgtaatgtaatgtgctggtattctcgaatgccatagcccataatcagccatggcttggaataacgtaatggctgactgat

SEQ ID NO: 2863 - DNA, 359 bp, Zea mays
  Clone ID: LIB3116-001-Q1-K1-H7
ctgtacaagacgtacgctgaagctcccgaccgtgcggcagccattgtaccgtacagtgccacctaaccggagaaaccgtgccaactgtgcacatccgatgctcacggaagacagtgttcatgaatgcattaatccgcttgtagcagatcagtattctgctagttgagctgataagctagagcgaatcaccgagcactgtttgcagcactagcgcaccttgaatgcggacatggacaccgtctgccgcgtcatatactacgccgtctttctagaccatacgcgcatcgtgtgatttgcagtcgcgaccaatctagctactattgctgtgaatatcatgcatgtcttgctgcgcatatgtt

SEQ ID NO: 2864 - DNA, 388 bp, Zea mays
  Clone ID: LIB3116-002-Q1-K1-A1
cccacgcgtccgattagctcttacccttttcacccatgatgacgaagtgccagaagcgcgcgagcatccaaggactttggctcctttccatggttcttctagcgtcgtcctctcttgtctgtgcaagcatggcggtagatgggcaaaccaaagaggacatcaacgcaacgagtgtgacgagcatgaacatgacgaggtcgtcgtcggcgagctacaacatgactggcggcggcggagaacttaacagaggtccgtgcgtcgtgagatctggattctactggtgccagaacattggctatccgaccatgtcggagtgcttgaagaactgcgaatcgtaaagcactggagtatagaaaaggaataaagtggtctctgctagctttaaaaa

SEQ ID NO: 2865 - DNA, 319 bp, Zea mays
  Clone ID: LIB3116-002-Q1-K1-A10
acgtccgacaacaaacctaaccggtctccatacttcaacccatacgccatgtcacatcaagaggggctagtcataaccatctaggacaggcctagcctactttcatcgctcccactgctacttgacgagcttcgttatcttcgaaagttactgattgcactagtcagcgtgctacgatgtgcccatctcatccagtcctgacgctctacttatcttaccttacaccaacagctactgagttcttgatgacaaagatctacactaactctctattccttacaactgctatgctgctgtagacttgagttacttaagccta

SEQ ID NO: 2866 - DNA, 369 bp, Zea mays
  Clone ID: LIB3116-002-Q1-K1-A2
cggacgcgtgggcggacgcgtgggcggacgcgtgggcacccacgcacactcttctcccccgagtccggaccccggaggagccaagccatggcgtccacctcctgctgcctcctccaccagtcaaccgcccgcctcggcgcgtcgccgcgcctggccgccgccccgccgcgcagcgcccagctgctcgtctgcaaggctcgtaagcaggaagccgccgcggaccagagcgacgtctcgcgccgcgccgcgctcgcgctcctcgccggcgtcacggccgccgccggcgccaaagtgggtcccgccgtcgcggcatacggagaagcagccaacgtgttcggcaagcccaaggcgagcacggagtacatcgcg

SEQ ID NO: 2867 - DNA, 387 bp, Zea mays
  Clone ID: LIB3116-002-Q1-K1-A3
ccgcggagctggaggccaagctggacgaggggcgcagccgtgtggaggccgagctcgtagaggcgctcgccaacctcgaggcgcataaggaggaggctgttaaggcgctcgacgcccagatcgcctcgctcagtgatgagatcgtcaagaaggtgctcccatccgcgtgatgaaaccaaaccggccctgccttatcctacgactatagttacatgaacatcataaattaatgataattttgaagaaattggccgatgactccgacactgtactcatgaaagattattggatgggttgtgtccaccgcctgtgttgggtgtggattgttgtagactcgcagtgatctttctcgataagcttgtacagttcagtacatacagacacaca

SEQ ID NO: 2868 - DNA, 119 bp, Zea mays
  Clone ID: LIB3116-002-Q1-K1-A4
ggggagactgcatcatcaggttgtatgagacgcaatgcaaactactcaccttctctaataagcgctggacatgtgtactttgtgttgggctattcgcattctgttccaaacaagttgcc

SEQ ID NO: 2869 - DNA, 422 bp, Zea mays
  Clone ID: LIB3116-002-Q1-K1-A5
gggttgaacaatatctggacgcaatggaaaaggttaaactgaaacaaggacgtgaagagtgcaatggtcatttctagtgatggaaatgcttatctgcaggtaaatctcgatgtttctgtttagtttttccatgtagactataatgacttttagttatctcttgttatcaaatcaatgtatgagagtcagtactggaaactttacatggaagatactgcagcatgtgctatcgtgatgaaaacttcagttggtcttgtatacctgcttgcctgtctgctatcacctttcatgccctccttttctgatgaattattacatcaattaaatttatctcctgaagaaaatttgtcattaagtgaagaaaagggacaaattgcaaatgcaaaatcttcttggggattttgtaccagcaaggcacagaa

SEQ ID NO: 2870 - DNA, 382 bp, Zea mays
  unsure at all n locations
  Clone ID: LIB3116-002-Q1-K1-A6
caagccgccgccactccttctccctccccctttctctctcttctctctctagcggcccaggccccccgatctcctcctcccactccgatcgcccgaccgatcgccgagcttccctgttccctccccgcccccgcgacgccatggagccgccgcacgccgagcaggccgtcgccgtcgcacgctgagcaggccgtcgccgctgtagcagcaggaggagagggtggcactgcaagcccgggcaccggcctcgaaagtgctgtctgcttaacgttttttgtttcgttcagatctatggccggacgaggcggactgtggctactacctncgcacgacgctgcgacgggcgctcctcagatcggcagagccctctttcgaacgcaag

SEQ ID NO: 2871 - DNA, 372 bp, Zea mays
  Clone ID: LIB3116-002-Q1-K1-A7
gcggcgtggagctggaggccaagctggacgaggtgcgcagccgtgtggaggccgagctcgtacgcgcgctctgcaacctcgaggcgcataatgaggatgctgttaaggcgctcgacgcccagatcgcctcgctcagtgatgagatcgacaagaaggtgctcccatccgcgtgatgaaaccaaaccggccctgccttatcctacgactatagttacatgaacatcataaattaatgataattttgaagaaattgtccgatgactcctacactgtactcatgaaagattattggatggagtgtgtccaccgtctgtgttgggtgatgaattgtgtagactcgcaatgatctttctcgattagcttgtacagttc

SEQ ID NO: 2872 - DNA, 431 bp, Zea mays
  Clone ID: LIB3116-002-Q1-K1-A9
gcagtcaccaaaccaaaccgctctcgagtctccatccattctctccgctcatccgcagctggctagtctccagctctagctagccttagcctcgtccaagggacgaaggggccaccatgagcgtggtgatcctggacggctccacggtgcgcggcttcgtggcggacgaggcggccttcgcgcgcagcctggacgcgcggttcgccgcgctggacgccaacggcgacggcgtgctgtcccgcgccgagctccggcgcgcgctcgagtccttccgcctcctcgacggcggcggcttcgggtccgcccagccggcgccgctccccgccgaggtcgccgcgctctacgacgccgtcttcgagcagttcgacgccgaccacagcggcgccgtcgaccgcgccgagttccacgacgagatgcgccgcatcatgctc

SEQ ID NO: 2873 - DNA, 330 bp, Zea mays
  Clone ID: LIB3116-002-Q1-K1-B1
gccacgcgttcgatagcaacatggcagcagcacaagcaagaaccacacctaacacccttcaggctgagatcatgacagtcttgctgacctcggccagtagcagatgcctggtccagctagatcctgcctgcagcagatgcaacaggctgcagtatgtaccctgacgtggagaccatcagtcaccagcatggtgaagaccacggtcctagacgtgccgaccaccaaggccagcgccgaacgattaaaggcagtcaccgatggcggctgatgcaactgcaacacctgcaagtgcggaaccagctgctgatgctcctgctgcagctgcaactg

SEQ ID NO: 2874 - DNA, 438 bp, Zea mays
  Clone ID: LIB3116-002-Q1-K1-B10
aatcatcatacaatagtttcgctttgatgagtaaagtgttccagcttgttcatgtcagacggacatactaaaaaagattgggaaagtaacgtaatagacctgagcacatgaattttcgcactaatgttacagcgcatcaaatcaaaagaaagaagatcggagcatggcaactgacaaccccaaactatgattttttttcaaagatggaacaccaaacaatgtgattgcatcttgagaaaccatgctgatccgcgcggcaaaaagaaatcctagaaacaagttgaaatcctcatcttttaagtgcgttcatcctgtccctcaggtaatacagcttagctctcctgactttcttcctgtccaagaccttgatttctttgatgtttggtgagtaaagtggaaagacagactcgactcccacgccagccactaatctacgca

SEQ ID NO: 2875 - DNA, 435 bp, Zea mays
  Clone ID: LIB3116-002-Q1-K1-B11
aaaaatccttcattcaaaaatcccctttaattaacaagacgaccttattgattgtatgccgcctgtactacttccaacggtcagaaagctgtatggtacgatacatgttgatctcaaggaatactatacaattacagttcatttggagaacaactaccacacctatatctctactggcaagaacaagctggtgctttctactgcaacctgcattgctggaaagaaccattttctgagccttgcatatttcactgttggtagaatctgcttcgtttcagcatttgcattcaacttgctatacttgataataccaaggaaaatgtgagataacaactacttgtcatggaacagacccactttacgtcgctgatattgttgtgaagttacatgtttacacagacaacaaattcatttatggcttacatgtatcttgta

SEQ ID NO: 2876 - DNA, 434 bp, Zea mays
  Clone ID: LIB3116-002-Q1-K1-B12
gaagcataatggtatcgcagagctgttagagattttcgggagtataattaatggcttggctgtgccactcaaggaggagcacaaattgtttttagtacgatcactgattccactccacaaaccaaaatgcgttgccatgtaccatcagcaactgtcttactgtgtcacccagtttgttgagaaagattgcaagcttgctgatattgtcattaggggtttactgaagtattggcccgtcactaatagctcaaaggaggtgatgtttttgggtgagctagaggaggtgctggaagctacacagccagcagagttccagaggtgtatggtgccactttttcgtcagatttcccgatgtttaagcagttctcactttcaggtggcagaaagagcgctcttcctatggaacagcaatcacatcgagggtttgatcaaac

SEQ ID NO: 2877 - DNA, 430 bp, Zea mays
  unsure at all n locations
  Clone ID: LIB3116-002-Q1-K1-B4
gcgcccacgcgtccgtgttcatcctggtcgtgatcatgcagatcccttgttccacgagtataaagtattcatgaatcccagcaccacagatgtggtctgtacgaccaccgctgaagccctggcaatgggaaagatagttatatgtgccaatcacccgtcaaatgagttcttcaagcagttccccaactgccgtgtctatgacaatgaagacgagtttgtacaactaacactgaatgctctatcagagcagcctgctccactgacagatacgcagaggtacgagttgtcatgggacgctgcgactgaaagattcatcgaggcctctgatataaatcctcatgtgccggagtccagggcccatcaaaactctagggctnntgtgcctgcttttctaagaactcgtnaactgaaacagaacttataggatgcg

SEQ ID NO: 2878 - DNA, 421 bp, Zea mays
  Clone ID: LIB3116-002-Q1-K1-B5
gccgtgttgctcgccgccgacccgccgtgttgctcgccgacaccgccccgcgggcagccaggatgccgttcaagaggttcgtggagatcgggcgagtggaccttgtaaactacggcaaggagtatggccgcctcgtcgtcatcttcgacgtcgtcgaccagaacagggctcttgttgatgcaccccgacatggttcgttgccaaatgaacttcaagcggctttctcctgactgacatcaagattgacattaaacgtgttccatagaagactacactgatcaaggcaatggaggaagctgatgtgaaaagcaagtggtagaatagctcatggggcaagaagctgattgttcagaagaggagagcataacttcatgactatgacagggtcaaggtcatgttggccaaaatcaagaggggcggt

SEQ ID NO: 2879 - DNA, 284 bp, Zea mays
  Clone ID: LIB3116-002-Q1-K1-B6
cccacgcgttcgcggacgcgtttacggacgcttgggcaacgctaacaaatcagcgtcactatgggttcatattcagcgcctgagtgatgcgagtgttgtcagcagatagccatgaatttttgctcctcctgaaccttgatgtgctatatgcccactctctgcgtcacagcgtagtcattaccttcaaagggtgatgccaccatgatctagaactgcatcaccgtttgcaagagctaggtctatacctgcagtttctgcaagctctgcacttgcatgttcaccaa

SEQ ID NO: 2880 - DNA, 385 bp, Zea mays
  Clone ID: LIB3116-002-Q1-K1-B7
acggcaagccgctgctgccgaagatgcactacagccaccccatctccgtgcggcagctgggctacctccggttccaggcgatgcagatggtggcggcgcggctggggcgcgctgagccgccgctgcggcgggaggtggtggagtacatgctggacgtggactcgcacatgttcagcctgcggcggagcaaggccaacttctaccggatcacctccctcttctcgggcgccgtggcggtggcgaagtggatggagggcatctgcaagtggaagaacccgctgacgacggtgctggtgcacgtgctgttcctgatcctggtgtgctacccggagctgatcctgcccaccgtgttcctgtacttgttcatgatcgggatgtggaacta

SEQ ID NO: 2881 - DNA, 435 bp, Zea mays
  Clone ID: LIB3116-002-Q1-K1-B9
cccacgcgtccgcggacgcgtgggcgccgggatcggggccagaccgccagagcggctgtgggggttgcctgctgctctgctcatctctatcctgcgggcgtgggccatgggctgtgggccgtggggttggtcgttggcccgtccacaggtcgttatacgatggctcgtgcaaaatcatacacgcgaccccccaaccatccaagagtagctagctgttggggtttttcacttttcaggctgttgctcatcaacgtcgttgtatagtgtgcactgtgcagtgcatataatatactccctctgtttctttttatttgtcactggatagtgtaattttgcactatccagcgacaaataaaaagaaacggagggagtatgtagtttgtgtccttgctaattgctatttaggtgtttgtggcacgaaactatatatatata

SEQ ID NO: 2882 - DNA, 436 bp, Zea mays
  Clone ID: LIB3116-002-Q1-K1-C10
tctctcgtcgcttcctccgtctctcggcgtcgaatctcctccaaccaccgcgcacactctactcgacgcccggtggaaggagttctccgggatttgagctgtttctgccctcacctccgctaggccggcgtcgagtggagatccaatcggaaatcgaactgacttcatcttctgttgcatccccgtcaggataagccatgccaggagtgatcacaaagttcgcggttacatccatggtgatgtggatggccccggttgcgatcgtttatgggttctactaccaggcgtttccaggtgtgagtcggatgtcatcctcggcgcagacactcgccagcgggttcctggctgtcatatcggttaatctggtgatcggcttgtacatattcatggcgatgaaggagactcgacaccaggagccacagccagacccgacctt

SEQ ID NO: 2883 - DNA, 368 bp, Zea mays
  Clone ID: LIB3116-002-Q1-K1-C11
aggctatgcatccatcctaattctcatgtgttttatattcttgcacctatcccatatactgtacgataccacccaaccatggacacttatcttatatgacttcaatatcgtattaccacaactaagaaggcttctattacatatgtacacgctatatatgttcctgctaattacttgacagatcctgctactactactacctttacccatcttgatgctacaactgtgttcttacatcatatctctgatcttgatatttatcctgctgtctatccactacattccacattaagaatgctttattcccacgtgctgcttgacgatcattataatactgctcgtgctgtatataatgttctttaaaacta

SEQ ID NO: 2884 - DNA, 201 bp, Zea mays
  Clone ID: LIB3116-002-Q1-K1-C12
cgcttcaaggctttccatgaggcgttcatggctgagtaccgtgactgaactgttacagtggctgagtaccaccgtgtagaccgaaacaaaataaagctcccccctctctctgtgtctgtgcgtgtgtgtgaactgatctctgaatggacgaacaatgtactctgttggcgcctttaatggcaattgaggaaaattttgatc

SEQ ID NO: 2885 - DNA, 306 bp, Zea mays
  Clone ID: LIB3116-002-Q1-K1-C2
gcgcttagatactctcttgcagcgtttggcggagagtgacctcagtcgttctggcacaccgtctgccaagaaggaagcaatcgccgcgctaccaaccgtgaacatcattataagcgttgggctgttcagtctgtcttgaggatttcgagatgggaggagaagcgaagcagatgccctgtcagcataagttccactctcactgcatactcccgtggctggagctccacagctcttgcccaatctgccggtttcagttgcctacttgggagacgaagaacaacccatgcgaatcagccagcacccgca

SEQ ID NO: 2886 - DNA, 389 bp, Zea mays
  Clone ID: LIB3116-002-Q1-K1-C3
cggacgcgtgggccagatttggggaatatgcttggtggttctcctgatgtttctcttttgagtcagatggtgcaaaaccctgcaatgatgcagatgatgcagagcattatgtctgacccacagaccatgaaccagttgcttagcttcaacccaaatgcacgcaacctgatggaatcaaaccctcagatgagggaaatatttcaaaatccagaatttcttcgccagctgacatcgcctgagactttgcagcaattactcttatttcagcagtctttattaggacagcttggtcaacatcaacctaaccagggtagaaacaattcaggcagtgccacaggtacgcctggaaaccctagccttgacaccttgatgagcatgctcagtgggct

SEQ ID NO: 2887 - DNA, 316 bp, Zea mays
  Clone ID: LIB3116-002-Q1-K1-D1
ctcgctagctcgctctctcttgcaactccagtgcttctcactgccactgccagcaggtcgagctgctccgcaagtctgctttgctgctgcacctgcaagtctgcaaccgcgcacagagatgtcgacgactgtgagccgtgcgtccctcgaccagaaactcgccctcgccaagcgctgctcccgagaggcgaccctcgccggagccaaggcggcagccgtggcgactatcgccttcgcgatccccaccctggccagcgtgcggatgctgccatgggccaaggccaacatcaaccccaccggccaggcgctcatcgtc

SEQ ID NO: 2888 - DNA, 274 bp, Zea mays
  Clone ID: LIB3116-002-Q1-K1-D10
ggaaaaaccgcgtgaagaggaccatcagagtgccggcgatcagcgccaagatcgcggacatgccgccggacgagtactcgtggaggaagtacggccagaagcccatcaagggctccccctacccacggggctactacaagtgcagcaccgtgcgcgggtgcccggcgaggaagcacgtggagcgcgccaccgacgacccggccatgctggtggtgacgtacgagggcgagcaccgccacacgccgggcgcgcccgcgcccgcgcccagccccct

SEQ ID NO: 2889 - DNA, 273 bp, Zea mays
  Clone ID: LIB3116-002-Q1-K1-D11
cccacgcgtccgcggacgcgtgggccagaacatgccggccatgggtggactctaccagtgccagctgcccagctaccgcaccacctactgtggcgtctccgctgccattccgccctactactgattcatgatatttgggaaatctcctctatccatccctctctatctatatctgtaataatgcagtaagacgacacacattatcatgtgtggtatgaccaataatatatgcatgatcataataaagtctcggttttaatgaatcaaaacaaa

SEQ ID NO: 2890 - DNA, 345 bp, Zea mays
  Clone ID: LIB3116-002-Q1-K1-D5
tcgaaaaaaaaaaaaaaaaaaaaaaaaaaaaaaaaaaaaaaaaaaaaaaaaaaaaagaaaaaaaagaaaaaaaaaaaaaaataaaaaaaaaaaaaaaaaaaaaaaaaaaaaaaaaaaaaaaaaaaaaaaaaaaaaaaaaaaaaaataaaaaaaaaaaaaaaggctctccttttaaaaattcccaattttacatccccttaattcacaatttatttttttttataagttccaccaaaatatattcaaatgcctgttttttaaaaaattataacttggaaaaaccttggcttaaccaaattaaatccattgaaaaaaaaccccttttttccaaaattggttaatttc

SEQ ID NO: 2891 - DNA, 116 bp, Zea mays
  Clone ID: LIB3116-002-Q1-K1-D6
gacgatgacctcgaccgcgcccggctgctcgcgctcgagggtctgcgcgcaggccgactcgagcgcatgtgcgacgaagcgctcgcgctggcggttcagcacgacgatgctcaggc

SEQ ID NO: 2892 - DNA, 394 bp, Zea mays
  unsure at all n locations
  Clone ID: LIB3116-002-Q1-K1-D7
ggcgagcagttacatgggccgccgcgccaagctcaacttcccggacgccgccgccgccgcggcggcgcgggatgtgcagccgcgccgcccgttgcccggtcagagcctccgcgagaactgcgggtccaacgccgcgtcgccgctgcacgtggcggtggcgcgggcgccgaccacgctgcagggaacagggccggcgccgcccaaggaccaggacatctgggacggcttgaacgagatcatgacgatggatgacggcagcttctggtccatgccgtgatcctgctacttcggccgtccatctccggatcttcctctgggtgntgtgcgtttatttttatgatgaccagattctacgggtgttttttaggggaagagaatcataaattgaattttg

SEQ ID NO: 2893 - DNA, 409 bp, Zea mays
  Clone ID: LIB3116-002-Q1-K1-D9
cccacgcgtccggtttgtgcggtcgcaccggatgcagcgtaagcactaccgggggctgtcgaacccgcaatgtatccatgggattgaggtggtcaggtcaccaaatcttgtagggctcaccgaggcagaccttaggaggtgggcggacctgactgggagggagctcaatttcatcatcccacaggaagccagtgatttcgggacatggaggaccattccaaattcagagcttgagcttgagaagccacaccctgtcatgaagagcaacggcacccaaaacccaaagaaaacaggcttgaatctgtcgtcaccgtccaatcattcaagcgaagatggtatggatctctctccagttagcaacaagcgtaagaaggaattgtccccacaggccatggatgaagaagtattc

SEQ ID NO: 2894 - DNA, 436 bp, Zea mays
  Clone ID: LIB3116-002-Q1-K1-E10
cccacgcgtccgatatgactcaaaatctcgggtgatcacacttccagaagcatcaaatgcgtaaacataggtgactctacatttacgccagtaactataaatggatgctctttggtctatattccaaatgtgggagacatcacaccagctttgaagaacagggagctccagagcttgtgaattctatagaataaaggtggttgtccgcacagtatagcaaactgcgaagcctgcaactactagagtttggtctgtagcaggctcagttgggaatgtgtagcagagcatgatccatggtgtggatgaattgcagagtactgtgctgtgtgtgtaggaaggaaaagctgccgcctgccgattgtgcagtcagtctagtacgttggtatgcgaccatctcaagtctgggctttgattttaagcaatgatttttggcaat

SEQ ID NO: 2895 - DNA, 362 bp, Zea mays
  Clone ID: LIB3116-002-Q1-K1-E2
cggactcgagggttactgttatgatcatgtgactcaaagctgcaagtcttgactcgaatatggctgctgcctgccacgtacttatgctagatctttggtggaacccaaccaccgaggaccaagctgtggatagggcacaccgtattggtcaaaaacggtctgtcacggtatcaagattaactataaaagacaccgcggaagatcgtattcttgctctccaggagaaaaagccggagatggttgcttatgcgtttggagaatacaaatctggctcccgacagactacattgaccgttgaacacctgaattatctgactatggtgtagaatcgctcctgagagtgaacagcattgctcattgga

SEQ ID NO: 2896 - DNA, 350 bp, Zea mays
  Clone ID: LIB3116-002-Q1-K1-E3
agcacctgcaggaagagcaagcatccgtggccgacggagctcgtgggcgtcgccgagccatggtgttgttggccgccaccgctgctgtcactggatcatccgtagccatctgcaggtctgctagagctgcaggtgtcaccacgctgagcggacagtatgtcaaaatagagaacgtcaaggacccatatgtccagggtgtcggcgaatgggctgtcaaggagcacaacaggcagactggtgagagcttgcagttcgccgaggtggtcagtggcatggaacaggtggtcgccggcaccaactacaagctcaacctcgcaaccaaagatccaacgtcgtcttaccaagcagtt

SEQ ID NO: 2897 - DNA, 325 bp, Zea mays
  Clone ID: LIB3116-002-Q1-K1-E4
cggacgcgtgggcggacgcgtgggctgttctctcgccgccgttctagttccgctttgcttgaggtgcacgtggcggtggaagcttcccgggcggtggcggttgttggttcatgtcgatggcgcaggtgtgctgcgactcggccgtaacggcggcaccggtggccgggccggaggcggaggcgagggccagggcgcgcgccgagaggcgccgtcgggccgcggaggccgggaggtggaagcacgcggcggctgctggcacggcagccgcagatgccacgaggaagcggagcctcgaggccggggagctgctcgtggcgcggaagca

SEQ ID NO: 2898 - DNA, 305 bp, Zea mays
  Clone ID: LIB3116-002-Q1-K1-E5
ccacaagcaaggtccaaacttgaacggtctttttgggagacagtcgggtaccactgcaggcgactcctactctgcgggaaacaaaaacaaggctgtagtctgggaagaagacactttgtatgagtacctgcttaaccctaaaaagtacattcctggaaccaagatggtcttccctgggctgaagaagccgcaggagcgtgctgatctcatcgcgtacctgaaggaagcaactgcatagttcattgacatgccttttgccatgaagagaaaaattgttttgcagtttaataaaaaacattttagac

SEQ ID NO: 2899 - DNA, 397 bp, Zea mays
  Clone ID: LIB3116-002-Q1-K1-E6
ccgtccgaagcccggtcgaccacgcgttcaaaaaatgcatgatcattacatggaattctattaagatattatatgaaaggggaattggttcattctcattgagaatgcgaatacaaggaggtattttgtgtttgggaaagtccgaagaaaaaaggatttggaatctaccttttcttttgctttttcccttataaaaataactcaatcaaaatccaattatctactctacaataatgaaatgcttgctatgcctaatatacttagtttaacctgtatctgttattaattctgttctttgtgcaactagctctttcttcgccaaattacctgaagcttatgccattttcaacccaatcgtggatgttatgcctgtcatacatgtactactttttctatt

SEQ ID NO: 2900 - DNA, 377 bp, Zea mays
  Clone ID: LIB3116-002-Q1-K1-E7
gactacatgaacctgtacgtgcgccacaagttcgaggccaaggagcccaggttcgaggccgtgaagtcggccatcgccaccgcgtgagagaagactgccttccgctgcaggcttccttcgtggcgtcaagccttgaggcttgaacgaacaacgtacgtccatgtgcttatagtggcacagttatgtgtgtaactaccgatcgtggaacggcctaatgtatttcggttgcctcagatcgatctatatgtgcgtatacattatgtactgaaaagtgtgtagcgtctggttaatgtatgagcagtgtgtatgtgaccgggacccggtgtgtagttgctattactaccatatccggtgaatgatcaaaccttttggtgatt

SEQ ID NO: 2901 - DNA, 378 bp, Zea mays
  Clone ID: LIB3116-002-Q1-K1-E8
accagcccagaaaattcgcagccgccaaccacccgaccccacatggccacatgcgcgaccgcgatgcccacgccgtgagcccgtgaggcgcgccgctggagccgtcgcagccgttactatgacctcgccggcccccacctcctggttctccggcctctcgcgctcctcctccaccatggccggcggcgtcgcctcggcccccacccccgcctacgcctacgcctacgggcccgcctccgtgttcctccccgacgcgcccaagtccgtaatcggcgccggctccggaggaggcaagcggaatcatctctgcggggcgctgttcaagtacggccccaaatctgcgcaggtagcattcaagactgggggattttaaccatc

SEQ ID NO: 2902 - DNA, 377 bp, Zea mays
  Clone ID: LIB3116-002-Q1-K1-F1
cgacctgcccatgctcggcgtcgcctccatcggcgcagccaagctctcgctcgccgccggcgggctcgcgctccccagctactccgactcagccaaggtcgcctacgtcctccaaggcacgggcacctgcggcatcgtcctcccagaggcgacgaaggagaaggtggtggccgtgaaggagggcgacgcgctggcgctgcccttcggcgtggtgacgtggtggcacaacggccccgccgcgccgaccccgctcacggtgctcttcctcggcgacacatccaagggccacaggccggggcagttcaccaacttccagctgacgggcgcgaccggcatcttcacgggcttctccaccgagttcgtgtcgcgcgcgtggg

SEQ ID NO: 2903 - DNA, 440 bp, Zea mays
  Clone ID: LIB3116-002-Q1-K1-F10
cccacgcgtccggaaaaagacaaggaaaagggaaaggagaaggagaaggaaggcagccagctgcacaaggaaaaagataaggagaagaaagacaaggagaaggaaaaggaaaaagataaagagaaggaggatcataaagataagaaagacaaggatcacaaagagaagaaagaaaagaataaagagaaggaaggcagccagctacacaaggagctcaaggcgggtgtcgccgacatggtgcacacgctcagctcttcggcaccgtcatccgggggcggccacgagcgtgctggctctgcggcggcgggaacaacaatcatcacgctggccggcgagaacaagggcacgtccatgaaggtagacagcagcgccgtagcctacggcacggcggacgcggcgggcagcaaggagcgccgcggccacaagctcgacggcagcgt

SEQ ID NO: 2904 - DNA, 430 bp, Zea mays
  Clone ID: LIB3116-002-Q1-K1-F11
cggacgcgtgggtaacaacgtccttgtatatatagtagtacctgcagtctctggtcgacgagggcgtgtccgaggcagggaagtacacagcagaagctagcaaacagcatgagtggtgccatggacatggcgcgagccgcgtgacccagcaaactacatacatacacctagcactagcagagaccagagattcagagctcaggagctcaggatgtgtcgttgagtgcgaagctgccgatcgaaggagggagagaaggttctcgaccgtcgtcttgctgcttgccggtcgcggtctcagtcatcgaccatgtggagcttggtgcggcagggcctccgatggggcagggggcggcgacggcggcggacggcgcgggtggtggacgagagcgcgctcggcgcagacggcggcgatatcgacggcggcggtgct

SEQ ID NO: 2905 - DNA, 462 bp, Zea mays
  Clone ID: LIB3116-002-Q1-K1-F2
cccacgcgtccgggacgaggaagagaactccgagcccttgccacctccttcgctgttccagggggcagctcagcgtccttccatcacagcggcctcttagatgatcgtgaactcgatctagatctcaccaccgcctgtgaacgaagctgaatctggaaccctggagagtggagagtgactgggagtgggagataaccgtgcagaaacccccgacgagtgactcgcatcgccggccggctcctcgccgcttgtgaactgaatcacggtacatgtaaaactgaatctggcagagcacacacgcgcctaagcctattagcgtctatagacttcgcagggctatgtatagtagatatgtagattgagaccctgctgagcatgtacgtgcagtatgttcctagtcacttgtgtatcattactagtaatgcagtatccctcgtgaaataaacgtcaaaaccccctttc

SEQ ID NO: 2906 - DNA, 389 bp, Zea mays
  Clone ID: LIB3116-002-Q1-K1-F3
cgacccacaggaagtcggcttccatcagatcatcgccccaagaaacctcagtagcagaatgggtgcgagccgtccgtacacggcccaccagaagagtcaagtgctccctcgcaagaagcggaagaagttcgtgcctgacaggtgcgactgctcaaagcagatcgacggggtgatgtacatgcgcccggcgccgctccgggacgaggccaccggcgacgtcgcaagcttcaagatgaccttgtgttacagaatcaaccctcgtcaagcagatgatggtaccgaattcaaccacggtggccgcaacattgggctggtcctgttcctcgtaccttacccctggaattccaatgatgagaggatagagggtgggctcgacagcaagtgcacag

SEQ ID NO: 2907 - DNA, 366 bp, Zea mays
  Clone ID: LIB3116-002-Q1-K1-F4
aagagaggagaggaagcagcgagaggagccgaggaagaatatatccatcctaacatccacacaccagacagacacacataccttattctccgccgtttcttggcctccggaaatctcctcccccaagttgcaagcatgggcgggttcagcctcagcggcgctacaggtctcgcggcgtaccgcgaggaagacgacgaggagctgttcgagacgtcgtcttcgatctccggcgactccgacgacgagggccaccagctctccgatggagagggcgcctatgatttgtcatctgtgatggcacagctccctgtcaagaaagggctatccagatactacgacggcaagtcccagtcgttcgcgtgcatg

SEQ ID NO: 2908 - DNA, 420 bp, Zea mays
  Clone ID: LIB3116-002-Q1-K1-F5
cgccacgcaggtgtacaaggagctgcaggaggccatcgccgcgtacccggacgccttccagcgcgtcatcggcttcgacaacgtcaggcagacgcagtgcgtcagcttcatcgcctacaagccccccggcagcgagtagagaccgtggctagatcgacccatggccatgcctctgcctgttgatcggatcaccttcttgcattggttcctctctctctctccctccttttttttccctttatctcatcatttcttttctcctgcatgcaatggttccttttgcttgcaacaattctcctgctgatgtatccagcatggcatcatccatctacaattacgtacgtagtgcaacgactgtcgattcgttgggtgaggaacatatatgtgaatgcaaggcttcggctaccatacatgtgtaat

SEQ ID NO: 2909 - DNA, 431 bp, Zea mays
  Clone ID: LIB3116-002-Q1-K1-F9
cggacgcgtgggcggacgcgtgggcggacgcgtgggcggacgcgtgggccgcgacggctccaacttgatcgacatgagcgtccggaagcagatcgaggagatcgcgtccgagttcgagttgcccgccgtcccgctcgaagtctgaggccggcttgaggcgtccatcctcgccctcgaagctatagctgctactgtctcaaggaaccaagcgggaatgttggccctgtccccttcagtcactcagacctgcggatcaacggtggtggctccaaatctccgatacatatatgaacggaccctatttttgtgcgtttcggttggcgggaacctctgtagttctttctcctttttttcctggggttgacagacacagacagacactgtaatatgttttaaaacactcatctatatagctgagtgtgcacctcttc

SEQ ID NO: 2910 - DNA, 290 bp, Zea mays
  unsure at all n locations
  Clone ID: LIB3116-002-Q1-K1-G1
gccacgcgtncgcaatacatcttcctagtttccggatttaacgttcacgcaagaaccagatgattacaacccaaaagtcaacaggttttcaagctcaaatagtctccatttatgagcagcctcatcaaaacgaaagaatccagcaagttgcccacacatgatacacgtctaaatctcaatcacccaaacggcctgccccaacatgcaccagattcaaactaaacatacaacttctgatctctcactgaatatttggatgtaaccacgaaatccatggatcaaagctcgac

SEQ ID NO: 2911 - DNA, 435 bp, Zea mays
  Clone ID: LIB3116-002-Q1-K1-G10
ccatggaacagaaagtagctgactccaaaccaattgcggtgacagtcgacgctgagaagcgggagaaaaccgctgctgtaatgggcaccacagtgcacaggtctatcaggttctcatatcggaaggcaggccttgctttgtgatcaaatcctctccgcttgagatgcacgtggccttcctggttgctttttcttttttggcaacaaccttcctggttgctttgtgtgatggtcagaaaacatagaagaataacctgcaactggagtgacagaatttcttttccccgcagtagacaggtgtgcgttatttggttggaattatctccagtccactatcaattttttttccttggattttgattcattttatgtttcgatttgttgccttatatactgtaaagtcattggaaagaataaataaaacacgaatgttttt

SEQ ID NO: 2912 - DNA, 243 bp, Zea mays
  Clone ID: LIB3116-002-Q1-K1-G11
acccttgtacaacatatctctcactcctttcttatttcactgaccgaccaaactctgatgccgatgaaaaccaatactgggacgggcatcacaaatccactaaatctcatcatcttttctctccacacactcaactctgtatgatcaaaacctgacctttttccattcactttgactttccatgatcccttcatgtatactacacttccttaccaaatgatcattttcctcaataaaaaacat

SEQ ID NO: 2913 - DNA, 398 bp, Zea mays
  Clone ID: LIB3116-002-Q1-K1-G12
atacgtcgggatctccaattcgcttcctacttttcatgcacacaaaaactaaaacgattgggatgggtttacaccctcaaaggggagataaaccctgtatatatctgatgattgttccttcttattactgcaatctcaatactcctaccatctgctaaaacttcaaaatgcaactaaccatatgatcacaatctcactctctttgcacaaaggcttcagatttccccaccaacaatgttttcgacttctacttcactatatgcgcaaaatatcctattcaatcacttatcctcttgcaaacattcattcaatccatctgattcatctcatctagatctaattatcactgtcatcttatatttaaccccttccacctataacataatacctattttact

SEQ ID NO: 2914 - DNA, 455 bp, Zea mays
  unsure at all n locations
  Clone ID: LIB3116-002-Q1-K1-G2
ggggaaatataatccaaatccttgacaaatcactaagcaatgccttcatccaaacaaaaccgcttactgttgtggccctatccttgttagtaatcaccaaacaatgccttagtacaaacaaccccttactgttatagtcctgttcctgttagtaaaaattatcaggtatcatgaatgatgtcaccttagccagtgacctactacaagcttcttggtcgatttatcaagaactccaaggagcaaatgttgttaaatattagctttgctgccagatggtggcatcggctgttctttcatttgtgtttctcattcatggnggttggttatataggtgattgaaaagttttgaactgtggtgatagtgtatgtaacanacatgtatacagttagttgatgatggatatattcaccatcatgtatttggttcttgagatgacagtaaagcgtgaatttct

SEQ ID NO: 2915 - DNA, 371 bp, Zea mays
  Clone ID: LIB3116-002-Q1-K1-G5
cccacgcgtccggcaagacgctgctgaggcaggccgaggcagcccggccgtggttcgccgtgcgcgccgcggcggattccgacaggccgatctggttccccggcagcacccctccgccgtggctcgacggcagccttcccggcgacttcggctttgatccctggggcctcggatctgacccggagagcctgcggtggaacgtgcaggcggagctggtgcactgccggtgggcgatgctcggcgcggcgggtatcttcatcccggagttcctgaccaagatcggcgtcctcaacacgcccttctggtacaccggcggcgagcagcagtacttcaccgacaccaccaccctcttcatcatcgagctcattctc

SEQ ID NO: 2916 - DNA, 364 bp, Zea mays
  unsure at all n locations
  Clone ID: LIB3116-002-Q1-K1-G6
cccacgcgtccgcccagcctgggactacagatattcaaggtatccgcatcagcataaacaggtaaagcatccgcatgatcagtcaatagcgacgtaccgtggacatacagtcctccggacattgatccgttgctacttttctccttcgtatagcactgggcaaaagtacatatatacagggtcgtatgactccaatgtttgcatctatgatgtggtaagcggatcccaggaagcgaagctgaaatggcatcaaatggcgattcgggactgcagttggcacccatttgagcccacgctcgtgagctcatnctgggacggccgggtagtgaaatggaccagcgcacgtgatgaaagcgcttctgat

SEQ ID NO: 2917 - DNA, 350 bp, Zea mays
  Clone ID: LIB3116-002-Q1-K1-G7
atggaatcaaataaaaaaaaaaaaaaaaaaaaaaaaaaaaaaaaaaaaaaaggaaaaaaaaggaaaaaaaaaaaaaaaaataaaaaaaaaaaaaaaaaaaaaaaaaaaaaaaaaaaaaaaaaaaaaaaaaaaaaaataaaataaaaaaaaaaaaaaggggggccccttttaaagaaccaaatttaatttacccgttcttgcaacataaaattttttttttggtgcacccaaatttaaattaattgcccgtttttttaaaacattttaattggaaaaaccttggttttaccaaattaaatccctttgaaaaaaatcccctttttccaagtgggcttaaatgcaaaaaggcc

SEQ ID NO: 2918 - DNA, 390 bp, Zea mays
  Clone ID: LIB3116-002-Q1-K1-G9
acggacggatctactattacacaaccaacattttttcttaactatccaattcacatatcagcatgctctattccacatcgaagtcggcttatccttacttagccattccaactttacatttcctatccatatatctacaatgcgtactctgatctcacatacacaatttatcataaaatcccattatacaatcaaattaaacatcacaattctaaccctactccaataactaatgatgtcaaatctaccgatcttgaaagctactactattacttgtatgaatcttctttaaaccaccacttattgacttcattcgaatactgaatgccacccacatcatgaattgacctcagtatctacctgttattaatgatttttactaactcttct

SEQ ID NO: 2919 - DNA, 283 bp, Zea mays
  Clone ID: LIB3116-002-Q1-K1-H11
atacgatacaccggaccacctactctgcctgcctatttgttaactgtgcatggaataatactgaaagtgggtttcctgccgtccaatgcactgagatatgatgcccaaccaataaatgtacctatcataattattctacttccaaaccaaatttaaataactgacataataaccaaaaagcacaaaaccgatcatccttcacaacaaatacacagcctaaactggtacaatgatacacgccatgtaacaatgcattaaccccactacatgtacagtctacaca

SEQ ID NO: 2920 - DNA, 379 bp, Zea mays
  unsure at all n locations
  Clone ID: LIB3116-002-Q1-K1-H2
gggttntgctgctgctccagccggacccaggacaagaagcggcgcgatggcggtgggcgagctggcgttcaaggcgctgacggctgggctgggcgtcgccacgctctacctcgccgccaccttctccgtcaacgtctaccgcggcctctcgtggcactccgagcagtccaagctagaaaaggcgaaaaccgaagattgaaaaagaccagcaagcagttttagagagcagatgaaaggcgggcatttttgttgatgtcttatctttcgtgtcaattgtgtttttgcttgtcccgtagacctttcaggatatctggagtgtatcttcaagtatgtgatatatatatacgattcaagaacctgtctgggatgattattcatc

SEQ ID NO: 2921 - DNA, 189 bp, Zea mays
  Clone ID: LIB3116-002-Q1-K1-H3
gcggccacgcgttctgggcgcggacgctgtcgctcgcgatatttgcgagagagagagaagagagggcccgagagccgaggacgagtgcagtctggcatgcgtgatgctgcttcggagcgcgtcctcgccgctgctcaactgcaggcgcgcgccggctgcggaggcggcaggcgagcacctcgcggtggt

SEQ ID NO: 2922 - DNA, 342 bp, Zea mays
  Clone ID: LIB3116-002-Q1-K1-H6
cccacgcgtccggccgatcagagggctgacttcgaaggcattttccgtgctatggatggactcccggtgaccatccgactcctggaccctcccctccacgagttccttccagaagggaacatcgaggacattgtaagtgaattatgtgctgagacgggagccaaccaggaggatgccctcgcgcgaattgaaaagctttcagaagtaaacccgatgcttggcttccaggggtgcaggcttggtatatcgtaccctgaattgacagagatgcaagcccgggccatttttgaagctgctatagcaatgaccaaccagggtgttcaagtggtcccagagataatg

SEQ ID NO: 2923 - DNA, 351 bp, Zea mays
  unsure at all n locations
  Clone ID: LIB3116-002-Q1-K1-H8
cggacgcgtgggcgacgcgcagncgcccattccgcatctcgccctcccgtcctgtcccgtggcgccgttctccgattggccgccgaccgcctcgccctcgtcaacaaaagcccaccgcaagcgagcgagcgagccaccctccccgccgccgccaccgaccccgtcccgcccccaccccgactgctcctgaccgccggcgtggagtgcccgggctccacctgctgcgacgacaccctccccgacacgcgcgcccccaccgactgctccgtttgcggggggagccggggctccggcctcggcggctttcaaagccccctgcctcacaacaggatccaaaatcccggcctagac

SEQ ID NO: 2924 - DNA, 436 bp, Zea mays
  Clone ID: LIB3116-002-Q1-K1-H9
actagttcttgtttgctactttgattgggaaagccatcatcaagactcatattcagacactgtttatcgtgtccctgtgcaacaatcagctcttgtatcttattgaaaaggagttaatctggatatttggtcacgttcctgggttttctgccacccttccgtctgtgattgccagactccatgctgccaaggacaagtatctatcaccaccagccccagtctcaccgtcatcacaaatgggggagaaacagtggaatttctcttttacatctgtctggaactctatagtgtggcttgtgcttttgaacttcttcattaagatagtcacgtcaacagcacaggattatctcaaaaagcagcaggatacggagatggaacttatttcggattccccgatccaagaccattctaaaactaactagtggcgcagctagtg

SEQ ID NO: 2925 - DNA, 362 bp, Zea mays
  Clone ID: LIB3116-004-Q1-K1-A10
caattcatcagctagaagttcgaaatgggggtcaagtttttagtccttctcggtgttgtcctggcctctcttgtcttccaggacgtggcatttgctagagagctcactgaggccaataatgaggatgagggaaagaacatgaaacaaggaggaatgactgaattaaaggatgagaaatggggaggtggatataatggaggatatggatatggaggtgggtatggaggtggatctggaacaccgggctagggcaggggttatggtgattgcctacaagcctaaagggtactaagttgtgtactcccctcctaggaattccatctgcttcaaagatgtacttaaattaagccctctcaaacccc

SEQ ID NO: 2926 - DNA, 246 bp, Zea mays
  Clone ID: LIB3116-004-Q1-K1-A11
gcttgtgaaacctcaggtagcccgttatgtgtatatcctattcgttttcatgatagtccaataagttttatggtgcatagttttctgattcctgtaaatgtttatgagaaaacatgaatagcttaagatggaaaaaaaagaaaaaaaaaataaacaactaaaacaaagaaaaaaaaaaaaaaaaaaagacaacaataaaaaaaggaaaaaaataaaaagaaaccaaaaaaaaaaaacacaagaatc

SEQ ID NO: 2927 - DNA, 191 bp, Zea mays
  Clone ID: LIB3116-004-Q1-K1-A9
gccacgcgtacgatccttcatcgtcatccaatgtccgccaccggcctgagcatgagcatcctacgagcgccggcgccctgcttgtctgatcccactcatgctcatggtcgcgagtgccaagccgctggcagtgcccatgcggcgccagctgctgcgcgcgcaggccagctacaacgtgaagctgatcacgc

SEQ ID NO: 2928 - DNA, 381 bp, Zea mays
  Clone ID: LIB3116-004-Q1-K1-B10
gcgggtccggacccagcctacctccatctggcggctggcgggcacccggagcacgaggatccggcggcgccgtggtccccggggcggcgcccgtctccgtgcccagagtgcgaggcggcggcggcggccatgcgccagccggcgttccactggtgcgtgcacgacgcggtggtctccgctgtgttccgctcccacgtgggtcccatcgagcgccctccgaagaagaccccctctccgcctccgcttctgcctctgccgccgagccctggtcgcctcctcggcatgcccgtctacgagttcatcgaccagcacctgctcttccgtcgtcgtcgcctggcccactctagcagcaactgtacgtagacaaaaacaagcgggact

SEQ ID NO: 2929 - DNA, 292 bp, Zea mays
  Clone ID: LIB3116-004-Q1-K1-B11
gccgcacctgctcgagtactcgttcatgtctattaacactctggacagtgacaggggtatcatgctttctggctgctcacaaggactcactccaggcggtcgtcagaaacgcctttgccggtgccgatgctatgctgatcgaggcgttgcccaagctggagattgttgccagcttcagtgtggggcttgataagatagatttgaccaagtgtcaagaaaaggggatccgatttaccaacaccccttgacgttatgactgatgacgttgcggattttgtcgatctgtttgatg

SEQ ID NO: 2930 - DNA, 324 bp, Zea mays
  Clone ID: LIB3116-004-Q1-K1-B12
cccacgcgtccgccatgttctccatgttcgccttcttcatccaggcctacgtcaccggcgaaggccccgtggagaacctcgccaagcacctcagcgaccccttcggcaacaacctgctcaccgtcatctccggcgccgccgagaggacgcctagcctgtaaggacggacgccacgccgccgagcaatgccaagtcatgcgctgctgcatgccgtctttgattttaccgggataaaaagctgtatgtgagggtctgaagaatgtgcaatgcccacgcgtgtaaattatcgagagggagaacaaaccttttcattctgattgtgat

SEQ ID NO: 2931 - DNA, 276 bp, Zea mays
  Clone ID: LIB3116-004-Q1-K1-B9
cccacgcgtccgcacctagctcccccgcgccaagaacacgccagctagcaagcgcgctcgatcgaataccgttaccgtgtcgccatggccgtcaccgcgtctctatcagccgtcggggcgccgctgtcggtgcccgggctcaggaagccgctcggcgtgtcgtcgctccggcccctgcagccgagggcggcgaggatgacgacgacggccgtgcgggcgtcggcgtcgccctcgtccacgtccatcaaggagaaggctgcggccgggctgaccgcg

SEQ ID NO: 2932 - DNA, 444 bp, Zea mays
  unsure at all n locations
  Clone ID: LIB3116-004-Q1-K1-C10
ctcaagcccagccccctcgttcccaagcccagtggaaacacgttaaatttcaggataaccaagctaatgccatgaaggaaccaggaaccggtgggtatggctatgggacgaaaaatgacaagaataaggatgtggatacaatagcttcggacttcatcaagctgaagcacaaggcttgggcactccagaagagcacaaccatgtaccaaccttctacctaaaggtgtcaatagttcaagaagttgatactatatacttatgcttgtctctgtatagtctataagtcctaattcaaataacaggtgctgcttgcagccttggatatttgcggatgcggagtgaagttaccatggcatccttgctaagaataagaaagtaatgtggttatgacgagatgtgtaattntgtggcgatattatttgcaacaatgatgtatatatgggc

SEQ ID NO: 2933 - DNA, 438 bp, Zea mays
  Clone ID: LIB3116-004-Q1-K1-C11
cgagcggcctccctttttttttttaagcttatttgatacacttttaattttatgatgatcaagattatgtcatgaagaaccagtaactgttggttatggttatgggacgaataatgacatgaataaggatgtggatacaatagcttaggacttcatcaagctgaagcacaaggctagggcactccagaagagcacaaccatgtaccaaccttatacctaaaggtgtcaatagttcaagaagttgatactatatacttatgctagtctctgtatagtctataagtcctaattcaaataacaggtgctgcttgcagccttggatatttgcagatgcggagtgaagttaccatggcatacttgctaagaataagaaagtaatgtggtattaggagatgtgtaattttgtgggggatttatttgcaacaatgatgcatatat

SEQ ID NO: 2934 - DNA, 435 bp, Zea mays
  Clone ID: LIB3116-004-Q1-K1-C12
gctcggaggaggtgaggtcggtggccccggccggcttcggccgccacggaggcggcgtccagcagcacgtcgtcaaggagaagttcgaggaggtcgacacggtctcacgcgccggcgccaaccaccaccaccaccaccatggtcaccacggcggccacggcttcgtggtgcgcgagaccagggtcgaggaggacatcaacacctgcaccggcgaggtccacgagcgcagggagagcttcctcgccagggctaactgagccgcccggcggccggcatccacgcccgttcgtgcctgcctgcgtgccttatgtatgtctgtggttgactggttgtgcagggtcatcgtacttggctatcgtacgtgcacgcactcagctcctgtacgaattacgacattaagctcgtgaccttgataaaacttcttcgtaatactaa

SEQ ID NO: 2935 - DNA, 345 bp, Zea mays
  Clone ID: LIB3116-004-Q1-K1-C9
gccacgcatccgaactggttcagaaagatattgacggcctacacctgattgagcgaatcgatgaagttgccattcagaatttacagacatacatagagtagaagttcgttgatattagcaaagatgatttggaattgggtgatgaagatgaagacaaggagaaagaaagcaagcatgagtatactcttctatgcgactggataaagcagcagcttggcgataaagtacacaaggtccagatcttgaagcgactcatctcttctccatgtggtccttgtaactgctaaatttgtctggtcaaccaacatggaaaggcttatgaatgcacagaccctaggtgacaca

SEQ ID NO: 2936 - DNA, 372 bp, Zea mays
  Clone ID: LIB3116-004-Q1-K1-D11
cataacaacgagcagcacagctcacgctcggctacgactacgatccgcgcgcatcgatggcgatgagtgacaccggctcgagcttcgcgcagtgggccgcgctctaccaccaccacgaccccgacggcggcccggtcctgcccgacgacgacgcggcggacgctggcaacggcatcggcagcggcaccgacaccgtcgcgagcccgacgtcgggagggtccagcggcgggagccccaccaccaaggcagcgtgggggcagcagcatctgcttcacggcgtggaggggccccgggtcgccgggaagccggcggcggcgcggcagccgtcccgcgcgtcgcggcgggcgcccgtgacgctgctcaacacggacg

SEQ ID NO: 2937 - DNA, 386 bp, Zea mays
  Clone ID: LIB3116-004-Q1-K1-D12
cccacgcgtccgcggacgcgtgggttgaagaggagaaaaggaaaaagagcgcatgatgagctgactgctgcgaatattttaccttctgcgtctgggacacaacaacaacatcgtcgacaatcaagattatgccttgttttgtagtattcgtctcgagtcgctttgtttattaccaatctattatctggtgttgaacagcagcacattgcagaacagatgatcgtcgagtgaccttcatatacgcctgtaactctctctctctccctctctctcagctcagcagtttacatcgactatactcattggacatggacctatctatatatcttgttcgtaaacaggacagagtctgactcctgctgcagtattatcaactcatctatttt

SEQ ID NO: 2938 - DNA, 451 bp, Zea mays
  Clone ID: LIB3116-004-Q1-K1-E10
caagaggtgattacttcgcgtgagaggttagctgggcaagatgccaatgtaaccactgtacctgttgcagtcttgagatttactcgtcagttgacacggtgcttgcaatggacaaatgatgtggctgacagactggcattttcagaggtgctctcaagtgacacagttttctctgctccaatgaatgagacctaccatcttctcggggtggatgggaatgacattctcagcttagagaagtatttacaagattattttactaacattttgaagaagttaaaggatctcaaggcacaatccaagcatactgatatattcttttgatataataacgatttctgtgacctatggacataattacaaatctgtgtctcatatgacagatgagtgagcacaattttttcctgtatatttgcatttttgcatgtgcaagaatgctctgtgctattag

SEQ ID NO: 2939 - DNA, 383 bp, Zea mays
  Clone ID: LIB3116-004-Q1-K1-E9
cccacgcgtccgcggacgcgtgggcggccaacctagaaagcgacggcggagccggagagggaaggggaggagggacgaccggtcaagggcggacgatgtgctgcggcggcgacggggagtgccggccgctcgggtggctcctgggcctgcccttcgcgctgctcgccgtcctcgtctctttcgtcggcgccgtcatctggatcatcgggctgcccatctcgtgcatctgcccctgctgcctctgcgtgacggtgctgctggaggtggccgtggagctcgtcaaggcgccgctccatgtcatgacctggttcacctccaagatcccctgctagctgtcccctgctttctgctgtgcggatcatactcatacatacatcttgctt

SEQ ID NO: 2940 - DNA, 297 bp, Zea mays
  Clone ID: LIB3116-004-Q1-K1-F10
cggacgcgtgggcggacgcgtgggccacctatctcccgcgggccaagaacacgccggctagcaagcgcgctcgatcgaataccgttaccgtgtcgccatggccgtcaccgcgtctctatcagccgtcggggcgccgctgtcggtgcccgggctcaggaagccgctcggcgtgtcgtcgctccggcccctgcagccgatggcggcgaggatgacgacgacggccgtgcgggcgtcggcgtcgccctcgtccacgtccatcatggagaaggctgcggccgggctgaccgcggcggccct

SEQ ID NO: 2941 - DNA, 440 bp, Zea mays
  Clone ID: LIB3116-004-Q1-K1-F11
gacgaggcgcgcctgctcaaggcctacggggagcttcctgacacgctcaggctcaacgagggcgtcgacgtcgatgggcccgaggaaggcgaggagggcagcgactacatccagttcgaggacgaggacatcgacaagatctaagaaatctgttcctgcttacggctacctgtattgttacgtgacgcgttcttctgcttctgcttgcggctacctttattgttacgtgacgtgtactggtatgttgtggtatggtttagcctgggttatcttgtaaaaggatctgaagtggttaaataatcgtgggtaatttcgtttttaatctggtacatgctgttacaaggtgttctgtactaagctattattgttctgaattgtgttctcctgtcttgattgatttgccaattagacccaagttttattgagtctaatattttcgg

SEQ ID NO: 2942 - DNA, 357 bp, Zea mays
  Clone ID: LIB3116-004-Q1-K1-F12
gtcacggcgtatttgcagacacaattagaagaaacatggaaagcattgttttcaagccttagatatgggaaaaactttagtggtccgggctgtttccgccatgctgttttatcaccattaggatacgagactgcattgtttaaagggcttagcgaagacatagattgtcaaggtgcttctgcacatgatctatggcaaagccccgatgacaaaaaaactgctcggttatctgagtttggagaaatgatcagagactcttttggatttcctgtaaacagacatcattctgataagacagtctcgggtcattataacatcctctttgtccgtcgagaagattatttagcccatccacgc

SEQ ID NO: 2943 - DNA, 215 bp, Zea mays
  Clone ID: LIB3116-004-Q1-K1-F9
cccacgcgtccggcaaggcatccttccggtctggaaggaagaggagggggaggaggaggccgcgaagtagtaggttgcgcaggcgcatacgcatacacatacacacagggtgctgccgtgaacatacacatgtaacgctgtaaagttcatctgctgtgaacatacacatgtaacacagatacttcagtttcagcagttaaaaacctaccgtcgtt

SEQ ID NO: 2944 - DNA, 430 bp, Zea mays
  Clone ID: LIB3116-004-Q1-K1-G10
gcaagctgaagaagttgaaggccagtgccaaaactagttccacacttgcggccgggcgaaagaacccgtggcaatagatgaagttaccaatagtgtcatttacctgatactttgttggtagatcaagtgcactaggttggtgaaccagaaaaccacagaactagattagagatctggactattgtattgcaccctcgttatatgttgtcgcaaccggccgggtgctgatgaaatttttgatagaccagaggagtttatcaatcccatgggtttggcggcgataattttctagtgacaggggttgtttaagactacctgttacttgatgttttgtgtaacctacaatttttcttacaaggtacttctctactggggtaaaaaaaaaaaaataataatttaatacataataataaatattaattataattaa

SEQ ID NO: 2945 - DNA, 377 bp, Zea mays
  unsure at all n locations
  Clone ID: LIB3116-004-Q1-K1-G11
cggacgcgtgggcggacgcgtgggtgctggcgctggccctgctctactcggccgtgggagccgccgcggagttcggcatcctgggcgagcgcggcaactcgcacgtccgctggcctaaggtctgcaacgtctatggccgcttctgcgagcgcgccatggcggccgtcatcgtctccctcatcgccgcattcgccaacctcgtcctcctcatgctcaacatcctcaccatccacaagagctcttcctactactaagctagctactatactgtagagaagagaaaccatatacaatgcgagctagctactcatatatagctgntgctgcatgcatgcatggngattaactaaagtgatcgacctcaacttgttgaaaaa

SEQ ID NO: 2946 - DNA, 359 bp, Zea mays
  Clone ID: LIB3116-004-Q1-K1-G12
acgcacgagcagcatgccggccgtatgcacggcgacgccgaccaatacgcgcgcgaggaggccgtcgaggatctcgtgcagggcgtccggcgatgacaaggacaaggtcccgtcgtcgggagggagcgatcttggggtcaagcagctcgggaagctggccatggtcgcgctggccgccggcgtgctggtgctcggccccgtcgacggtgccgtggcagccaagtccggcggcagggtcagcgggcaggcgttccggtccgcgccccggtcgtccggccctcggatcatcatcttcaggacctacatctacatcaacccgccggtggcgccgtcgatgggcggatacaggtacgggagcc

SEQ ID NO: 2947 - DNA, 282 bp, Zea mays
  Clone ID: LIB3116-004-Q1-K1-G9
ctagtcgctgccacatggccttggctactgcttctgcacccgaacccctccttcagagtcagccacaaggaaaggggcgtgcgccacgcacatttctcatgcctacacaactcctctactagccttaactttgccaggcaaacctgtgatcacttccattcactcgtcgctttccagacatctgctctatgaagcaatcttggcgtcttcatgctaagaatggcacaagcaacactaaatgtggctactaatgggtttggtacgattctcaagaatttctta

SEQ ID NO: 2948 - DNA, 453 bp, Zea mays
  unsure at all n locations
  Clone ID: LIB3116-004-Q1-K1-H10
agtcaccaggctagcttctactgatgaggtaaaagctgcgtacgagaagatgtgtgaagaactaaatagcaaagaactagaagaagaggagcttaacaaggaacatgagctcctaaaggttctcggcataaatcaggagtcataatgcctcacttcactaatttcctgtgcttcaatcatatatgcgccattgtaggaatcatttactatactatcaacggaggaagaacgaagattatatgattggagcttgtcaagaagtggacagcctgagcgatatgtctggccatttgaagttgatccattggagttggcaccagatcctccaaaggaaccagaagatgagttcccaaccaagctcgttggctacttcttactggcgtggttcatactctctgttggcctctcggtggccctcaacaaatgaagattttctncccaaaagaacatgaa

SEQ ID NO: 2949 - DNA, 359 bp, Zea mays
  Clone ID: LIB3116-004-Q1-K1-H11
ccgccgtcaccgccccttccttcgccgcacccgcaccagcccgcgccgtggtcagaaggaggtccttcaccgtgcgcgcctctctccgcaaggccaccggcaccgccgccgtggcaatggctgccagcgccctgcttgccggcggtgccatggcccaggaggtgctgctgggcgcaggcgacggcgggctcgtcttcgagcccagccagttcaccgtcaaggccggcgacaccatcacattcaagaacaacgccggcttcccgcacaacgtcgtcttcgacgaagacgaggtgccgagcggcgtcgacgccaccaagatctcgcaggaggagtacctcaacgcgccaggcgagacctac

SEQ ID NO: 2950 - DNA, 409 bp, Zea mays
  unsure at all n locations
  Clone ID: LIB3116-004-Q1-K1-H12
cggacgcgtgggcggacgcgtgggatactttgccctcggatggcttatagcaagaaatcagatcctgagagtttacgttcctagctacgagagctacggacgaatgtggccacacatgcacacgaggatcatcgcggctctgatggtttaccagaccaccatgatcggcttcatctccctgaagaagttcgcctacgcgtccgttctcgtgcccctgcttccagccagcataatcttcgcctacgtctgccacatgcgcttctacccggcgttcgccaagactcccctggaggtggtggtgcggcacgacctgaaggagactccgaacatggaggccatctacaccgcgtacataccgncgtgcttgaagcctgataagctcgaagatctggacgcgttcgaggacgcc

SEQ ID NO: 2951 - DNA, 440 bp, Zea mays
  Clone ID: LIB3116-004-Q1-K1-H9
cccacgcgtccgcaattttgttatccacgtgtgtgcttcttgaattatggaaaagcctgaaagacaacacatccttttttgtgtgtgcaaaacatccttctgtgaaatgatcctcaaccatcaattcttttaaatgttccctagtaaaatgatttattcttgatggttcaaaagtttccctattccttggatgtatcatatgcatcggggatgtcatattgaagaattagtataataatatggactatttggaggggtctttaaatgagcttggaagttggtgcataaggctgcaacaccgtctaatggaaggtgttttggaccaaagaaagcttgtaccttaaaacaggaggatacaagaagctgaagtggttgtctgaaagcttttgaactgcttgaagcattaatgtagctttcgtgcttttgtgactgatcaacac

SEQ ID NO: 2952 - DNA, 320 bp, Zea mays
  unsure at all n locations
  Clone ID: LIB3116-004-Q1-K2-A1
cggacgcgtgggcggacgcgtgggcggacgcgtgggcggacgcgtgggcggcgatccgatcgttctcgagcaaggtcggtggccatggctcgctgccgccatcacctcctcctcctttccgtcttacttgccttggctgctgctgctgcggcgcanagtcatggggaagcctccgccgtcttcatcgatgcctcgtcgcaccgctaccttcgggaccagcaagccgaccaccaggacgcttcaatgtcgttaaatgaagtttctgcgggtgtttctgtcttgcttggtttcgcaccgtcaacatccctaccagctatttc

SEQ ID NO: 2953 - DNA, 445 bp, Zea mays
  Clone ID: LIB3116-004-Q1-K2-A2
gagcagagcagcgaaaagcatggatgccgaagccgccgccgccgagggccaggtgcggcactggaccgcggacgtcaacggcatttccctccacgtcgccgagcgtggcgccgccgacgcgccggcggtcctcctcatccacggcttcccggagctctggctctcgtggcgccaccagatggccgcgctcgccgcccgcggcttccgcgcgctggcccccgacctccgtggctacggcgactcgtccgtgcccaccgaccccgccgcctactccatcctccacctcgtcggcgacttggtcgggctccttgaccacctcaaactcacaaaggtgttcgtggttgggcacgactggggcgcgatggtggcgtggcacctctgcctgttccggccggaccgggtgcgcgccgcttgtgtcctggggatcccctacttcccccgcggg

SEQ ID NO: 2954 - DNA, 412 bp, Zea mays
  Clone ID: LIB3116-004-Q1-K2-A3
cacagcaatccacacaagcacttcgacgtcgcacgggcgctgcacacagacacaccaagcgtcggcaccaatggcttactaccaggaggtggactactgctcggaggaggtgaggtcggtggccccggccggcttcggccgccacggaggcggcgtccagcagcacgtcgtcaaggagaagttcgaggaggtcgacacggtctcacgcgccggcgccaaccaccaccaccaccaccatggtcaccacggcggccacggcttcgtggtgcgcgagaccagggtcgaggaggacatcaacacctgcaccggcgaggtccacgagcgcagggagagcttcctcgccagggctaactgagcccgccggcggccggcatccacgcccgttcgtgccttgctgcgtgccttatgtatg

SEQ ID NO: 2955 - DNA, 234 bp, Zea mays
  Clone ID: LIB3116-004-Q1-K2-A4
cacagccgtccacacaagcacttccacatctttcaggttctgcacacacacacacctaacgtacccgcgaatctcttactacgaggaggtggactactgctcggaagacgccatgtctgttgccctggctctcttcatcccccactaacgcgtcttccagcatcacttcttcctggagaagttcgaggttgtcaacactgtcttacttcgccgactcctactaccattcaccac

SEQ ID NO: 2956 - DNA, 364 bp, Zea mays
  Clone ID: LIB3116-004-Q1-K2-A6
ctcggcttctccctcccgctatctctatctctgcgcgcgagctcgcccctgctcgccctgctctcccatggccgcgcccaactccgtgcgctcgccggatcccctgctcggcttcgactgccgttccccgtgctcgcgttatctccctcctctctgccgcagctcgctgagtccctctgtttcctcccatggcacggggttccctgcaggctgctcgcggcacccatctcctctgctcgaccgcgagctcgctccctggtcatgccgctccctcgcctaatcgtggtcgcgcgcgcgtgtgccttctcttgggggagctcgaccccggccttaagcagtcacgtccgttgttggctggcatgct

SEQ ID NO: 2957 - DNA, 84 bp, Zea mays
  Clone ID: LIB3116-004-Q1-K2-A7
accgttctcgaatagccggacccacccacacatccgttcagataatcccttccactatttttatttttctgcacaagcatcaca

SEQ ID NO: 2958 - DNA, 164 bp, Zea mays
  Clone ID: LIB3116-004-Q1-K2-A8
ccactcaggctcagggtcgcggttgccaagccgctggcggcccccatgcggcgccagctgctgcgcgcgcaggccacctacaacgtgaagctgatcacgccggagggggaggtggagctgcaagtgcccgacgacgtctacatcctggacttcgccgaggagga

SEQ ID NO: 2959 - DNA, 115 bp, Zea mays
  Clone ID: LIB3116-004-Q1-K2-B1
atcctgttcgctaccgtgatgtttaccctagtccagagggtttatcttcgttcgtgtcgtgtttgttgttgcccatctgtgtttttgattgcaaggtcgctctgtgtcagttgtt

SEQ ID NO: 2960 - DNA, 184 bp, Zea mays
  Clone ID: LIB3116-004-Q1-K2-B2
gcgatcctgttcgctaccgtgatgtttaccctattccagatggtttatcttgcgtcatgtcgcggatggtgttgcccatctgaggctttgattgcaaagtcacttctgtgtcaattgttaaaaaaaaaaaaaatataaaaaaatggtcgtcgctttatatgttccaagcttacttactctttca

SEQ ID NO: 2961 - DNA, 367 bp, Zea mays
  Clone ID: LIB3116-004-Q1-K2-B4
cccacgcgtccgcggacgcgtgggcaaaaggtctgggtcatgaatatcgtgccgatcgattcaccagacacgctgcccatcatctacgagcgcggtttgtttggcatgtaccatgactggtgcgagtctttcagcacttacccaagaacgtatgaccttctgcacgcggaccatctgttctcaaagctcagaaagagatgcaaactggctgcagttttcgccgaggtcgaccgtgtactgaggccacagggcaagctgatcgtgagggacaccgcggacactataaatgagctggagagcatgtccaagtccgtgcagttggaggtgcggttgtcctattccaagggttgcgtgggccttctttttt

SEQ ID NO: 2962 - DNA, 59 bp, Zea mays
  Clone ID: LIB3116-004-Q1-K2-B5
accacagcgagcgagagcaaggcttccaatttccaccgcgagaacaagtctcagccaaa

SEQ ID NO: 2963 - DNA, 376 bp, Zea mays
  Clone ID: LIB3116-004-Q1-K2-B7
tgcagaaccttgtttttccttgttcatctatccactagtaggttatagtagtttaaaaaaggataataggtgtttggtttcgacctctgatggcagagatgatacgaaagcaactcctgtcgtttcaatcatgcaaaatgcatgccccgttactatagaatcatcctgaccttgggacagctggtgggttcatcatctgatctgatgattagctcatgtgtcgtattcataggttaagtatatataggtcctattatataattttgtctgttctgttacatgtcctgtatggaacttacttatatgtttttcgctttattttttctttttatatttctattttgatttttttttttatttgtaatttttttttttt

SEQ ID NO: 2964 - DNA, 438 bp, Zea mays
  Clone ID: LIB3116-004-Q1-K2-B8
aactgatcgtatagtggcctatctgctggttcatagacattgctaccaggctgcaggagcaacaaaagaagaaatcatatcctcaacccgcttgacactagaacctgagctgaacgtaccattgggaactactatggtactatcagaagatcaactgctttcagaggatcaacgagatgagcaaaaaaatgtgttgcagccgtcacaataagatgctgattgatcaactgttcagaatcaatatgatagcaaaccccgtgatgatgacagtctgctgatcacctgcggctaccgagatcccttgtgtaatatgtaaccatttcaacattgcagcattctttgattatcatcatgtaataacatctcagactgtatacgaacctacaatcgtgtgtcgagccatcaaatgagcaaaccttggacatcgttatgattaaa

SEQ ID NO: 2965 - DNA, 255 bp, Zea mays
  Clone ID: LIB3116-004-Q1-K2-C5
gtcatatctagctagtagctccctgaaaagttcactagagaagcatttgagggaggagccatgtctgaggagaagcaccaccaccacctgttccaccaccgcaaggcagaggaggaggaaggcgcctccggcgaggtcgactacgagaagaaggagaagcaccacaagcacatggagcagctcggccagctcggcgccatcgccgccggcgcgtacgctctgcactagaagcacaaggccaagaaggacccgtag

SEQ ID NO: 2966 - DNA, 377 bp, Zea mays
  Clone ID: LIB3116-004-Q1-K2-C7
actgggaccaggctttcaggagtactgcaagacatacccagaaaattactgcttaacccagcttatctattggtatagccagaattcaaaacctgaatctagattgacaagagctagaaaaggtcgcatgtcattgcccgatgtctcgtccttctatgtgaagtctctaaaaccattgcaagagcgagtttatgggaacagaactgtgagattcatgttatcacgcatggaaaaacaagcacatagaccatggccaaaggataggatatgggtgtacaagagtgatccgagatactttggcagtgcaatgatggatgccgtgctgaataattactcccttgacaaggagatggttctttggctcaagacgagaccaa

SEQ ID NO: 2967 - DNA, 442 bp, Zea mays
  Clone ID: LIB3116-004-Q1-K2-D2
ggaagaaggaagcaagaaggaggaccgagcaggcctaggccctagggtagtcccgtccggtccactgcggcgcaagtccggccggccggcgggctgactgcctggcgtcggtagggggcgacggcgatctatatctgtcgatgggctactggtgggaccgcgtcgtgctgccggtgcggcgggcctggctcggcgtcgcgtcccgcttcggggttcgccagaccgggctgtggaggctgcggcaggaggtgagcacgtgcgagtacgaggacgtgcacgtgatgtgggagatgctgagccgcaccacggcgccggcgccggcgccagcgcccaggcggcacagccggttccggccgcagccgcggccgtggggcggcaggttccgtctctgccgaggcttctagtggtagatcaaagccgccgcgcgcgtcagctccgatga

SEQ ID NO: 2968 - DNA, 126 bp, Zea mays
  Clone ID: LIB3116-004-Q1-K2-D3
ggaagaaggaagcaagaaggaggaccgagcaggcctatgccctaaggtagacccgaccggggcactgcggagcaagaccgggcggacggagggctgactgacaggcaacggaagggggcgacagag

SEQ ID NO: 2969 - DNA, 56 bp, Zea mays
  Clone ID: LIB3116-004-Q1-K2-D5
aaaaaaaaaaaaaaaaaaaaaaatttataaatttaaaaaaaaaaaaaaaaaataag

SEQ ID NO: 2970 - DNA, 62 bp, Zea mays
  Clone ID: LIB3116-004-Q1-K2-D7
tcgggcaaagatgccccaaaaggtgatttaatttttggacagtaatcttcggagggggggta

SEQ ID NO: 2971 - DNA, 435 bp, Zea mays
  Clone ID: LIB3116-004-Q1-K2-D8
cagaaggaagccgcggctgctgcggctgctgcgtctgattcagaggactccgatgatgcggctggcggcaataatcacaaattgccccggtcgccttcgcgctcggtgtcgtcactctctgccagtaacaagaagcgctgcagagatgaggctggcagcagtgctgacaaaggtttcagagagttagcaagggcgatcgaagcttttgcggagatgtatgagcgtgtggagagtgctaagcaaaagcatgtggtggagatggagcgccagcgaattgaattcctgaagcaactggaggtgaaacgcatggagaatttcgttgatgcccatgtgaagctggctagagcaaagcgcacgaagaagactacagggggtgctgccgacggtgctggtggtatggagttggttgccaccgttgctgcgctgcctttcgtc

SEQ ID NO: 2972 - DNA, 434 bp, Zea mays
  Clone ID: LIB3116-001-Q1-K1-B11
gtggaaaaatacttaatccaaaaatcccgttgagtgaacaagaggaccttattgattggatgcgggctgcagcgcttgcaacattgagaaagctgtatggtacgatacatgttgatctcaaggaaaacgatacaattacagttcagttggagaacaactacaacacctatagcttcagtggcaagaagaagctggtgctttctactgcaacctggattggtggaaagaacgattttctgggccttgcatatctcactgttggtggaatctgcttcgttctggcatttgcattcaccttgctatacttgataaaaccaaggaaaatgggagataacaactacttgtcatggaacagacccactttacgtcgctgatatggttttgaagttaaatgtttacacggacaacaaattcatttatggttcacatgtatc

SEQ ID NO: 2973 - DNA, 418 bp, Zea mays
  Clone ID: LIB3116-001-Q1-K1-A1
cccacgcgtacgaagctcctggcatccatgagaccacctacaactccatcatgaagtgcgaggtcgacatcaggaaggacttgtatggtaacattgtgctcagtggtggcacgaccatgttccctggtattgcggaccgtatgagcaaggagatcactgcccttgcgccgagcagcatgaaaatcaaggtggtggcaccgcctgagaggaaatacagtgtctggataggaggatccatccttgcctccctgagcaccttgcaacagatgtggatctcaaaggctgagtatgacgagtcaggacctgtgattgttcatcggaagtgcttctaagctctgggtcccccttcggctccattatatttattccttgagtgtttatcatataagctactatgtttgggattgcatgcctttga

SEQ ID NO: 2974 - DNA, 439 bp, Zea mays
  Clone ID: LIB3116-001-Q1-K1-A10
accggccgccacaccaccgtaccccgacccctcgacaacaatggccaccgtcctaggcagcgcgggcgcgccggccttcttggtctcgccgtcctccctccgtgccgcgccggcgcccaccgccgtggcgctgcctgcggccaaggtgggcatcatgggccgtagcgccagcagcaggggcaggctgcgcgcgcaggccacctacaacgtgaagctgatcacgccggagggggaggtggagctgcaggtgcccgacgacgtgtacatcctggaccaggccgaggaggacggcatcgacctgccctactcctgccgcgcggggtcctgctcctcctgcgccggcaaggtcgtctccggctccgtggaccagtccgaccagagctacctcgacgacggccagatcgccgccggctgggtgctcacctgccacgcctacccc

SEQ ID NO: 2975 - DNA, 416 bp, Zea mays
  Clone ID: LIB3116-001-Q1-K1-A12
gacgtccgatgagggccgtgtcgcgtcagcttagcgggaagcagacgccatggccatcgacgagggcggcgagaaccagcaggacaagcctgccgactctgccgctgccgctgctacttgacggcgtgcgtctgttgtgaaagtgactgatgggtgttgtcagcgtgctttgatgtgcgtatcttatcggctcctcttgggttcattctcttttctttcaggaatagctggtgagtttttgatgtgaaagctctaaactaaatttctgtacggattcaaggcgttgctcctggaagctggagatacttacgtgtacgtatgaggctgcgcaaccaacccccacgttcgatggcgtacacagtctagcaaccacgatgctctcgcgttggttgctgctgtaatctataaacgcttag

SEQ ID NO: 2976 - DNA, 405 bp, Zea mays
  Clone ID: LIB3116-001-Q1-K1-A2
cccacgcgtccgcccacgcgtccgcccacgcgtccgacttaatttacaactacagtccgacgtttaccgggaaaaaatcgaaatcgtttgaggaggtctacatcttctcctgagactggattgaacgcctgagtgtcttcaggaatctgtagttctgcactacattgctattgtagtgtaaccgtgcattagtattacccgtggtaccagaagttgtatttgtatagattcgttggactgcctgtattgcagtaacctttccaccgtatgggtggctctatagaatgcctataagcagcgcaataataatgataatgtaagactgaaaaaaaatacttgtatggagattttctgaatttaaaagtttctccaaatcaggtgaaggtcgaatgttcctggacctga

SEQ ID NO: 2977 - DNA, 462 bp, Zea mays
  Clone ID: LIB3116-001-Q1-K1-A3
cggacgcgtgggcggacgcgtgggcggacgcgtgggctaccaccgggcgggcacctactgggacttcccgcgaccgcctcccgctcctcctccccgctgccatgtcctccgcttccaacaccgccccccactccgtcgtcgccgaccccactactcttgcccgcaaaatcgcagacatccgtgccgccggacccaccaaactccaggttatcgccgacttcgatggcacgctcacgcggtactggtacgacggcgcccgcgggcagagtagccatggactgcttaggcaagggaacgaggagtacgacgccaagagagaagcgttgtatcagcactaccaccccatcgagatctgccccgacatcccactctcggagaaggccaagctcatggaagaatggtgggagaagactcatggtcttcttattgaaagcggtcttacatacgaagctatcacaaaat

SEQ ID NO: 2978 - DNA, 366 bp, Zea mays
  Clone ID: LIB3116-001-Q1-K1-A8
tgctcgttcgggcgtcagtctgatggatatctgcataattcgccctttctagcggtctcccgggcatgtacgcggtgacaatcattgggttctagggcattttacacagagagagcggaacaacagttctttagagtaattttctgacaatgtcttctcttagtcatttacttgttcttgtgtttctctatgttctgcttttttactcatctgaatctcgcaaaccccaagttctttatgacactggatctagcgattatggtgcaaaaggcacaagatgggctgttctaattgctgcatcaagttattattataactacatgcattatgcttacatatgccatgcatatcatgttcttctaaaag

SEQ ID NO: 2979 - DNA, 74 bp, Zea mays
  Clone ID: LIB3116-001-Q1-K1-A9
ccaccatgagcgtggtgatcctggaccgctccaccgtgcgcggcttactagcggactaagcgggcttctcgcgc

SEQ ID NO: 2980 - DNA, 403 bp, Zea mays
  Clone ID: LIB3116-001-Q1-K1-B1
cgaccgatacgtgcagaaaggcctctttctagatgccgcccgggattatacacatccattgttccactacaaactgggattcatgaatccctacaccagtaatatcgtctgtacgacaacacttgaatcacaatcattgataaacatatcactattagacaattacaaacatgatgaccactttatccagttgctcaacacgcaccttaataacaattaagaccattttctacaactaacactgaattatgtatcaaactacaatggcttacagacagaatccctcttgaacaagctgtcatgtaacgctcagactatcagattctttgacgtcaccaatttaaaccctcatgagctcgattactgtgtccatatcaaatttaaagattttgaccatattttt

SEQ ID NO: 2981 - DNA, 437 bp, Zea mays
  Clone ID: LIB3116-001-Q1-K1-B10
aatcatcatacaatagttacgctttgatgagtaaagtgttccagcttgttcatgtcagacggacatactaaaaaagatcgggaaagtaacgtaatagacctgagcacatgaattttcgcactaatgttacagcgcatcaaatcaaaagaaagaagatcggagcatggcaactgacaaccacaaactatgattttttttcaaagatggaacaccaaacaatgtgattgcatcttgagaaaccatgctgatccgcgcggcaaaaagaaatcctagaaacaagttgaaatcctcatcttttaagtgcgttcatcctgtccctcaggtaatacagcttagctctactgactttcttcctgtccaagaccttgatttctttgatgtttggtgagtaaagtggaaagacagactcgactaccacgccagccactaatctacgc

SEQ ID NO: 2982 - DNA, 349 bp, Zea mays
  Clone ID: LIB3116-001-Q1-K1-C5
cccaaatattggtcactggagttattgatttttatgtctacatttaaatggataatgatgaatcttagatacatatatggtatatatatggaaccacagtgttccaacaacacgtgttgcgctgacaaccaaacggtactgaaaacaccgcttattaaagctcactgttcctgtaatggcctcagcagccctcctgcatactgacgacgaactcaaatgcagcagacgtggctgatccaaccgtgcggcccaagctaagctccgaaggctttcatggggtccttggggtcgatctcgtggaacagcgggaggtccgacgtgagccgctcctggctgaaaccgatgctcg

SEQ ID NO: 2983 - DNA, 437 bp, Zea mays
  Clone ID: LIB3116-002-Q1-K1-D12
gatcgatctaaaccaatccattttatatatacatacgacatgccaacggttaaacaacttggtagaaatgcaagacagccaatacgaaatgctagaaaatcggccgcgcttaagggatgtcctcagcgtcgaggaacatgtgctagggtgtatactatcaaccccaaaaaacccaactctgccttacgtaaagttgccagagtacgattaacctctggatttgaaatcactgcttatatacctggtattggccataatttacaagaacattctgtagtattagtaagaggaggaagggttaaggatttacccggtgtgagatatcgcattattcgaggaaccctagatgctgtcgcagtaaagaatcgtcaacaagggcgttctaaatatggggccaaaaagccaaaaaaataagtgattcgtttttagcccttata

SEQ ID NO: 2984 - DNA, 384 bp, Zea mays
  Clone ID: LIB3116-004-Q1-K1-A12
tagcaacatagaaagcacaatagtgtaccaacaatggcagccaaaatattttgcttccttatgctccttggtctttctgcaagtgttgctaccgcaaccattttcccacaatgctcacaagctcctatagcttcccttcttcccccatacctctcaccagcggtgtcttcagtgtgtgaaaacccaattgttcaaccctacaggatccaacaggcaatcgcaacaggcatcttaccattaatcacccttgttcctccaacaaccgtcagccctattacaagagttacctttggtccatttggtggcacaaaacatcagggcacaacaactacaacaacttgtgctagcaaaccttgctgcatactctcagcaacatcaggttct

SEQ ID NO: 2985 - DNA, 443 bp, Zea mays
  Clone ID: LIB3116-004-Q1-K2-C2
cccacgcgtccgaagcgagaaagagatcgatcgtattcgtatccgcggaacaagcagcgaaggatcggagcctatccaatggccgagggcaagagcagctccggcggcgacctgttctccagcggcaagctggtggcgggggccgccgtgtcggtgttccagcagaagagcgtggagaacgtcgacaagcaggaggtcgccggcgcggcggccgagctcctgcacgcggcgtccgcgtacggtaagctcgacgacaagccggccgggcagtacgtcgagaaggccgaggggtacctgaaggagttcagcgcgggacacgccaccgagcaggagcagcctgcggcggcagcaggcgacgacgcggcgcccaagtcaccggcgccggaggcgcccaaggagccggcggcggtgcctgcgccggccgcggagggaggcagcaagtc

SEQ ID NO: 2986 - DNA, 81 bp, Zea mays
  Clone ID: LIB3116-009-Q1-K1-F10
taagaaagtgcatttctagtttcttatttttgggaagccacaaacatcagcaaaaataagaaagtgcatttctagtttctt

SEQ ID NO: 2987 - DNA, 257 bp, Zea mays
  Clone ID: LIB3116-010-Q1-K1-D3
cccacgcgtccgaaaaaaaaaaaaaaaaattttaaataaaaaaaaaaaaaaaaaaaaaaaaaggaaaaagaaaaaaaaaaaaaaaaaaaaaaaaaaaaaaaaaaaaaaaaaaaaaaaaaaaaaggggggggcgctttaaaggaacaaaatttacatacgcgggctgggaaagaaataatttttttatagggccaccaaaattaaatattttggccggggttttaaaacgttgggaagggaaaaaacctggcgttacc

SEQ ID NO: 2988 - DNA, 447 bp, Zea mays
  Clone ID: LIB3116-010-Q1-K1-E10
cgtaaagttgccagagtacgattaacctctggatttgaaatcactgcttatatacctggtattggccataatttacaagaacattctgtagtattagtaagaggaggaagggttaaggatttacccggtgtgagatatcgcattattcgaggaaccctagatgctgtcgcagtaaagaatcgtcaacaagggcgttctaaatatggggccaaaaagccaaaaaaataagtgattcgtttttagcccttataaaaagaaaacggattcttgaacctctttcacgctcatgtcacgtcgaggtactgcagaaaaaagaaccgcaaaatccgatccaatttttcgtaatcgattagttaacatggtggttaaccgtattatgaaagacggaaaaaaatcattggcttatcaaattctctatcgagccgtgaaaaagattcaacaaatgac

SEQ ID NO: 2989 - DNA, 325 bp, Zea mays
  Clone ID: LIB3116-010-Q1-K1-H1
ggcggcgacgagaagtggcgagccccgagagcgggtttagttagaggctacgggcggtcgggcgcggcggcggcggcggccatgagcagcgggagcgagagcactaccgccagcaggtggctcgagctggccacgctgcgcgcgctggcgcgcgacgccgcggagcagcttcggctgccgcgggccggcacgtcggcgtcggcgtcgtcgtcgtcgccgtggcgcgggcgcgaggaccacctccacggccacggcaagacggccaaggtgatgcacctgctgctctggggacccaagtgaagcggcggcgagaggccaccgtacc

SEQ ID NO: 2990 - DNA, 264 bp, Zea mays
  Clone ID: LIB3116-011-Q1-K1-A12
ccagcccaaattttttttattccgggacatgcacgagggggggttgaataactctgtagaaggttatcaggagataaagctaccctatcaaatcgtcgccattgtttttggcgctcttaaagatgccgctgccaaaaaatatgatttggaagcatgggttcctgcatctcaaacttacacagagctggtgtcttgctcgaattgtacagattatcaatcaaggcgactagaaaatagataccggcagaaaaagaacaatgaaca

SEQ ID NO: 2991 - DNA, 454 bp, Zea mays
  unsure at all n locations
  Clone ID: LIB3116-011-Q1-K1-B10
cggacgcgtgggcgaattcccaggctggcaggtcggcgaggagggcaggaagaccgaagacggagccgtgcgggggctcggggcgggaacgggacaggaccccaaaatctcagatccttcctgcccgcccgcccgtgcccgtcgacgcgtcgttcttgccggccgcgccccacctccgccctctcctcctccagggggatcggatacgccacaggctgcgcgatggtgctgtgggtcttcggctacggctccctcatctggaaccccggcttcgacttcgacgacaaaaaaaatcctcgggttggtcaaggggtagaagcgcacgtttaatctggcttgcattnnccacagaggcacaccggagcatccggcgaggacctgcacgcttgaaaccgacgacgaggccatatgctggggaattgcatattgtgtcaagggtggtccagaaaaagag

SEQ ID NO: 2992 - DNA, 197 bp, Zea mays
  unsure at all n locations
  Clone ID: LIB3116-011-Q1-K1-B9
agaaaggagcanagaacaaacgaggagagaccgcaccacacaccncacgccngaaggccagagcaaaacccncacggccgcgcccaaggacaacgangaacancgaacaaccaaacaaagcaaaggacgaccagcgcacggaaagcaaaacgcacagcacgccgggcgcaccacacacagacacgagcggaccgcgc

SEQ ID NO: 2993 - DNA, 447 bp, Zea mays
  unsure at all n locations
  Clone ID: LIB3116-011-Q1-K1-C10
gcaaagaaccctgcaactgcaacaagccctgacgcttaatacatcggccggcactcgatcggcagcagatcaaagatggcggcggaggagggggagaaggcgaagagcggcggcggcgggcagcagatgacggtggtgcgggggctggacgtggcgcggtacatggggcggtggtacgagatcgcgtcgttcccgtccttcttccagccgcgggacggccgcgacacgcgcgccacctaccggctgctggaggacggcgccacggtgcacgtgctcaacgagacgtgttggggnccagggcatgcgcgactacattgagggcacgtggctcaagggcggccccngcagcgacgaggccaagctcaaggtcaagttctaccttccgcccttccttcccatcgtccccgtcgtcggcgactactgggtgctctacgtcgacgatgacta

SEQ ID NO: 2994 - DNA, 437 bp, Zea mays
  unsure at all n locations
  Clone ID: LIB3116-011-Q1-K1-D11
gcaaaaganaaaagaaaagagcacacccgggactctgttctcgtaaatcaaactcgtaaatggggattattaatatttaccaagctatttggtgtagttaattaagtttcgattaagtgaatttgcttgaattaaaagtaattaggtataaggactaaattgtatatagggtgaaaggtaaattatagattaaagaaaaatttaagggactaaataagcaattatgccattgacattaaatgaagcggcgtaaggatgaaaatatttataaaatttaaaggtaaaatatatattatttttagggttttgtgaggatgtggtagttgtttgantagnttgaatggagtggtgtgggttatancatattatattatattatattatattatattatattatattatattatattatattataatatattatattatatt

SEQ ID NO: 2995 - DNA, 446 bp, Zea mays
  unsure at all n locations
  Clone ID: LIB3116-011-Q1-K1-D12
caagcaagcaagcaagcagcgagtacatacatactaggcagccaggcagccatggcgcccaccgtgatgatggcctcgtcggccaccgccgtcgctccgttccaggggctcaagtccaccgccagcctccccatcgcccgccgctcctccagaagcctcggcaacgtcagcaacggcggaaggatccggtgcatgcaggtgtggccggcctacggcaacaagaagttcgagacgctgtcgtacctgccgccgctgtcgacggacgacctgctgaagcaaggtggactaaaacctnctgcgcaacggctggatactctgcctcgagttcagcaaggtcggcttcgtgtaccgcgagaactccacctccccgtgctactacgacggccgctactggaccatgtggaagctgcccatgttcggctgcaacgacgccacccaggtgtaca

SEQ ID NO: 2996 - DNA, 446 bp, Zea mays
  unsure at all n locations
  Clone ID: LIB3116-011-Q1-K1-F10
tgtagatctcctcgcacctcgcccattcgcttcaccaagggtttaagaccggcggcgatggcggcgaagctggcgcagctgcgcacacaggtaacgcgtgcggcggagttcgcctcgaagcacggctgctcctactacaaggaggtaatggagaagaacaagcagtacgtcgttcagccccccaccgtcgagaagtgccaggagctctccaagcagctcttttacacccgcctcgcaagcctaccaggtcgctatgagtcattctggaaggagcttgattgtgtcaaggccccntgtgtggaatggcactgtggtgtttatggtggtggaccttggttttgtntatttatttggagttgagctctatgcatggttctgcgtaggcgagattgtcggcagaggtttcaccttgaccggctataaggtctagatgatttccactggtc

SEQ ID NO: 2997 - DNA, 241 bp, Zea mays
  Clone ID: LIB3116-011-Q1-K1-F12
gacaagcgctagcgtaaacgcggtttgcacactaaccgcaaccactttcaatagcggggctcttgattgcttgaacatgcagggctgctgtatcagagaatgaacacatacgatcgtgacgaatgaacacattaagctcgcgtaccaaggtggatttcatcaacagagaaagctggataatactagctgacagcgtgatgccctgaacacagtggagactgtgtggccttacgaaattgat

SEQ ID NO: 2998 - DNA, 291 bp, Zea mays
  Clone ID: LIB3116-011-Q1-K1-F9
aaaaaaaaaaaaaaaaagaaagaaagttatagaaaaaagaaaaaaaaaaaaaaaaaagggagtggggaaatggaaaaaaagagagaggggaaaaaaaataaaaaggtgaacaaggaaataaataaatttaaaaaataggggggggcggtctgaaagaataaaaggttactaagccacgaatgcacaataaaaacctcataaaatggtgactgcaaaacaaaaagaagggggggatttgttaaaatgaggagacgggaaaaatctagaggtttcgaaaataattgcttaggg

SEQ ID NO: 2999 - DNA, 116 bp, Zea mays
  Clone ID: LIB3116-011-Q1-K1-G11
cccacgcgtccggtgcttctggtttcgtcctcattcgcctgaaggacaagcctcactggatcatcaagaactcgcggtgcgagaactggtgggtgaacggatactacaagatatgc

SEQ ID NO: 3000 - DNA, 283 bp, Zea mays
  Clone ID: LIB3116-011-Q1-K1-H10
cttcgggctgatagtacactgctcatccttcaacgacaaccaggatccatgcctagctgggtgccggaactgctgctatggttggggcatcctagactgcctgcctgcttgcctggaggcatgctttgccctggttttggttttcgtcgttgtgtttgccatccttggcatcgcctatggcttcctcgctgcaaccatggcggtccagaggatttggcagaagcactatcacatcctgaccaaaagggacttgacaaaggaatacgtggtggaagaccttcac

SEQ ID NO: 3001 - DNA, 239 bp, Zea mays
  Clone ID: LIB3116-011-Q1-K1-H11
atcttcctgaacaatggtcttcatgtggaagtatagtattttgccacgttttgagctgaaaaaaaaaaaaataaaaaaaaaaaaaaaaaaaaataaaaaaaaaaaaaaataaaaaaaaagaaaaaataaataaaataaaaaagagataaaacatatataaatccaaaagtaagaaaaaaaaaaaagtgaaagaattaaaaaataataaaaaaaaaaaaaggggggatgattaataagat

SEQ ID NO: 3002 - DNA, 259 bp, Zea mays
  Clone ID: LIB3116-011-Q1-K1-H9
cccacgcgttcgcccacgcgtccggccgacgccgccacgtccccacgaaaaagaaacaaaaaagaagaagacgacagactgccagaggcatggcggccacgagctccgcctgcgcggcggtagcgctcgcgtccttcccgtgcgccggcttcacctccggcccttcccgcgtctcggccagcagccaccgcggtcagcggcactccagggccgccaccgtcagatgttccagcaacgtcgccaacgtgtcccaaggcgc

SEQ ID NO: 3003 - DNA, 158 bp, Zea mays
  Clone ID: LIB3116-012-Q1-K1-B9
taatttattcacgatcacaatggacttggcaaatattatcccatcagtatttgtcatgagagcctcagtctactctcgtatcatcttaggtttttggatcccttcgttttgaaggaactgaaatttacttaatggagtaggttacttggtttacattc

SEQ ID NO: 3004 - DNA, 262 bp, Zea mays
  Clone ID: LIB3116-012-Q1-K1-C12
aagctggtggaggacaccaccgaccacgtccttccgctttcgaggtcccggaaatgataaaaagggaccggttctcgtggttcagggccaagaatttccgaggcaaaccatcgcggggctcaacccgctgtgcatccagctgctgactgagttccccatcaagagcaagctggacccggaggtgtacgggccagcggagtccgccatcaccaaagagatcctggagaagcagatgaacggcgcgctgaccgtggagcaagcg

SEQ ID NO: 3005 - DNA, 358 bp, Zea mays
  Clone ID: LIB3116-012-Q1-K1-D6
gccgcgagcggggacgagctcatcgccgacttgaaagccaagtgggacgccgtcgagaacaagagcactgtcctcacctacgccggcggcgctgtcgtcgctctctggctgacgttcgtcatcgtcggcgccatcaactccgtgcctctgctccccaagatcatggagcttgtcggcctcggctacaccggatggttcgtctaccgctaccttcttttcaaggaaagcaggaaagagctcgccgacgacattgagtcgctcaagaaaataatttgctgggacagagttaaacatgttgttctcgggaaactttttttgggcgatttcttttgggaacacgttggctcttggtttagac

SEQ ID NO: 3006 - DNA, 398 bp, Zea mays
  Clone ID: LIB3116-012-Q1-K1-E2
tacggtttggttgatctcaaggttaaaggagatggcaactgccagtttcgagcgctgtcagagcaattttaccgaactcctgaacatcacagatttgtccggcagcaagtggtgaagcagcttgaatcgcatcctgagatttatgcaggatatgtccctatggactacagggaatatctcaaaaagatgtcaaagagtggagaatggggtgaccacgttacattgcaggctgctgcagactcgtacggtgtaaagatcttcatcctgacatcattcagagatacatgttatattgagattcttcctgttgttgagaaatccagaagagttatatgcttgagtttttgggctgaggtgcactacaactccatatatcctgaaggagagttgccgttttg

SEQ ID NO: 3007 - DNA, 99 bp, Zea mays
  Clone ID: LIB3116-012-Q1-K1-H8
gacggttagtctctcatgatgcatcgtattttgctgttcactcccatacaaaaataactagggctattctaggaggctagggggtcataacttacaaaa

SEQ ID NO: 3008 - DNA, 354 bp, Zea mays
  Clone ID: LIB3116-013-Q1-K1-C12
tattttcagcattcaaaaacacaccaagcgaagcgcactagcaacgacctaacaccaatggctaccaagatattagccctccttgcgcttcttgcccttttagtgagcgcaacaaatgcgttcattattccacagtgctcacttgctcctagtgccattattccacagttcctcccaccagttacttcaatgggcttcgaacatccagccgtgcaagcctacaggctacaactagcgcttgcggcgagcgccttacaacaaccaattgcccaattgcaacaacaatccttggcacatctaaccctacaaaccattgcaacgcaacaacaacaacaacagtttctgccatcactg

SEQ ID NO: 3009 - DNA, 394 bp, Zea mays
  Clone ID: LIB3116-013-Q1-K1-D12
tatagatgcctagcaaggggagcaagagctgttctacagttttatgctgataatgtgaagcagagtgaaatgattgtgacttttgccatgcgtgctggttttgctggcggagtggttgttgactggcctcatagttcaaaagcgaagaagtcctaccttgtcctcacttgtggaccaccttcagttactacatcacttccaaaaggtaaaggtgaaaatggtgaggcgtgcagcgatgatgacgataatgagagcagtggcgaagatggcgacagaacagtgggcatatatgaaaggaataggccgaagaagcggcagaagacgaaaaagaacggcaaaggcaaggactggctcctgagaaaaaaggagcagatgagaagaagaggacatgatg

SEQ ID NO: 3010 - DNA, 382 bp, Zea mays
  Clone ID: LIB3116-014-Q1-K1-E3
cccacgcgtccgaagcaatcgcagcaagcaacatacctttatcacccttgtttcaacaatcgccagccctatctttggtgcagtcattggtacaaaccatcagggcacagcagctgcagcaactcgtgctacctgtgatcaaccaagtagctctggcaaacctttctccctactctcagcaacaacaatttcttccattcaaccaactgtctacattgaaccgtgctgcttatttgcagcaacaactattaccattcagccagctagctactgcctactctcaagaacaacaacttctttcatttaaccaattggccgcactgaaccccgctgcttatttgcagcagcaaatactactaccatttagccagctagctgcagc

SEQ ID NO: 3011 - DNA, 449 bp, Zea mays
  Clone ID: LIB3116-015-P1-K1-A1
aggtcgtgctcatgggtgccgtcgagggctaccgcattgccggcgggccgctcggcgaggtcgtcgacccgctgtaccctggcggcagcttcgaccccctcggcctggccgacgaccccgaggccttcgccgagctcaaggtgaaggagctcaagaacggccgcctcgccatgttttccatgttcggcttcttcgtccaggccatcgtcaccggcaagggcccgctcgagaacctcgctgaccacatcgctgacccagtcaacaacaacgcatgggcctacgccaccaacttcgtccccggcaactaagctcaacggctatgctatgcaacttcattgtctttcggatcggagagggtgtacgtacgtggattgattgatgctgcgagatgcatgtgtgtcttttgtttcacgttgcattgcataggcaagtcgagatgatgagttggc

SEQ ID NO: 3012 - DNA, 445 bp, Zea mays
  Clone ID: LIB3116-015-P1-K1-A12
cccacgcgtccgtcaccttactattctacattagaaaatctatactgagtgtgaaaggaagcatataccctgttggacgttgttttcacaagttctttgttgaccttggtggatttttctcagtttgtgaatgagatgaaaataatgaccttggagccccgtcaaccatggtctacaatcgccttgtaaattgtataatagctaaagcctacatcaaagtatttataccctttacatttgcgtctggagaatttactctcttctgttttccattaatccactgtccacttactcatgagttctctgagatattgaatggaacgtaaacaatttttgtggagccttgatggatgtggattacagtttactgtatggtttgtgattaacaaattcctgctgttactcttgtctgcagatattctgtatgactcgtggtcaccagcga

SEQ ID NO: 3013 - DNA, 389 bp, Zea mays
  unsure at all n locations
  Clone ID: LIB3116-015-P1-K1-A3
ccgcacgtaccgatccgcaattcgagccacgacgtcacgctagaactagtncggacggcgtcgcggggtcacactatgcaataatgcctaataacggcgtccgcgccgtggcgacgcccgtcgcgcgagaagagccgctcctaccgcgggaagacgacgcagcaccgccgaaggccgccggtggcgatgggcagccgctcgacgcgggcgcccgtgacgccggcagcttcccgtggctgccagccgcgggcgtcgtgtacctcacgctcagctccgcgatggccctgcaccgctgctggcccgaccccggcgacgtcgcgttcgtcgtgtcggcgtacgtcgacctcgtcctgctcttctgctgcctccggaggtacgagcgcgcggag

SEQ ID NO: 3014 - DNA, 435 bp, Zea mays
  Clone ID: LIB3116-015-P1-K1-A4
ccctagctagcttattattgcttaccaggcttactgtggtccatggcacctcctcgcagccctgttccagtcgctgctgtacgaggcggcggggcggaccatcaacccggtgcacggcgcggtggggctgctgggcacggggaactggcacctctgccaggccgccgtcgacaccgtgctgcggggcggcgccatcggcccgctgccggagcttggcgccgggacgggccacctgtacgggccccccgccgccaccgacaagcgcgccggcggctggtccaccttctccacggcgaagcgggcggcgaaggccgccgccggtgccggggcgccgcccgcggcggaggcggcggcgtactgcgacctaaggctgtgcctcagcagcagccccgggtcccccgcggcgaccgcggaccggtagagggccccccttct

SEQ ID NO: 3015 - DNA, 383 bp, Zea mays
  Clone ID: LIB3116-015-P1-K1-A5
cggacgcgtgggcggacgcgtgggacgttgctgacataagagacgcggatcgtctagcacctgctgtacaaggtgtggatgcgctcataatcctcaccagtgctgccccgaaaatgaaaccgggtttcgaccctagcaaaggtggacggcccgagttctactacgaagacggaatgtaccctgaacaggtggattgggttggccaaaagaatcagatcgatgctgctaaagctgctggagtgaagcatattgtgctggtggtatctatgggaggaacaaatcctaaccatccgctgaacagcatgggtaatggcaatatactggtatggaagcgcaaagcagaacagtatttggcagacagtggaatcccttatacaatcata

SEQ ID NO: 3016 - DNA, 486 bp, Zea mays
  unsure at all n locations
  Clone ID: LIB3116-015-P1-K1-A6
cggaatnntcccgggtcgagcgccacgcgnntccgctccgattcccaaccagggcaaggcaggtactcatgtgtggctgttcataggcgaggcagcggggcccatgagaggcgtcnagcaggnccaaccgttcgtcactccctcgcagncttctttaacctggggcgaaaagcgcgagagaaanccgagaccgccgccgccgcagcttggcagttctcctaaccacgagcgtcgagccaccgttccccatgtcgctcgtggcaaaaacacacctcagagaccgtgagctcaggtgctgctacaaggccaccgtggacggcttcagtgctacggacttccaccggcggtgcgacttcaagggcccctgcgtcgtcgttggctacaccgacggtggcttccgtttcggcgggttcagcccggaggggtaccgaagcacggacgactactacgacacgctggacgcgttcctcttctactgggcggaat

SEQ ID NO: 3017 - DNA, 383 bp, Zea mays
  unsure at all n locations
  Clone ID: LIB3116-015-P1-K1-A7
cggacgcgtgggtgctctgctcctctctcttctccatttgctgccgcanctctccgagctcgccgccgccgcctcagggcaggctcatcacagcacagattcggagagcctgcccttagcacgcagcgccagtgaagaaggccgagataatggaggtggagacgatgctggacgacgacgtgttcttcgccgagctcagcaagcggatatcgctggtcatcaccgacaaccacgagggcccggactttttcgccgtgcaaatcattcccggcgccgccgccgccgtcgtgccccttcaggggttcgcgtcgcgcgcccatgtgccgtcgcaagcgttgctgcttgcgccaccggccttaccgctgtaccaccactaccaccac

SEQ ID NO: 3018 - DNA, 385 bp, Zea mays
  Clone ID: LIB3116-015-P1-K1-A9
cccacgcgtccgggcgcgccggacgccggcgcggatgctgcaggaggcacggtgctggaccagaaggtgtgggtcgcggcggtcgaggacgtcgagaagccgccccccgccgcgtgagccgcgcggcgctgctaggccagcccacactgctgctcgctcataaaaagggcggcgggagagcctggcagtggcaggcaccctgctcgtgctcggctgggctgggctccctgcttatatcactacaatattatactactagtagtggtgcttgatagcagtgtgtggctgtgctaataccagtataatactggttctactataatacagtcgtatcaggcatggcgtgcatcaagactggttgtgatagtagcaacgtgatgctcgt

SEQ ID NO: 3019 - DNA, 442 bp, Zea mays
  Clone ID: LIB3116-015-P1-K1-B6
caacttcgacgccttccacggcgacaaggaccacggtggcgtgcacgacggcaccggcgtcgtgctctgggagtggtgcaagggcgagaaccatagctggaagatcctgccgtggggtcccgaggccaactccgccgcggcccacgcgggaggcccgcacgccgtgcgcgtcttctgcaaggccggcggcgaggactacagcctcacggtgcgcaacggcacggcgtgcctggcgcccaccaacccgcgggacgagtaccagcactgggtcaaggacatgcgccacagcacccgggtgcgggacgaggagggctacccggccttcgcgctcgtcaacaaggtcaccggcgaggcgctcaagcactccacggggcagggccaccccgtcaagctcgtgccctacaacccggactaccaggacgagttcgtgctctggaccgag

SEQ ID NO: 3020 - DNA, 405 bp, Zea mays
  unsure at all n locations
  Clone ID: LIB3116-015-P1-K1-B7
cactgattcaaaatgcaagtttaaagccattacacaccgctgtggaatcaacccagagcagtggaccattgtttggtgggcggggaatgtttcttttatgtggagtactttttgtatcaagatggaggaagcacaagacgaaagtcatatacgacttaaagaaaggccggtacattataacacacatcagctgatgcttaaccttgtgcagaagaactatatttatactacaggaatagatgttgtgttgtacaacaatgtaccagttcaattatttgtgtttttattttatgtagcatagctgggtgggtagagcattgaattttncacaaatgcgtttagaataatgtgtaaacaagtttcccttggtttaattgaaattatttttgtcgaaaaattataccc

SEQ ID NO: 3021 - DNA, 410 bp, Zea mays
  Clone ID: LIB3116-015-P1-K1-B8
aactattcttggtactagactggatagctttgagtcattgtttggcagaattcctgcaaaggcaatcactgacaaggggatggataaacgccaagacatgctttccagtttgaagtctaaagccaagcagatggcgacaagtttcaacatgtcaaacttcgctaacagggaggatctgcttggtcaaagtaaaatgccagatgacatgagcagagttgctgggttagataaccaaggaattgttggccttcagaggcaaattatgaaagagcaagatgagggtctcgagaagctggaagagacagtgctgagcacgaagcatattgcattagcagtcaatgaagaacttaccctgcacacaagattgatagatgacctttgaaatcatgtgatgttacaaaatcacgtct

SEQ ID NO: 3022 - DNA, 404 bp, Zea mays
  unsure at all n locations
  Clone ID: LIB3116-015-P1-K1-C3
cggacgcgtgggcgagcggatcgagatggcggcgtctgatgttgagtaccgctgcttcgtcggcgggctcncctgggccacggacgagcactccctccacaacgccttcagcacctacggcgaggtcctcgagtccaagatcatcctcgatcgggagacgcagaggtcccgcggcttcggcttcgtcaccttctccacggaggaggcgatgcggaacgccatcgagggcatgaacggcaaggagctggacggccgcaacatcaccgtcaacgaggcccagtcccgcggcggccgtggaggcggcggcggtgggtaccggggtggccgtggaggcggcggctacggcggtggcgggcgccgtgatggcggcggcggctaccgtggtggcggcggctaccgtggcg

SEQ ID NO: 3023 - DNA, 193 bp, Zea mays
  Clone ID: LIB3116-015-P1-K1-C8
agggtcagttgcaaacagccaaatactccatatcatcgatcgagccaccgactacgaagtggatgatgaaaatacttgcatggctgctattgcatagcttgacaaattgttagacacggcatagtacatcacagtgcgtcaggctgctcaacgctagcctcatttctacaacctttaatagctgcatcctact

SEQ ID NO: 3024 - DNA, 51 bp, Zea mays
  Clone ID: LIB3116-015-P1-K1-C9
cccacgcgtccggtgttggcttcttttccctttccggttcgggttcagatt

SEQ ID NO: 3025 - DNA, 384 bp, Zea mays
  unsure at all n locations
  Clone ID: LIB3116-015-P1-K1-D2
ccagtgagtgatctgcaaatgaagattgggtttggttttggggtcgtctgccaggtcncgagcttggactgccacatcctggtgcggaacctcangagcccaagcggcagcggcgggtaccagatcccccgcggtttcttgttcaacatcgtgacctgcgccaattacaccaccgagatctaccagtgggtcggcttcaacatcgccacacagaccgtggcaggttacgtcttccttgtcgtggcggcgggcatcatgaccaactgggcgctcggcaagcacagccgtctgaagaagctgtttgacggcaaggatgggaggcccaagtaccctcgccggtgggtgatttctcctccgttcctgtgaaaaggcggtggtggtggc

SEQ ID NO: 3026 - DNA, 323 bp, Zea mays
  unsure at all n locations
  Clone ID: LIB3116-015-P1-K1-D3
cgctcgtccgcgttcagctcagctactccaatttcgcaacaagttgcaagcaataaccgaccaanggcgacgaacgggtcgatggccacgctctcctccttgcagccgcctgagtagcggcaccggcgccgcggccatccaccggcagccggcccgtgctggagccgtcctcgtcgtcacctgcaagcggagctccttcgcgaccgtccgcgccgcaaccgctgtcacggcggcggcgccggctgccgtagagctgcaaaacaagggggtgtcgctgccgacgtgggcggagttcgagctcgggcgggcgccggtctactgga

SEQ ID NO: 3027 - DNA, 447 bp, Zea mays
  Clone ID: LIB3116-015-P1-K1-E10
gcaagctcgatctactactactactagctggtacacatactagccagcctgccagcgcagcgggccatggcgcccaccgggatgatggcctcgtcggcaaccgccgtcgccccgttccagggtctcaagtccgccgccagcctccccgtcgcccgccgcagcaccaggagcctcggcaacgtcagcaacggcggaaggatccggtgcatgcaggtgtggccggcctacggcaacaagaagttcgagacgctgtcgtacctgccgccgctgtcgacggacgacctgctgaagcaggtggactacctgctgcgcaacggctggataccctgcctcgagttcagcaagctcgggttcgtgtaccgcgagaactccacctccccgtgctactacgacggccgctactggaccatgtggaagcttgccatgttcggctgcaccgacgccacg

SEQ ID NO: 3028 - DNA, 215 bp, Zea mays
  unsure at all n locations
  Clone ID: LIB3116-015-P1-K1-E2
cccacgcgtacacccacacattctaaccctacaccattctctttattttctttcaccccaccaccacncctgcgttgtgtcttttaaacccgtgtgtcgcggcacataccaatccatctcctccctnctctacccctcttactccccctaccatcttatcatcattatcaaatacattattctctctcttcactcacttcacatatcctcttcca

SEQ ID NO: 3029 - DNA, 122 bp, Zea mays
  Clone ID: LIB3116-015-P1-K1-E3
aattcccggtcggccacgcgtccggaaaataatgttttgctctcgtggatctgcacgtgacgaggagagttcagttgtcgtgagcgatgtgcgttgggaatattgggatgtggtccttttct

SEQ ID NO: 3030 - DNA, 310 bp, Zea mays
  unsure at all n locations
  Clone ID: LIB3116-015-P1-K1-E5
cggacgcgtggggcgtttgttggtgcgctgctccgaaggatcgttaaagatccatcctcggtacaagacgagaagaagcttggagaggctattaaattcgctaatgcgtgtggagcaatcaccgccacgaagaagggtgcgatcccgtctttgcccactgaaactgaggtcttgcagctaatagagaaggcatagatagatcactgtaattgctttggttttcactagcttccacttctgcaaattgcanaatgtattgaattctgatctggaacagaagaagtgggtgctccatcttacctgccatttt

SEQ ID NO: 3031 - DNA, 57 bp, Zea mays
  Clone ID: LIB3116-015-P1-K1-E7
aaaaaaaaagggggggggaaaaaaaaaaaggtgtagggaaaaaaaaaatatatttat

SEQ ID NO: 3032 - DNA, 450 bp, Zea mays
  unsure at all n locations
  Clone ID: LIB3116-015-P1-K1-E8
cggacgcgtgggtccgctcacctagaacctactagaaggcgaaccaacccgcacaggcacgtctcttcccatccgtgcgaacggcgcagatcagagagaccgaggcgcccgcggttctgctttccttccttgccccgttcacgagagaattttctggagtcttcgactcgagcagggttccgatggcgctgcaatggatgatcctggcgtgcgtggtggcggtggaagctgcggtggctgcgctggtcacgctcccggtgccccgcgctgtgcggggccagatcgtcgcgctcacgtccttgttcctgcagcccctgtccagggtgataccccttgccgccttccagattctngatctttactggaagaaggagcacagactgatgtgcacctcggagatttgcaccggcgaagagcgcatttggttcgagaaatctatgtttaaagctc

SEQ ID NO: 3033 - DNA, 352 bp, Zea mays
  unsure at all n locations
  Clone ID: LIB3116-015-P1-K1-E9
gaaaatatctgcatgagtgcattggttcattcatgatttctctagcacaangccatgtaaggattttgttttgaagagccagggtcctttttaaaaaacgggctggtctgaacattcaggcttatttctctagcataatactcataaagagtcctgtacttttaggtcttgttcggttattcctataatacatggattgatggaattaaaaaaaatttataagaactcttacttgcttacgaattcaacacatctaatcccactcaatccatatggattgagagctaatctaacaagtcttacatgggtgactatgcactcttaatatcgaatgtatggtattacatttcta

SEQ ID NO: 3034 - DNA, 391 bp, Zea mays
  Clone ID: LIB3116-015-P1-K1-F10
cggacgcgtgggggaagagaagcaggtagtgtacgacggagggagacagccagacaggacaggagcctaccagaccagaagggcatgccgggcgccccatgcaacgtcgagccgacgggccgccggttgcgctggagcgggctcggacgccggcgccgccgtaggctcccggtcgcccggctcggcggcgagagggccgggcgctgtcggtgagttctgtggcggctccggctgtgctggcttacggcaaggtggctactgcgcgcggatcgcatgctggtggcgatctacatggttgttttcgtgggctcctctgttttcatctgtgcgtcttttttcacctgtttgccgtggtttggtctgtagtcctgtttcgcaattcttttttttt

SEQ ID NO: 3035 - DNA, 455 bp, Zea mays
  Clone ID: LIB3116-015-P1-K1-F11
cggacgcgtgggcggacgcgtgggcggacgcgtgggcttttatatcttcacctttttacatgttggtttgtctgtcttccttgctatctgcaccaattatgtatatatcaaacaacaaactaaaagataggttaagtaaaagtttgatgcaatgccacttgcatagtaagtaaatcacttacctgtttaaatctttcaggtggttaacaaggttcaaatatgtttaaatctaatccctggtggattatccttattccttacatgtttcacattgaaatattgtgcagatgtttctttttggctaagtcatatagttcagcaggcaaaagagctgaagcatatgcattattctgccatgcccatactctcactggttctgcactgcaacagcattcaaacagtcatgacaaggctttaatacaagatctggagtttctatctaacaactgtagatc

SEQ ID NO: 3036 - DNA, 443 bp, Zea mays
  Clone ID: LIB3116-015-P1-K1-F2
cccacgcgtccgatgacgaggacgacgaggatagcatgcaggggatgggggacttcattggtgagatgacccagatgatgagccaggtgcggccgatgaggcaggaaagctttgaggagctgcagcagctttttgtcgacatgttccagtctgatattgattcaggattctgcaatgggactgctaagggccatcaggttcaggggcaagccaaaagtagaacatgctcaccacggtcccctcctactactatagtaaaggaggcagaggtgtcatcatgtaatggcttcaataagcggggttcatcagcaatggactcaggaaagcctccaaggcctgttgaatgtggtgcaggtcagagccaggctggattttgttttgggcttgcttctgacgaacggtcatgcaattgaccaaacatgtaccataagccaatgtgatgt

SEQ ID NO: 3037 - DNA, 451 bp, Zea mays
  Clone ID: LIB3116-015-P1-K1-F4
gattaatattcctctgagctttgtagcttctgttggcactagagtacatggactagcttgtgggtttgatgtattgtttaatgggagcactgtgcaaaggtggcttaccactgctccaggatcccctacaactcactggtaccaactacgatgtgtgctttcacagccattgtatgtcatggccggccaagaaataactggccatcttcgtctcgtagcccatagtgctcaaagctacacaatatacttgacaatgtcagctaaaatgtggggtgtgggtgcggagcaaggcggtatcctacagacatctactgggaaacttgaactgaaggagccatactacaggttgtctcagccacaatcctgcacgttgccacaagatcagcaacagcagcaattgccatctttgcaggcacaggtaagatgtacctttttttgtagcagtagttat

SEQ ID NO: 3038 - DNA, 370 bp, Zea mays
  Clone ID: LIB3116-015-P1-K1-F7
cagcactctaactcaggggacacgatcgccatggccgccacatcgaccgccgccggcgtgctgtccccgccgtgcgtggccgggctccgcctggcgccgtctcccggccgggcgcgcgtgtcgttccgcgcggcgccggcgccggcgcggcggtccgtggcggcgcgcgcggagctgagctcggcgctggtgatcagcctgagcacgggcgtgtcgctcttcctgggccgcttcgtcttcttcaacttccagcgggagaacgtggcgaagcaggtgcccgcgcaaaacggcaagacgcacttcgacgccggcgacgagcgcgccaaggaagttcgggtcctgcttaagttcaacgaccccgggggcttta

SEQ ID NO: 3039 - DNA, 376 bp, Zea mays
  unsure at all n locations
  Clone ID: LIB3116-015-P1-K1-G10
cccacgcgtccgcggacgcgtggggtgtttttttgcatgagaagaagaattcgcaggtgtggcaggtcatttattccagtgcgcattggcttcnaacatgggctattttacagaaggcggagttgcgacctatggttgtggaggctacgcagtacttggtgcaggtggccatggactatttttcccgggctcatgggtggcggtctagtctgcggattgattaccattagagtgtgtggattatcatctttattttgtctttaagctgtgtgcttcttaagcagaggctggaagaaatttcaagaattgtatcccctcgatgtaatgtgcttgaaattattaataaaatctttctttatcataaaataaatttatt

SEQ ID NO: 3040 - DNA, 410 bp, Zea mays
  Clone ID: LIB3116-015-P1-K1-G11
agcggcccatggcctccatggcgtttgccctttcgggggccttcaagggcctctgggtggcgcccaccaccaccacgggttgcttcccgctctgcgaccgcgcctcgctctccgtcggcggcgcagcgggcgtgccggcggtgccggtgccggcgcggcggctcaccatccagatggcgcacaagaagggtgccgggagcaccaagaacggccgctgactccaatggacagcgcctcggggccaagatatactgcgaccagcttgccaagcccggggccatcatcattcgtcagcgcagctccagtgtctttcctggaaataactttgtgatgtgcaaggttctcacattcttttctttgatatatggactccttaaggtttgaataatttttggctctgttaagaaaaa

SEQ ID NO: 3041 - DNA, 366 bp, Zea mays
  Clone ID: LIB3116-015-P1-K1-G12
gtgctctgggagatgatcaccggagaggaggcctactccgcctactctccggtgcaagcggccgtcggaatcgcagcctgcgggctgaggccggagatccccagagagtgtcctccttttctgaggtcactgatgaacaggtgctgggacaattcccctctgaagcgccctcagttctctgagatcatatccatcctacaaaggcagcagaacgttagatagtgttcttttcttttctttttttctcttccccccttccttctatattattatatatgctatatatcagtttggcttggctgtttgcatgcctaatcatgcaggaaactgcatctgagaaaaaatataatataattatatatgtgc

SEQ ID NO: 3042 - DNA, 444 bp, Zea mays
  unsure at all n locations
  Clone ID: LIB3116-015-P1-K1-G2
gatggccatgcgaagaactccagggcagcagctcctgctgccaaagagtacgacgacnacgatgacgaggaggacgaggaacacacggaaaccttttgtggaagctgcggcggcctctacaacgcgaacgagttctggatcggctgcgacatctgcgagcggtggttccacgggaagtgcgtgcggatcacccctgccaaagcggaccacataaagcactacaagtgcccggactgcagctcgaagaaaataaggcagtaggtcccagtgtgcaccgccggccatcgctgacctgtctgatcccaaaccatactccattgcttgcctgccttgccccaaggtcgcagctagcagatgcgaattccttcatttgtgggggggtgttgtgtgatggatagcctggtaggaagaggcaaagactgataataatgactcgttatttgt

SEQ ID NO: 3043 - DNA, 226 bp, Zea mays
  Clone ID: LIB3116-015-P1-K1-H1
catggatgggggctcttcgccgcagggaatattcaggagggtcaaatggttattgagtaccgtggcgaacaagttagacggtgtgttgctgacttgagggaagcacagtaccatagagaaaaaaaggattgctatttgttcaagataagcgaagatgttgtcatcgatgctaccgacaaaggaaacatagcgcgcctaattaatcactcgtgtatgtcgaaccgct

SEQ ID NO: 3044 - DNA, 350 bp, Zea mays
  Clone ID: LIB3116-015-P1-K1-H4
gggaacggacaagacactgtttcaccttccaatgtcatttgtactgagagggtggaatcttgggctgcgtgagtcatgcacgaagaaatggttttgttgtatgacatccatccctactcaatcctgaggaagacaactgcatgcgctttggaaatactgtccctttaattttctatacatactatccataagacaatgtaggtgtacccaggcctttccggtctccaggatgggctatctcgtaaaactcttgcgtgcgttgttgtatggtgtgagagaattctcattgcgaacttctggttgtaattcttatataaaaatataaaatatgttgtttctctttataggat

SEQ ID NO: 3045 - DNA, 226 bp, Zea mays
  Clone ID: LIB3116-015-P1-K1-H7
cccacgcgtccgcccacgcgtccgcttacgttttcgcggacgcgtgggcgcgctaggtgaggactgtacagcggcacagaggtgcgacgtacgacgactactactcatgcgccacacatggcatcccagctctccgccgccgtgccccggttccacggccttcggggctactccgcgcccaggtccgcggtggcagtgctgtcttccgtgaggttgggcaggaaga

SEQ ID NO: 3046 - DNA, 453 bp, Zea mays
  Clone ID: LIB3116-015-P1-K1-H9
aagagaccttacagaaaagtggtccaagcctttgttgatgctttagaagcacgcaagataaccgttagcgttcgacggacccgtgggcttgacgctaacgcagcctgtgggcagctgaggaatgagtttcagaagaatccactacttgagattgaaccgtcaccctccacagagcggaccctcgtagctgcttaattgaaacacctatcaggttgatgcagcatgttcaagcatacggaatcgtcatttaatttatggggacattaggtgttgtaaagtgacagcaagttatgcataacgctagagaattttggaacgttctgtccgtgcccatctgatgtcatgagtggcaattacggaattaccacacttgtctcagatattataaacccatctttgttacagaaagtcaccagaaatgaactcctactgtccatgatctgttgcattcac

SEQ ID NO: 3047 - DNA, 415 bp, Zea mays
  Clone ID: LIB3116-016-P1-K1-A1
caccttaaggatgtatactgaagatgtgaggtctggaagcatcaaatttcactattgcacgataaacaaaaggttaggagccagcccttcagatcttcggagtttcgatattgataaccatatagccgtgtgaggttgaaaggttctaaaccttttgcgattgaggagaatggttttggcatacaacaggcgcgcgcacacacaccattggagccttgtttggcgcctccctgcacattggaacagatttaaagtaggtgctggaacatattgatagccattttaggagattatgcgtttcgatttcatgggagttgggaggacagaattgtatcatagtgcagtaacctctggttgtaggattgagttatcctgcatgccatggttgtggcgcttcgtcagcgaccgaatgctg

SEQ ID NO: 3048 - DNA, 56 bp, Zea mays
  Clone ID: LIB3116-016-P1-K1-A11
acccacctctctctaatatccaaacttacttctttttcattctacgtcattctttc

SEQ ID NO: 3049 - DNA, 227 bp, Zea mays
  Clone ID: LIB3116-016-P1-K1-A4
agtagcctgcagctctcccaccttctcgctgcgctgtactgtgctggcaggggaggggccatggacgaccccgtcgagcgcttgaaggacgggttccacaagttcaagaccgaggtctatgacaagaagccggagctgttcgagcctctcaaggccggccaggcccccaagtacatggtgttcggctgcttcgacttccgcgtgttgccgtcggtgacacttgggac

SEQ ID NO: 3050 - DNA, 368 bp, Zea mays
  Clone ID: LIB3116-016-P1-K1-A5
gcagatcgatcggtcgaggcgggtaggacaggatccagaggtagctagccatggcggaggaagcgtctgcgcctgcggcggggacggaagcgccgccggggaagatgacgatggtggtaggggtcgacgagagcgagcacagcttctacgcgctgcagtgggcactgcagcacttcttcccgccgggccagccgcagcagtaccgcctcgtcgtcgtcaccggcaagcccaccgccgtctccgccgtcggcctcgccggcccaagcgccgcggatgtgctgccgtacgtggaggcggatctcaagcgctccgccctgcgcgtcgtcgaaaaagccaaaagcctctgcacacaagcgagcgacgctgtg

SEQ ID NO: 3051 - DNA, 441 bp, Zea mays
  Clone ID: LIB3116-016-P1-K1-A6
cacccagcagttcgtaaccacctgctaaatcatcaaaaagatgcccccctgcaaagtagcagcagccttactcctgttgatcatcacaacaatttctgtcaacaccgtaactgggtcgcgatgtaacgctcaggagaagaaccagattgtgagcttgtgccaaatgtacatccagagaggaaccctcgttcagctcccatcccaaactgggccatgctgtgcggcagtgagagagctggagagggtacacaggggtatgcagatgaagtgcatcgccgatctactgaacgctggagatctacagaaatacgatccaacttagatcaagcatcttgacattttctgctacacttagcatcgttagtttcattcctttcctcccatgcatcgttggaaggtcatgctgtgaaaggcgcgatggcgtggaatggatgctggtag

SEQ ID NO: 3052 - DNA, 377 bp, Zea mays
  Clone ID: LIB3116-016-P1-K1-A7
ggccgtccccgtcccgagtcaccaactcaccaccgaccctagcaaaaccgcacgcaccctgccagcggccccccaactcccaacccaacccctactccagctagctcgcggcggcggccagcggccatggcgttccggctgagcaacaacctgatcggggtcctcaacttcgtcaccttcctgctctccgtcccgatcctgggcgcgggcatctggctgggccaccgcgccgacggcaccgagtgcgagcgctacctcttggcgcccgtcatcgcgctgggggcctttctcctcgccgtctccctggcgggcctcgttggggcctgctgccgcgtcacctggctgctctgggcctacctcctcgccatgttcggcct

SEQ ID NO: 3053 - DNA, 439 bp, Zea mays
  Clone ID: LIB3116-016-P1-K1-A8
cccacgcgtccgggtggtgacccagaagatcccgctggcggaggccctgacggggtacaccgcgcacgtgacgacgctggacgggcgcagcctgacggtgcccatcagctccgtgatccacccgggctacgaggaggtggtgcgaggggagggcatgccgatacccaaggacccgtccaggaagggcaacctccggatcaagttcgacatcaagttcccggcgaggctcacggcggaccagaagtccggcgtcaagaggctgctcgggcagtagagcgcgcttgtgttgtttcgtattgtgtatcagacattttcgtgttggttcatcttgaactggggtggagggagctgccatttgcagcctccgcaacgacgacgatgacgaggccaccaagtgttgagtacagaacagctactattgtacggtgtatggtttgag

SEQ ID NO: 3054 - DNA, 436 bp, Zea mays
  Clone ID: LIB3116-016-P1-K1-A9
ggtaaggaagaggaggagggcaggatgtctcaccgtaagttcgagcacccgaggcacgggtccctcggcttccttcccaggaagcgctcctcccgccaccgcggcaaggtgaagtcattccccagggatgaccccaagaagccttgccatctcactgccttccttggctacaaggctggcatgactcacattgtccgtgaggttgagaagccaggatccaaactccataagaaggaaacttgtgaggctgttaccatcattgaaacccctcctcttgtcattgttgggctcgtggcatatgtgaagactactcgtgggctgcgcacactcaactttgtttgggcccaacatcttaacgaaaaagtgaggagaaagttttacaagaactggtgcaagagcaagaaaaaagctttcacaaaatatgccctcaaatatg

SEQ ID NO: 3055 - DNA, 325 bp, Zea mays
  Clone ID: LIB3116-016-P1-K1-B11
cccacgcgtccggtgtcatcttatctcttcctcctaccttcactctcaaaatcttcagggagtcgtagaggagcagcaggtgcaccaaaaggatggcagcgccaggctccctgcgacttctccaggccccgtccttcgctgcggccaagtgccagccggtgggtggccgggcatccgcgcggcgagcgccacggccactgttcgccgtgcgcgcctcggctgctgacgccgccaacagggatgccgtgctcaaggccttccgcgagaacagggctctcaagataatttccggtcttcagaactttgacaggagcagtggtgcatc

SEQ ID NO: 3056 - DNA, 292 bp, Zea mays
  Clone ID: LIB3116-016-P1-K1-B12
tccacgcgtccggtgtcatcttatctttgctactctacctgcactctcaaaatcttcagggggtcttataggagcagcaggggcaccaaaaggatggcagcgccaggctccctgcgacttctccaggccccgtccttcgctgcggccaagtgccagccggtgggtggccgggcatccgcgcggtgagcgccacggccactgtttcgccgttctcgcctcggctgctgacgccgccaacaaggatgccgtgctcaatgtctttctcgagaacatggctctcaatataattttt

SEQ ID NO: 3057 - DNA, 351 bp, Zea mays
  unsure at all n locations
  Clone ID: LIB3116-016-P1-K1-B4
aaggaatccgatccatccaagccaagccaaggcagagaagaagaagaggaggaagaagaagcatcggcagcatgtcggaggggactgccaactgcgtggacatcctgatcgccatcatcctgcctccgctgggggtgttcctcaagtacgggtgcggccacgagttctggatctgcctcctcctcaccttcctcggctacatccccggcatcatctacgccatctacgccatcaccaagaacacctagctagtcatccttgccgacgacgatccatgtctctgtatctgagtctgttcatatgcctgatgccgacttgtgctgtatgtagttgcttgaattcagtcgtntt

SEQ ID NO: 3058 - DNA, 149 bp, Zea mays
  Clone ID: LIB3116-016-P1-K1-B7
cggacgcgtggggtcgaattaatttgctttgtgttgccgctagtccatgtggactggtattgttcccctggatttatttggcaagcgtgtccgtgctcgctctagcgttttattgagcttttaaagtcatcgcattcttttttgattgc

SEQ ID NO: 3059 - DNA, 401 bp, Zea mays
  unsure at all n locations
  Clone ID: LIB3116-016-P1-K1-B8
gtagtcgcagcagctagcgcccggccggccagtcgagtgagtccatcctccatcgccatccaatggccgccaccgccctgagcatgagcatcctccgcgcgccgccgccctgcttctcgtccccactcaggctcagggtcgcggttgccaagccgctggcggcccccatgcggcgccagctgctgcgcgcgcaggccacctacaacgtgaagctgatcacgccggagggggaggtggagctgcaggtgcccgacgacgtctacatcctggacttcgccgaggaggaaggcatcgacctgcccttctcctgccgtgcggggtcctgctcctcctgcgccggcaaggtcgtctctggctccgtcgaccagtccgaccagagcttnctcaacgacaaccaggtc

SEQ ID NO: 3060 - DNA, 96 bp, Zea mays
  Clone ID: LIB3116-016-P1-K1-B9
agcggacaagcggcgatgtataccggtggcgcgctccctgccacgacacactctcacaacgcttacacacgaggcctagtcaacatctacgagacc

SEQ ID NO: 3061 - DNA, 265 bp, Zea mays
  Clone ID: LIB3116-016-P1-K1-C11
cccacgcgtccgcccacgcgtccgcccacgcgtccgggtggatcgggtggaagaaggtttagggaagagtagagaccatagaccactgcatggctacactatataattatcatcaataatgtgcactatattgaatgtcaatgcaccacctctatatgctgaatgctatgtatctcaaactatgatttgtaatgacttgaaggattgagagcttattctcttaacggaatatagaccaatattattagtatatattccatgatta

SEQ ID NO: 3062 - DNA, 103 bp, Zea mays
  unsure at all n locations
  Clone ID: LIB3116-016-P1-K1-C12
acgatccaagtttccttcccccttctttccacccatttgttcttccagagcggcacctaaanncaaagcactttttcaaagaccacaaggccctcactnctac

SEQ ID NO: 3063 - DNA, 460 bp, Zea mays
  Clone ID: LIB3116-016-P1-K1-C2
gcaaaagggtggcgtggcaaaactcgtttcaaccctgccggcagcaagacttacgtgagagagtacagccattcaccaccctcaactctcctggaaggcaggggcactcagagcggtgcacatgttgatataatggggaacttcgctttgatcgaggacatcatcaggatagctgccggggcaaccggtgaggaaattggtggcgaccaggtttattcagatatattcaaatggtcagagaaaatcaaattgaaattgtaacccatgggaagttaaaagaagtgccccaacccgttcattgcgttcctaaatgcttgcctgagcgcaactctggattttgcttaaatatcgtatttttttcacgcctcattcgtccctctagtaaatttacattgacaggaccccggtgcgacgcggatgttgtaccgtattttggcattgtatataaaatgtacaggcg

SEQ ID NO: 3064 - DNA, 240 bp, Zea mays
  Clone ID: LIB3116-016-P1-K1-C3
caacctgagtggctagctagagctagctagctccgggcgcccgcagcatggccacgaacagccaccgcattattgcgcccggcctcctgctggtcgcggccacgacgctagtcgtcgtcgttgttgcgcatatcgcggcgccggctgccgactgcccctactagtccgacgccgacgccggcccctccgtcaccgaccccgcccccggtggtgaacccgccagcgttgttcacgccgtgc

SEQ ID NO: 3065 - DNA, 350 bp, Zea mays
  Clone ID: LIB3116-016-P1-K1-C5
attttgagcattcagaaacacaccaagcgaagcgcactagcaacgacctaacaacaatggctaccaagatattagccctccttgcgcgtcttgccctttttgtgagcgcaacaaatgcgttcattattccacaatgctcacttgctcctagtgccattattccacagttcctcccaccagttacttcaatgggcttcgaacacctagctgtgcaagccaacatgcaacaacaagcgcttgcggcgagcgtcttacaacaaccaattgcccaattgcaacaacaatccttgccacatctaacaatacaagccatcacaacgcaacatgcacaacagtttctaccagcactg

SEQ ID NO: 3066 - DNA, 175 bp, Zea mays
  Clone ID: LIB3116-016-P1-K1-C6
gtccgttttccaggtcgaccacgcgtccggcctgctgtgatcatgtaccctgtcaaactgcttgtacggatggcatgacgtgacctccatgtgacaagctgatatatagcgcgaccggaatttgccgtgtaaaattactctacttattaaatagaatcagaacaggtgtttcatt

SEQ ID NO: 3067 - DNA, 200 bp, Zea mays
  Clone ID: LIB3116-016-P1-K1-D11
gagccagccagccagccagccgcttgggcgccatctcttagagcttcgaccctcgaagagagatccggcgcggccaataaacacccggctcactacagactcgcagatggccggcctcaggatgaagttcgtcgccgtcgccgccatggccgccgcgctcgtggcgtccgtcgcagtcgtctaggtccccgtcccggctt

SEQ ID NO: 3068 - DNA, 227 bp, Zea mays
  Clone ID: LIB3116-016-P1-K1-D12
cgcaagcctgcgctgcgattttatgtctttctgctaccttgactctaaaaatatgcataggagtcgtaaaggagcagcgaagggcaccataaaggatctgcagtgaccaggctggcactacactgagcacagaacaacactcttcgctgactggctagtggcagcacggtggtgtggcacaggtcatggcactcggaccagcgccacggatcactgttctaccgtgc

SEQ ID NO: 3069 - DNA, 226 bp, Zea mays
  Clone ID: LIB3116-016-P1-K1-D3
cccttcctcccacccttcctcccacccttccgcccacccttccgaaaaaaaaaaaaaaaaaaaaaaaataaggaaattttaaaaaaaaaagggggaaaatataaaaatttcattatttaaataataaaaattttaaaatctttaatatttcaataattttactctatattatttttcctcttctttttttttttccccctctttttttttccattcccttttcttt

SEQ ID NO: 3070 - DNA, 81 bp, Zea mays
  Clone ID: LIB3116-016-P1-K1-D7
gaaaaaagaccagacccactctttctccctttccttcactactttctctaattttttttttacctacacttccaaaacttc

SEQ ID NO: 3071 - DNA, 320 bp, Zea mays
  Clone ID: LIB3116-016-P1-K1-E1
cggacgcgtgggatacggcgtctgcaactgtttctctcagggcggacgggggcgtggcttggagcggtctaactcgccgagatgcgggggcaaagcggttgtccagcgcccggctcctcacggcggtgacaaaatcggcagcggaacatcacccaaggctgccgctcgtggcgacttcgcgtcttccaacctgagcaagcctatcaagaagcagccgcagcagcatgcgcagaggctgttgctgcggcggtcggcgtcggacctcggcagtcgcgtctttcgtaccgacctcgactcgcctgcttcgctcggggttacta

SEQ ID NO: 3072 - DNA, 408 bp, Zea mays
  Clone ID: LIB3116-016-P1-K1-E12
agctcaccggcaccgacgtcgggtaccctggtggcctgtggtttgacccgctcgggtggggcgccggctcgccggagaagatcaaggagctgcgcaccaaggagatcaagaacggacgcctcgccatgctcgccgtcatgggcgcttggttccaggccgagtacaccggcaccggacccatcgacaacctcttcgcccacctcgccgaccctggccacgccaccatcttccaggccttcacccccaaatgaggagctctgatgaacttagcagttcgaggagtgctaccacacatgcatgcattgttaggtttgatggccgatatggaacttcattttttttgttgcgggcggactactgggtagactgtcaatgatgatgatgatgaaatggttcgggtgcgatgca

SEQ ID NO: 3073 - DNA, 375 bp, Zea mays
  unsure at all n locations
  Clone ID: LIB3116-016-P1-K1-E4
cccacgcgtccggtaccttcctgttgtctaccctcctgagatcaagcaagagaatgcccttcattttgcagaggataccagctatgctatggcacgtgccctgaatgccttgccgacttattattcatatggcgattctatgattatggcacgagcagtagaagctggaaaggtgaactgctcaaattatatggtagaaatggcttgggttaaagatgtttacggtataagcacagcagaagtgatggaactattggaacatttcctggctatgaatccagataacgatggacgtgtgaaagctgaagatntctgggctcattttggtctggattgcaagcctctgtgcaagaagatatttcactatttcgattt

SEQ ID NO: 3074 - DNA, 315 bp, Zea mays
  Clone ID: LIB3116-016-P1-K1-E5
cccacgcgtccgcccactctttcgcccactcgttcgggtggatcgggtggaagatggtttagggaagagtagagaccatagaccactgcatggctacactatataattatcatcaataacgtgcactatattgaatgtcaatgcaccacctctatatgctgaatgctatgtatctcaaactatgatttgtaacgactcgaaggattgagagcttattctctgaacggaatatagaccaatattattagtatatattccatgtttcctggcgacaaatatgttagataatataaaaaaaaaaattaaaaagggcgg

SEQ ID NO: 3075 - DNA, 389 bp, Zea mays
  Clone ID: LIB3116-016-P1-K1-E6
cccacgcgtccgccgcggggcaggggcagccctccgagctcgccgtcaggcagaacgtcgagggcctcgcgcggtacgcgctcatctgccaggagaacgggctggtgcccatcgtggagcccgagatactcaccgacggcggccacgacatcgggacctgcgccgccgtcacggagcgcgtcctcgccgccctctacaagtcgctcagcgaccacaaagtcctgctcgaggccacgctcctcatagaccaacatggtcacccccggttccgatagccccaaggtctccgcggaggtgatagcggagtacacggtggcggcgctgcggcgcaccgtgccgccggcggtgcccggggtggtgttcctgtcgggcgggcagagcgaggagga

SEQ ID NO: 3076 - DNA, 361 bp, Zea mays
  Clone ID: LIB3116-016-P1-K1-F11
cccacgcgtccggtctcgctggcctggaacatcgccctcatcttcgtcaccgggatgctggggaaccggccctacgcgctgatcaccacagccgtgtccgcggacctcggcacgcacagctcgctcaacggcaactcccgcgcgctggccaccgtcacggcgatcatcgacggcacggggtccatcggcgccgccgtcggcccgctcctcacgggctacatctccgccaggagctggagcgccgtgttcacgatgctgatggcgtcagcgctcgtcgcggggctgctgctgtccaagctggtggcggcagaagtggtcgccaagatggagtcccggaggacgcccgccgctgctgcgagcg

SEQ ID NO: 3077 - DNA, 342 bp, Zea mays
  Clone ID: LIB3116-016-P1-K1-F12
caaagccatcggagagagcagctggacgaccatggcctcgccgctgctcaagtcgcactctcagctcgccgccgccgccgccctgcactccgtgaggagagccgaccgctgccctgcgacaatacacctgggcaagttccatgaccacgggctcaggtccggccgttctaagagatccggttcagcgaaggtgggcgccttcccgtcgctggacgtggtgccgctgatggtgacgatggtggagcacgtggacatgtcgcgggactacgtcgtgaccaagtccatctggcatctcaacgacgcagccctcaagagcgtctataccttctaccccatgttcac

SEQ ID NO: 3078 - DNA, 420 bp, Zea mays
  Clone ID: LIB3116-016-P1-K1-F5
cccacgcgtccgcccacgcgtccgcttggctcgacggcaagcacgtcgtcttcggccaggtcgtcgagggcatggacgtcgtcaaggccatcgagaaggtgggcacccgcaacggctccacctccaaggtggtcaaggtcgctgactgcggacagctctcctagatctctctgatctggtctgttcggccgccctccctccgtcatcgtcgactccccctgcgtccgttcctttggatctgaataagatggtggtgatctgagtggtggtcttagtttatcatgtatcgctcgcagtttaatttagcggtttaggtgtggatctgtgaaccccatggcgcctctgcttgattcgtgtttcacctgttatgttctgagattcatgataatgctatgagaactgaaattcccgtttcatgca

SEQ ID NO: 3079 - DNA, 441 bp, Zea mays
  Clone ID: LIB3116-016-P1-K1-F6
cccacgcgtccgcctccagatcgctgggcacaaggatattcttgaaggcgatccattcctgaagcaggggctggtgctgcgcaacccctacatcaccaccctgaacgtgttccaggcctacacgctgaagcggataagggaccccaacttcaaggtgacgccccagccgccgctgtccaaggagttcgccgacgagaacaagcccgccggactggtcaagctgaacccggcgagcgagtacccgcccggcctggaagacacgctcatcctcaccatgaagggcatcgccgccggcatgcagaacactggctaggcggcttctcttcactcacctgcagagtgcaccgcaataatcagcttccggatggtggcgttttgtcaagtttggatggaaatgccgaactggcaacgtctgttttccctatgcatatgtaatttcct

SEQ ID NO: 3080 - DNA, 446 bp, Zea mays
  Clone ID: LIB3116-016-P1-K1-F9
gcatgagcgcgtacatgtcctccaagaagaccatggagatcaacccggacaacggcatgatggaggagctccggaagcgcgccgaggccgaccggaacgacaagtccgtcaaggacctcgtgctgctgctcttcgagacggcgctgctcacctcggggttcagcctcgacgaccccaacacgttcgcggccaggatccacaggatgctcaagctcggcctcaacatcgacgaggacgctgctggcgacgaggacgccgacatgcccgcgcttgacgagggcgccgcggaggagagcaagatggaggaggtcgactgaggtgtccttccttcctataatatgcaagttttcagcgatgagggacgacggtcaatggcgatgcctgtttgtgtgtgtctgcgtgtgggtccaaaggggtcactggtggtacaggtcacggtagtgtct

SEQ ID NO: 3081 - DNA, 358 bp, Zea mays
  Clone ID: LIB3116-016-P1-K1-G1
agaagcggcggcggcggagcaaacgcaggcgaaggcgagggtgtgagggaaggagcaccagccatggtgcacgtcaacttctaccgcaactatggtaagacgttcaagaaaccaaggcgtccttatgagaaggagcgtcttgatgctgaactgaagctggtcggtgagtatgggctgaggtgcaagcgtgagctttggagggtccagtatgcactgagcaggatccgtaatgctgcaaggcacttgctcacccttgacgagaagaacccccgtcgtatctttgagggtgaggcgcttcttcgccgcatgaaccgctatgggctgcttgctgagggtcagaacaagcttgattatgttc

SEQ ID NO: 3082 - DNA, 379 bp, Zea mays
  unsure at all n locations
  Clone ID: LIB3116-016-P1-K1-G10
ccacgcgtccnnagtctcttccncatattcttaatttttctttttttcctgaaatccttcaccctcaacaagattattttctaaaaagacatatgtctcttctctttccctttcatcttataaatcacatctcccaatctctttatttcattcatcatttcttttattctacttcttcttttttctttatctctttattaatcctttattttttaatattttttcttctctcctctctctctttcattatcttccatatactacacttcttcactctcctaattatctttttttttatcattttttctcccttttccttacttattcttccttccataaataattttacatttacctttcttcctctcctatattccct

SEQ ID NO: 3083 - DNA, 319 bp, Zea mays
  Clone ID: LIB3116-016-P1-K1-G11
tgcctgatgatactacatatgacatactccctcggaccaataatagttgattttccaccggccaggattgcttgctgctgggtcaagcctccagtctgacacagtgtattaccaaccagagggaatacgagttagcttgaaacttttggaagcaagtcctgcagatgctgaaaatcatgtttcaattctgccagtaaagtatgaagaaccttaacatgcgattcagcagattgaaatttaggaaacttgcactgtaaatgaagtgaactccttgtcagttataatttttccttttcaatatatctctacccctttaaag

SEQ ID NO: 3084 - DNA, 408 bp, Zea mays
  Clone ID: LIB3116-016-P1-K1-G12
aggatagttattaaaataagagaacccggttgcgtttaccagtggagactgcaggcagaggtcgctatgagagcagatggaaagcctggaatgtctgatgaggaggttatggattttgtatcacgctacctaccggcataccatgcatatctgccaacactgtacaaagaggggccgaatggttcgaatccagatcatctgctggtcatcgacatagacgaaaataggaaccctatctgtggtggatcatgggacatctcatgtttgtgaaactacttttatgatgggccgtcaaacaccactggcctcttgttgccctacactctggtagtgtaaatctgtgaattccatgtaaatatgaatttcgcttcttaaagcactttttaatctggcatggtccttagccgg

SEQ ID NO: 3085 - DNA, 309 bp, Zea mays
  Clone ID: LIB3116-016-P1-K1-G4
tcgacaagtcgttcggatttgacactgccgtggaggaggcccagagggccatcaacgctgctcatgtcgaggctgagagtgcagagaacggcatcggtgtcgtgaagctgatgggtcgcaacagcggtttcattgccatgtacgctactctagctagccgcgacgtggactgttgcttaatcccggagtcgcccttctaccttgaagggaagggagggctccttgagtttgtcgagagacggctcaaggacaacggacacatggtcatcgtggtggccgagggtgctggacaggatctcatcgcgaaaa

SEQ ID NO: 3086 - DNA, 166 bp, Zea mays
  unsure at all n locations
  Clone ID: LIB3116-016-P1-K1-H1
gggactgtggagccattttgtgatgaatagttcgaataatcagtatagaggtacgttgtaaaatatgccagattaccatagccatcgaattctcctaggagatgacagtttttagtaagcattcattggaatgatgntaactgataagggaagttaacgtggnagt

SEQ ID NO: 3087 - DNA, 195 bp, Zea mays
  Clone ID: LIB3116-016-P1-K1-H10
cggaatcccggtagaccacgcgtccgcggacgcgtgggcacggcggcgacgtgtatgtctagccccgagagcgggtttagttagaggctacgggcggtcgggcgcggcggctgcggcagccatgagcagcgggagcgagagcactaccgccagcaggtgtatagagctggccacgctgcgcgcgctggcgcgcga

SEQ ID NO: 3088 - DNA, 171 bp, Zea mays
  Clone ID: LIB3116-016-P1-K1-H2
ccggccagaacaccaaccatggccagccaggacgccgtcgatgttatgatgtcattcttttcagtaggttggaacagatcactgcctgggttgaagtgtgatcctgacttccctggactcctcgcaaacaagtataacgggatacgcgagcaagggggaacgggcatggtg

SEQ ID NO: 3089 - DNA, 314 bp, Zea mays
  Clone ID: LIB3116-016-P1-K1-H4
ctgagccttgtctgtgagataatgcagttggagatccttggcgatgaggtccgtgaccgattcctgggagctcatgagaggatccttgtctggatggacaaggtgaagaaagccacgagccctcattttgaggaagcccacgagctccttttccaagtgaagaaggcacgcatggtgcaaggcagcagcagcaaggcttttgagtcgagcacaaagctcaaaacagcatcaaagctctgacgaccaaaggcagaataagcgacagacagatccatcttgtgatataatataataaacgggaactattattaatt

SEQ ID NO: 3090 - DNA, 222 bp, Zea mays
  unsure at all n locations
  Clone ID: LIB3116-016-P1-K1-H6
cccacgcgtccgcggacgcgtgggcgcgagcatttcaagccgagctgcaagggcccggagcggagaccggaagagggagacttcgcttgcnatgtcaccggcagcatccgccgccgaaaccatcgtcgtcgcaatcgcaagcgtcccgagccagcagcagagcagccaccgcgccgcggcgccgtccgtcccgtcgtcctacgccgtctgggagaaagagcg

SEQ ID NO: 3091 - DNA, 154 bp, Zea mays
  Clone ID: LIB3116-016-P1-K1-H7
gtaacggtggacggaaagatccagcggcacaacacaaaacaagtgttgctgcactgcagcccgctgcgggttaataggttagaaatatagcatttgttacgaggaaacattgaagttttatgcaagaaaaccgctgttagataagaaatacact

SEQ ID NO: 3092 - DNA, 85 bp, Zea mays
  Clone ID: LIB3116-016-P1-K1-H8
cggacgcgtgggcggacgcgtgggggtagatattcggagggtcgaagaaggaggatgccatccagaaccagtatgagttcctgat

SEQ ID NO: 3093 - DNA, 313 bp, Zea mays
  unsure at all n locations
  Clone ID: LIB3116-017-P1-K1-A1
gaaagtggtagatgatgaaccaccanaaatttaatttaaaaaaaaaaaaaaaaaaaaaaagggaagaatattaaaaacccaccgcgccggcaaaaaaaatttttttataaaaaaaaaaaaaaaaaaaaaaaaaaaaaaaaattttgccaacccctttaaaaaatcaaaccttacttccccctccattcaacgtaataatttttttttaaggtcaccaaaatacaattaactgccccccgttttacaacatcttgactggaaaaaccctgcccttccccaacttaatcccctttcaacccatccccctttcccc

SEQ ID NO: 3094 - DNA, 408 bp, Zea mays
  Clone ID: LIB3116-017-P1-K1-A2
cgacgcgtgcgtcacattaatgggagtacatttatgtttctgctttacgaatatgatattttttggacattgctggtaatagcaagccggaggccgattttggtattttggatttcaggacttttagccccggttagtgaaggaccagagaagctttctagttatgaatcgggtatagaacccatggggggggcttggttacaattccgaatacgctattacatgtttgcgctagtttttgttgtttttgatgtggaaacagtctttctctacccttgggcaatgagtttcgacgtattgggtgtatccgtttttatcgaagctttcatttttgtgcttatcctaagttgtggtttagtttatgcatggcgaaaaggagccttggaatggtcttaactgaatattcag

SEQ ID NO: 3095 - DNA, 162 bp, Zea mays
  unsure at all n locations
  Clone ID: LIB3116-017-P1-K1-A3
accacgcgtgcgcccacaactgatgaaactagatcttttgttcccccgactatctcacattcgcgaaattactagactcctgggcggcctncgctatataacacaacatacctttccagcctcttcaaacttcccacattacaacctgatttgctttaacaa

SEQ ID NO: 3096 - DNA, 446 bp, Zea mays
  Clone ID: LIB3116-017-P1-K1-A6
cggggcggcgccgacgcgtccgccctatctcggatccgatggctcgttcgccgccgccttcttcgtcggccggcggcgcgcaggaggcgcagcagttcctcaacgcggcgctctcccagcgggggccgtccgcgctgccgtacgccgaggacgtcaagtggctcatccgcaaccacctggtggcgctggccgaggccttcccctccctccatcccaaggccgccctcttcacccacaacgacggccgcgccgctcacctcctccaggccgacggcaccatccccatccaccacgccggtgcctcctacaacctccccgccgtcatctggctgcccgagccctacccgcgctccccgccgctcgtcttcctctccccgacccgagacatggtcatcaagccccaccaccgccttgtcgacagctccggcctcgtcgcaacgcgccct

SEQ ID NO: 3097 - DNA, 151 bp, Zea mays
  Clone ID: LIB3116-017-P1-K1-A9
ctttaatttggatcccggctggggcgtgctgcgtacgtgaagtgtgattagtcgaaggtggcctgatttgagatgtgcatgatgatccttgtgtaattttattaccaagtctcttcttatatttacatgttcatttgcttgcttcttgcat

SEQ ID NO: 3098 - DNA, 449 bp, Zea mays
  Clone ID: LIB3116-017-P1-K1-B11
cctgaccaagatcggcgtcctcaacacgcccttctggtacaccgccggcgagcagcagggcttcaccgacaccaccacgcgtggtcatcatcgagctcatcctcatcggctgggccgagggccgccgttgggctgacatcatcaagcccggaagcgtcaacaccgatcccatcttccccagcaacaagctcaccggcaccgacgtcgggtaccctggtggcctgtggtttgacccgctcggctggggctccggctcgccggagaagatcaaggagctgcgcaccaaggagatcaagaacggacgcctcgccatgctcgccgtcatgggcgcttggttccaggccgagtacaccggcaccggccccatcgacaacctcttcgcccacctcgccgaccctggccacgccaccatcttccaggccttcacccccaaatgaggagctctgatg

SEQ ID NO: 3099 - DNA, 341 bp, Zea mays
  Clone ID: LIB3116-017-P1-K1-B7
aagcccgcacgacacgacaccaagtcgaggttctcgagagggcaccaataatggccggcgggaactccagcgtcgtcgggcgtgaagcccgccgcggcagtgccgcaggccgccgccgcctcatcgccggcgaagcgggtgcagctggccgcgcccgagggccgccgcgccgctctgctcggcctggcggccgtcttcgccgtcacggccaccaccgggtcggccaaggccacgatcttcgatgagtacctcgagaagagcaaggccaacaaggagctgaacgacaagaagaggctggccaccagtggagccaactttgcccccccctacaccgtggagtt

SEQ ID NO: 3100 - DNA, 106 bp, Zea mays
  Clone ID: LIB3116-017-P1-K1-B8
aaaaagagggggggggggacaaaaaaaaaatttttataaataaaaaaataattataaaaaaataaaaaataaacaaataaataaaaaataaaaaaaggggggaatt

SEQ ID NO: 3101 - DNA, 461 bp, Zea mays
  Clone ID: LIB3116-017-P1-K1-B9
caccagacctcatctcactccgctaccccctcatcctgccatccaccagaagcagtgcgggcatatggcgcgccgtgcggggctgctcctcgccgcggcgctgctcgtcgccgtcgctgccgcggcggtgccgccgacgtgcgagcgcatcgagtgcccggcgtacgaggtggtggacagcgccaacgggttcgagatccggcggtacacggacgccatgtggatcaccacggcgcccatcgaggacatctccttcgtcgccgccacgcgcaccggcttcctacagctgttcgactacatccagggcaagaacgcgtacaaccagacgatcgagatgacggcgccggtgctgacgcgggtgtcgcccagcgacgggcccttctgcgcctccgccttcgccgtgagcttctacgtgccggccaagaaccaagcggacccgccggcggccgaggcctgcgcgt

SEQ ID NO: 3102 - DNA, 405 bp, Zea mays
  Clone ID: LIB3116-017-P1-K1-C11
gcggcgccgtgcatggccggccagatgggcctgaaccagctcggcccggcccagatccggcggatccaggcccagttcatggtccagcagcagcagcagcagcagaggggcctgcacgcggcgttcctgggcccgcgggcgcagccgatgaagcagtcagggtcgccgtcgccgccgccgccgctggcgccggcgcagtcgaagctgtaccgcggcgtgcggcagcgccactggggcaagtgggtggcggagatccggctcccgaagaaccgcacgcggctgtggctcggcaccttcgacaccgcggaggacgcggcgctcgcctacgacaaggcggtcttcctgcttcggggcgacacggtgcgcctcaactttccggcccttcggcgcggtggcgcgcacttt

SEQ ID NO: 3103 - DNA, 331 bp, Zea mays
  Clone ID: LIB3116-017-P1-K1-C12
taatagcgtagtctactatgcatacgatgcttacataacaaacgggcgggccagtgtacatgagacgactgaaaatcgggtcatacatatatgatgacaccttttaagttttactagaaagcaagaagacctcacgaaaggccttggactcattattacgcaatgtcatctcttcgtgggccaggggaagaatgtctgacaaaatgggtcgacatgagatcggatcaactcgagctcgtgcgactcactgaattcaaacgttattcacaacatggatacgattctcccgcgtagcgccctcagacgttggaactgaatgatgattagtcag

SEQ ID NO: 3104 - DNA, 256 bp, Zea mays
  Clone ID: LIB3116-017-P1-K1-C3
aaaaaaaaaaaaaaagaaaaaaaaaaaaaaaaaaaaggaaaaaaaaaaaaaagaaaaaataaaaaaaaaaaaaaaagaataaaaaaaaaaaaaaaaaaaaaaaaagaaaaaataaaagaaggaagaaaaaaaaaaaaaaaaaaaaaaaaaaaaaaaaaaaagaaaaaaaaaaaaaaaaaaaaaaaaaaaaaaaaaaaagaaaaaaagaaaaagaaaaaaaaaggaaaaaaaaaaaaaaaaaataaagaaatgaaaa

SEQ ID NO: 3105 - DNA, 460 bp, Zea mays
  Clone ID: LIB3116-017-P1-K1-C5
ccgaactagttttagagcaccctccacctggtgctcttcctcaggggtggtatgcagatttttggggagacattgactggcaagaccatcaccttggaggtggagtcgtctgacacaatcgataatgtcaaagccaagatccaggacaaggagggcattccaccggaccagcagcgcctgatctttgctggcaagcagctggaggatggccgtaccctcgccgactacaacatccagaaggagagcaccctccacctggtgctccgcttgcgaggtggtatgcagatctttgtgaagaccttgactggcaagaccataaccctggaggttgagagctccgacaccatcgacaacgtgaaggcaaagatccaggacaaagagggcatccccccagaccagcagcgtctgatcttcgctggcaagcaactggaggatggccgcaccctagcagactacaaca

SEQ ID NO: 3106 - DNA, 388 bp, Zea mays
  Clone ID: LIB3116-017-P1-K1-C7
gagcgtgacacccgacctccccctcccgctccgggcagcagcagcagcagtcatgcggatagccgtggtggctcccggcgcggcggcctacccatgttcctcctccctcgctgcgccggcgagtgcgacgagccgcgcgcacgttgcggcggccgggatgtcctacagggcgtcctctttcgtcggaggcgggctcgcggcggtggttgcgtcggtagccgcgcggccgaggagggcgggctctgggagaggcgacgctctcgggtgcaagtgcctcttcgggctcggggtgccggagctcgccgtcatcgccggcgtcgccgcgctcgtgttcgggcccaagcagctccccgagatcggccgcagcctcggcaagaccgtcaagagc

SEQ ID NO: 3107 - DNA, 362 bp, Zea mays
  unsure at all n locations
  Clone ID: LIB3116-017-P1-K1-C8
cggacgcgtgggcggacgcgtgggcggacgcgtgggccggagtcatcaagctcagcatcggatggtaaacccgacctcgtgctgaagaggcggaacataaaagctggagccgctacagcactgatggcaggcagggtgaagccgtcctcgtggcagagcgccagttccacgagctcaaggactcggatgcctgttctggcagcacgcaagtaggcagctcgttgcctcaggctttgtgtgggaaatagggggcttgtgaaatatggacttgcccgtaatattgctatgtttctttggttgtactatactcacaaatatgacgccgntgacttttttcaaaaatttgaccactcgtcttattt

SEQ ID NO: 3108 - DNA, 112 bp, Zea mays
  Clone ID: LIB3116-017-P1-K1-D3
aaaaaaaaaaaaaataaaaataaaaaaatatataattaaaaaaataaataaaaataataaattaacaaaaaaaaaaaataaaataaaaagaaaactaaaatatattttaatc

SEQ ID NO: 3109 - DNA, 424 bp, Zea mays
  Clone ID: LIB3116-017-P1-K1-D4
gtccggcttcccttccaagaagcgcagcgcccatggccatgtccacgcaagcctccgccgccacgcgccgacctgctggccgccgcctgggcgccggctgctaaaccgcggcagctgagctcgcagctcgcgctgccgtcgtcgtcctaccgcgggccggccccgctccgcgcgtccaccgaggaggcggaggaggcgcccaaggggttcgaggccccgcagctggaccccagcacgccgtccccgatcttcggccgcagcacggccggactgctccgcaaggcgcaagtggaggagttctacgtcatcacgtggacgtcccccaaggagcacgtgttcagagatgcccaccggcggggccgccatcatgcgggagggccccaaccttatagaagctggcgcgcaaggagcagtgcctggcgct

SEQ ID NO: 3110 - DNA, 482 bp, Zea mays
  Clone ID: LIB3116-017-P1-K1-D6
aaaaaggccgccccacccttccaaaaaaataaaaaaaaaattttaaacataaataattaaaacaaaaaaaaaaaaaaaaccgggggttttttaaaaaaaaaccggggaaaaaaaaaaaacaaaaaaaaaaaaaaaaaccaaaataaaaaaacacaaaaaaaaaaaaaaaaaaaaattaaaaaaaaaaaaaaaaattcccccccccctttaaaaaacaaaaaaattccccccccttcaaccaactatatatcttcttaatttggcccccaaaaataaaatcctcccccccccaattaaaaactttaaacataaaaaaacctcctcattccccattaaaaaatctgtacaaaaataatcccttttcccaaactcttaaaaaaaaaaaaaccctacccccaatctcccttccaaaaaaatgccctccctcttattctaaaaatcaccccccctctcttaccccccatataaactccccctttttt

SEQ ID NO: 3111 - DNA, 429 bp, Zea mays
  Clone ID: LIB3116-017-P1-K1-D9
acagcaatccacacaagcacttcgacgtcacacgggcgctgcgcacagacacaccaagcgggggcaccaatggcttactaccaggaggtggactactgctcggaggaggtgaggtcggtggccccggccggcttcggccgccacggcggcggcgtccagcagcacgtcgtcaaggagaagttcgaggaggtcgacacggtctcacgcgccggcgccaaccaccaccaccaccatggtcaccacggcggccacggcttcgtggtgcgcgagaccagggtcgaagaggacatcaacacctgcaccggcgaggtccacgagcgcagggagagctttctcgccagggctaactgaagccgccggcggccggcatccacgcccgttcgtgcttgcctgcgtgccttatgtatgtctgtggttgactggttgtgc

SEQ ID NO: 3112 - DNA, 54 bp, Zea mays
  Clone ID: LIB3116-017-P1-K1-E10
acggtctccctcttcctttcaataatttttttaaaattaagccaccaattagaa

SEQ ID NO: 3113 - DNA, 403 bp, Zea mays
  Clone ID: LIB3116-017-P1-K1-E2
cccacgcgtccgaggatgtttacttttcctttggaagtgtccaggaccatggggccagcagagggagccaaggaatgcactcatgaaaattttgcctaaatattgctggggacaccccttcttccaatcgtctgtttgatgcgatagttacccactgtgtccctgttatcatcagtgacgacattgagctaccttatgaggatgtgttggattattcaaaattctccatctttgtccgttcgtctgatgctgttaagaaaggttacctgatgagactgctcagtggtgtaagcaagcaacaatggacaaagatgtgggataggctcaaagaggtggataaacattttgagtatcagtatccatcacagaaagatgatgcaatccaaatgatctggcaagcatt

SEQ ID NO: 3114 - DNA, 450 bp, Zea mays
  Clone ID: LIB3116-017-P1-K1-E7
cccacgcgtccgcggacgcgtgggtacaatccaaactttaatacagttgatgctcgtggtgcaagggaaccatggcatgactggcattctaagatcgatggtccagctgcttatgatgttctacagaactttcaggagcgttggttaaaagcggccaaacgacatgggattaaaaagttggcaaaatcctatgacgatgctctgctcactattgaaagaataccagagattataaacataaatgatgcaatatattttagtgacaatgatccagagacatggcatgttcaggtgtttcggtctattgattcaaactctgccaagggatttccaaaggatccacgagcagcaaccatgaagaatcttgtttgtggaaagaatgtacttattgacatgagcatacatacggcttatgtccatgctatccggtcagcccaacattatatttat

SEQ ID NO: 3115 - DNA, 445 bp, Zea mays
  Clone ID: LIB3116-017-P1-K1-E8
caaaggcccaaaatgcccttcacggaagatggttcgctgggaagatgattacagcgacatgtatgttctctctggagtacaggacgaagttcccaaacttgtgagcatatgccgggaagagttggccagacctgcatagttcgtttggagtattcgcaagtgctgtatcgttggatggtagacgaacaccttattgattgtatgacaggatagttgcagcaccgggcgtcactatcagtacaatgcttgatgtactttatttacggcgtcgcagtgaccaaaccttatttttgtccaccgaatgaaatgccctatcatctccaggcttgttggcatatggttgattttctggacggtcaccataacacatttttgtcagatttccaatgtgctttatttttttattctcttatgtttcaggatgttttgatatgttcttgctttc

SEQ ID NO: 3116 - DNA, 437 bp, Zea mays
  Clone ID: LIB3116-017-P1-K1-E9
cttcctccttcccaggaactccattgcactatttccaccccaagaacacagcacagagggggatccgaatccacaggagaggcagaagcacaactcactccccactccctccacccatcagctagccatgggcaaggactgcggcaaacacggcgacgacgacctccggcgctcgtgcaggcgcctgctagccatcctcgtggtcctcgcgctgaccgttggcgtcgtcgcgctgatcgtctacctggtgctccgccccacgcacccgcgcttctacctgcaagacgcgtcgctccggcagctggacctctccaacgccaccaccagcaccagcaccagcaccctgctctccaccgcgatccaggtgacgctagcgtcgcgcaacccgaacgagcgcgtcggggtctactacgaccgcctcgacgtgtacgcgtcgt

SEQ ID NO: 3117 - DNA, 334 bp, Zea mays
  Clone ID: LIB3116-017-P1-K1-F10
gcaagctctacgcgttgatcatcagggacatcccgatggccagatgcttcacatcatggaggacgacaagggagaggtggtgagagttatcatcgaagtggagggtctgtctgatgccattcatcgctgtctttgacctcgtgaaggcgtcttagccacttcaatttgattggaaatattgttgttttaagatacgggtccatggttaatgttgtacgcttctctgagaagacctgtcattccaataatttggttctggagcaacctggagcttgatactgatctagcttcttttagtaacaaatgtaagttgctcacattttctttagattgg

SEQ ID NO: 3118 - DNA, 374 bp, Zea mays
  Clone ID: LIB3116-017-P1-K1-F11
ggcggcatctaacaagattgcagcggcacatgtcgtcttcgtcctcgccttgctccgtggcgcctatcgtgcggaggcagcgtgttgtatgagcgcataacaatttatatcacggcatacgcatgcaccaaggactgtgccaactcgtgcgttcaacataacctcggtgtcggcgggtattgcaggggcaagatcccatttaacaaagaatgcatgtgtacatttgaatgcccatgagtcaaaagccactatatctgacgggcgcaacttgttatatatctagggatgggatgtcgtttggcatgtactccattttgaaagtgtccaagtgagactttatacatatatgcagttgagagatggaatttattatt

SEQ ID NO: 3119 - DNA, 446 bp, Zea mays
  Clone ID: LIB3116-017-P1-K1-F12
ccgacccacgcgtacggacgtcatttaacaatatttcaccggtttatgtcatctcccgcctcacctaactccgccgcccctattttgcagaggcggcgggctatataaaacataacaatttctatcaccatccattcatgatcaacaaggactgtgccaactcttgcgttcaacataaccttcttttcttcagatattgcatgcacaagatcccatttaacaaataatgcatgtttacatttgaatgcccatgagtcaaaagccactatatcttacggacgcaacttgttatatatctatcgattgtatgtcatttggcatgtactccattttaaaagttatcaatttagactttatacatatattcattcgaaatatgctattaattcttaacaaataacaccttttattattattaccaactaatttactaaattatatatatt

SEQ ID NO: 3120 - DNA, 288 bp, Zea mays
  Clone ID: LIB3116-017-P1-K1-F3
atccggtcgaccacgcgtcaccccgcaccaccgacgctgggatgaaggccgtgccagccgacagccggccccgggccgatccgcgaccaagatcaccattcgtttcggggggcggcgcggagcggctctgggaagggcggacaggttgggctggcgcatcggctctgccttggccatgtcgcgctcgctactcgtggtctctggtgactgctcgctacggaccgacgcccgtcgcgacacctgattctggaggagagagggaatagtggacaatggggacagtcacac

SEQ ID NO: 3121 - DNA, 468 bp, Zea mays
  Clone ID: LIB3116-017-P1-K1-F6
cggacgcgtgggcggacgcgtgggcggacgcgttggcggacgcgtggggggttacagctggtagattaccactctggaggacttcggattaatccaaacttgtataacaatgggaaagtgtgtcttagcctgttgggtacctgggatggtagaggttgtgagaagtggaatccagctcaatcgacaatgctgcaagttcttgtctccattcaagctctgattttgaatgacaagccatattacaacgagccaggatatgagtcctatgccaacactccgaatggagagcggttggctttggactataatgacaacacctttctgcactcatgcaagactatgttatactcacttcggaggcctccagagcactttgcagatcttgtcgctggccactttcgggtgcatgggcacacgattctcgcggcatgcaagcactacatggcgggtaatgatattgggtcagtg

SEQ ID NO: 3122 - DNA, 267 bp, Zea mays
  Clone ID: LIB3116-017-P1-K1-F9
gagaaacaggaaagctctgtacatcttatttcttctatactccaattgctttgaactggatgggtcataaacctatacatcgatccatatcaaagcaattggagtatagaagaaataaggagaaacaggaaagctctgtacatcttgcattttgctgttgtttgtcgaagtttcaatgtctgtcgcgtgacaaaatatagttgtaatttatattttggcatgcacgaaacaggtgtatttattcatttttgaacgaaattttatgtc

SEQ ID NO: 3123 - DNA, 411 bp, Zea mays
  Clone ID: LIB3116-017-P1-K1-G1
ttccgaaggaaagttgaagttgacaaggatctgcgttttttgcagccactttcaaacaagaaagaaagtgatgaagttttcattaagctgggttctgacaaggataagaagaaggaaaatgctgagcgtgatgagcgtgccaagaagtcggtgagcatcaacgagttcctgaaacctgctgaaggagaaaggtactacggcggccgtggccgtggaagggggggccgtggggatcgtgtggttttagaggcggatacggagggggatacagtcgtggcccagctgctgctgctccatccattgaagatcaagctcagttcccaagccttggtgggaagtgaagggcgcccagctgctgctgtcaccgaagcgtgtgttgtctgctggtgtcatatttaaattttgtccgac

SEQ ID NO: 3124 - DNA, 453 bp, Zea mays
  Clone ID: LIB3116-017-P1-K1-G10
gcgcgacgggacggcccttgtgctgtgggagtggtgcgagggagacaaccagcgctggaagattgttccctggtgaacaaggaaatgtgtgaccgagcccgcaccaaggaggagctcctgccgtaataagtgaagtgattggtactgaagtttctggaaataagaggctcttctgagatgcctgtttgtgtgagtatttgcgtttccattccgttttcatgataataaaacgcattgattattaatatatgtaatgtgatgctacactgagtggcagcgttggtatatatttgtaagaattaagaacccattgttgttggactaagcgtgacgagtgatgtactgatgtatgaacctttgcttgatgcatatgctcttctgctcctaaccggggcttcgatgagtcgattatatatatgagtatcatgtttataatagttcgagttattgcat

SEQ ID NO: 3125 - DNA, 464 bp, Zea mays
  Clone ID: LIB3116-017-P1-K1-G11
atcgaatcgtgtcgttcgtggctgtcatactcgagctgcttgcactcaccacacttcgctgcacacacaatgcacaaagggagtccatcactaacaacaccgatatgttggcaagctgtatcaaggacgtaccgatgaacaagaacaagctgcagctccaggagctcgcgcgcttcggcggatatgaccacaaccaaacggccaatagctcttatggggatcgagaagcttgtgaacgccaagacacagattggtgcttgcacgatgtactatctaactattgaaacgaaggatggcgtaggcaagaagctttatgaaactaacgtctgggaaaagccatgagagaactttaagcaacttcaggaatttaagcctgttgacaaaggtgctagcgcctaaggatctgtcgtctccctgcgcaatttgctgtctgaagcgcaaaactaaattacaaaataaggagc

SEQ ID NO: 3126 - DNA, 468 bp, Zea mays
  Clone ID: LIB3116-017-P1-K1-G12
cacagcaatccacacaagcacttcgacgtcacacgggcgctgcgcacagacacaccaagcggcggcaccaatggcttacgtgagcaggaggtggactactgctcggaggaggtgaggtcggtggccccggccggcttcggccgccacggcggcggcgtccagcagcacgtcgtcaaggagaagttcgaggaggtcgacacggtctcacgcgccggcgccaaccaccaccaccaccatggtcaccacggcggccacggcttcgtggtgcgcgagaccagggtcgaagaggacatcaacacctgcaccggcgaggtccacgagcgcagggagagcttcctcgccagggctaactgagccgcccggcggccggcatccacgcccggtcgtgcttgcctgcgtgccttatgtatgtctgtggttgactggttgtgcaaggtcatcgtacttggctatcggacgtgcacgcac

SEQ ID NO: 3127 - DNA, 472 bp, Zea mays
  unsure at all n locations
  Clone ID: LIB3116-017-P1-K1-G2
gggaaagaaaggaaggaagcatggattagttgggtacagacttatattgaagagctggtggagagcggcgttcctgatgaagaaaggaaagccgcgatgaactctgttaatccaaagtatattctccgcaactatctctgccagtctgctatcgacgtagctgagcaaggcgattacgaggaggttcgccgggtgcttagggtaatgcataatccgtatgacgagcagccgggaatggagaaatatgcacggttgccaccagcttgggcatacagacctggagtgtgcatgctgtcctgctcctcgtgaaccccatgatgcaagacgtggagtcgtcgtggacattacaaaaatgcttgggtgcttatagtcttcctcctgtataggggtccatctttgtgcttgaatgtgtcaagcatcgcatgctattttttttccggtgatgcangtgtgtaagaaccatgtcgttgca

SEQ ID NO: 3128 - DNA, 374 bp, Zea mays
  Clone ID: LIB3116-017-P1-K1-G5
cccacgcgtccgatagcggacacggtggacatggggcctttggaggctatggtcacggtggttacggccacgggtatggtggccacggcaagttcaagcatggtcacggccaccacggcaagttcaagcacgggcacggcaagttcaagcatggcaagcacgggcacggcatgttcggcggcggcaagttcaagaagtggaagtgatgtgccctccatggttgatcgtagctgaactcaggcttccaggacatgtgttgccagtaataccttttcagcgttactcatccttcatctgtatttccagtaatccagcttgtggcgagtgacataatgctaataagtgacataaataaccatttgctgatatgctgt

SEQ ID NO: 3129 - DNA, 437 bp, Zea mays
  Clone ID: LIB3116-017-P1-K1-G8
cggacgcgtgggcggacgcgtgggcgagtaggagcaaccgcttgcgtcagacgcacactgacggagagtgatcactgatttgtggtcatggcaaccgtaactgaggaagttgctccggtcgtcaccgtctccgaggagccggcgccggaagcggcgaaggaggtggtggagaagccggaggaggggaagaagcccgacgaggagggtgacgagaggaagaaggccgaccccgccgccgagaaggagaagaaggccgaccccgccgccgagaaggagaagaaagcgaggaagccgcggagcaggaagcccaagtccgccgggctgcaccacccgccctatttcgagatgatcaaagaggcgatcctgtcgcaggacggccggaaggtccgggcgagcccgtacgcgatcgccaagcacatgggggagaagcaccggga

SEQ ID NO: 3130 - DNA, 370 bp, Zea mays
  Clone ID: LIB3116-017-P1-K1-H11
ccacgagcgggggtccccggagacgattcgtgacccgcgcgggttcgccgtgaagttctacgacccgctagggcaactgggacctgctgggcaacaacttccccgtcttctttatccgcgacggcatcaagttccccgacgtgatccacgcgttcaagcccaacccgcggtcgcacgtgcaggagtactggcgggtgttcgacttcctgtcgcacctccccgagagcctgcacaccttgttcttcctcttcgacgacgtgggcgtgccgtccgactaccgccacatggaagggttcggcgtgaacacgtacacgttcgtgagcgcggcggggaaagcgcaatacgtgaagtttcactggaagccgacgtg

SEQ ID NO: 3131 - DNA, 341 bp, Zea mays
  Clone ID: LIB3116-017-P1-K1-H12
cagagcgcacttgctcctagtgccagaattacacagaaggggggggggggactaaaataaccttctaacatccagtcgcggaagagtagacgggagaactagcgctagcggagagcgcgtaacaacaacgaagcgaggaaccccctgatgagcaggaacctggagaggaatggcaagaacaccagcatgacaacaacaacaacaggtgctggcaagaacgagacacctagccgcggagaacccaacacttaaaggagcagaaagcgtccgaccaaaacagaacaggcgtaagggctcttcttctaagcatcggcaggagctggccaattcccacgcccccg

SEQ ID NO: 3132 - DNA, 439 bp, Zea mays
  Clone ID: LIB3116-017-P1-K1-H2
cggacgcgtggggactactcgaggaaggagtgggggtcgcaaggttgctccaggaagagacccgcccgcgctgcggccagagattgatggccaggcggcagagcaacggcgcggcgggcaggcggtcggggccgagctgtgcccgacggtggcgttcgaggggcatgccgttgctacttggggaagaaggccaaaaatcgatctcagtgcgtggctccggcgttgtagatctgctcgcgtccgatggcgtcggagatgcaggcagtcgcgtgcacgcgcgggctttgaacaaccagatctctggtgtgctggccacgcctggtgacggccagccagctgcacgtgcgatggccacaccctggccacgccccgtgatggccagccagcgggacgtgcaatggccacgccccgtgatggctccggcgaccacgaatcgtcg

SEQ ID NO: 3133 - DNA, 308 bp, Zea mays
  Clone ID: LIB3116-017-P1-K1-H3
gcgacacgtacggtctcctgcatatgtacagtagcaacaactactaccattcagccagctagctgctgtgagccctgctgccgtcttgacacagcaacaattgttgtcgttctacctgcacgctgcgcctaacgttggcaccctcttacaactgcaacaattgctgccattcaaccaacttgctttgacaaacccagcagcgttctaccaacaacccatcattggtggtgccctcttttagattgcttatgagttatagttcaataataaagtttttttgatgaataaaaaattatttattttaaatt

SEQ ID NO: 3134 - DNA, 388 bp, Zea mays
  Clone ID: LIB3116-017-P1-K1-H6
cggacgcgtgggcggacgcgtgggcggacgcgtgggcgcagctgacggacgactgaaccaccgacagacaacatggccgcctccgcctccaccgtctccggcctcgccggcgcctccctggccagccgcccggcgttctccaccagcttcacgcggggcagccgggtgtcggcgaggaaccccctgatgagcaggaacctggagaggaatggcaggatcacctgcatgacgtttccccgggactggctgcggagggacctgagcgtcatcggcttcgggctcatcggctggatggggccgtccagcgtcccggccatcaacggcaacagcctcacggggctcttcttctccagcatcggccaggagctggcctcacttcccacgcccc

SEQ ID NO: 3135 - DNA, 446 bp, Zea mays
  unsure at all n locations
  Clone ID: LIB3116-017-P1-K1-H7
cccacgcgtccgcggacgcgtggggcgggatcgagacgagcacggtgggtctgggatgtgaggccgtcaccgggcaggtcacggaggtcaacaaggacaccttctggcccatcgtcgaggccgccggcgacaaggtcgtcgtcctcgacatgtacaccgaatggtgcgggccttgcaaagtgatggctccgaaattccaggagatgtctgagaagaacctggatgttgtgttcctgaagctcgactgcaaccaggacaacaagccgcttgcgaaggagctgggcataaaggttgtgccaacgttcaagatcctcaagggtgggaaggtcgtgaaggaagtgaccggcgccaagatcgacgagctagcgcaagccatcgacacaatcaagtcagactgacaaagaaagcangtgatgcaactagctagtgtagacgatgaatgaatg

SEQ ID NO: 3136 - DNA, 331 bp, Zea mays
  Clone ID: LIB3116-018-P1-K1-A3
cccacgcgtccggaacgtcgacggatacagcccaatctacaacgaggatgactggtctcccaccggcgacgtctacgtcggtgggaccactgggcttctgatctgggccgtcaccctcgctgggatcctcggcggcggcgccctcctcgtctacaacaccagcgccctctccggctaaggatatccaatgcatgcgctttttgcgattcgtcgtgtaaaatcagggtgtctgtctataatctagcctccatggatgctcaacctttgtcatgtaacaataatcagggctactcttcattacataattttgatgctatatttatatacccca

SEQ ID NO: 3137 - DNA, 443 bp, Zea mays
  Clone ID: LIB3116-018-P1-K1-A5
cccacgcgtccgcggacgcgtgggcgggaggacgacatcacacagccatcgccggccggaagctctcagctctgagcagaaggaggcgggtcgtcacactcacacccgtcagcatgagcgaccgcaggtacgggtactcgtacccgccgccccaggggtactacaacaacggaccaccggtgatggcgccgccgccgtaccagtacgcagctcctccaccgccgaggagggagccgagcttccttgaaggatgtctcgccgctctgtgctgctgctgcctcatagacgagtgctgctgcgacccgtcggtcatattcgtgagctgatccggccgcagtccgcagcacatgccatgccattgtaccagcccaagagacatgtcgcatgcatacgtgtgtgttcgcatgcacttggcgcctcttgttggtgatagatgatgtttt

SEQ ID NO: 3138 - DNA, 468 bp, Zea mays
  Clone ID: LIB3116-018-P1-K1-B10
cccacgcgtccgctctcatgtatggaagagaagatccttggattagacctatttggggccttaaagttaaacagcaagtgcgccgaagcaccttattatggaattagccccgctggtcattgtcctcatgatgaggtccctgaggttataaactacttgctccgtgggtggctgaagaacctcgagtctgagggctcagtcgacctgccgtttctagaagaacgcagctatgctgagcgtggtgtatccagggagctggagtttgtcagagaaggatcaaggaagtcagttagtgtgcggctctatggtaccaagattttcctatggagccagctaagctcattcttgaacacacgtgttcccaagtcacggatagtcttgagataatccaatcctaacctcaatagatctcaatcttagaagctttgattaagatattgtatttattactttattaaattggtcagc

SEQ ID NO: 3139 - DNA, 369 bp, Zea mays
  Clone ID: LIB3116-018-P1-K1-B12
attatatagaaaagagtgttgctttggtctacgagtctaaaactatattactgctatgtggatgagcttcttactggtggtgaattacagtaacatgtggcggtgacatggcacaacaagaacttgaagaagtagacatgttgctgttgcctgcagggtgacgtctatggtggtgtgctgtgagcaacgcccacacaatgtgatcgggctgcacgccaatgttcaacatgtgccccaaccagaacatgtatgctactactaatataacatttgtcattggttggttcacccccagaggtttgctgcatgttcaatgagctagtggataaaaaatttttcgtgttctttttgcgggttaatagatgacat

SEQ ID NO: 3140 - DNA, 368 bp, Zea mays
  Clone ID: LIB3116-018-P1-K1-C10
gaggcgaacacccccatggcggcggctggctgcggcgcaggagggaaggtatccttcgagagcatcctcacctccgaccgggggctccctttcaaagtgttcagcgtgcccgaggcggcgccctttaccgcggtgctcaagtacgccgcggaggagttcaaggtcccgccccagaccagcgccatcatcaccaacgatggaattggcatcaacccccagcaaagtgcaagcaacgtgtttctgaaacatggttcggagctgcgtctcatccctcgcgatagggttggagctgtagtcatgtcttccggttagaggatatatacagtccaatgcataatgagcaaaacttgagagaaataaagctttga

SEQ ID NO: 3141 - DNA, 405 bp, Zea mays
  Clone ID: LIB3116-018-P1-K1-C11
cccacgcgtccggctcattttccgcactctcagttcatagttgtctctttaaaagagggggtgttcaacaacgccaatgtgatatttcgaacaaaatttgttgatggtgtgtccaccgtgacacgaacagtgccttcgaaacagagatgaccagtttacacatcatgcatcttctgaaccaaaactaggcatataattccaaatctgtcattttaaggagctgctataatcaaacattttcgctgtttattcagccaggaaaattattccatgaaagctgaaccccacaattacttgacgctgatgcctcaagcccctcgcttgtcaagcaatgacatcaaaataggtgctgtaactgtaatctcatggcgtgacgttcatgatgacctcgactggcttctacat

SEQ ID NO: 3142 - DNA, 425 bp, Zea mays
  Clone ID: LIB3116-018-P1-K1-C12
cggacgcgtgggctaggcgccctgaccccaaccgtgccctgatgtaaggttaatccgaatgctgaagtcatgggtgcgcttgcagtcacagcgtctttagctaacaagctcgcatacatataggcaacttgagtgagctatgtagtacggatatggttgtgtggcaaactgccaatgactattgacatccttgcatatattgacatgtgacaaggatcaacctgcaaaactggtgccctgctactcgcagaccttattatcttaaataacacaggtggtgtgtttttcaattatgtgaaaaccttggccttgtttggataatttatggtgtgattggattggttgtagttgtaggacaaccggtgacagcctcttcagcgtctctgttcgtcctgccaattctgatctactgctagggacgacac

SEQ ID NO: 3143 - DNA, 327 bp, Zea mays
  Clone ID: LIB3116-018-P1-K1-C4
aaatccccggtccggcccacccttccgaaaaaaaaaaaaaaaaaaaaaaaaaaaaaaatttttttaaaaaaaaaaaaaaaatataaaaaaggggtggaatttaaaaaaaaagtgggtgggaaaaaaaagccctccctttttaaaaaaccaaatttaacttccccttccttccaactaaaaattttttttatagttcccccaaatttaatttaattcccctccttttaacaacttctaaactggaaaaccccttcgcttacccaacttaatcccctttaagaaaatccccttttctccatcttcccaaaaaccaaaaaacccctaacc

SEQ ID NO: 3144 - DNA, 448 bp, Zea mays
  Clone ID: LIB3116-018-P1-K1-C8
cggacgcgtgggtctggtatcattggaatttattcatcagtttgacaaataacggcttaggggcaccagaaaaagaggggggcatgattccacagtccgtgcagtgtcgtggtttaaggatattgaaatggtgttcgttgttctggaccgtttgaagactaaatatcttcagtcatgtatacaataaatcttacagtcggtgaggaaattgcttgttaaatcttgcatttacttatataactggtttccagcagcaataagtctatatgtaaaacttcttgatttgtatatgctatgctttctgtggagcagggatacttactcttttttttttacttattttgtttttattttatgttatattttcattattttttttttaatttttttatacttatttttattgatttattttttttttttattatttattgtgttccctttttta

SEQ ID NO: 3145 - DNA, 217 bp, Zea mays
  Clone ID: LIB3116-018-P1-K1-D10
cggacgcgtgggaaaaaaaaaaaaaaaattttttttaataaaaataaaataaaaaataaattggggttaattttaaaaaaggggtggatataaaaaaaaattatttaatattaattttaaagggcggccttttttaaatatccaattttatatccctttctttcaatcttattttttttttatagttttacctaaaataaattattttccctttttt

SEQ ID NO: 3146 - DNA, 214 bp, Zea mays
  Clone ID: LIB3116-018-P1-K1-D12
cgcctgcccgcccgccatggcgaccatagccacgatggccctgctgaagcccgccaggatcgtggcgcggtcggcgccgccgtccaccatctgcagcgtctcgctgcgcgtcccggcgcgggccaagaaggccgcggtgtccgtgttcgtgtcgtccgcgctggctggcgccttcttcttcgctctggctttattggacgctgcgctggcggtg

SEQ ID NO: 3147 - DNA, 150 bp, Zea mays
  Clone ID: LIB3116-018-P1-K1-D7
acggtatcacctaggccttagcaacttcacaaccgggaagggcaaggtcaaccttggcggggtccaatatccgtccacgtggggtctttatgtgcaatgttgttcccagaagggctaccgggatggtttaaggggggtttccatccataa

SEQ ID NO: 3148 - DNA, 267 bp, Zea mays
  Clone ID: LIB3116-018-P1-K1-D8
cggacgcgtgggcggacgcgtgggcggattcttgggcggacgcgttggctgaaattggggaaaacttgaagtagggtggtaaaaaaaaaaagggatattaaaaaaaaaataaggaactttttttctaataattaaaatcatttttttgattttttttttaaatttttaaaaggattaatttatattttttaagggtgtgaaaaataaaattattaattttttttttttttaaaaaaatttttttattatgttaataatttttgtaat

SEQ ID NO: 3149 - DNA, 67 bp, Zea mays
  Clone ID: LIB3116-018-P1-K1-D9
cggacgcgtgggcccctacgcccgtttctcttttgttgcgcaacatcagaacacaagcgaggaaccc

SEQ ID NO: 3150 - DNA, 322 bp, Zea mays
  Clone ID: LIB3116-018-P1-K1-E10
ccaagaaccaaaggtagctagctagccgcgactcgttggctagacgattcaagcagcagcgcaggatggtggcgccggtggtgattgcgtcggccgggctgggcatgctggccggcgtggcgatggccaaccggtccctcgggaacgggctcccggcggcctccaggtgggacgcgcgcccgcgctgcgccacgtgcggcggctccggccgcgtggagtgcatctgcaaccgctggtccgacggcgactccggctgccggacctgcgctgggtcggggaggatgccctgccgcagctgcggcggctccggcacgggccgacc

SEQ ID NO: 3151 - DNA, 342 bp, Zea mays
  Clone ID: LIB3116-018-P1-K1-E12
cccacgcgtccgctcggccactgctcagctctcgctgcagcgatggccctgcaggccccgtgactcatgcgcgcgccggcggcgcagcggtccgcgccgccacggccctccttctccgctccgtggtcgccgcggctgccggcgccggcgcggccccgggtggccacggccgcgcggatcaccatgcgggtcgcgtccaagcaggcctacatctgccctgactgcgggtacatctacaacgacaggacgccgttcgacaagctggctgacaactacttttgccctgattgtggagccccgaagagaaggttcataccctacgagccgccagttttcaagaac

SEQ ID NO: 3152 - DNA, 198 bp, Zea mays
  Clone ID: LIB3116-018-P1-K1-E4
cggacgcgtgggcggacgcgtggggcagcgtcatcagcagcagccaccagctccggtccgtcacgtcctgctcggtggcggtgcacctcccgcaggcgtcgccgtcgtgcgttgccaccgtcagctccgctcgcgggctccatcttgtcttccaccacatcatgcacgatcacggcggcggctcttccgtttttttct

SEQ ID NO: 3153 - DNA, 111 bp, Zea mays
  unsure at all n locations
  Clone ID: LIB3116-018-P1-K1-E7
cccacgcgttcgcccacgcgtncgtttactttttcggcaaggacccctgatgctacagcaggatctgctaaagttgggcgtggtgagaagcacataaaagctctttttttt

SEQ ID NO: 3154 - DNA, 357 bp, Zea mays
  unsure at all n locations
  Clone ID: LIB3116-018-P1-K1-E8
ataatgtacattggcctgatgatgatcttactactgaaacaataacttangtcatgtgcgaccacctgaacctgggagtgaagactggcctgccatacatcttgcacagcaaggctagcaacccctttcttaactttaaaaaagaatacaagggcattttcttgcttgaggacattattcccttttttcagaacgtgaccatccccaaggactgcgacaccgtccaaaagtgctacatttacctcttttgacaaagtaaagagaaacttggcaccaatgacccctacttttgtaagctcggtgacgccatggtcacctggaacgaggcctgggatgagcttaacccgtcgacccctg

SEQ ID NO: 3155 - DNA, 444 bp, Zea mays
  Clone ID: LIB3116-018-P1-K1-F10
cccacgcgtccgcccacgcgtccgcccacgcgtccgagcggcaaagcagctcaagctgcgcgtcctctcgctgtccgggtgtatgaaggtcacccagaagagcgtccctttcctaggcagcatgtcttcgtccttggaggggctgaatctccagttcaacttcattggcaaccacaacatcgcgtccctggagaagcagctctggcggtgcgacatccttgcttagaggaacacggcggttattcgtcgctggagatgctaggtcaaccttctccggatgcaaatacacgaccgaagcagtagtttagtactcaagtctatgctctgtagttgagtctggtttccggctcgtgtttgtgtcatggtgggtcttctgttcgtcgtcgtcctagggccaattgtttttccaagggggggtttttttcggaggctcatttttttgca

SEQ ID NO: 3156 - DNA, 309 bp, Zea mays
  Clone ID: LIB3116-018-P1-K1-F11
atcaaacaagagagttgaaatgaactccatggaagcgtaattgagtgtatttatcatgtgtgcaaacttcgctcagctgagggagaaagcacacctgagtttatggctgtatgtgtgtatactcaggtgtaagccttgttgtctttgaaatattcctgcacttagaaatatacctagttcgcgttttcaaaaaaaaaaaaaaaaaaaaaaaaaaaaaaaaaaattgaaaaacaataaaaaaaaataaaaaatattataatcaaatataaaatttattaaaaaaaaaaataataattacatagggggggg

SEQ ID NO: 3157 - DNA, 427 bp, Zea mays
  Clone ID: LIB3116-018-P1-K1-F12
gacgagagtggaggagggctgctgatgggcggaggagacgaccggagagcggcggcgctgcagcgatcctcgtcgccatggagcgtgggctagcggtggcgggcgcacgccgggatggtcctcgtcatgctcgcctacagcggttaccacgtcctcgccaagtccgtcctcaacgtgggcatgaaccaggtcgtcttctgcgtctaccgcgacctcctcgcgctcctcgtcgtcgcccccgtcgccttcctccgcgagagaagggttaggcctcccgtgacgcctcagctcctcgctttcttcgctctgcttggcttcactgggctgtatgggaacccgctcctttgtctcgtcggcctccgctacacaaacgccttctacgccgcggcttttcagccctccataccaagtgcttacgttttttttg

SEQ ID NO: 3158 - DNA, 359 bp, Zea mays
  Clone ID: LIB3116-018-P1-K1-G10
cgacgaaacggttcaggagagcctcggtgtccgcaaggtatagcagtcctacgtgctcgatcgtgcatgcacgcacaggggggtttttttttttctctctctctttttcttgaggaaacaaaagccaagattttcagtaaatttggtatcgaacacacactgaacatccctgcaacttttgttgttaagaggttgtttgtttaggactataatctgtctagattatataatccaacaaataatgtgttatttgctggattatataatctggacagattatattcttaaacaaacacccgctaattttttcaggggacaattggagcgtggaaacgttgcaaccaggacatactttacaa

SEQ ID NO: 3159 - DNA, 387 bp, Zea mays
  Clone ID: LIB3116-018-P1-K1-G11
cccacgcgtccgctcatccgaattcccaggcaggcaggtcggcgaggagggcaggaagaccgaagaccgagccgtgcgggggctcgggacgggaacgggacaggaccccaaaatctcagatccttcctgcccgcccgcccgtgcccgtcgacgcgtcgttcttgccggccgcgccccacctccgccctctcctcctccagggggatcggatacgccacaggctgcgcgatggtgctgtgggtcttcggctacggctccctcatctggaaccccggcttcgacttcgacgacaaaatcctcggctttatcaagggctacaagcgcacctttaatctcgcttgcattgaccacagaggcacaccggagcattcggcgaggacctgcacg

SEQ ID NO: 3160 - DNA, 432 bp, Zea mays
  Clone ID: LIB3116-018-P1-K1-G5
agagcttacgctgctggggttatgggcgagcccgttcgtgctccgggcgcgcatcgcgctcagcctcaaaggcctcacctacgcttactccgaggagaacctcgacgacaagagcgagcttctcctcagctccaaccccgtgctcaagaaggtgcccgtgctcatccaccacggcaagcccgtctgcgagtcccagatcatcgtgcagtacgtcgacgaggctttccccgccgccgcacctaatttccttccatccgacccctacgaccgcgccattgctcgcttctgggcctcctacgtcgacgacaagttctacagcgcgtggatacccgtgttcaggggcaggacggcggaggagatggcggaggcggcgaggcaagccgtcgcggcgctggagacgcttgagcaggcgttcagggagtgctccaaggg

SEQ ID NO: 3161 - DNA, 417 bp, Zea mays
  Clone ID: LIB3116-018-P1-K1-G6
gcgagaagaaggcggacaaagagaagggcggcggagagaagaaggccgacaaggaaaagggcgacggagagaagaaggccgacaaggagaagggcggcggcgagaagaaggccgacaaggagaagggtgccgacaagcccaaggaggagaagaagaagcccaaggaggagactgtgacgctgaagatccggctgcactgtgacggctgcatcgagcgcatcaagcgccgcatctccaagatcaaaggcgtgaaggacgtggcgttcgacgccgccaaggacctggtgaaggtgaccggcaccatggacggcgccgctctgccggcgtacctcaaggagaagctcagccgggacgtggaagtggtggcgcccggcaagaaggacggcagcggcggcggcggtgacaagaagacaaggg

SEQ ID NO: 3162 - DNA, 318 bp, Zea mays
  Clone ID: LIB3116-018-P1-K1-H10
agttgaagaagttgtctctcaagctgagaatccaccagcgaagaataacttctacttcgacgatctatggagtagacccagagcctcctgcaacacaaggcaagccccggtgatgaaacagccaagttctgttgtttttgctcaaaggtgatgccaaagcaggaggaagaacactaaacttgtttgggggaggatgttttgtttcccaattatgtaatattaagttctgcactcgaacaccttgttatgtaataagtactctttctatattttataagaatgtaaattatgttattggtgaaaaaaaaaagttaattt

SEQ ID NO: 3163 - DNA, 275 bp, Zea mays
  Clone ID: LIB3116-018-P1-K1-H11
ccacgcgtaaaacactacacgacaccaattttagcagcttgttatgccaccaataatgactctcattaactgcagcatcttcaagatcaagcgcgccctaaaacacccgcaagccccctccgactaatcaccgacgaatcgtttgcatctgtccaatcccaagggccaccacgccgatttactctaactggcggccgtattcgacgtcacggtcaccacctattctgtcaaggccactatcttcgatcactaccttaagaaaaacaaggccaaca

SEQ ID NO: 3164 - DNA, 401 bp, Zea mays
  Clone ID: LIB3116-018-P1-K1-H2
cccacgcgtccggtctgatgattctgatgaggatgattctgatgattctgatgaaggcgagggagtatctcctgacgaaggcgatgatgattcaagtgatgaggatgataccagtgattatgaccagggagaaaccccaacttctaaaaagccaaaggcaggcaaaaaaagaggtgctgaaaatgctcttaaaacacctcttttttataagaaagcaaaagttgccacacccccagcccaaaaaacaagtggcaagaagggtgccacccatgttgcaactccacacccagcaaaaagcaagacccctgcaaacaatgacaaatcaacggagaagtcttcaaaatctggtgggtcagtcccttgcaaatcatgcagcaagacattcaatagtgagatggctc

SEQ ID NO: 3165 - DNA, 226 bp, Zea mays
  Clone ID: LIB3116-018-P1-K1-H4
accgacgcgtccgtggacacttgggctgcgcctctacatttctttttttactgctcatccgcctccgcctgatccatgcaaaacagggatcgccatgggggactcggaggagcaccactttgaatcgaaggccgacgctggggcgtccaagacctacccgtagcatgctgtcaccgtccgtaagaacggctttatcggcataaataaccatccctggctggttgtg

SEQ ID NO: 3166 - DNA, 461 bp, Zea mays
  unsure at all n locations
  Clone ID: LIB3116-020-P1-K1-A4
accgccccgaaanncccgggccgaccaacccgtccggttgaacttaagtttgttggactgagggtttttaactcttactgggtgaatgaggatagaccctacaggtcctttaagataatccttggggactttgccaacaaagccataaaaaccgacccggggatcaactggttttgcaaccttgtgcacaagaaccggaggctccggggcttaacttaagaaggcaagaagaaccgtggcctgcttggcaagggccaaacccacaacaggaccaggccctaagggagagccacctggaagcgcaaccagaccttttccttccgccgttaccgttaagaaattcgtcggttgcttggttactgccattgtccgatcattccaaataaaaaaaccaagcgggcctgtttttggttgcattttaaaagttttgttatttgggttcttggcacttttaatgttag

SEQ ID NO: 3167 - DNA, 295 bp, Zea mays
  Clone ID: LIB3116-020-P1-K1-A7
aacggccggaatcccggtcgaccacacgcttccggcactagttttagatcgaagcggttccttattttttgaaattttcaaccgttttaccagtggacagtattagtggtcggggtgggaacccattcaagttaagggcttgggttgcgtttggactccagggcaaaattgtcttaaggatttaaaggaaaagcggactttatttgagctgggcataattaaaggacacccttgttgttattgttagggggccaattgctcacttgaaatttaggtattgttgtttcccattgta

SEQ ID NO: 3168 - DNA, 308 bp, Zea mays
  Clone ID: LIB3116-020-P1-K1-B3
aaaaaaaataaaataaataaaaaataaaaaaaaaaaataaaaaaaaaaaaaaataaaaaaaaaaaaaaaaaaatataaaaataaaataaaaaaaaaaaaaaaaaaaaaaaaaaaaaaaaataaaaaaaaataaaaaaaaaaaaaaaaataaaaaaaaaaaaaaaaaaaaaaaaaataaaaaaaataaaaaataaaaaaaaaaaaaaaaaaaaaaaaaaaaaaatataaaataaaaaaaaaagtaaaaaataaaaagaaaaataaaaaataaaaaaaaataaaataaaaaaaaaaaaaaaaattaataa

SEQ ID NO: 3169 - DNA, 217 bp, Zea mays
  Clone ID: LIB3116-020-P1-K1-B5
ggccgagcacacccttccgccacacccttccggccacagtgtattattaacactgatatcttttacttaagccaacctctatttgcctccaaaatactaattaacgcgcagggcataaacataataaaggccaaaacctcaaaaaaagtatgggccctcaaccttgtgaagctaccaagaatcttaaaagaaggtttcattatccttcccatttttt

SEQ ID NO: 3170 - DNA, 366 bp, Zea mays
  Clone ID: LIB3116-020-P1-K1-B7
ccggccgaaattccgggccgaccacacccttccggaatttaatggaattgaactggtaaagttgttggaaaaaagcaccggtttaatgacaatggaggcttccttgtaagggggcggggtaaatatttgtttgatacctgaggtaccattaattgttgatggaccgaatggagtttttcgacatttcgaacacttgttaaaaaccaagggatttgttttggtttgcgttgctgaaggaccaggacaggattattttaaaaagtaaaatgcaactgttgcataagggaacatggtttttagggacattggtgtgcaccttaagcaaaaaatcaagtcccattttaaggacataggagtccattttga

SEQ ID NO: 3171 - DNA, 428 bp, Zea mays
  unsure at all n locations
  Clone ID: LIB3116-020-P1-K1-B8
cggaanncccgggcggaccacacccttccgccacaaacacacttcaacaagttttacccgcctctaatccgaacggnccgaatggcgcaaaaggatcaaattttcctagtgcagcttcaattccttaaagttctttccccggatgcacttccggaacaactttttttaggaacacggggcgcattgcaaccgtgttaggatttttttctagaaatttaacttggttcccttatacttttataatcctttattcctaaattccatatcttattttttatactcttaaatttatctttaatatgtatttaattttattttttataattaaattattagtcttgttttatttattaatatattttttttatttttatatttttataatttatttattaattttttttattaattatattattatttttaat

SEQ ID NO: 3172 - DNA, 445 bp, Zea mays
  unsure at all n locations
  Clone ID: LIB3116-020-P1-K1-B9
cgaaaacccgggccgaccaacccttccggaaaaaaaaaataataaaatcaataccactgtgtttcctcctaaantttcaaattcaatccgggaaatttccaaggcaaaatgttttaaattctaaaaaaattttcaaaaaataatcaacttcttaatccacactccaaagaataattataatccaaatgattccatctatccattttaagttttccttcatcttaacctttttcattttaatcttttgtcccattttttttttaaataaatcactacattcctccaacttaccttttttttattttcaatttcccctttattaatccacaatccaattttaatattttatttaatttaatatcattatattttttattttctaattatttttaatttctttttttatcctcctttttatttatttctttattatttatcttttttt

SEQ ID NO: 3173 - DNA, 444 bp, Zea mays
  Clone ID: LIB3116-020-P1-K1-C11
cgggcccggaattccggggtggcccacagccgtccggccccaccaaaccggagggggggctaaggacaggccctgaacttttgttgaatccggtcctgttttgccgaaccgaagcagaaaaatgtttgttggagacttaaatcaattccatccgattaagcttgaaggttaagcaggcagatgaatgggagaccatttttgccaagaagttctttaggttttggtcaatgggggcagaggctttccaggggttggggagaaaaccggttcagggttatgatatcagtttcctgttaccaaactaccatgggggggccatgcttaagcccaagctcatagatttaatcgggcaattaatggaggtttttgccagggagatcagcgggctgaagctgtcagtaaccacttctggccggttgggggccactgaatttttgaagcagt

SEQ ID NO: 3174 - DNA, 377 bp, Zea mays
  Clone ID: LIB3116-020-P1-K1-C12
cgaaatccgggtcgaccacacccttccgccccccttccgcaacggtttggtgtattacttttgttcgttctgatttttaaccggctttttgttttaagaatgggggggaccctctaaataataaactgcatgtattttgtccaatccattaaggaataaattgtggccagcattttggtttacttaaaaaaaaaaaaaattaaataaaaaaaataaaaaaaaaataaatattattaaaaaataaaattaaaaaaaataaaaaaaaataatttatggggttccccttttaataatccaacatatctaccccttcattccaatttttataatttttttttggttctccaaaaaaatattaatttgcccttttttttaat

SEQ ID NO: 3175 - DNA, 198 bp, Zea mays
  Clone ID: LIB3116-020-P1-K1-C5
ccgggccgccccacccgtccgaaacctaccccttcttaaaggaaggccttcctttattttttcttaaacctaatcgccccccacggcaagtttatttaagaagggggccggacatggaaaaagtgaaaaccttggcttccggcaattttaccggcccgctcactcttgcttaataataaatatttatcctttcctttc

SEQ ID NO: 3176 - DNA, 315 bp, Zea mays
  unsure at all n locations
  Clone ID: LIB3116-020-P1-K1-C7
aaaacccgggcggaccaacccgtccgaaaaaaaaaaaaangaaaaaaaaaaaaaaaattaaaaaaaaaaaaaaaaaaaaaaaaaaaaaagagaaaaaaaaaaaagagaaaaggagaaaaaaaaaaaaaaaaaaaaaaaaaaaaaaaacaaaaaaaaaaaaaaaaaaaaaaaaaaaaaaagggggggccccactaaaaaaacaaaatatataaaccctagatacaaaaaaaaaaaaataaaatataagagaaacaaaaaaaaaaaaaaatgcccaggataaaaaaacataaaaagaaaaaaacccgggttccacac

SEQ ID NO: 3177 - DNA, 265 bp, Zea mays
  Clone ID: LIB3116-020-P1-K1-C9
ccgcaccccccgaaaaaaaaaaaaaaaaaaaaaaaccaaattttattaattaataaaaccacaaaaaacccggtacctattaaaaaaaaaacgccttataaaaatccaaaaaaaaaaaatattgcccccccttaaagatcccaattctttctccccggtccatcaccgtatatttttcttttgctcccccaaaaattaacccaatggcctaatttttccaaacggcctctttgaaaaacctctcccttcccccaaaaaaatatct

SEQ ID NO: 3178 - DNA, 423 bp, Zea mays
  unsure at all n locations
  Clone ID: LIB3116-020-P1-K1-D1
aaggggnggaaaaaaaaaaaaaaaaaaaaaaaaaaaaaatataattaatataaaaaacacaaaaaaaaacctggtaatatataaaaaaatttaaggccccatcccattccataaaaaaaaattttttgtgtcctcccctttaaaattcccaattttttccccctcgttctcgaatcataaatctttttttattccccccttaaataaatttttccgccctctttttaaccaaacccttactttaaaatacctgttttcccctaattaaattttctttacacaaattccttttttctccattctattttatcctaaattatcctccctcctttctttcattaaaaaaatattaaataccttttttgtcttttttattcttcccctttctttctctctctaaattccccctttatttttttctat

SEQ ID NO: 3179 - DNA, 451 bp, Zea mays
  Clone ID: LIB3116-020-P1-K1-D11
cgaaatacccggtccgaccacacccttccaccaacccttcctccaacccttcctttatccctatttttaaaattctatcccaatattacttgtccaattttaaccaagaatcgtgctaacaaaaatttaatatacattaaatatcaacataattaaatattccatttaaattaccaaaaatttaaaattaatttaatttctatatttttaaatttttaaacccatctatatttttcattaaaattatattatatctttattaatattttactatcttttattatcattaatttttttatatattattaattatctcatatcaattatataatttatatataaatatatatttctttttataatgttttattatatattttatattattttttataattataactttacttaatattctataatataattttactttctactatatatttta

SEQ ID NO: 3180 - DNA, 249 bp, Zea mays
  Clone ID: LIB3116-020-P1-K1-E2
ggcggaccacccgtccggcggaaatacataaaggaagattggtggcctattccttttaagtccttaaacaataaggttgcacaatagattttaaggaaatgaaaatgaggataatttgaatggtgataataacaataaaggcgattatttgaagaactgaccccttgcccttggttcaaaatgttgtccgtggataatgtggctggccggacactgaacctttttggaagattttttgttgtggttgtt

SEQ ID NO: 3181 - DNA, 295 bp, Zea mays
  Clone ID: LIB3116-020-P1-K1-E3
ccgggcggaccacacgggtccgccacacccttccgaacaaaagaaccgttgccaaaggtggtaaaaaaggcgccggcggaggaaccggacgcggcacctcttaggaagggagagccgaggaaactccagccatgggggtccggatccgtttggcccggttcggttgccggaatcggcctttttaccggttgatggccgccgttagccgttcccttggggacggcaggaacttgagggtcttcggttactttaacccgtttccagggaaggttggaggcaaaaggatgggccttaa

SEQ ID NO: 3182 - DNA, 313 bp, Zea mays
  unsure at all n locations
  Clone ID: LIB3116-020-P1-K1-E8
tccnaaaaaaaaaaaaaaaaaaaaaaaaaaaaaaattaaaaaaaaaaaaaaaaaaaaaaaaaaaaccgggaaaaaaaaaaaaaaaaaagagccccaaaaaaaaaaaaaaaaaaaaaaaaaaatggcccccccccccaaaaaaccccaactaaccccccccgcccaaccacctaaaaacctctttaaaagggcccccaaaataaaaaccccgcccccccttttaaaacctcctaaccggaaaaacccctcccttccccacctaaaaacccctcaaaaacaacccccctttccccaattccccaaaaaacaaaaa

SEQ ID NO: 3183 - DNA, 464 bp, Zea mays
  Clone ID: LIB3116-020-P1-K1-E9
ggccggccacacccttccgttttaatttaaagagcgactaaattgaggaatataccaagcgataacctaatttggaacgcgaaatccttcctcaaggggggggagcctcttcccccgccgcccagaaccatttgaagctgatccctggcatccccaacaacttgtccttggactgcttggccccctttctctaccctttcaaccgatcaaatcgctgggttttctcttgttttctttatccctcttttattatattttctttctttttaattttattatttttattatattactcatttttttaattttatttttatattatttaatgtgtttgggtgttattttttattattaattatattcattttttaaatattttcatattattttaaatttttattatttttttaatttatttttctttttttatcttatttattctatatttatttttttattttttt

SEQ ID NO: 3184 - DNA, 479 bp, Zea mays
  unsure at all n locations
  Clone ID: LIB3116-020-P1-K1-F10
cgggnccgaaattccgggttggaccacacccttccggaacaaaggaccttcggcccccgttaagaatcaaaattttcccaagcaagttttgggtgggccttttctttttgggaccacttcaaaggtttttggggtagttggccattttaacaaataaagttttaatgtttgatttcaaaattaaaatccaaactgctttgaatcctttggttgaggccaatgttgggaactttggtgcggaagaagggtaaaaggactacttcaacgtccccatccagaagcgaaatggtcgaaggagcctgaccaccgtccagggattgaaaaaggagttaagttccagcaagatccttaaaaaatttaaagaaagagttttgttgaattggaccaggggtccaggaccaaaaacttgacaaggtaattaagttccagggggatcagaggaagaccgtttggaatttcttggtccaggccggtatggt

SEQ ID NO: 3185 - DNA, 253 bp, Zea mays
  unsure at all n locations
  Clone ID: LIB3116-020-P1-K1-F11
cacacccttcctaatcaatctatttctattccccttttcaatactccaaagaatcgaaccctttccagtgccctgtttcattataaattgcctcggcaacctatattccaccnnaaacttttttctctttccctcctttttttttttttacttatttattttttttatacattcttttttttttttttctttcctttttttaatttttatattttttttatttttttttttcatttttttttcttttttatat

SEQ ID NO: 3186 - DNA, 309 bp, Zea mays
  unsure at all n locations
  Clone ID: LIB3116-020-P1-K1-F12
cgaaancccggggccgaccacacccttccgcccacccttccnttttaacttttaatgtcatttttcagaaaatcttaccaaaattgaaggtggcttttatcccattgggtttgaacttccnaaaccaaaattccaatataaattttaaagttaccaaatttgtaaaaaaatgtaattatttttttccaactaatttttttaatgttcccccataatttaacatgtttaacctttttaaacacctattatacactttttatttcacaactttttacaataacttttaattttacttaaaaaatttctttt

SEQ ID NO: 3187 - DNA, 373 bp, Zea mays
  Clone ID: LIB3116-020-P1-K1-F3
cccttccgaagttcacctgaaccaacaagccctcccaaattttttttaacaagttccagaactctctcaatcactagaaggttcctaacctttcggggtccacacttactttaatcggttcaaaccttaaccactacatccgaaaactgttttacaacgggttgatcaattccaccatgagttccaaagtcttaaatttaagcatggccaagccttccataaagttcaacagcacccatttcccataaaagttattgaatttccttatccaacccccttaaaaaaatggtttttttccattcaattaccaaccaaaaatttttcttttgcattcccaaatactatccaaaccattccaaattataatattccc

SEQ ID NO: 3188 - DNA, 159 bp, Zea mays
  Clone ID: LIB3116-020-P1-K1-F5
aaaaaattaaaaaaaacattccaaacatatttttccaatcctgaaaaaattgaaaattttaaactataatttccaattacttttaataaattcctttttaaaaaacaacattttatttatttgttttttactaatataaatttttaatattattttttt

SEQ ID NO: 3189 - DNA, 415 bp, Zea mays
  unsure at all n locations
  Clone ID: LIB3116-020-P1-K1-F8
cgaaatncccggtccggccaacccttccaaccatccaaacttccaagttaccaacaactgttccagtttttttccaaacaataattgaactgaaaatttaaaacctttatgggcaaatttttcctaaaaggcctgttttcccaccgaaaccaccaaaagtttaacaatctatccattaaaatttcctaaaactacacttttccaaactaaatggaattaacaaccttccaatctgttggaatatattgcaacctagtaggattaaaatatttatttcaaaattaaaaaaaccttccattgaaattttctaaaatcccttttaaaaaaatntaaaactcgtatgatcaatatataccacaactnttatttaattctatggtataatttttatacaatttacagaataactttttcc

SEQ ID NO: 3190 - DNA, 269 bp, Zea mays
  Clone ID: LIB3116-020-P1-K1-G11
ggggccgaccaacccttccgcccacccttccaaggtaatcaacatcaccattttcaacctttgcccatccaaatggtcccagcagggccaattttgaggttattttccccacccccaatttaatccgaaaccccttcttggaacgtcgtaaaatggtcttgaatgtcttcaacccaaaccggccaaacgtttcaaaggacaagctccttggaaagctcgttaagctgtccaaggccaaaaaggacaatttttccgttttcggtttaaaa

SEQ ID NO: 3191 - DNA, 287 bp, Zea mays
  unsure at all n locations
  Clone ID: LIB3116-020-P1-K1-G3
ccggaanncccgggcggaccacacccgtccggccaactaaccctacaaaaaactttccatgtctacttttaatgcttcgcaaccgcaaccaaggtgttggtcggtttttctgtgatgaagaagtaaatgtccttaaccgcagtttcaatccaagctaatattaaatttggtgtaacgtgagccctcaaaataaaggttccacatgtttaaatggttttaatgtcagtcctaacctcaaaaaaaaaaaatatattattatataaatttatatttattaatatatatat

SEQ ID NO: 3192 - DNA, 283 bp, Zea mays
  Clone ID: LIB3116-020-P1-K1-G6
ggggggaaactgcctaaaaaatatttaacaaaccattttaccaattccggccaatctttcctttggagagtgtgccaatttttgagtggaccaacctttaatctcctccccaaccagttttttaatcacctaaccaacctgcttcaccatcccttctctttccaaaccttccccaacttcccatttaaaaccttaaaaaaaattccaaggtttataccaattccggtgattcctcccaaaaggaaacccttaataaaccttagccaccccaaaaacccttttt

SEQ ID NO: 3193 - DNA, 499 bp, Zea mays
  unsure at all n locations
  Clone ID: LIB3116-020-P1-K1-G7
cggnccgaaatacccggttccgccacacccttccaaaaaaagttttttccttccagccatccaaattctattttccccccccccccaaaggaaaaaggagacttataaggtgttgtttggtgcaaaaaaaacttcccttaatttatattttgttatggttttccttaaacattttttctcatttttttattatatttatttttttttttttttaaatttatattattatttttatttttattttctttttattattttatttattctttttatttaattattttttatttatttttttacttttttactattataattttatttttattacatattttattttatttaatattttattttgttgtttgttgatattattttttaatttattatttatttatatttattttttttatttatcttatatataatttttttttttttattctttttttttaattatttttattttattttttattctttttttatattttat

SEQ ID NO: 3194 - DNA, 331 bp, Zea mays
  unsure at all n locations
  Clone ID: LIB3116-020-P1-K1-G9
aaatnccggggccgaccacacccttccggttgtgaccaatcgccactttccaattacttccgttccggagggaatcatgaaggaggggcggcaactgaaagcgggggcgttcggttttccgcccccggtccacccggggcccacccccttggggtggatcggcatcggcttaatggccgggcccttggccaaccccttcttctcggcagggtccccggtaaccggttaccctcgaacgccgtccagggcggaaagccttttctcggcggccccaagctctccggactttccgtcctctttgtcctccttttccacactggtttttaccatg

SEQ ID NO: 3195 - DNA, 401 bp, Zea mays
  Clone ID: LIB3116-020-P1-K1-H10
cgggccgaccacacgcgtccggcagggcccaaaattaagtggcctttttttgaaaggtgtaaaatgctgaaagataaaatatggcgcggcgttttttttgagaaggatgggtttcaaagtgtttttataaccattccgttgtccaaatttaacttggatttttttccggttaaaaaaaaaaattttgggttgttttcaacagtaaaaagggttttaaaggggttaattccatcctttggccatgatcttgatggccttttatttaagggttggtacaatccttatgtaactcgaactaattaaggtttcctgaagtgtaaatcccttgggatgaattttttgtattttcttttccgcctttccaatgtattcttttacttggttttcttttttgagtgggt

SEQ ID NO: 3196 - DNA, 373 bp, Zea mays
  Clone ID: LIB3116-020-P1-K1-H12
cggggccgaccaacccgtccgaaaaaaaaaaaaaaaaaaaaaaaatttttaattttaaaaaaaaaaaaaaaaaaaaagagaaaaaggtgaataaaaaaaaaggggaggggtaaataaaaggggcccccctttttaaagaaccaaatttaccttccctgtctttgcaaattataatttttttttttgggcaccaaaaataaaataaattgcccgtgttttaaaaactttggacttgaaaaaaccttggtttacccaaattatatctttttgaataaaatccttttttttcaagttgggtaaaaacaaaaaagtccttacctatattctctttccaaaaatttgccaactttaaattggaaattggaacccccct

SEQ ID NO: 3197 - DNA, 140 bp, Zea mays
  Clone ID: LIB3116-020-P1-K1-H2
acacgcgtccgccacacccttcctcccacccttccaatgttgcattaatttttacaaaaactaatttaaaccatggtattgggacgtttacccaggagttagcacaccaaactatcaatggatccaccatgaggccgggg

SEQ ID NO: 3198 - DNA, 401 bp, Zea mays
  unsure at all n locations
  Clone ID: LIB3116-020-P1-K1-H4
aaanncccgggccgaccaaggggncggngaacccccggnccgccccaaaccagnnaaattccatcttgaaaaaccgaacccctaaggggaacgggttgaaggcggcttgggacaggctcgccttaattttaatcgcttcctccccaatcgccaaaggtcttttgccggaaaattccaccccgaaaagtcctcttaaaggccttcaaggccggttttccaccccaaatttcttaacaaacttccagccactaataaaccgaataaaggaaatcggagaaagttccggaaggacttaaacccaggtgggcctaaactgcttgttttcccagggcaacgtgttgccaatcccggcccccaaaaacccctaccagccccggaagttccttggcccttttgggtga

SEQ ID NO: 3199 - DNA, 434 bp, Zea mays
  Clone ID: LIB3116-020-P1-K1-H5
cttccggggtgtctaaggatctcctgacctccttccttcttgtccttttcctcccttccccggttacggaggtcctgttggttgctacggagaattactacaacaacaacggcaaggagaaaacaagtaaaccaaaatcttcttaacctaagaagcctaaccgccaattgaaaactttggccggttgttagaaaaaagtgcaaaattgccaaaactagtacgccgacaacaacaagcagaagtttgccggtttccaaggagggcggcaacggcaaaacaaccctttccgggttcggctttggcggcgtgaaaaccaaggtgctgaaccctttccaaaccaatttttggcaggtgcaaacctttttggaccaaaaccgcttcctgttcagggggatcaaccccaaccacgagtccaaggggcccgggaacttttc

SEQ ID NO: 3200 - DNA, 323 bp, Zea mays
  unsure at all n locations
  Clone ID: LIB3116-020-P1-K1-H7
ccgggccggccacacccttccgatttaataattatactttgtccaattttaccattaatccaaccttattaaatttgggcctgtgccacttttactatgtgccggggataaaaaaaaacnaanccatttaaaaaaaatccttttttttcttttaatttttaacaagaatcccttccacttttcccaaaatgctttttccaatttacaaacccacagttgtaccattaactacctaatattttttttttttaaagtaaattttttttgtttccattaaaccctttttttttttttttaaaactattaaacaatttaccattttt

SEQ ID NO: 3201 - DNA, 298 bp, Zea mays
  Clone ID: LIB3116-021-P1-K1-A1
cggggcggcccacacccgtccgttaacatttaatggggttggcaaaagcccattttgtttgttgattatcccacctggccattggctgttattaaggccattggatggggctggcccgttttcaaatggctctacataattgccttttacttcctgctgcccataataaatttcctaatcctgctttaccctaagtaggagggcttggaacctcgcccttaggaaaacctagggggtgccccgtccattgcaccggaagaattttcggttttgcctcgccccatatttgaccggatgt

SEQ ID NO: 3202 - DNA, 359 bp, Zea mays
  Clone ID: LIB3116-021-P1-K1-A11
tccccggccgaccacccttccggaagctgttgatgaaggcaaggcatatctccttcccctgcccgaagctgatcctcccgagggggaacctaactttaaggagggcccagccttccccagccccggttttgcctgcagtaacagaggacaacggcccgaactgggggtgggtgtcggacctgggattgaagccaaggcatttccaagccccggcccgttgcctccccccaaaattaataaaagccaaaacgggacccccgccatttcaaaagtctcctttggccgtttgaaccaacttttttaactatatttaatttttagatttgcgaggaattgattaatctattttagaaataaca

SEQ ID NO: 3203 - DNA, 400 bp, Zea mays
  unsure at all n locations
  Clone ID: LIB3116-021-P1-K1-A5
cggaaancccgggncggcccaaccctcccaagaaaaccccatgcttgggtttccggggggccaggttgggtttatggacccctgaatggccggggttccaagcccgggccattttggaagctgttttagcaatgaccaaccagggggttcaagggttcccagagataatggttccttttgttggaacaccacaggaactggggcataaagggacttttatccgccaagttgctgaaaaagggttcgccaatgggggcaagactttcgggtccaaagttggaacaatgattgaaatccccagggcagttttggtggctgatgaaatagcggaccaggctgaatttttttccttcggaacgaacgacctgacccaaatgacctttgggtccagcagggatga

SEQ ID NO: 3204 - DNA, 464 bp, Zea mays
  Clone ID: LIB3116-021-P1-K1-A7
ggccgaccacacccttccgaaaaaaaaaaaaaaaaaaataaaaaattttattttaaaaaaaaaaaaaaaaaaaaaaaaaaagagggttaataaaaaaaaaaaaaggaggggccccccctttaaaagaaccaaacttacctaccccttcattccaacttaaaatttttttattagggcacccaaaataaaatcaattgcccgcgttttaaaaccttcttacctggaaaacccttgccttacccaaattaaatccctttgaaaaaaatccccttttcccaagttgggtaaataccaaaaagcccccacccattcccctttccaaaaatttccccaccctaaatgccaaatggacccccccctttaccgccccataaaccccgggggtttgtgggtttaccccaaaggtaccctttacaatgtccaagccctatacccccgttctttttgttttttcccttcttttt

SEQ ID NO: 3205 - DNA, 491 bp, Zea mays
  Clone ID: LIB3116-021-P1-K1-A8
accccgggcggaccacagccttccgacccgtttgaagttgaaggcccttttgaacttccattcccaaggttgcaagtccgtccatggggaaggtgtgcctgttaacgggcaacaaaagcatcctcggggcgttggccttggtggccgtcgccgctttgatgttggtggccttttggttgccccggccgggccgccggggttttttttggaagcacggccacggcccatggccggccaagccgttgttccggttaaaagtcgtcgttggaggtttatgatcggttaaaagtcgttgtgacccgccagaagtgccatgcctggtcaatctggaactgtttgcttttttgtaccccgggtagcatttgttggttctgaaaccattatgcttttgacagttcatgtttttgggtttgggaaaaaatatttatttttttttaaattttttttttttttcaatattttttttgttaatttatattttttttttattt

SEQ ID NO: 3206 - DNA, 487 bp, Zea mays
  Clone ID: LIB3116-021-P1-K1-A9
ggcggaccacccttccaagcttgttagttggataagttctgggttgttcgggggaatgggccaccaccaccaaaagagtgatttaccttaaaattgggagatgttgtttttgttagtggaatggaaaggttaaagattggggaaattgtgactcctaggaagggaaaatttccggttgagttgattcgttttttgtaataatggaactggtttattttaatgtttgaaactttgattttaacggtccacattttttcttttttgggatgagatttttgttttaagtattatctttaattgaatttgaaagtgttggacgtggtgttgaatttttttttattttaatttttttttttttcttttatttttttttcttttatttttttatttatttttacttttttttttcttttgtcatttatatttttttattttttatatttatcttacttaatttttttttttttcatctttatttttttttttt

SEQ ID NO: 3207 - DNA, 323 bp, Zea mays
  unsure at all n locations
  Clone ID: LIB3116-021-P1-K1-B1
cgggncggcccaggccttccgggaacacctacaaggtatttgccactgatctttggactgaccccactccatggccattcaaggagacggcctataagctttagggtgggggggaaacatggaccctttgggaaagtgccatactatggtactgcaccgggtgtagtccatcagcctaattttgctgcaacatttacattcatagcaggggaaggggcaaaaggtctaatgaagtcccaaccaggttgtaatttcagggtccaccctttaatgcaccatgtccccttccgaattttaagatcgaagggttttttggataaaat

SEQ ID NO: 3208 - DNA, 282 bp, Zea mays
  Clone ID: LIB3116-021-P1-K1-B10
ccgggccgaccacacccttccgaccattattttgcggacctgtcccagtcttttcaaagttgttttccaaaaaaccatttgccgggtattcaataatattggggcgcccgtccaatcaattaatctgttttttccaatcaaaatccaccggtacctgttttttattttttaaccttttccacctgaaacctattccctattttttttttaactttttccacctaaaatagtagtcatcgaagttttttgattggatccaccaatatttttgattgtttggtt

SEQ ID NO: 3209 - DNA, 381 bp, Zea mays
  unsure at all n locations
  Clone ID: LIB3116-021-P1-K1-B11
cgggnccggaatccccgggccgaccacacccttccaaccttttgtttttggtaaagaagccaggttttaggaggcggttagaccattttgtaaggggcaggatttggttttagggcgcggtgcgcacctgaccaaggctattcttttgggcctctgcaaccggcgtgaaccacacaccgctatcaacctgttggcgtccatgatatcagggggttgcttgccaaatgaatcgactaacactatactggttgaaggctggcctaatgaaggctgggtaaaggaggcaggagaattgttggctaaattgtgctctaaaggagttgtgattaaaaaccttatgaagaagggatccattaaattgctaaatgggcctacacaaac

SEQ ID NO: 3210 - DNA, 270 bp, Zea mays
  Clone ID: LIB3116-021-P1-K1-B12
cgaaattccgcggccgaccacacccttccggtcttatgcaaacacagccactgaaggcttcctaccagatgatggggtaaagctaactggccttggtttaaagaattaagggggttcaaccaatgttcaatagtcaaattttggataaccggaaattgggccttaaaatttgaagagttgttggggttaagcctcggaaccaaataaaaccggccggacctattccccttgttcgttggtgtaaataaaggttgaatttgaccgggcccc

SEQ ID NO: 3211 - DNA, 351 bp, Zea mays
  Clone ID: LIB3116-021-P1-K1-B2
ttttcaactaacttttgttttaccaacactcattgcccatccaagcagctttttttaacctttaggtttgtctaaaaccattaccccttttaaaaaataccatactatgtacctcaacctcttttaacccattaccctaatttacctcaaccttttccatccataccataaaaagtgccaaattttttattaaattcccacccaaattaattattatatttacccccctttattccaccaatccctcttccaaatcctaaaatctaatgttccttataataatatccaattcccacttttattcactaattcttatttttttcacccacattttttcaataatctttttat

SEQ ID NO: 3212 - DNA, 423 bp, Zea mays
  Clone ID: LIB3116-021-P1-K1-B7
aaataccggtcggacaacccttccgccacacccttccggaaccataaaaggaccattattgtcccaccattgccacccaaaaggtgtgggcctcttaatcctcctggggggttctcaaaatcctgttacggcaaccattttcccgaattgttcgaaggctctaatagtttccttttttcccccgtacctttaacaagcggggttttcggattgtaaaaacccaatttttaaaccttccaggatccaacaggcaataacagttggcatttaaccttaataacccttgttcctccaccaataataagcctaataacataagttacctttggggcattaattgccccaaaccataagggcccaccacctccaacaacttgtgctagcaaaccttgttgcctactttaagaaacagaagttttttcc

SEQ ID NO: 3213 - DNA, 403 bp, Zea mays
  Clone ID: LIB3116-021-P1-K1-B8
aaatacccggtccgcccacacccttccgaaaccattaaaaatccttgttttaattttttataaaaaaaaaaaaaaaaaaaaaaaaaggaaggaaaaattaaaaaaataggaagggaaaaaaaaaaaaaaaaaaaaaaaaaaaaaaaaaaagggccgccccttttaaagattccaattttccttccccttccttccaacatattatttttttttttgggccccttaatttaattcccttgccccccttttaccaccttcttactttgaaaaccctttcctttcccaaattaattccctttgaaaaaaatccccttttccccatttgccttaataccaaaaagcccccacccattcccctttccaaacatttccccaccctaattgccaattggacccccccttt

SEQ ID NO: 3214 - DNA, 256 bp, Zea mays
  unsure at all n locations
  Clone ID: LIB3116-021-P1-K1-B9
attccggttggaccaacccttccgccacacccttccggccttgccggcttttccttctaaaaccgcggcccgttcccccccgccggggtaaggccccgatttgagggggccattnccggnaaaaacggcctaaagttaagggagcaggtgaagaacttaagggccccactcaaggttgccggggcttccgttgttttgttcgggaccaacttcaacaggttctctaagaacctaaacccccgttccgtaggccttt

SEQ ID NO: 3215 - DNA, 368 bp, Zea mays
  Clone ID: LIB3116-021-P1-K1-C7
cgggcccggaatccccgggccgaccacacccgtccgaagaatcacagaacagggagggcattccccaaaaccagcaccgtttgatttttgcggccaggcgcttgaaggatggccgaactttcccgaactacaacatccaaaaggggagcacccttaacctggttttccgcctaaaagggggtttgcaaatttttgtaaagaccctgactggaaaaaccataaccctggaggtggaaagctcggccacaatcaacattgtgaaggcgaaaatccaggacagggagggcttccccccggaccagcagcgtttgattttggccggcaaacagttgaaggatggccgaaccttagcagactacaccatccaa

SEQ ID NO: 3216 - DNA, 332 bp, Zea mays
  Clone ID: LIB3116-021-P1-K1-D12
cggaatcccgcggccgcccacacccttccgcccacccttccgattaatttcaattacaatattgggggggggggccttcctcccttgcgcgagtttgttcaaaatgggcggcgccaaaaccgccttttccgttcccgttacctcgaccccggccaacggcccttcccctgcctttttccccggcgtcgtggccttcctctttcggttccctgtttcgccccattgccttcctccatccatccttgtttgttaatttttttttccaattttttttctttttctccattattttttctctacatttttcttttttttatatttttattttattt

SEQ ID NO: 3217 - DNA, 256 bp, Zea mays
  Clone ID: LIB3116-021-P1-K1-D4
tccggaataatgatgatcaaggcgtcaatcctggtgcttatttgggccagcaaataactgttcaagacggggtacctgctgctattggcggggattttgctcggcctgaagttgcttaaaagatggaagccgggattgccgaaaagaacttcaaaattgcaaggctgcctgatagggtccagtcctatgaagctgcaaacagggaaatgtcccaaagaaaccaaaaagctatcgagacgccaaggcaacaacccag

SEQ ID NO: 3218 - DNA, 391 bp, Zea mays
  unsure at all n locations
  Clone ID: LIB3116-021-P1-K1-D5
aaatnccggggccgaccacacccttccgccacacccttccggggggatttaataagcctgtcggtccccttaagaactttccccttaccgtgggggctcccaaataacatgggccggatgttaaagggccctaacctggttcccatccaaaaataatggccctgcctcaatgttcttgggttaactgccctgcctgttgcaccggcggtctccgcaataaggctaataatgcgtgattccagcacctaccattttttcgttgttctttgaaaccgaccgtttcctttcctttttgttggaatgctgacccagacctagttttttttcattttaagggaatttttttccatttttgtaaggttgcccctttttttttttgattagatgtttt

SEQ ID NO: 3219 - DNA, 495 bp, Zea mays
  unsure at all n locations
  Clone ID: LIB3116-021-P1-K1-D7
aacacccggtccgaccacacccttccggggccttttccgcttccctggccccatatttttccaccccaaattttcccntcctcaacccgccacttttcaaagtttcccagcacctaataatccctaatccccccttgtaactttttcactaaccaattacccccctcatgcccctcccacccttttgatttaccttttcctcttttttttaaactctaacaaaccttttcctattctttaatttccctccccccttcccaattaatcacaatttttttcttaaactctttaccacaaaaaatctcttttccataaatcttaattctcaaaaatattttttttttcttccactatttctttccaaataattattattttttacactctaaatttttttaactaaaaattattttttattttctttaaattataatctttcttatatacactaattttttatttttatatattaccctacatattttttttaacata

SEQ ID NO: 3220 - DNA, 379 bp, Zea mays
  Clone ID: LIB3116-021-P1-K1-D8
acgggcccgaaattcccgggcggaccacacccttccggccaaggaccgaatcggcttttgaaaggcctttttccgaaccgacggcttcaacaaggggagggtcttcaagttggtgggaactttccttggccagtcaatcaattttttggggccgttgcgtgcccggttttacaacaacaaggtccaacggtggttaagcaaaaccgccttcaaaaccatcgccagaaagttgttaaattccaaggagggcccgcccactttcaagcagccaaagataacgatcgaaaagcttttgaagtacggccacatcctggtggcggaccagaaaaacttaaagcgtgggcagtttgtttccaggttctttaacagggcttttttt

SEQ ID NO: 3221 - DNA, 327 bp, Zea mays
  unsure at all n locations
  Clone ID: LIB3116-021-P1-K1-E11
ccggnccgaaatccccggggttgtaaattccaaccgccccttctaaagaatccaacctaccttcctcttccttccaacgtattacctctctaatggtgccacttaaatcaaattcatgtgcctccttttaccaccttctgacctggaaaacccctgccttaccccaacttaaccgctttccataccatccccttttccccagttgccttataacctaatagcccctacccaatctcctttccaaccagtttcccatcctaaatggctattgtaacccctccttttatctattctttaacctctatgttttttgtgaaaataattttt

SEQ ID NO: 3222 - DNA, 266 bp, Zea mays
  Clone ID: LIB3116-021-P1-K1-E12
cggcccggaatccccgggccgaccacacccttccaaccacaacccaacaaccctaaacaaacaggtctaccgccttcggaccccattcccggcggggcgtttactactacacggcggggcaggaaaccctgccccccaagtccttgcctgcaaaccaaaaggagtgccaggccccgaccgtaaccaaggtcctgccggcccaacggttttaccccgcctgggagtcccaccacgcagcccttaagagggccggccagtccgccaaa

SEQ ID NO: 3223 - DNA, 257 bp, Zea mays
  Clone ID: LIB3116-021-P1-K1-E3
cccacagccttccgccttaataatccatgacctgcccaaaccatttggccccagggaatggaataatcccgaccagaggccattttttttgtttaagacgggaggattaaggctgccagccaaataataatggctccaacccttgacctaaggcagcaggccctcgaccgttttttgccgaataaaaggtctgacttcaaaggcattttccggcctttggatggactcccggtgacaatccaactcctgaaccttcc

SEQ ID NO: 3224 - DNA, 401 bp, Zea mays
  unsure at all n locations
  Clone ID: LIB3116-021-P1-K1-E4
gggccggaaatnccgggtcggaccacagccttccgcaaatcttttgattaaaagcagggggtgggctttgttcaaacccttgccatggcggatcagtggggggattcggcaaacaaggggagcattaagaaggtaaccaagggcctgaaccaaggaatgggggttttgtttggggttgaaggcttcctgctgatcttttttggggggaactatgccttgattgtgtttgcccaaaaaacgctcccgccaaaaaaaaaaaacccgtttttgaaaaaaaactttaaaaaggaaaagttgaagcaggggttttttgccctggaagattaaactgccttgcggcggtgcctcctttccaaagttccttatttactggatttttagagaaaaaaattttttttttt

SEQ ID NO: 3225 - DNA, 387 bp, Zea mays
  unsure at all n locations
  Clone ID: LIB3116-021-P1-K1-E5
gccggaaatcccggggcggcccaagccgtccggtggttgttttgtgtttgcaaaaacaagctttatttttcttttatgggaataaccgttaacgcggcctcaaaccaatatgaggtgggatgaataatgttttttggctgaggaattggctcgcaaaattaatgaatccatttcaactctcaaaaaaaaaaaaaaaaaaaaaaaaaaaaaaaaaaaaaaaaaaaaaaaaaaaaaaaaatttaaaaataaaaataaaaaatatttattaatagtttaattttactaattaaattattttttattttttatattttntaaataaaaattatattttaaaaaaagggggaaaaaggggggctcttttttataattcaaatttttttttcc

SEQ ID NO: 3226 - DNA, 430 bp, Zea mays
  unsure at all n locations
  Clone ID: LIB3116-021-P1-K1-E7
aaccggnctgaaattcccggtccgaccaacccttccgaaaaaaaaaaaaaaaaaaaaaaatttttttatttaaaaaaaaatataaaaaaaaaaaaaggatgggataataaaaaaaatgtgggggaaaaaaataataattttaatataatatttttattaaataaaaaaatattataataaaaaaatttatttattaaataatgtgttttctttttttaaatattttttttatatcatttttttttttaattaattttttttttttatgatattttattttatattaaattttctcaaaataaaatttttttactttaaaattttttttttcactcaattttattttctttattatttactttttatttatatttttttttataattattattttaactcaatttatttttttttttaaaaattttttttt

SEQ ID NO: 3227 - DNA, 373 bp, Zea mays
  Clone ID: LIB3116-021-P1-K1-F11
aacgggcggaaattcccgggccgccacacccttccgaacggccttaatcccccccgcggccacttacaactactggcccaactcctacacccggttgggtttaaacatggccctggagggcttccccaaccaccgccgcctccagaactgttccaacccggcctccatggccaaccagtccttcctcggcctcaaaaagttcctggccggttccggcaacccgtcctaccccggcggcccctttttaaacccgttcggttttggcaaaaccaaaaaggaaataaatgacctcaacctcaaggaaatcaaaaacggcaggctcgccatgcttgccatcctgggttacttaatccagggcctcgtaaccgccttt

SEQ ID NO: 3228 - DNA, 330 bp, Zea mays
  Clone ID: LIB3116-021-P1-K1-F12
aacgggcccgaaattcccgggcggaccacacccttccaaaaccaaaaggcaaaaatggagttgtaccattattgccggaggatgaacggatcagggttgagggttttaataatggtgccggttccttgaaccacctaaattttttgtttgttttaaggcctaagggggcatccggcccatttgtgaacttaagtgacggcctactatttgttgccgccggtttggttggccattattaaatcaaccagggccgttttgtaaccatggaaaaggtctaaggttttgagcctggtattatttaaggcatcctaatttactgtaaaacctttt

SEQ ID NO: 3229 - DNA, 278 bp, Zea mays
  Clone ID: LIB3116-021-P1-K1-F4
cgggccggccgcccttcccaaaaaatttttccagctttttcagaaaaactttttctttcttgaacctaaaaaaaaaatgcccgacctttaaatagtccttaagatgcctcaacaaaaaattaaaggttctgctccatcagttttaataaatagttaaaataaggtttcctttttccacattcaccaattaattcctttttattctccccctttctatttttaaaacttcattttccaaatactatattttcttttcccatttcattacaatcatcttt

SEQ ID NO: 3230 - DNA, 391 bp, Zea mays
  unsure at all n locations
  Clone ID: LIB3116-021-P1-K1-F5
aaatnccggggccgaccgagccgtccaaaaaaataattcgtttaaaataaaatatatattaattatttaacgaataaacatanttaacgtagtggttatattaataaccaggggggtcaaatatggataaaattaaaaggcctaaaaggaaaaaaaaaaaaaaaaaaaaaaaaaaaaaaaaaaaaaaaaaaaaaaaaaaaaaaaaataaaaaaaaaaaaaaaaaaaggccgccccttttaaagaatcaaagttaacttccccttcattccaaattaaaaactttttaatagggcaaccaaaatcaaattaattgcccgctttttaaaacactcggaactggaaaaaccctgccttacccaaattaaattcctttgacaaaaatcccctttt

SEQ ID NO: 3231 - DNA, 400 bp, Zea mays
  unsure at all n locations
  Clone ID: LIB3116-021-P1-K1-F7
cccgggccagccacacccttccgacctagttttaggccgttttttcagttttgtttgaaaatcccaacctgccaccnccggtttcccctttccatatgtaatgtcggccctcttaatatcaactcttgttgccaattccaagtgaaaaattttgccttataatccatattgaaataataaccatcgtccattttccaaaaaaaaaaaaaaaaaattaaaaaaaaaaaaaaaaaaaaaaaaaaaaaaaaaaaatttaaataaacatttaaaaattaaaaatttatttatataataaaaaattattataaaaaataataaaaatatgggggggcccttttaaaaaaaccaaattttatttcccctcctttctaattaaatatttttttttatttttccccaa

SEQ ID NO: 3232 - DNA, 465 bp, Zea mays
  Clone ID: LIB3116-021-P1-K1-G11
gaaccggccgaaatcccgggccgaccacacccttccaatattaattaaggggcctggacctaaatggaaggggtttcctaacaactgcaaatattaagactttatttaaagacgtccgcgggaaatgaattgaggaagggacctataacctttgcttaaaaaacgtgagggatgaaatctggaccatggtaaaacccgaaaatcctttaaggatcttgttataaaacctttttttttgcaagcaaggtggaactgtccccagtttgttattaaatttccgtggttcctggcccaacaccaccaggtaaaatcttttccagtataaagtaatactaagtgaaattggcattaaatttttattttaccaataaactctatctttgttccttaaattataaaatttcttaaaaacttcttttatcctaaattttatattatttgatactaattttttttttaaaattt

SEQ ID NO: 3233 - DNA, 214 bp, Zea mays
  Clone ID: LIB3116-021-P1-K1-G4
gtccaacctaatcacagcctgttgtttgtaaccaggttttaaggtttgttatccttaaggttgttaaggcgtttgttcttgttgtcaggaggagaaatcattaattaaactggttttataacatccaccacaagaattttccttgttaactaaaaccgaaatgctctgtagttgtatttttgggtggagtttaagggtgtgttcatttaaaatt

SEQ ID NO: 3234 - DNA, 343 bp, Zea mays
  Clone ID: LIB3116-021-P1-K1-H1
accgggtccgcccacacccttccgtcaaataatggttttaatggttggaatcccgtttgcagggaccttggaaggcccccgcttgtggcggcttggtttacagggtggccgttgcaaaattaggcttgccaaagtttgttagtgacctatttttggttggactgttttaccatttgtccaaccagattgttacgaacaccttggagcggggggttcctttgccacatgctgggggcattgtgttgaagcttttgtttgtcattggcttttaaatcgtggtttttggcaccaaaattagcccccaaactggaatgggcacgtccattgccatagctggggttgt

SEQ ID NO: 3235 - DNA, 406 bp, Zea mays
  unsure at all n locations
  Clone ID: LIB3116-021-P1-K1-H2
ccccccaaaaaaacccntactaaattatttatttcccccctctcttttcttctaccccttcccacctttttttttcttcccccccccccccctctaaaaatcccaactcttccaccccccttcctttccccacctaataacctccttcttttggcccccccccaaattccaatcccccccccccctccttttccccccccctaccctttaaaacccccttcctttccccccccttatatcccctttccacccatcccccccttttcccctcttttcttaaacccaataaccccccccccattccccctctcccaccatttccccccccccatatccccattttccccccccctcttccccccccttaacccccccctttttttctcttcccccccccttttccccc

SEQ ID NO: 3236 - DNA, 329 bp, Zea mays
  unsure at all n locations
  Clone ID: LIB3116-021-P1-K1-H5
ccctccgcgaccccttggccgacacccttggccgacaccctggtaagaagttgaagccctaatnataccggccgtcttttaaatttctttggtgcccaataccctcaactagaaaatttaaccaagtccaataggttttgaaatttaataaagtccaattcctcaaagttacctaccccattctcccttgccttccttaaccctcttaccaacctcaatatttttaccctattaaaccaaatctatatgaattgtaaatctatttataaaccctttaatttaaacctaccaattttaataatctccacccatttaaagttttccttacc

SEQ ID NO: 3237 - DNA, 267 bp, Zea mays
  Clone ID: LIB3116-021-P1-K1-H6
ccaaggccgtcttgaacccaatttctttgttgggaacaaccaccccaacggggccgaattgtcactcgttctgggtggaaacaatcttaaccttaaacatgatgttcggaacctttgccgttgccacggacacaaaaccggtggttaagttggcggttttacaatttattccccaattttaaatccttttaactttttaatggctatttcctttttaaaccaatacttttttgaggtcaattttatttttaaaactttttttttaaa

SEQ ID NO: 3238 - DNA, 421 bp, Zea mays
  Clone ID: LIB3116-021-P1-K1-H7
cgaaatccccgggccgaccacacccttccgttaaaaacctacggccctttcgaacctttttttaccggaagtaccactccttcccgggccgcgcttccataaaggaatggcgcgtgctccactttctttcaacaacctggaatctacctcaacccatttgccttttacttccaacccttgtaatattaactaccaccatatccagttacctgttttgttttcctttgtcttcttcaaccgctttaatcgcccggttccaatcaaccaaccttttaatttccaactccaccattttttttcccttattttttaaatatttccaataaataaagacctcaatcccctaaaaattgcactttaattcaaccaaaaaaaaaaaaaatggccgctcttttttataaaatccaatttttccttcccc

SEQ ID NO: 3239 - DNA, 396 bp, Zea mays
  unsure at all n locations
  Clone ID: LIB3116-022-P1-K1-A10
gggncgggaatcccggggcggaccacacccttccgggaggggaggccaccaaggtaaaaaccaattggttgtttccctccgttttagctttggggtgggccaggtgcagcagccagcaggttttttttaaaaaggctggtaggggtttggggccggtaaaagaggtggcccgagattaaaaccgtcgttggcccagttgaattaagcttgccttgcaggaaaggggggggtttgggcttagggtttggccttttgaaaggcgtggtcctttccttttttccccttttcctttttggattatagggagtactccggccgcctggaaacaccgggctggttctgggccgttacctgatggtggggagggggcttggcttcgcctgtgttttgtttttg

SEQ ID NO: 3240 - DNA, 386 bp, Zea mays
  Clone ID: LIB3116-022-P1-K1-A11
ggaaccccggcggaccaagccttccaaaagtaaacccaccaagttaaaaactttatgttgaatccctccgttttacctctgggagcgtccttttccagaagccagggggttttttttaaaaaggctggtgggtttttggacccagtaaaaaaggttgtccaaaattaaaaccgccattggcccagttgaaataaccttgccttgcagaaaagtggtgtgtttttccttagggtttgaccatttaaaatccgtggtcctttccttttttcccctttttctttttggaatatagggagaactccagccgcttgtaaaaaccgggctggagttaggccgttccctattgtggtgaagttggcttggctttccctgggttctgcttttgc

SEQ ID NO: 3241 - DNA, 290 bp, Zea mays
  Clone ID: LIB3116-022-P1-K1-A3
gcaacaaaaccagggcgagattaacgggggggggggccaccccctgtcctccaagttggcccggtacctggaccggggaggcctccttggccaaggaccaactgttggacccggggcactggttccgccaggggggggggctcatttgcggcctgttttgggaagccgtcccccttgtgggggccgtttggatcgaactgttgccaaggaggattttggaggccatggggcgctttttaaggagggtcttttggtttaattaacccttttcctgctttgggggactttag

SEQ ID NO: 3242 - DNA, 416 bp, Zea mays
  Clone ID: LIB3116-022-P1-K1-A4
attccagggcggaccacacgcgtccgccacacgcgtccgcaaggacaaggagggtttctcctcggaccagcagcggttgatcttcgccgggaggcacttgaaggatggtggaaccttgcctgactccaaaatccaaaaggggagcaccctcaatttggtgctccgcctaaggggcggtttgcaaacctttggaaaaaccttgactggcaagaccataaccctggaggttggaagctttaacaccatcaacaccgtgaaggctaaaatccaggacagggaggggtttccccaaaaccagcagcgtttaatttttgccggcaagcacttgaagaatggtcgaacccttgcagactacaatatccaaaaggaaagcaccctccacctggggctccggcttggagggggttttaaaacca

SEQ ID NO: 3243 - DNA, 364 bp, Zea mays
  Clone ID: LIB3116-022-P1-K1-A6
cttccgttcttcaatgctgaacatgctctcaatctcttttgggggggccatggccgcctacggcaaggggcgcttcaacgtgcgcggggtcgccctgaacttggttgccgccgccttgaaggccacccggttggggctaatccaaatcctgctaacatccaagggcatttccttaaaccttataacctggttttactacgtggggccgggctgcctttgtttcctggtggggccctgggtcttcgtcaagctgcccaggctaccccccgtaggcaccttccaaccgaattttttcgcttttggaaccaactaactttgggcctttgggctaaaccttgctgggttcctgctagggggcaaaacc

SEQ ID NO: 3244 - DNA, 218 bp, Zea mays
  Clone ID: LIB3116-022-P1-K1-A7
tccgccaacccgtccgagggggggcggccctttgttcaaaccaggggttggttttaaccaggagggggagcgcttaagttgggacttccccgccccgtccaaaagcagggccgtttggtggccatgggtctgcaggaggagttcagaggagccccccaagaaggccaaaaccttgcctgccaccacgacgaacaagagcaagctggtcctttacggcc

SEQ ID NO: 3245 - DNA, 408 bp, Zea mays
  Clone ID: LIB3116-022-P1-K1-A8
caaggcgtccggccccgggccggagtaggttggaatcttttttcttttgagaggacttctgcaaggccaccggggagccctacaagtgcaaggggtccaaaccttgaggccagggttctttcaacgacaaaccgtccagaacggccccaagggtcctttccataaagaataatttccaaatttttcgccaaaagaaacgtttgttttttttttttttgagtggattgcagcaaccgaactggcggtccaggcttccgctttccatttcctgttggaagtcgggtagggtaatcctggggggggtttttgtttaataaaccatgcctgccaattggaatctcgtttacccaaataaaaaaaaaaataaaaaaaattatttaaggcctaaaccaaatcaatattctgggt

SEQ ID NO: 3246 - DNA, 133 bp, Zea mays
  Clone ID: LIB3116-022-P1-K1-B3
gtccgcccacccgtccgaagaagagaggagctcggccatggtttagcgccatggtccggtttcctggtggagattccctatcgctcgctggtgcgaaaggaaagaagctagcttttaccttggcgtttctggc

SEQ ID NO: 3247 - DNA, 468 bp, Zea mays
  Clone ID: LIB3116-022-P1-K1-B4
tccgggcggacccacccgtccgcccacccgtccgacgattttacaaatcatcctgtttcttggtaggccgaggggttttccagagtggtccattggtggaaaaaattaaggggctggggggatgctccctagtggctcgttaatttccccgggtcccggacctttcgtggccttcggggttctggcgattttcgggccaggttcttttttggcgagttttttcgcttttccggccaattagctgaattagggtcccgggtggatttttggtgggccaattttttatcccctggaaaggaggtggtttattttttaaagcaggggttagggttggcctttattttaatttaatttattttctttcgtttttacatttattttattttattcttttgtttattggttttttttttttcttcttcttttactttttctacgttttttgttttcttcttttctttcttcctt

SEQ ID NO: 3248 - DNA, 423 bp, Zea mays
  Clone ID: LIB3116-022-P1-K1-B7
cccggcccggatttcccggttggcccacccttccgggaaagggcatgcctccataaaacatttaattcaatttggcaccatctacttcggacccattttaatttgtggtgggcctccttcaaggctcagtaaatggcaaacaggaccttccaacaggcagcggcatgggcctgtttatggggggaaccaggggcccggttgctaaggccaactcaccaaactccatgcattcaattgccccagcttcgtttcttttgccagcaccctcggcttaaattggcattttgttgcctgctcctaagccctcaagccaattgatttcaccaaccttgtcttaaaacctacctcctttgcaaacacctgcaagccgaccttaggaacccgagccatttgagtttaaaagctcggtccaaaggttttctg

SEQ ID NO: 3249 - DNA, 280 bp, Zea mays
  Clone ID: LIB3116-022-P1-K1-C11
tggaataccagggcggaccacacccttccgagacacccttggccgaccccttggccttttcttgtggccggccccttgacccttccccggaaggattctttagcaagaaaggaggccccccgaataacccccataagcaagtcaaccaccaccgccattaacttcccaagaaacctttcaatagcctaaaaccaacagccccaggccaaaaccaccgagaagttcctcttaatcgtcaccattcctttctccttttttggcttaccctaagtccctttgt

SEQ ID NO: 3250 - DNA, 346 bp, Zea mays
  Clone ID: LIB3116-022-P1-K1-C12
tccggttccggatttccgggttggaccacacccttccgaacaagaggccgaggcaggaccccgctctgtgttgttcaccaggtccaccaagccgttggaaagcttgtaaaaccccggttggggcttacccaaggccggggccctgttgttgttgggttccgccgccgccgccggtttggcctacccgttgggggaccccgtcaacggtttttccaacgccacccgcttccggtcctttttaatttccttaatggccctccggttggcaacaaactcaaggaaggccggttccgccttaattttggccagcaggaagaagcataggaccgtgtccctaactttttcc

SEQ ID NO: 3251 - DNA, 174 bp, Zea mays
  Clone ID: LIB3116-022-P1-K1-C4
ccttccgaaggccgtaagcccacggttgcttaaggcttctttcatcgggctgggcccatacccccgcggggccccacaggtggtcaaggcagtttttgtaaagagcaccttgcgtcccgttgcctgcccttggaacggccttccggagttttgaactctttggccgttccaact

SEQ ID NO: 3252 - DNA, 423 bp, Zea mays
  Clone ID: LIB3116-022-P1-K1-C5
gggcggaccacacccttccgagtacccttggccgtcacccttggccggacttttttcccccctggggcttaaaatcaccccgagggagaaaatattaagggtggccgccaaaagcctaaaaagccgaggccacatttcctgattcctgatggttggcaggttggttagggcttgtattgcgtaaggccgtccgtattggaccttgttaagtggctagggtggttggtgtaactagtagtattattgttgtcaccagacaacgacgccaaacctgaaaaggaaaactgtgctattaactcgtttttaagtctttaataacgaagtttaaggtcccgaacttgcctgaccttggccccttaattggctcttcttcttttttggcctgtactttgcatagcaactttttacaaattttttgggggt

SEQ ID NO: 3253 - DNA, 303 bp, Zea mays
  unsure at all n locations
  Clone ID: LIB3116-022-P1-K1-D11
gggngggaatccccggccaaccacacccttccagccctcttacctattttcgccgtcctttttctcatttaaagaacttcccaacgaaggagcggggtcttaataacaacaacggggagattcccaacccactgttccctcaacccccccaacctaaacataataaccaaccacttttagttggtccccccccttccctactttaagaataagaaccttttctacagtaaaaatatcccccccctcctcccccctataaaacaaattcttttctttaagatccttaactttgtttccccaaaa

SEQ ID NO: 3254 - DNA, 365 bp, Zea mays
  Clone ID: LIB3116-022-P1-K1-D12
cggccggaccaacccttccgcccccctccttaaatccctcagccttttcttctttaggagaacctcccccccaaaagaaggatctttataaaaacaagagagaccccccccacccccttttccctctaaccccccccacctgacctaaatttcctaccacttcaagtcttcctccccccttccctccattaatatttatacccttctatactattaacatacccccaccacctcccccctaaatccaatttcttacctaaagtccctatccttgttatcccaaaaaacctcctccccccccaattaatttccctcaaaacccaagcctcttttaaaatccctccaatatctcctcttatcccaaa

SEQ ID NO: 3255 - DNA, 391 bp, Zea mays
  Clone ID: LIB3116-022-P1-K1-D3
cctttaaggaaccgactggccggggccagaaagagagaccgccccccctgtttttccaaagctaaccctaaagggggaggagggcgcccgaaggcggcattgggtttaatattggccttgggggagaatctgttcctccgtttgttggaggacccggccatgcccgaccagtttcggcggaagcttttttccaagttaaaggagcgttccaagccccctaaggcgggttggagcctccttttgggcccttacggtttttgagaccttaaccgtttaaactggaagttttcctgggttcccaaaataatccaggccgccggccgttggtacccttacaacaacctaatggaacgccattttggttggccgccgttttcttgaacacccgttc

SEQ ID NO: 3256 - DNA, 434 bp, Zea mays
  Clone ID: LIB3116-022-P1-K1-D5
gggcggacccacccttccgcggacccttggggccgcgtccaaggagattttctttaggctcggcggcctctcaaagaagaacttcaaggtgttcgccagttccagaatcggggccaccagcagcctgcctgacaagatcctcgccgaaggcccaaacttttgaactaaagcattggttccggttgattaaaacattggcttccttccttggttcctttttaaaatgtttccgccgccgccgccaaaaaaaaaggggtgggttcgatgggccaccttagtattagtttagctgggtttggccatgggggcgtctggggtggttatctataaggctgcctgccttcctaaagcagttataatatccaatttaaaattctatccgggaagcggtggtgtcaaaacaatgctttacacacccatttgcacagcctttc

SEQ ID NO: 3257 - DNA, 378 bp, Zea mays
  unsure at all n locations
  Clone ID: LIB3116-022-P1-K1-D7
cgggnngggaatccccgggtggaccacacccttccggaagcaggcggaggaggagttgtcccattgtttcattgggtttttggcgtgcctcgatggggaggcccctagccaccgttggaaggcaaaaggcctggaggaagaagcgaaagtttgagcttggtcgccagccagccaacaccaagttgtaaagcattaaaacagtggggagggtccgggtccttggaggtattgtgaaatggagggttttcggccttgttcctggtacctcctaatggggaagggaagttgtttcccgtatgacctgttatccttacttggtttacaatgctttatactttgggctggtggggcctcaatccttttttaatagtgcctttt

SEQ ID NO: 3258 - DNA, 395 bp, Zea mays
  Clone ID: LIB3116-022-P1-K1-D8
cgggcccggaatccccgggcggaccacacccttccgggaaggcttaaggctcgggggaaaggtgtctgtccagacaatcggccgtggaaagtaaaggcacagtttacccaagaggcacattcctaacaagggttgtttaactccaactccaagggaggggcctttggagcccatttccaaatggggaccattgctttctttggggcaaattttttccaaggggttcctccgaacctatcaaggggacctgaaaggtcctggcttggccaccaaaggaagcctggaattggttttgcctttcgctttaccacaaccaaaatggtgggccctctacaggtcgcaggccctggattagttgccttaagtattgtccagaaaatttccaagagggtttc

SEQ ID NO: 3259 - DNA, 270 bp, Zea mays
  unsure at all n locations
  Clone ID: LIB3116-022-P1-K1-E11
cgggncgggaatccccgggtggaccacacccttccggccccaccaaaccaaaccattaagcattttcttcaaccaaagaggcagcgaccacccggggggccccaagagggagaagcgggcgtccaccagccctcctttcaatccaattggccttggcggcagcgaccggcaaaagccggaggttccccctgccctgcgggttgcttagccatgcctttaaggccgaccagcaccaattgggggccccggccgccccggccacaattacct

SEQ ID NO: 3260 - DNA, 454 bp, Zea mays
  Clone ID: LIB3116-022-P1-K1-E4
cggatttcccggtcggccccacccgtccggttaactttttccccttcggcctggccttttattccagtggaggaaggaagcaggcctggggaggttatttcgggccccaaaggttttcagccagttccttggggaattgaccctagcgaccggggggctcgttctgattgctgcaccgggggccagacctgcacctcaattgttgattcagaaaaaggggtcctgaaaccaagatgtcgtccttgggttggggttcctatggattcaaataagcctagtcctccaggaattaagaaggcccagcctgttcctgatggtggctgctgccaaatggttaagtttggcttgggagaaaggaaatcttgctgttaaccttctaagaccaatgttggtccagggggagctgggcttcgttatgctttgcccctgcaatttttgggcccctccaagaaaa

SEQ ID NO: 3261 - DNA, 184 bp, Zea mays
  Clone ID: LIB3116-022-P1-K1-E5
tcctccacccttccccccatctaccttcccttttattcttttaaaaaagactccacgccctggaagagtatttttaaaaccaaaaagacccacccatcccacatttaaacttaccctatccaccagtttcctctttcctttatcctttacctccgtccaatccctccatcttaactttttaatt

SEQ ID NO: 3262 - DNA, 389 bp, Zea mays
  Clone ID: LIB3116-022-P1-K1-E6
ccgggcggaccacacccttccgttgcgtcggccacctcctaatcgccttagtttttccgaagccgctgtacttggcctccggggggatcggtttttgcttaggggcgcattgcccactgttgttcgccataatttccaaggtgtttgggctaaagtcctactaaacgctttacaacttcggttccgaggccagcccaatcggcccctacttgctaaacttccggttggggggggccctttacaacttgaaggccgccaagcagaacgggggttccttggcggccggtccaaccaaaacctgcatcggcttccattgtttccgaaaggcgtccctaatatttacggccgcacacggtcgccggccccctttttttgtttttcctgttttg

SEQ ID NO: 3263 - DNA, 483 bp, Zea mays
  unsure at all n locations
  Clone ID: LIB3116-022-P1-K1-F5
tccgaatttccaggttgaaccacacccttccgnaaaaaaaaaaaaaaaaaaaaaaaaaaaaatttttttaaaaaaaaaaaaaaaaaaaaaaaaaaaaaaaaaaaaaaaaaaaaaaaaaaaaaaaaagggggggccgttttaaagaaccaaagtttacttccccgggcttgcaaggtaaaaatttttttttagggcccccaaaattaaattaacggcccgcggtttaaaaacgccggaccgggaaaaacccggggtttcccaaattaaatggctttgaaaaaaatccccttttggcaagttgggttaaaaccaaaaaggccccaaccaaccgcctttccaaaaatttgcccaccctaattggaaaatggaaccccccctttacgggcccttaaagcccgggggtttggggggttcccccaagtttgcccgttaaatttgcaaaggcctttggccccgctcttttggttttttccctttcctttt

SEQ ID NO: 3264 - DNA, 53 bp, Zea mays
  unsure at all n locations
  Clone ID: LIB3116-022-P1-K1-F7
gggnnnggaanacccgggcggacccacccgtccgaaattactaccatgaaacc

SEQ ID NO: 3265 - DNA, 403 bp, Zea mays
  Clone ID: LIB3116-022-P1-K1-F8
cggaattccggttggaccaacccttccgttcctttactcaaaccttttccggaaccgtttcaacttctttccttgacccttgaacacagggatggactggttttttaaagggataaagttaaggccaccctccaaagacttgttcaaattgacaagttaatcgatttgttttttcgggggttccaaagggggcccttgtaaactgctgctaactagtctgtccggagttggcttaaacaaccgttagtcttatggagctgttcgtcggaacaaaaatcgcctccctgtttttcttctgggaagtttggattgattaattcctaataaaccggggcatagttggttttaatgtaaagggcttatagcagggcttggtaagcattaatcctgctggtttccaaat

SEQ ID NO: 3266 - DNA, 420 bp, Zea mays
  Clone ID: LIB3116-022-P1-K1-G12
cgggtccggatttccgggttggaccacacccttccgatcgttaaagcacccctaggtcctggtctttgttagaccggctttttttcctgccggggccgccttaagatagtgctgcgacccgtttcggcctctgttggcagggaaatttccccccaggaaacttacccgattcaacctttttttttttaaaaaaaggcccccgtggtttttagcttgatgcacctggatttaagctagctgttgctgtaccggtccctttgtttttataattttatggcccagcaattcttattttgacctaactgttccatggtgtccgttcccaacttccttggtggctggggcttttgtttacccattgcaggaaaggactggaaaatggctgctttaaaaaaaaaaattttccaattataaatttaa

SEQ ID NO: 3267 - DNA, 423 bp, Zea mays
  unsure at all n locations
  Clone ID: LIB3116-022-P1-K1-G4
ccaacccttccgttacacaattcaagctaatcccaccaccaatttctcctcaaaggataccataccataccaagaagccttttctaacattctacagaaacccttaacctccnntccctttatctcccctcctttctttttcactttataatttcattattcattattttattaatcatttaattcttatttttttaatattaaattattaatataatttttttttaattatttaattaataatatatttaaatactttattaatttattttataatatatttatttactatttttttaattaattcatttattattccttaaattttttaattcttctatttataatataataaattatatttatttatttatttttcttataataaaattatattaatttattattattattatatttata

SEQ ID NO: 3268 - DNA, 457 bp, Zea mays
  Clone ID: LIB3116-022-P1-K1-G6
ccttccgtttcccataggctcattcttcgaaccccatttttttgggccgggaaaggaaaaaagatttgggtgcaattcattagaaggagggagcccttccctgttttgaattccatcctcctttaaataggatttgctctaagccttcccatactttcctttattgcctgcaccatttttttccattttgcgaatccctattttatttgaagttttttactttcatttccattttctaaatcgacccactttaattaaattggaaaaattcgaaggaaaaaaaaaaggaaggggttattattaaaccaggttttccggttccataatcctgaaataaagtccttttttttgagtttactcctcattaggatgttttttttaaccacccaattttaatttatattaaccatcctattttaattaggttctataccaattagtagtaagatttttcttt

SEQ ID NO: 3269 - DNA, 317 bp, Zea mays
  Clone ID: LIB3116-022-P1-K1-H1
cggattcccagggcctaccacacccttccgtagaattaaaccttgcgcctttttcggctgttttttcctgaaggcccccacctccttaggaatgacttttttaaccatccgggaggtaatcctcctgtccctaatttccttttaccgccttttaagcccctacaaggcccccccttcttcggccctcggaagcaaggccttctaaatccccgcctaccccccctaaaccccttgaagaaaggcctctttccaattctttgttatccgtagccaaccatttataaatggcttatcgaatttttacttcgttaatagtt

SEQ ID NO: 3270 - DNA, 424 bp, Zea mays
  Clone ID: LIB3116-022-P1-K1-H10
gaattccggtccggaccacacccttccgtccaaatttcaaggatccttttggggaggtttcaaggaaggaaccggccattgaaaggggcaacctttgcctgggggaggaggaagccattccattggggggaccagctttccctggttaaggtggctggaatttttattgtccacaggatggtggcttcgcattttacaaggggcctgaaatggtttaaccagaaagccaaactgttgctcgaaaggaaaccatccattcaaatgtcgttgaaccagataattgccccaagactcaaaaggccgttttagcaggcccagagggagaaattcctgctgaaaattctggtgggccggggtctgaaatggccaaatgcaccgggatgccgaaggatgctccaccacttacagcagcaggtgcaattcc

SEQ ID NO: 3271 - DNA, 281 bp, Zea mays
  unsure at all n locations
  Clone ID: LIB3116-022-P1-K1-H11
cccgtcccaaccacacccttccgcccacccttccagttgccttttcctccccttttaacaaagtccccctcagtttagagagaagctaacttttttgagaagggggaacacccccncctaatgtgaaatcccgttcctctttcaacaggccttgcctaacccaccaccaccaagtcgctgaaaaatccctctccctccacacggaaaaccctcaactccaagattaacttcaacctcccaagaaaaatcccacgacctatttgtcccgacaagacaaaacc

SEQ ID NO: 3272 - DNA, 140 bp, Zea mays
  Clone ID: LIB3116-022-P1-K1-H12
ccttccgccttttgaagagaccctgttaaggcccttgttctttaaaccaaatccaaattcaatagtaagcatttattctcccgcgggggggtttcttattaagtcccggtaaccatttaatttagtccctttccttgcca

SEQ ID NO: 3273 - DNA, 368 bp, Zea mays
  Clone ID: LIB3116-022-P1-K1-H4
cccttccgcggaaaggccgtccccggtgccaggtttccttatttcaccggaagaatgttcctggtagggttggcccaaggccatcaggggcggaatctcttaaaagggactccagccctgaaaaacccacaggcggtaattcgccccgccccctccaaaaggtgaaaaagggtttgggcaagctagctgaagcagtgttccaccggagcccaaagaaggggattgttgccgaaccttcaccatgtgtaactcctaaccaaaacattcaaccggccggggaaagcagggtttcagtaccatttgtggccgtccaaaatccaggggtcgacggttcggggtcgaaaccagtttaccaccaccaaagccct

SEQ ID NO: 3274 - DNA, 375 bp, Zea mays
  Clone ID: LIB3116-024-P1-K1-A1
tccccaaatccacatacaacccttccccaaaaacttctcaagtttcttcgcgcccaaccttttcttttttgagaagggggctacccacatttcttttttaaaaccctattcaaaaaaccttaactacctaacatacctactgctccacccctataaaatccaaacttatcctcctctcctctttaactattacaacaatattggtccccccaaaatcaaataaattccccggtattctcatacacaaaaacctttaataacccttattttcaccattttttacactcttttaccaaatctctttttttatatacatgttatattaaaaaaaagccaatacttatcccttttcttaaaattcccccccccttatta

SEQ ID NO: 3275 - DNA, 349 bp, Zea mays
  unsure at all n locations
  Clone ID: LIB3116-024-P1-K1-A11
cttcctccaaattaatttcctaattttaatttgtccaaaataataatttttcagggcagacccattataataaagggaggggaaccttaaaaaaaaaaaaaaaaaaaaaaaaaaaaaaaaaaaaaaaaaaaaaaaaaaatatggcctcccctccaaaaaaatcaaacttaacttacccttcaatccaacaaaaaacctttttaaaatttcaaccaaaatcaaatcaacttcccntcttttaaaaactccttacactaaaaaacccttcctttaccaaactaaatctctttcaaaaaaatccccctttcccaaacttccttaaaaccaaaaaaccccaaaccaatcccct

SEQ ID NO: 3276 - DNA, 315 bp, Zea mays
  unsure at all n locations
  Clone ID: LIB3116-024-P1-K1-A12
cttcctttccccttttcctccccttaaattcactttgttttcacttaccaaaaaaaatttccaaggggaggtttttttccaattccagtctggaaccacactcctaccnccttcccctttcccttctccttaccacttaacattttnttctcttccccaacctttcctccttcccctttctttcccccctttcctaaactccaactccatcccaaaccttttccctttaatttccacccccaccttcctccacaatttcctaatccataacaaccccttattccatccccccaattcccatttcccaattttttc

SEQ ID NO: 3277 - DNA, 333 bp, Zea mays
  unsure at all n locations
  Clone ID: LIB3116-024-P1-K1-A3
tcctaccccttttccaaccctctttttctacccctttgaaaaaacccaaaggtngggctcttatcctaaaccggcccgcganaacctcctcccttaaaataaccacccttcaaatcaaaaccacccatccaccccaaatccaacccttgcctctctatttccttttaacaccaccaccaccaaaattttttagacctttacctaacatttcctccttttaaaaatcaacctttaattaacccccaaaataattattaactccttccaattttccaatttttaattttaatccctcaaaagtttactntaaaaaatcctccaccctttttattt

SEQ ID NO: 3278 - DNA, 390 bp, Zea mays
  Clone ID: LIB3116-024-P1-K1-B1
ttcctctaaccctttttacctatttttaaatcgcgtccggcctttttataaattccaaccttacggcccggtccttcctacgtaatggctggtctttatttccacctaaattcaattaactgcccgcctttttccaacttcttaacttgaaaaccccttcctttcccaaacttattctctttccacaacatccccttttccccagttgccttattaccaaaaagcccctaaccaatcccccttccaaacattttcccacccttattgccaattggaaccccccctttatctcccctttaaccccgccggtttgtttgtttacccccatttttcccatttaattttccattccctttacccccattcctttcccttttttcccttcctttt

SEQ ID NO: 3279 - DNA, 328 bp, Zea mays
  unsure at all n locations
  Clone ID: LIB3116-024-P1-K1-B5
aataaaccaaaatccatccaaatatttttcccttctatttccataaccccnaataaatcctccattcgttttttttaataaaaggccagaccttccacctttcccntttccccctttttcccttttttccaccattctccctccctttttttcctaccccaaaaccccttttattttttaaaaaatcctaaaaaccaattatatccccaactcttttccttcatcctntatcttaccaccctataaaccctttaaatttttttccccaataaccatttcccattatcctcccccttttaaatctctcccttttttcccccctatttac

SEQ ID NO: 3280 - DNA, 298 bp, Zea mays
  unsure at all n locations
  Clone ID: LIB3116-024-P1-K1-B9
atccggggccgcccaacccttcctcccacccttcctcccaacacccccttttttttttccccccttaaaccttccttaggtgccgtttttatttttcttagccgcgttttcctttaaccccnttcccataatatttttcccctccacctcaatttcctataaaaaacctctccttctccatccctttttccttttcaatcctaattcccctaccatcctccttntttcccatatccatcaccaaaaccttttactttaaccttaacaactttttcaccaccaccttccattttaacct

SEQ ID NO: 3281 - DNA, 145 bp, Zea mays
  unsure at all n locations
  Clone ID: LIB3116-024-P1-K1-C1
attccccttatctcttcccccccttttttttctaaccctaaccttttcctttacgacagctttttatttatttcagcaccgctccatttttttttntttttcctctctctttttctacaacatctctctctttttcaatttcttc

SEQ ID NO: 3282 - DNA, 259 bp, Zea mays
  unsure at all n locations
  Clone ID: LIB3116-024-P1-K1-C6
aaaaaccccattattttcccgccaagatttttttttaaatatttgcgcagccttttcctcctnnnnttttttnacaatccttttcccccaccctttttcccccatttctaccatcctcctattccttccttttttttcccttacctttaaccaccaattttttaatttttttaaaccccatttttccatccctccatttcccaccatccattctctcctatcttctaacctttttttaccctttttcctccaccaccct

SEQ ID NO: 3283 - DNA, 470 bp, Zea mays
  unsure at all n locations
  Clone ID: LIB3116-024-P1-K1-D5
caactttatctttcccttcctttctttccagcccttcctattccacggcaacgttttttttatataatccgtcagccaccctttttcttcacctttcctaccaatttaacaccaccatattccaaaccttttctttttaattcaatcttccttcatttatttttttccaactctaaattcctaaactcaaatacatttcttttatttcttctttaatcaactaattcttaattaatttatcttactattttttttccattattttaaaccnaattcttttaatatttttattaatattttttaattaattttatattatttttatcccatatattttttttattttttcttttatatcttttttattttttaaaaactatattttattttttatttttttttattatttttaatttattttatattttctttttattatattattcatatattatttttatcattttttt

SEQ ID NO: 3284 - DNA, 308 bp, Zea mays
  unsure at all n locations
  Clone ID: LIB3116-024-P1-K1-D6
gaanncggggcggaccaaagcaaacaagaaaaaggacctccccaacggaatgtctgtccttcctgccgtcccttcccttccggtccgcgtatttctaaaactgggggggggcctttaaacaccctctttaacaacctgtccaaccaatgcaacaccaccataatccaaaccctttcggtttaattcaacgttccataagtcaatttgtcccaacctaaaagcccaaaactcaaaaacagtccttttaatccttttttaatctactaaggcctaataaatttaactaccttttttttttccattattta

SEQ ID NO: 3285 - DNA, 151 bp, Zea mays
  unsure at all n locations
  Clone ID: LIB3116-024-P1-K1-E11
ccttccttttccaccctaaatttgggcctaaccaccttttttttccaaaaaatccccattttnaaggaagggttccttttttccaaggcaccgacccaccttttttttttccccaccaaatnccttaaaattcctaccaccaccaaatttt

SEQ ID NO: 3286 - DNA, 390 bp, Zea mays
  unsure at all n locations
  Clone ID: LIB3116-024-P1-K1-E12
cccttcctattccctttccccacatttttaataactttattttatttncaataccaccactccaagacaagcttttttctacacgagggagcctttttcttctaaaaaaacccctattccccccatatttcttttaaacgaaaaaatattaattgaacgccccattaacctatttttcaaaaataaaaattgtaaaaaaaattaacctttttttttccaaaaaaaacccaaattgaacccatctatatcccaaatttataacctaaccttaaatctttaacaaaccaatttattctaatctttcattcacacaaataattttaattttaaccaatcttatctccttttaaaaaaaaaattatttccccctattttaaaaaaaaataaaaa

SEQ ID NO: 3287 - DNA, 343 bp, Zea mays
  unsure at all n locations
  Clone ID: LIB3116-024-P1-K1-E3
cggggcgagccacatccttactcccacccttccnaattaatccttatataatttaacctcctttncccccacaanggcaacaggtttttttaaatgcgggccgacctcctctttctcttaatcctccaattccctcaaaaattccccttcccttataaaaacaaccacctccttcctatccactttcttcttttctttttcccctaaaaaaaaaccccacccctatttctttaacccttcttttattccttcatttcctcccactatttacatttcctatccacctacatttcctaccctttcaacttttatccccatcaatccacgcccttttttttaattt

SEQ ID NO: 3288 - DNA, 336 bp, Zea mays
  Clone ID: LIB3116-024-P1-K1-E4
attccggtttggaccaacccttcctccacacccttccttccctccgaaccctcctgtttggaacatttttaacctaaggcgggggtgttcccttgaatcaggggaggaaaacgtttccaaactttttaaatacacattagaattcaaacctaaccctaaccctttttgggtttacaaggttttccaattttctttttaccttacatgaaaccggcgttccttccgtcccggttaattttttatttcaacttccaaaccaaacggttaaatttttttttaccttttaactaaaacttttttcaaaaaaccaaccgacgaagattggcttttgttttt

SEQ ID NO: 3289 - DNA, 410 bp, Zea mays
  unsure at all n locations
  Clone ID: LIB3116-024-P1-K1-E5
tcgaaanncccgggccaacccaccctatacctttttaccttatccaacctaacttcctcttttttccaccccaacaccctttttccggtacctctttttttaaattgagcagccccccttttccaccttctttccttcaaaaccccttccttaccccaccttatcccccttccatcacacccccctttccccattttctttattaccaaaaatcccccaaccaaccccccttcccaccatttccccatcctaaatctcaaatttaccccccctcttaccttcccataaacccctctaaattttttttttccttactattntacccgttcatttttgtattcttatattcttcctcttccttttccactttcttttcattttattatttatatctttcttcttacttcctt

SEQ ID NO: 3290 - DNA, 378 bp, Zea mays
  Clone ID: LIB3116-024-P1-K1-G10
gggcggccaacccttcctccccatttcccattttcccattttctttttattcttccgtccttaactcccccgttaaggttttttttttcctgaggccgggttttcaaaatttatttaaccttccttcctttaccattttggccttatccaattttattacctacttttattaccatttttttttaaaaaactaataactctgaacctttattttttttacttccttaactttttctatagccaccattccttctttcccattttattacatttcacattatcacctttattaatttttcctaccatacatatttatgaaaacctattccttttacctttattttttcaattttaattttttttaaattatttttatct

SEQ ID NO: 3291 - DNA, 265 bp, Zea mays
  unsure at all n locations
  Clone ID: LIB3116-024-P1-K1-H1
aaaccggggccgaccacatctcttacatttcccctttccttaaatttcttcttaattttccacacccccctaacccacctttttaagaattttttttaaatttgaaccgccatccaacatccttcatttcctttatttttntccatttttaaaaacctccaaaaattcaaattcaaattttctaacctaacctttcttcctcctccacctaccacctattcctcctcccctttttccctttccataaacccaaataactctccca

SEQ ID NO: 3292 - DNA, 209 bp, Zea mays
  unsure at all n locations
  Clone ID: LIB3116-024-P1-K1-H11
acccctccttttactttttcaccaaaacccccnctttctcgagggccgtcatcttcaccttagatccggactcctttacccccntttcccccccttaccttccnccaagaccctccccccttaaaacctccaccaagcccatatccttttaatttccttattnnntcaaggctaacccaaaaaaaaacctaaaaccattccattccttt

SEQ ID NO: 3293 - DNA, 287 bp, Zea mays
  unsure at all n locations
  Clone ID: LIB3116-024-P1-K1-H4
aaaattcccctctccaacttcctttccaatttaccctaattgaaacctattaagtgggtttctcattttccacttgattggngccttnnttttnttcatatnaaccccccaaatttcccntttccttttcattttaaaaaaaaaaaaaaaaggccgccctttttattatttccaaccttacttacccttcctttcctacttattatcttttctatattttaacctaatttcattttattgccccctcttttacaacattttaacttttaaaaccctctctttaccta

SEQ ID NO: 3294 - DNA, 165 bp, Zea mays
  unsure at all n locations
  Clone ID: LIB3116-024-P1-K1-H6
cccccataaatccttttccttttgaataaccaccaaccaaaacctttcccggnaagaaaaattttaaagccggccggccttttatcccaaccttccttccccttccttccaacttaataccttttttttatttccccctaaattaaatccacttccctttttttt

SEQ ID NO: 3295 - DNA, 204 bp, Zea mays
  unsure at all n locations
  Clone ID: LIB3116-024-P1-K1-H8
ccaaaattcccttttttccttttttttttatttaccatttaacccctaaaagaaagcttttttcttaattttagtcagaattncctccannttttntccacctttaaattacctaatttcccctttaaaaatttcctatcctaattgcccaaaaactatttttttcctcccaaaaaaaccatttatcctcaaatttaaaatttc

SEQ ID NO: 3296 - DNA, 318 bp, Zea mays
  unsure at all n locations
  Clone ID: LIB3116-024-P1-K1-H9
gtaaaataaatccnngaacccaaattataatttttttaaaagaatgaaaaattaaannaaggaccgttttttttctaattcagagcgccaatcccctcctttttcaccacccttctaatcccaaaaaaaaaaaatcctaaatcttttatttaatccaaccnntttttcctaccctacctattcctatcccatttaaatccataaaaaaaaaaccccaccctctccaaaaaaaaaacctccaactcctcctaccaacccatacccaaaaaaaaaaaaaaaatccccccnttctaaaaaacccaaccttacttccccttc

SEQ ID NO: 3297 - DNA, 131 bp, Zea mays
  Clone ID: LIB3116-025-P1-K1-A4
gggccgaccaacccttccggttgttgcgtcggcggcaatttcttagtcgtttttttttaaacaaacaacccaataatatgggatgggttttattattctaagaatttatctttaaaaaattttaatattat

SEQ ID NO: 3298 - DNA, 310 bp, Zea mays
  Clone ID: LIB3116-025-P1-K1-A5
gaattccggggcggaccacaggcgtccgccaatggatcggaaaaacctcccgaaaggacatcggttggcaaacaacaacaagcgtcccgggttggttggggaaccgaagggttgcggggacaagaacggcttcaatttgccgggccgaagccggggcccttttttggttgcggtccttaataacgcgcaggccaaccaggggcagaggggggttgaagaaggaagaagcaacaacggtttgcaattgccgccctgttcggttaaagaaggggagggaggaccttatttacccggggggcctctttatagt

SEQ ID NO: 3299 - DNA, 278 bp, Zea mays
  Clone ID: LIB3116-025-P1-K1-A9
attccgggaccgacccacccaacccggaccccttggcctaaaaaaaattttaaacaattctttctagtcccttcacggaaagcaccggatgggatgagctaattaccgttcttatttctaagattttttacttttaaaaatgttagtcctgattcatgtatgtaaaatattcttctcgcatctataaattttattctttatgttttatatttttatggttaaaaaaggttgttttttcattatcatattaattttaaatttttatgctttttctctcc

SEQ ID NO: 3300 - DNA, 220 bp, Zea mays
  Clone ID: LIB3116-025-P1-K1-B11
gggtccgcccacaggcgtccgccaactcgtccggttggcattaactattaagtttggcccaccagagccaccatgggccagggggacttgtttaaaagcgggggcgctgaacccccccgttggcagaagggccgggttcctggtgggaaccttgcaggggctgccgtcaaagcgggcgtttgggccgttgtccgtgtgccgggtaaccactctccgtccg

SEQ ID NO: 3301 - DNA, 142 bp, Zea mays
  Clone ID: LIB3116-025-P1-K1-B2
tggggcccccccctgtagcggggctttaagcccggggggggtgggggttccccccagggtgccctgttaaattttccaccccctataccccggttctttcggtttatttcctttttcttctggcaagttttgccgtttttcc

SEQ ID NO: 3302 - DNA, 423 bp, Zea mays
  Clone ID: LIB3116-025-P1-K1-C1
gacccaggcgtccgcccactcttccggggggccaaggtctttgtgcttttttgggggcaggccaggagggaatcgaaaaggcgggacccagggttgttaaccaccgtgccctcttcattttgggaaggaattgtaagggaaaggacttctttggcccttttgaaactgacagggtttattttggttgaaggaaaccagaaggcttgttgttgttccagactaaaaaaaagggtggggaccttaggtgtttttttccttgggaagggtttaataacttttctggaaattttaaactttttttgtttgttagaaaccgtaaaattggcgcttgttggggtttgttcttccccatgtaaactgctttttttaatggaagttttaaaatttttgtgtggttagaaaaaggaaagttttttcaagttt

SEQ ID NO: 3303 - DNA, 309 bp, Zea mays
  Clone ID: LIB3116-025-P1-K1-C11
cgggcgcgaccacacgcgtccgcccacgctgtccgccacacgcttccgtgtgagtcttttttacttaaaatggcaccattaaggaggatcttaaactccaaactgatgaaactctgggggcccaaattaaggaagggttcaaaggcggaaaggattttgttgggactgtccagtctgcaatgggggaggagcaaatttgtccgtttaaggattttgtccccaataaacttctcttcttctgtaaacttaaccttactttttctaaactaaaatcgaaaattaagtgtatttctaaaggattatttacct

SEQ ID NO: 3304 - DNA, 422 bp, Zea mays
  Clone ID: LIB3116-025-P1-K1-C3
gggcggacccaggcgtccgagaccaattggcaccatagaaggcacaatagtgttttaccatgggcggccaaaatatttgggttcgttaggctcttgggctttttggaaggggctgttaccgaaaccattttccaacaaggttaacaggttcttatggtttctttttttccccaatacttttaaccaggggggttttaagtttgggaaaacccaatttttaaaccttccaggatccaacaggcaatggcagaaggcatttaactttaataaccttggttcttccaacaacggtaagccttattacagaagttactttgggggcattggtgggaccaaaccataagggcccaccacttccaacaacttgggctaggaaacctggttgcttactttaagaaccagaggttttttccattaaacca

SEQ ID NO: 3305 - DNA, 414 bp, Zea mays
  Clone ID: LIB3116-025-P1-K1-C4
ataaggggccgaccaaggcgtccgggacgcttggccccccgggacggtttaagttccttcagtaacaaggttatggcttgggaggccagggttttgtttaatggggaccttgtaaaaagggtcctccggtgtttgggcccttaaaagatttccgttgccgtgaccattttcgggggtcttggcattgccgggacatgggaaagggaatttggtgcaaaggttaataattgtaaaataatggtggagaagtatctgcttgtaggtcggatttttggttatcaaaatcttttgtgtttttaataaacattgatttatctttcccaaatttgtgttttctatttgtttaatggtgaaaccttgttaattgtttttcttcttataattatgatactttttttgtcaatattatttttt

SEQ ID NO: 3306 - DNA, 463 bp, Zea mays
  unsure at all n locations
  Clone ID: LIB3116-025-P1-K1-C7
cgggncgggaatcccggggcggaccaaggcttccgtcaacgcgtccgaatatggggtccaattacctaactgggatgaacagaaaggtgtccagaaggggaagggttgaacaggaaaccaacaatgcttcaacagagttggacaggattgaaaaggacataattccaatggggggtttccccaattatggattggggaggggtgattacttgataataaagggttgttggggggaaccaaaaaaaaggggggtgaccttccgccagtccttcttgaagaaaatttccgggttggggctggaggaaatcaagttaaagttatttgacaaatggtccaaattggggaacggcggtttcaaaattaccgttaagaagcaaaggttttttgggaagttaaaggcttaaggggctgcggtgaaccaaattcccttttttaaaaataattaaactgtgaatcttttgtt

SEQ ID NO: 3307 - DNA, 395 bp, Zea mays
  Clone ID: LIB3116-025-P1-K1-C8
acgggccggaatccgggcggaccacacccttcctgaccccttggggcttgcgaggacaccttggttggaggaggagagagaggacgtttttttcttttgggggtcccggttcccaaacctttggtttgttgcctgcttgcctgaaaaagggagttggcaatggggtttaagcgcttcctaagggagttgagggacctgcaaaaggaccccccaacataatgcagggcaggtcctgttggggaggccatgtttaatgggcaggcaccatttttgggaccacttgccagtccttatgttgggggggtttttttagggaccattaatttcccgccagataaccctttaaaacttccaagggtttttttaaggacaaaggttttccatcctaatttcaa

SEQ ID NO: 3308 - DNA, 284 bp, Zea mays
  Clone ID: LIB3116-025-P1-K1-D3
gggcggaccacaggcgtccgttccgatctgggtggaggcggccatcggggtttattacccaacgggttacctacttggataggagcaatgcaacgataactaaacctattcttacttaatggaccaaccagggaaaaatgttttcaacgttaggacgacaggttgttaagggtgggcaaacttgaactggacgggcgcacggatttcaatggtgccaacagaaaaggtgcggatttgagagaaattcgaccttttggatttttagagaggattttgataccgtt

SEQ ID NO: 3309 - DNA, 454 bp, Zea mays
  Clone ID: LIB3116-025-P1-K1-D5
atccggggcggaccaaggcgtccggaaggtgtggttaacgggaccatttttcttaattattaacaggttctaatggttgccttttttcgccaatactttcaataaaggacggtttaagattgggaaaaccaagcctttaaaccttacaggttccaacaggcattggaaccaggcaattaactttaataaccctggttttttaaacaatggccggccttattttgggggcagtaatgggtccaaacaataagggaacaccagttgcagaaactggggttaccagggatcagccaagtagttttggcaaacctttttccttactttaagaaccaccaattttttcaattaaaccaacggtttacattgaaccttgttgttaattggcagaaccaccaactactacatttaagccggttggttacggcttactttaagaagcaccatttttttcaat

SEQ ID NO: 3310 - DNA, 455 bp, Zea mays
  unsure at all n locations
  Clone ID: LIB3116-025-P1-K1-D6
gggaatnccggggcggaccacacgcgtccgcgacccctgggccggccccggggaacatttccaggtttggctttccatcttaaggccgaggatcccggaatttttgaaacctaaggaaggtcaaaggggggcctgttggttttgccaagcaaactttaagggcctgttggagggttaaaaaatttaatcgtcctgaaggcataaaataatggttggtggtaaataatcttttccctggtttttaattgggaatcttggctggattttgggggaatccttttttatttcccctttccatggtcccttaatttaatttcggtttggagggccagacctggagtcagttaatgtgtccaaagttgcgtttgaggctgcctgtaattgaatggtttggcatgtgaggaagatttaaatgtgttattcaactttgggggtcatgatagtggcccatattt

SEQ ID NO: 3311 - DNA, 315 bp, Zea mays
  Clone ID: LIB3116-025-P1-K1-E1
cggggcggacccaggcgtccgccacacccgtccggttttggattgggccaatttcctttaccatggaacgtaaaatccccgatccggcggtaggaagataaaatccccgcggggaccacccgtttaaaggttttccatgaggcgttaatggttgggacccgggactgaactgttccagtggcttgttcccaccgtgtaacccgaaccaaattaaagttcccccctttttttgggtttgggcgtgtgttggaactgttctttgaatggccaaacaatgacctctgttgccccttttaatggcatttgtggaaaatt

SEQ ID NO: 3312 - DNA, 427 bp, Zea mays
  unsure at all n locations
  Clone ID: LIB3116-025-P1-K1-E10
acgggnccggaatcccgggccgaccacacccttccgcgacacccttggccccccaaggacggtttaagttcccccagtaacaaggttatgggttgggaggcaattgttttgcttaatgggaaccttgtaaaaagggtcttccgtggtttgggcccttaaaagttttccgttgccggaaccattttcgggggccgtggccttgccggaccatggggaaaggaatttgttgcaaagttttataattgaaacaccatggtgaaccagaacttgcctgaaggcggcttcttttggtccaaaagtttttgtgttgttgaaaaccttgttgttactttgccaaaattggttttcaactgttttaacggtaagaccttgaaaagtgctcttccttttatgaagaaggatatcaagttggttatttttttttgtt

SEQ ID NO: 3313 - DNA, 122 bp, Zea mays
  unsure at all n locations
  Clone ID: LIB3116-025-P1-K1-E12
accacacgcgtccgttgttaaatttaacttttttgatggcttaatttaactgctgccagggaagcctttttttaagtngcagtaaggttcttttagtctgaacccttttctaaccgttggat

SEQ ID NO: 3314 - DNA, 135 bp, Zea mays
  unsure at all n locations
  Clone ID: LIB3116-025-P1-K1-E3
ggaaatncccgggccgaccacacccgtccgggcaatccgttgaataatccgaatggaaaattaattttcgctgttaagttgggaacctggccggggcttgggttaaaaaaaaaaacaaccctcccccttcccttt

SEQ ID NO: 3315 - DNA, 316 bp, Zea mays
  Clone ID: LIB3116-025-P1-K1-E5
ggcggacccaggcgtccgtttttttttttttttgggaagggaagcattttttttggttcgttttcaatggaataataacgcagggttggatccatgggctggatgaaccccggccggccggaattaattttagcccgccaacagaggcaactagataccgaaataaaaggggtaaacaccatgatcgatcgattaattatgacaaaaacccgtccaaacatgcttttataaccgattttggatccatgataataacggaaggacttcgttgatggacggaatgcctcgggtgggcgtgattttttagtatcggaac

SEQ ID NO: 3316 - DNA, 322 bp, Zea mays
  Clone ID: LIB3116-025-P1-K1-E6
cggcctgttttggaaaagggaagggcttttaacctgtttttgctgttttattttctcctccttggtcggtacatatttaaaatggtaacaatttttggggagggaatggaaaaccattcccatttttttaaacagtattataaaaggccggacctgttttttaattccagcctttatttaaacaatgtttggagtttgttaactttggaggaaattaaaaataggggttgcgatggtatttgtgtgtttgcaatttgaaatggttgttgcctgaaataattatttttggtccactggttctatgatccttaatttgtcctgc

SEQ ID NO: 3317 - DNA, 440 bp, Zea mays
  Clone ID: LIB3116-025-P1-K1-G10
ggaataccggggcggacccaggcgtccggcagtgtccaaaattaggttgcctttttttgtaggggggaaaaggttggaggaggaaataggcggaccactttttattgggaaaaataattttgggggtggttttaagggcattccgtggtccaattttgccatggattttttttgggttggaagaaaagattttgggttgctttaaccagtaaaaagggtttttagggggtcaattcaatcctttggccatgatgttgttggcctaatatttaagggttgggccgatccatatgtaactggtcttaatgagggtttcttgagggggaaataccttgggaggaattttgtggccttttttgtggggtttacaaatgatattcgtaaactgtttttctttattggggggggaaaaaggaaattcatggttggtgcccggttgg

SEQ ID NO: 3318 - DNA, 440 bp, Zea mays
  unsure at all n locations
  Clone ID: LIB3116-025-P1-K1-G12
cgggnctggaataccggggcggaccacaggcgtccgcccacgcgtccgccaaggcgtccgggtattgcttttaaaataatccagtaaaacttttaagccggaacgaggatttgttgggggccactaataaggtttgagcagggaagggatccaaaatttgttgttgggggtgggtaaccatttttggttgggtccatttgttaagttttggttggttccatattggagatttttttggtggtttccatgcttccttccactccacaaatatggtgggcgaaggatttatgtccatgcttgccagattattgccaggggttggaagttttgtgttggccttattttaaaaaagggggttggaaccgtaggtggggttgggatttaattagctgggttggtagtagtgggggtcggaatcgttttgtgaaagggaccaggct

SEQ ID NO: 3319 - DNA, 457 bp, Zea mays
  Clone ID: LIB3116-025-P1-K1-H12
cggaataccggggcggaccacacgcttccgaaccagttagttttagcaaagaattggcaatttaccgaccgccgaattcaaaacagcccgaggggttagcaaagcggaaggcacttccttcttaaaggaacatggcccgattgcagaatttggcattggcaacggcggccgggggggccttggtgttgttggcggggggaacctcggaggcggccataagttgcgggcagtgggggtcggcaatggggccttgaatttcttacccgcgcggccagggttgggggccttccgccggttgttgaaggggtttaagaagcttaaaaaacgccgccggaacaaccgccgaccggggggccgcttgtaactgcttaaaaaacgccgccgccggcgtaagggtgctaaacgccggaaacgccgccagaatcccttccaagggcggggtaagaatcccttaaac

SEQ ID NO: 3320 - DNA, 387 bp, Zea mays
  Clone ID: LIB3116-025-P1-K1-H2
gggaattccggggcggaccacaggcgtccgccacacgcgtccggggccgcgggggggccgttttggttccagggcagcttaccaagggttccggccttccggttaaaccgcgcttggttaacataaggatttttttggtggtcgggcaggggaaaaggttcgttgggtggtttggttgcccccgtgggattgtgggggtttggggctcctccggggattgtccccgggtttttatttggggggtaaagggggttttgccttgggggcggccccaaggttggccttttttcttgtggacaacgcatattgtttgtcggttggtagggtggtagggttatggtagcggggtagctgacctttttccttccgtccttgtcctgaccaggg

SEQ ID NO: 3321 - DNA, 443 bp, Zea mays
  Clone ID: LIB3116-025-P1-K1-H3
gaaaacggggccgaccacaggcgtccgaaaaaacgccggtttccggaacaaggtcttgttttattaaaacaagttgccaagcggtttggaggggtccaatatatttatggaggagtccctaaaggcgccagtggagacctattcggtgaccttaacgtgtgctgggatcttacgttttttattggaagccgaacaaaggggcaggattggtcggtaggaccccagttaattaatgcttgtttttaattctatgttcttggacttgtatgtacttctccggttgatggttgatgcatccatttttatttgtttttcctcttgtttcaccatttttggtactcttttatttatattatatatttattttataattaattatttaatatttaataggggtgctgttttttaaattttaattttttttatttttttttcttttttta

SEQ ID NO: 3322 - DNA, 223 bp, Zea mays
  unsure at all n locations
  Clone ID: LIB3116-025-P1-K1-H5
aagggntaacaaccagaagggggccaccggcccgaaggagggaaggccgggggggaaggccggcaacagcggcaacgaaggggggaccaaaaacaaggccgnaagggggaagaacagggaggcgaccacggacaaacgcgcgggggccaacaacaacaaccaccaccagggcaaccacgggggccacggaaacggggggcccaaaaccagggccaaggaggac

SEQ ID NO: 3323 - DNA, 203 bp, Zea mays
  unsure at all n locations
  Clone ID: LIB3116-025-P1-K1-H9
acgggnccggaataccgggtccgaccacacccgtccaaaagtttcaccattgtaccatggaccggggattaaaaaggagcgtcggggaagcggccgggggcccgccaccgccaaaggtgtcccggtgggagcccagggatttccggtggttggggcaaaggttaacgggcgctggtccgcccgccgccgccgccgttctgggt

SEQ ID NO: 3324 - DNA, 119 bp, Zea mays
  Clone ID: LIB3116-025-P1-K2-A1
cctaaagcccctcaggcctaagttcaccaccacgaaccaaccgccagaaagagggacgaatggcgagctctcagtgctgcgataacccgccggccctgaacccggccttgggggagggc

SEQ ID NO: 3325 - DNA, 290 bp, Zea mays
  Clone ID: LIB3116-025-P1-K2-A12
cggggccgaccacgcgtacgaaatctcccacctagggtttcggttttttgtattctacctccgcgaaaatcccaaggagcaggtttttgtaatttaggacccgccaccgagaaaagaacgaggttgacgacaacaagttctagtttgtctataaggaatacttactgtatttcttttaggtaaccatcattttttttttttttctttcaaattcatcttcctagatgggaccctccacttcttcctattttgcttttttttgtttataatgtttctcttttttctttttt

SEQ ID NO: 3326 - DNA, 279 bp, Zea mays
  unsure at all n locations
  Clone ID: LIB3116-025-P1-K2-A5
cccacgggtccgaaaaacctcccgaaaagactattcggtgagccaaccaccaccagcgtcccgcgctagctgcggaaccgaatggctgccgtgaccagcaccgcctccatctgcccggccgaagccggcgccctcttttcgctgccgtccttaatcacgcgcaagcccaccagggcagcaggaggttgcagcaggcagcagcgacgacagtctgccactgccgccctgctcgggtagaggagggggaggaggnntcttttntccggggggcccctttat

SEQ ID NO: 3327 - DNA, 312 bp, Zea mays
  Clone ID: LIB3116-025-P1-K2-A6
gttggcagcgcgccgcggcagcagagggggtgagagagaggcaaagcgagcgagcgagagagcgctggtcatggcgtcactgtctgccgccgccgtggcggccaccatagcgatgccaagcagcagcggtgggagagggcgccgtctcagggtcgcgtccatggccacccaaagggccagaagccgacgcccaagaccgtttccggcacgagaagatcgggcacgacgacggtgttcccggtgggcgagccggtcccgcggccggcgactactagcggtaaagcgccggttaagctgttgactaacgtggag

SEQ ID NO: 3328 - DNA, 227 bp, Zea mays
  Clone ID: LIB3116-025-P1-K2-A8
cccacgcgtccgactagttttagaccggtctcgcgcggcctgcgactgcgagccgaggaatccaagaagccgggccggccggagtgtcaatcgttgtttccgccggttgcgagatcggagccagcaaggacaggtcgtcgtgggactagccatgctgcacgccgggagaagaaggggaaggtgaagagagggtggctggcggtgcccttcggggcggcggagggcga

SEQ ID NO: 3329 - DNA, 375 bp, Zea mays
  Clone ID: LIB3116-025-P1-K2-A9
cccacgcgtccgactagttttagacttgtcgtgtgcggcctgcgactgcaagccgagtaatccaagtatttttttccggccggggtgtctttcgttgtttccgccggttgcgagatcggagccagcatggacaggtcgtcgtgggactagctcttgctgacgctgagagaagaaggggatggtgaatagaggttggttgtttttctccatagtactcatgtatcacttctgtttctttctttttttttttttatattattttttttattattattcttttttctttttctcatttagcttttttttatttttcttcaactatacattcttttttactcttaacttattttctttatacatctatcctttctttac

SEQ ID NO: 3330 - DNA, 396 bp, Zea mays
  Clone ID: LIB3116-025-P1-K2-B1
cggacgcgtgggcttaaagaaaagaattaaaacagttttaaggccctgtcgagataggaaccctagggagagcacattacgctctacttacgaggatcttcaccttgaaacggcgagcgccgagaagcgggtaaaaatcgcccaggccctagaaaatctgtacaggcgaagcaatatttccggagtaacaaaaggcagcagccccataccgacttgattattcaaatctgcgattgggagcgtacgaagaggtaaagaaattcactggtgtaggcataggaaaccgaggcccccaaaaccatttactatcggtgggggtggggggggaaagaaaaatcttctttgttatccattttatttttcataaaagaaattaattccttcctaccttttttt

SEQ ID NO: 3331 - DNA, 391 bp, Zea mays
  Clone ID: LIB3116-025-P1-K2-B10
gccagttcgagcgccagcggtgggccgccactcgcggcgtcgacgagtgccagatcgtgcgcgacctccccgagggcctccgccgggacatcaagtaccacctttgcctcgacctcgtccgccaggtcccattcttccagcacatggacgacctcgtgctcgagaaatctgcgacagggtgaaatccctcatctttcccaagggagaaaccatcgtgagggagggcgacgtggtgcagcggatgctgttcatcgtgcggggccacctgcagtgcagccaggtgctgcggaacggcgcgacaagcagctgcacgctggggcctggcaacttcagcggcgacgagctgcttgcgtggtgcctgcgccgcccgttcctggaacgcctcccgacg

SEQ ID NO: 3332 - DNA, 275 bp, Zea mays
  Clone ID: LIB3116-025-P1-K2-B11
cccacgcgtccggttagtcatcactactcacgttcgtccaccagagacaacaatggccatggagacgtgcttaagagcgtgggcgctgcacgcccccgctggcagcaaggacaggctcctcgtcggcaacctgcaggtgctgccgtcgaagcgggcgctcgcgccgtgtccgtcggccgtgtagccacgcgccggccgcggaacgtctgccattccaagaacgcattgtacgaagttggggtgtcggtcaagaagaactggaacggtttgtggat

SEQ ID NO: 3333 - DNA, 159 bp, Zea mays
  Clone ID: LIB3116-025-P1-K2-B3
cccacgcgtccgaaagcccagggctgccagttttatttcctaatgtaatgtagcaagagcgagaccctgttagacgggtgcgctgaaattctgaacctctgtaatatctgatgttcttgtggatacctgtttcagaattttcggttcctgaacccagtt

SEQ ID NO: 3334 - DNA, 323 bp, Zea mays
  Clone ID: LIB3116-025-P1-K2-B6
agccaccttatggccgagtctatttctgagttacagaagaaggagaggtcactgcaggaggagaacaaggctctgcagaaggaacttgcggagaggcagaaggccgtcgcgagccggcagcagcaggtgcagtgggaccagcagacacatgcccaggcccagacaagctatcatcgtcctccttcatgatgaggcaggatcagcagggattgccgcctccacacaacatctgcttcccgccgttgacaatgggagatagaggtgaagagctggctgcggcggcccaaaaccagccattgccggggcaggcccaaccgaagttc

SEQ ID NO: 3335 - DNA, 118 bp, Zea mays
  Clone ID: LIB3116-025-P1-K2-B7
gtcgtcgtcgtcgtcgtcgtcaagggacgacggccacccgccaccgccgttgcctacggcgccgtcgtcgttcggcctgggcctcgggctcttcccggcaacgggggccacccagccg

SEQ ID NO: 3336 - DNA, 396 bp, Zea mays
  Clone ID: LIB3116-025-P1-K2-B8
agcgagcgagggacccggggcggaataagatagagaagacgtctctctcctctcggcgtccccgttccccaacctctggtctgctgcctgcctgcctgcaaaaaggagtttgtcatggcgtctaagcgcatcctcaaggagctgaaggacctgcagaaagaccccccacatcatgcagtgcaggtcctgctggtgaggacatgtttcattggcaagcaacaattatgggaccacctgacagtccctatgctggtggtgttttcttagtgaacattcatttcccgccagattaccccttcaaacctccaaaggtttctttcaagacaaaggtcttccatcctaatatcaacagcaatggaagtatttgccttgacattttcaaagagcagtggagcc

SEQ ID NO: 3337 - DNA, 438 bp, Zea mays
  Clone ID: LIB3116-025-P1-K2-B9
cggacgcgtgggcgcggaccgtgagtacggtgcttagtcggacagcgaggaggagaggaggctccttatggcaaagaccttggccaagtcccgtgcgccggaacccactaatttaaagggagcgccgccctccaagaagccaaagttcaggtgaatgctgccttcgcaattcgttcgtgccaaagtgcagcagctttaagggagcaccacctccaaaaaagcaattttttttaatgggacttcctttaacttttgccccccgagtttaactttttttatagattgggattttttttttttaaaatttccaaaagtttcttttttctcttctatttttttttctttcttatttttttccttttatatggtacgctttattctttttattttttttcaataatcttttttctattcctacttttccatatttttttttaa

SEQ ID NO: 3338 - DNA, 422 bp, Zea mays
  Clone ID: LIB3116-025-P1-K2-C1
cccacgcgtccggggtgccgaggtcgttgtgttgctttggtggcaggacaggaaggaaacgaaaaagcaggagccagggttgttcaacaacgtgaccgattcgctgaggcgaggaagagtaaggtgaaggcactcgtcgacgcctttgagactgacagagcgtcatctcgtgcaggaaaccagcaagcctgctgctgttccagctatgaaagtaggtgtcgtgccatgagtgcttcttgacctgcagtgtgcatgatcacctttcttggaattttaaactttttttggttgttagtgaccgtaaaagtggcgcttgttgaggtttgctcgttcccatgtaaactgacttttctcatgggagttttcatacttttgtagtgctagaaaaaggaaagtctgtacaggttttgtgtctatgcaag

SEQ ID NO: 3339 - DNA, 418 bp, Zea mays
  unsure at all n locations
  Clone ID: LIB3116-025-P1-K2-C11
cccacgcgtccgcccacgcgtccgtgtgagttttcttacttcagatggcaacactagggatgatcttagactcccaactgatgagactcttgtggcccagattaaggaagggttcgaaagcgggaaggatcttgttgtgactgtccagtctgcgatgggggaggacagatctgcgcgttgaaggatgttggccccaagtaacttccttggctttggagacggaaccctactgtatctcaacttaaatcggaaaagaagtgtatcaccaaaggattgctaccgagacattcacctggcttgagctggcttttgctatagcgtgcaaggggttgctgggtgtcgtacctacctgacttatcattatctgnggttacattctggaccctgtattttctatgctttcatgtctctctacttt

SEQ ID NO: 3340 - DNA, 421 bp, Zea mays
  Clone ID: LIB3116-025-P1-K2-C4
cggacgcgtggccccccgaggacggtttcagttactccagttacgaggttatgggcttggatgccactgctctgtcttatggtgaccttgtcaagagggtcctccggtgctttggcccctcagagttttccgttgccgtgaccatcttcggcgggcgtggccatgccggacatggggaaaggcacttggtgcagaggtctatgactgcaacaacatggtggagcaggagctgcctggaggcgggctcctcgtgtaccagagcttctgtgctgctgaagacgctgttgctacctcgcccaaatctgttttccactgctttgacggcgagaacgtggagagtgctccttctcctatgaagaaggactacaagctggctaatcttctctgctgggaggaggaagcggatgccatggaggagaag

SEQ ID NO: 3341 - DNA, 422 bp, Zea mays
  Clone ID: LIB3116-025-P1-K2-C6
ggccgccggtgagggcgtacaggaagaacacttttttaggcggcagcggcggaaacggccagagaaggccgagcagaagcagcagcagggaggcctgtacgtgaaggtgagcatggacggcgcgccctacctaaggaaggtggacctccggatgtacaagggctacagggagtcagggaggctttggactcgctcttaaccaactccttttccgcggcggcagagggcggcggcgaccaccaccagcacgccatcgtttacgaggacaaggacggcgacctcatgctcgccggagacgtgccctgggatatgttcatctcttcgtgcaagaagctcaggataatgaagggctctgcctctgaggccaggtgatcgctgatccatacataaacagaggctacagacacgccacctggccacct

SEQ ID NO: 3342 - DNA, 401 bp, Zea mays
  Clone ID: LIB3116-025-P1-K2-C7
cccacgcgtccgcagaatgggtaccttcaccttactgagatgaacaagaaggtgtacaagagcggcaaggctggacaagagacccacgatgcctccacagagtttgacaggactgagaaggacatcactcccatgggtggcttcccccattatggtatcgtgaaggggactacctgatgatcaagggctgctgtgtgggaccaaagaagagggtggtgaccctccgccagtccctcctgaagcagacttcccggttggcgctggaggagatcaagctcaagttcatcgacacatcgtccaaatttgggcacggtcgcttccagactaccgatgagaagcaaaggttttttggcaagcttaaggcgtaaggtgctgcggtgcaccaaagtcccattttttaa

SEQ ID NO: 3343 - DNA, 380 bp, Zea mays
  Clone ID: LIB3116-025-P1-K2-C8
cggacgcgtggggcgagcgagggacccggttcggaagaagagagagaagacgtctctctcgtctcggcgtccccgttccccaacctctcgtctgctgcctgcctgcctgcaaaaaggagtttgtcatggcgtctaagcgcatcctcaaggagctgaaggacctgcaaaagacccccccacatcatgcagtgcaggtcctgctggtgaggacatgtttcattggcaagcaacaattatgggaccacctgacagtccctatgctgggggtgttttcttagtgaacattcatttcccgccagattaccccttcaaacctccaaaggtttctttcaagacaaaggtcttccatcctaatatcaacagcaatggaagtatatgcc

SEQ ID NO: 3344 - DNA, 342 bp, Zea mays
  unsure at all n locations
  Clone ID: LIB3116-025-P1-K2-C9
gggcggacccactcttttttttttttcttttccccccctcgccttttgttttgaagaagagaaaaaanacnnagtgattgttgttttttttattttggcccggcctctacaacacccctctatctttttacttttatttttttttcttttttcctatttcttttctcatttatttttttcctttccttttttccttccttctttattcttttttttttccttctttttttttcctttctttatttttccttcatttttttcttttcttcttctctctttcttatccttttttcttttttctttcttctctcttttttttttcccttctctttttttctcttt

SEQ ID NO: 3345 - DNA, 130 bp, Zea mays
  unsure at all n locations
  Clone ID: LIB3116-025-P1-K2-D1
cccatgcttttgnactacctttctcccagtctcctttttcagacaaaacagtatgcaaatggatagtttttttttatttttggccagcaccattaccccctttctaagcccagcaaacgtcattctaagc

SEQ ID NO: 3346 - DNA, 343 bp, Zea mays
  Clone ID: LIB3116-025-P1-K2-D12
gtttgctgctaccataaagaagtggttgcctcctgagccatacaagggaaagggggtcagatatatggatgaagttgtccgaaggaaggaaggaaaagccgggaagaagaaatagaaagggtttttttgccctctccttacttaatttaaattttcccactgtaatgtcttcgtctgctaaggctgaacctaagaaatatattgttctgtgctgaacgtggcatatagttgtaaaaaaaaaaaaaaaaaaaaaaaaaaaaaaaaaaaaaaaaaaaaaaaaaaaaaaaaaaaaaaaaaaaaaaaaaaaaaaaaaaaaaaaaaaaaaagggggggccgttttagg

SEQ ID NO: 3347 - DNA, 334 bp, Zea mays
  Clone ID: LIB3116-025-P1-K2-D2
tgctggatctggctgtggactacatcaaggatcttcagaagcaggtcaaggtgctgaacgacggccgcgccaactgcacctgctccggcggcggcaagctgcaggacccgttcaccagttagaaggagcagcagccggcgcgtagcagtgcgcggccatgcatggcccgcgcaaggccggcctgactgacgcctccgtgccggccggcggttaagctcgcttcgagcgctcctcctcgattggagtaagagtcgtcgaagtatagtagtatcagtgtacgtgttcggctttacatagttaactgaatgagtagtacgtagtctgttatacatgc

SEQ ID NO: 3348 - DNA, 307 bp, Zea mays
  Clone ID: LIB3116-025-P1-K2-D3
ttccgatctgtgttgatgcggccaacggagttttattaccccactggctacctacctggatgggagccatgcagcgattactacacctattcctacctcaatgacccagcagtgcagaatgctttccacgctaggacgacaagttggtcagcgtgcgcgaacttgaactggcggacgcaccgatttccatggtgccaacagtcgcatggctgattgagaagaagctgcccgtttggatttttagtggcgattttgattccgtgtgcccacttcctgctacgaggttttccatccatgatcttaacct

SEQ ID NO: 3349 - DNA, 428 bp, Zea mays
  Clone ID: LIB3116-025-P1-K2-D4
cccacgcgtccgcccaggaagccggcaagctggtggtcattgacttcactgccgcctggtgcggtccatgccgcgccatcgccccactgttcgtcgaacacgccaagaagttcactcaggtcgtgttcctgaaggtggacgtggacgaagtgaaggaagtcaccgcggcctacgaggtcgaggcgatgccgaccttccacttcgtcaagaacggcaagacggtcgcgaccatcgtgggtgccaggaaggacgagctcctggcccagatcgagaagcatgctgcgcctgcgcctgcgtctgcgtctgcctaaaggagatcagatcagtcgtcgccgtcaataagggccagcacgtatggctgtaaatgttgtcgttatcagttctggctttgtcgtttgtgggcgattgtgaactagtagtatgtttgt

SEQ ID NO: 3350 - DNA, 404 bp, Zea mays
  Clone ID: LIB3116-025-P1-K2-D5
gcatgtgttgctaacgcgaccatttttcctttttattcacaggctcctatggctgccctgggggccccataccttccatcaatgaccgcttcagtatgtgaaaacccagcccttcaaccctacaggctccaacaggcaatcgcaacaagcaacttacctttatcacccctttctttcaacaatcgccagccctatctttggtgcagtcattggtacaaaccatcagggcacaacagctgcagcaactcgtgctaccagtgatcagccaagtagctctggcaaacctttctccctactctcagcaacaacaatttcttccattcaaccaactgtctacactgaaccctgctgcttatttgcagcaacaacaactactaccattcagccagctagctactgcctac

SEQ ID NO: 3351 - DNA, 324 bp, Zea mays
  Clone ID: LIB3116-025-P1-K2-D8
gcaatccacacaagcacttcgacgtaacactggcgctgcgcacagacacaccaagcgtgggcaccaatggcttactaccaggaggtggactactgctcggaggaggtgaggtcggtggccccggccggtttcggccgccacggcggcggcgtccagcagcacgtcgtaaggagaagttcgaggaggtcgacacggtttaacgcgccggcgccaaccaccaccaccaccatggtcaccacggcggccacggtttcgtggtgcgcgagaccagggtcgaagaggacatcaacacctgcaccggcgaggtccacgagcgcagggaga

SEQ ID NO: 3352 - DNA, 298 bp, Zea mays
  Clone ID: LIB3116-025-P1-K2-E1
cccacgcgtccggatctggttttggccaagttcctggaacatggcacgtcagatgcacgagcctgccgcaggaagataaaatccccgcggtgatcacccgcttcaaggctttccatgaggcgttcatggctgagtaccgtgactgaactgttacagtggctgagtaccacgtgtagaccgaaacaaaataaagctcccccctctctctgtgtctgtgcgtgtgtgtgaactgatctctgaatggacgaacaatgtactctgttggcgcctttaatggcaattgaggaaaattttgttc

SEQ ID NO: 3353 - DNA, 373 bp, Zea mays
  Clone ID: LIB3116-025-P1-K2-E10
cggacgcgtgggctcccgaggacggtttcttttacgccagttacgaggttatggggtggggtgccactgctctgtcttatggggaccttgtcaagagggtcctccggtgctttggcccctcagagttttccgttgccgtgaccatcttcggcgggcgtggccatccgggacatggggaaaggcacttggtgcagaggtctatgactgcaacaacatggtggagcaggagctgcctggaggcggtctcctcgtgtaccagagcttttgtgctgttgaagacgctgttgctacctcgcccaaatctgttttccactgttttgacggcgagaacgtggagagtgctcctcctcttatgaagaaggactacaagctg

SEQ ID NO: 3354 - DNA, 381 bp, Zea mays
  Clone ID: LIB3116-025-P1-K2-E12
ctgctcaatctcacctctttgatggcttcatcccactgctgccagtgcagcctcttcttcactggcaggcaggttcctctagtctgtagtctcttctgaccggtggttgttgcagtttttaaccgttcttccctctgacagccaggcataggtggcaaaatccaggccctgtagattcagctccattccctgctgcctgcagctccctgtcaatctttggaagccggccgcagagctttcaagttttgccgctttcctttgctctctcgctcgctctttcgctcacctctgcattcccccctccctctgtctctagtttccttgctggcaaacggacgaaggaaaacggccaagatgggagctttaagcagcatcggcgtc

SEQ ID NO: 3355 - DNA, 442 bp, Zea mays
  Clone ID: LIB3116-025-P1-K2-E2
aaaaaccgggccgaccacgcgtccgcccacgcgtccgaaaaaaaaaaaaaaaaaattttattaaaaaaaaaaaaaaaaaaaaaaaaagaaaggaaaaaaaaaaaaaaaaaaaaagaaaaaaaaaaaaaaaaaaaaaaaaaaaaaaaaaaaaaaaaaaaaaaaaaaaaaaaaaaaaaaaaaaaaaaaaaaggggggcccttttaaaaaaaaaaagttaaaaacccggggaaggaaagaaaaaatttttttaaaggggccccaaaaaaaaaatcaaggggccgggtttaaaaaaagtggaaagggaaaaaaccgggggtaaccaaaaaaaaaacccttggaaaaaaaaccccttttcaaaaggggggaaaaaaaaaaaaagcccccaacaatacccctttaaaaaaaatggccaaacttaaatggaaaagggacccccccttta

SEQ ID NO: 3356 - DNA, 267 bp, Zea mays
  Clone ID: LIB3116-025-P1-K2-E3
gggcatccgttgcatcatccgcatggagaactagatttcgctgtctagtttgtgatctggcctgggcttggggttaataaaagaggcaatgctagcctgccctttcgatgaggaggtacatacacgctggcgatggaccgcgcttgtgtgtcgcgttcagtttggctttgccaagcagtagggtagcttcccgtgtcggtaattatatggtatgaaccatcaccttttggctctacatggtatgaacgtaagatacaaattccaact

SEQ ID NO: 3357 - DNA, 401 bp, Zea mays
  Clone ID: LIB3116-025-P1-K2-E5
ggaatggaagcattttttttggttcgttttccattgcattattacacacagctggatacatgggcttgatgaagcccggccggccgtgatttattttagcccgcccacagatgcaactagataccgaaataaaaagggtaaacaacatgatcgtcgatttattatgacacaaacacgtacaaacatgcatatatgatcgactctcgatccatgatcatcacgggaagacctcgatgatggacgggatgcctcgggtgtgcgtgatcttgtagtcacggaacccagccgccaggaagatcctcctccactcgtgctcctcccgttccgccccgttcacgaagctcagtatgtggagatccaacacatacgtttccctgcacgttttgtcgtcgtcgtcgtcg

SEQ ID NO: 3358 - DNA, 320 bp, Zea mays
  Clone ID: LIB3116-025-P1-K2-E6
gcctgctctggaaaatggcaaggcgtctaacctgtttctgctgctctattttctcctccttggttcctacatagtttaaatggtcacaattctttgtgatggaatggaagaccagtaccacttctttcaacagtaatatcaaatgccggaactgtttttttaatacagatctcattagaccatgtttggagtttgtttacttttgatgtaatttagaataagtgatgcgatggtatctgtgtgcttgacatctgagatggctgttgtctgcaatatatagttttggtacacttgttctatgatacataatttgtactgtc

SEQ ID NO: 3359 - DNA, 138 bp, Zea mays
  Clone ID: LIB3116-025-P1-K2-E7
gatccttctggaatgccccaacttcttaactaaagcaatggatccgtatgaataaaacgtgggctggcatgcccgggaccgtgggaaaattattaccacggcaacgacaaaaaaaaaggggttgcatcaagaagccaa

SEQ ID NO: 3360 - DNA, 322 bp, Zea mays
  Clone ID: LIB3116-025-P1-K2-F1
atcagatttccagttcacactattcgaattttttatattcatgctccgaaaaacacaaagaaacagtaatttataatataaatccttggcgaatgtatcccgctcacgtatatgttcacacaactccttctgttgcggaagacccaacgtgcactcaatagcatgtgagtttaaagatctcattttttctacgatggaccatacatctaattggaggcacatgaacatttctctcatcttttttttgaacccaattcaaacggtttccatcccattaacatttgacatcttattacctatcctgttaaaacatatatgttct

SEQ ID NO: 3361 - DNA, 425 bp, Zea mays
  Clone ID: LIB3116-025-P1-K2-F3
agagaagctagcgttcaacagaggaagaagcgagagagctgacaaaaatcgactgcccatcaatggctctggcgccggcgcctatccagtgcttcctcacgagcagcagaccggccgtatgcacggcgacgccgcccaataagcgcgcgaggaggccgtcgaggatctcggcagggcgtccggcgatgacaaggacaaggtcccgtcgtcgggagggaacgatcttggggtcaagcagctcgggaagctggccatggtcgcgctggccgccggcgtgctggcgctcggccccgtcgacggcgccgtggcggccaagtccggcggcagggtcggcgggcaggcgttccggtccgcgccccggtcgtccggcccttggatcaacaactccaggacgaacatctacatcaaccccgcggtggcgccgc

SEQ ID NO: 3362 - DNA, 342 bp, Zea mays
  unsure at all n locations
  Clone ID: LIB3116-025-P1-K2-F4
cggaannnngggnggancaggcgtccgacaaagcgtccgtaaaaaaagggtcaagatgttcattcttatcgttaacaatcagccattgggatgggcatttgttggtatccttcccatgtctcttgaattgcttcgttactgacatcactctgtgacctgccggcgattttcgcacgagggttcttgtttgtttctaggcgagctgactgcagtgcgcaggaacgctttccgtgaggttactatactgttattaagctggatcagctcgttatgacagctctgtttctaatttcttgttggcctcggcaagcttgttgggagtaaatttaataagcctttgat

SEQ ID NO: 3363 - DNA, 333 bp, Zea mays
  Clone ID: LIB3116-025-P1-K2-F5
ggggaacgtctgcatcgcgtcgtttgactggaggtgcagtggggtctgcaatccggtcgagaggatcaagtacgtgcactcgcgatgcggcgaaggggaggatgcgatctggagcgcctccttctgacaagatggtgatggaatcatggaatgattatatatatacagaccacgcctgcttgtgtgcaggcccaggccatagctgcattagaaggctcgcgttgtgtacacacagtgagttcagagaaggggaggcatgcgtgtctgatacaggaagaaaccactggagcacaatcttttattttttttgggggggagggttcagaaataggt

SEQ ID NO: 3364 - DNA, 458 bp, Zea mays
  Clone ID: LIB3116-025-P1-K2-F8
ggccccccgcaagcagttcgccaccaaggtggttaggaagtcggcgccgacaaccggggtgttgaatattcccaataggtgcgggcccggaacagtggcgctgcgcgagatccgcaagtaccagaagagcacggagctcctgatccgcaagctgcccttccagcgctggtgcgcgagatcgcgcaggacttcaagacagacttccggttccagagccactccttgttgtcgctccagtagttcttatttatttttttttctttttatatttttttttatttttttattttttatttttttttaattttgggttgatggttggttgttttttttttttaaataattaatatttattaattattttcttcttttatatatatattattttaaatattttttctttttttctattttttatattttatatatttattttttattaatttatttatttattt

SEQ ID NO: 3365 - DNA, 230 bp, Zea mays
  Clone ID: LIB3116-025-P1-K2-F9
catcctccgtcgtcgtgcctctgcgctccctactagaccaccgtcttctccgccacctccggtccgagatcacctacctcggggagcgccgccctccccacgtgccgccgagtagcttcaagtcgttcgccgtggaggaccgcccgggggagcagtgggtgcgcctcgcgccagcgcgggagggggaggcaaggaggttaaggtattttcatatattttttatgtttttt

SEQ ID NO: 3366 - DNA, 210 bp, Zea mays
  Clone ID: LIB3116-025-P1-K2-G1
atggccggccttccacacattctctttttcagatctgtgtcagaacctttcactcaactccaactactaatatcaccttctcacatactcatctcccgccttactacctgctactccatgctcttttacactcagcacctcattaatttacaatttcccaagatgtctgcttgataactttacctctttcatgtatctattatttgttat

SEQ ID NO: 3367 - DNA, 389 bp, Zea mays
  Clone ID: LIB3116-025-P1-K2-G12
cccacgcgtccgcccacgcgtccgcgtcatgcctttaaaataatacagtaaaactcttcagccagcacgatgatatgctgtgtgacactcatcaggtctgagcagtgaagtgatccaaaatctgctgctggtggtaggtcaccatatatagctgggtacatatgttagctatagctggttacataatagagatatatatagttgtatacatgcatacatacactacacaaataatgtaggcgaaagatatatgtacatgcatgccagtatattgacaagggttgtcagtatctgtatagacataatctaaaaaaaggagatagaaacgtaggtagggtttggatttcattagcttggctagtagtagtagtggtcgagatcgatttgtg

SEQ ID NO: 3368 - DNA, 393 bp, Zea mays
  Clone ID: LIB3116-025-P1-K2-G2
agttggcttaaccttggtccaggggacgagggggccaccatgagcgtggtgatcctggacggttccacggtgcgcggtttcgtggcggacgaggcggccttcgcgcgcagcctggacgcgcggttcgccgcgctggacgccaacggcgacggcgtgctgtcccgcgccggctccggcgcgcgctcgagtccttccgcctcctcgacggcggcggttttgggtccgcccagccggcgccgttccccgccgaggttgccgcgctttacgacgccgtttttgagcagtttgacgccgaccacagtggcgccgtcgaccgatccgagttccacgacaagatgcgctctattatgctttccgtctccgatggtcttggttcccaaccgttccagtttc

SEQ ID NO: 3369 - DNA, 349 bp, Zea mays
  unsure at all n locations
  Clone ID: LIB3116-025-P1-K2-G3
gacccaggcgacnanatagccttaacctcgnccaagggacgattttgtttccatgagcgnggngatcctgaacggctgcgctgttcacaatttcggggcggacaaacccccctacccgcgcagcctggacaccacaaattgctgcctggacgccaacacctacatagtgctggcccaatctaagttataggcgggctcaaaacctacatacttatcgtcggttccatccattcttccaccaaacaaataatgttcgcaaacgatttattttcattcaagccacgtccctcgctgctattgaggctcccgggacagaagcggcagcgacaaaggtgaaacctttgctgac

SEQ ID NO: 3370 - DNA, 395 bp, Zea mays
  Clone ID: LIB3116-025-P1-K2-G5
ccgatcccacccggcagcggcgctgcgcaatggccacccacgcagttttcgccgcctcccgcatccccgccggcgcccggttgcacagcagggcgccggcgtcgtccaggcacggcgtgcagaggctggacttcgccgacttctccgggctcaggccggggtcgtgctccggagcgctgccgcgcgggaggcgtccttctccgacgtccttggcgcgcagttcgtcgccaaggccaccggggagaacgccgtgagggcgcccgcagaggcgaagctgaaggtggcgatcaacggtttcggccgcatcggccggaacttcctccggtgctggcacggccgcgaggactcgccgatcgacgtcgtcgtcgtgaacgacagcggaggcgtaaggaacg

SEQ ID NO: 3371 - DNA, 355 bp, Zea mays
  Clone ID: LIB3116-025-P1-K2-G8
cccacgcgtccgcccacgcgtccgcgtcatgcctttaaaataatacagtaaaactcttcagccagcacgatgatatgctgggggacactcatcaggtctgagcagtgaagtgatccaaaatctgctgctggtggtaggtcaccatatatagctaggtacatatgttagctatagctggttacataatagagatatatatagttgtatacatgcatacatacactacacaaataatgtaggcgaaagatatatgtacatgcatgccagtatattgacaagggttgtcagtatctgtatagacataatctaaaaaaaggagatagaaacgtaggtagggtttggatttcattagctt

SEQ ID NO: 3372 - DNA, 357 bp, Zea mays
  Clone ID: LIB3116-025-P1-K2-G9
gttcacgcaagcgcaagtgcgcaacttgctgttctcgctgtctcagattccctgctacaccgcctcctccgcggttccgccaccagtctcccctgcaaccgggaatccgggataagaggaagagaaaccgcgcggcaaaaggaaaggagtccaggagcgataaaagatctctgaccggagtcctgccaggctgatagaatcctggcagccatggatatactgctaggttctgggagattcttggcgcgacggactcccctcatgctcgtccctcgctgctctcgaggctcccgggacagaagcggcagcgacaaaggtgaaacctctgctgactgggacagggcatgggctaagttc

SEQ ID NO: 3373 - DNA, 224 bp, Zea mays
  unsure at all n locations
  Clone ID: LIB3116-025-P1-K2-H1
gccgaccacgcgtncggaaacggnaagacactttgtttccttcgtcttttcttaaaaggagcnctccacagtcacggggagtgctatattatttatttaagcgcgatccatcacgtatatctgacgggaaacactgcccctgtgagtcgaatctcactccctcttcagggacacgttccatctctctgcttcagtcccacacgttgcgatgcacgaggaagttt

SEQ ID NO: 3374 - DNA, 421 bp, Zea mays
  Clone ID: LIB3116-025-P1-K2-H11
gcgcaaatttgattgatagacatcgggatatgcggcttgatgtggataatatgtcctatgaggaattgctcgcactaggtgaacgcattgggtacgtaaacacaggacttagtgaggaaaaaatcctaagtaacttaaaacaacggaaatatgtcttaatatcatggaagatcctccaacaggtgttgaaccatgttgtatttgccaggaagactacgcggaaggcgaggacttgggcagactggactgtggtcacgacttccacaccgcatgcatcaaacaatggctggttataaaaaatgtgtgcccaatctgcaagaaaacagcactggacgcctaagacatggctgcattttccctccctagggaaaatccggtagccggcactaagggcaagtggttgtcatctaaccacaccatg

SEQ ID NO: 3375 - DNA, 317 bp, Zea mays
  unsure at all n locations
  Clone ID: LIB3116-025-P1-K2-H12
caccagctagctctagcaaagcacttgccatttaccgaccgccgcattccaaacagcccgacgagctagcagagcggcaggcacctccctcctcaaggaacatggcccgcatgcagcagttggcagtggcgacggcggccgtggtggccttggtgctgctggcggcgcgacctcggaggcggccatcagctgcgggcaggtggcgtcggccatcgcgccctgcatctcctacgcgcgcggccagggctcggggccctccgccggctgctgcagcggcgtaaggagcctaaacaacgccgnccgtaccaccgccgacc

SEQ ID NO: 3376 - DNA, 398 bp, Zea mays
  Clone ID: LIB3116-025-P1-K2-H2
cccacgcgtccggggacgcgtgggggccgtttttgttacagtgcagtctaccaatggttcccgacttcccgttaaaacgcgcattgctcacatcaagatctctctcgtagtcgtgcaagtgaaaatgttcgttcggttgctttgatgcgcacgtaggactgtaggagtaagtgctactcctgtgtatgtcccccggttttttatttggtggtaaaaggagctctgacatgagagcagacacaaagattgacctttctcctgtagacgacgcagtatgctcgtcagctcgtcaggatgtagggctatagtagctgtgtagctgtactctttccctccgtccttgtcctgaacaagtgctctcgttgatgtttgtgtcattcaattattttaaatttatt

SEQ ID NO: 3377 - DNA, 311 bp, Zea mays
  Clone ID: LIB3116-025-P1-K2-H3
aaacaccgccggtttcccgaacaacgtcgtgttcgtcgaaaacaaggtgccgagcggcgtcgacgcctccaagatctcgcaggaggagtacctcaacgcgccaggcgagacctactccgtcaccctaaccgtgccgggcacctacggcttctactgcgagccgcaccaagagcaggaatggtcggcaagatcacagtcaactaaagctagctatccattccatgcatctcgatctgtatgtactccgcccgtcgatggatgatgcatccatctctacttgttttcctcacatgtccaacaattaatgcacc

SEQ ID NO: 3378 - DNA, 243 bp, Zea mays
  Clone ID: LIB3116-025-P1-K2-H4
caggcgtccgaacaaccccggcttcccttacaatgccgtttttgtttatgacaaggcgccaaacgccgtggacaggtcaattatataatagggggggcacctcaacaccccatgcgagacctactccgtcaccctcaccgtgccgggcacctacggtttctactgtgtgccgcaccaaggcccggaatgggcggcatgaccacactcaactaaagctagctatccattccatgcatcttgatc

SEQ ID NO: 3379 - DNA, 435 bp, Zea mays
  Clone ID: LIB3116-025-P1-K2-H5
ggaactggaattccgggccacgacctacgagcgtgggcaccaatggcttactaccaggaggtggactactgctcggaggaggtgaggtcggtggccccggccggtttcggccgccacggaggcggcgtccagcagcacgtcgtcaaggagaagttcgaggaggtcgacacggtttaacgcgccggggccaaccaccaccccaccaccatggtcaccacggcggccacggtttcgtggtgcgcgagaccagggtcgaggaggacatcaacacctgcaccggcgaggtccacgagcgcagggagagcttcctcgccagggctaactgagccgcccggcggccggcatccacgcccgttcgtgcctgcctgcgtgccttatgtatgtctgtggttgactggttgtgcagggtcatcgtacttggctatcgtacgtgca

SEQ ID NO: 3380 - DNA, 384 bp, Zea mays
  Clone ID: LIB3116-025-P1-K2-H9
agagtttccacattgtaccatggaccgcgtgctccaagaggagcgtcgcggcagcgggcgggggcccgccaccgcccaaggtgtaccgcgtggagcccagggacttccgggagctcgtgcagaggctaacgggcgccggtacgcccgccgccgccgccgttccgggccggcgcaccggagggcgacgctgaagccggccatggccgcggagagcaggcccccacaggccgtttggggccgtccccgtggcggccggggcagagcagtttgactacgcggcgtcatggttctccgcgccgttgttgagccccgggtacggtgcgccgggctttggaggcggtcaccagcaccaggggaaccctggcttttttgtttagggcccta

SEQ ID NO: 3381 - DNA, 389 bp, Zea mays
  Clone ID: LIB3116-026-P1-K2-A10
gaacgaacgacctgacgcagatgacctttgggtacagcagggatgatgtgggaaagttcattcccgtctatcttgctcagggcatcctccaacatgaccccttcgaggtcctggaccagaggggagtgggcgagctggtgaagtttgctacagaaggggccgcaaagctaggcctaacttgaaggtgggcatttgtggagaacacggtggagagccttcgtctgtggccttcttcgcgaaggctgggctggattacgtttcttgctcccctttcagggttccgattgctaggctagctgcagctcaggtgcttgtctgaggctgcctcctcgttggcaaccggattgcctgctgctggtggatgtggtgatcaacagttttattacaga

SEQ ID NO: 3382 - DNA, 294 bp, Zea mays
  Clone ID: LIB3116-026-P1-K2-A11
cccacgcgtacgggcgtcccggagctttcgttttcactagcgatcaagtcgcaaaggggggtcctttttatcttgctcagggcatcctccaacatgaccctttcgaggtcctggaccagaggggtgtggtcaagctgttaaatgttttttcataaggggcctcaaagtttgtcctaatttttaatgtttttcttttttggtataacatgtttgtaaattctctttctttgttgaccttttttttttaaaatgctctttactattttattctttattttttgttactcatatttt

SEQ ID NO: 3383 - DNA, 433 bp, Zea mays
  Clone ID: LIB3116-026-P1-K2-A12
gggtttacctgtgaggcctgctcccctgccgccgccgccatgggacactccaacgtgtggaactcgcaccccaagaactacggccctggatctagggtttgccgtgtgtgcgctaacccccacggcttgatccgaaagtacgggctcatgtgctcagacagtgcttccgcagcaacgccaaggacattggcttcatcaagtaccgctgaaacttggggagctccaagcatggcaataatggaggcatggatggggacctaaaagatagtctgtactcttattcttactataaaaccatgtaatgaattgtttggctttgtgtggacgaagttggtgtattctggatggtactcttgaatcttgatgcttccctgctatgctagctgagcatgtcgaaccgctatgaatcagacaatacagtatcactgttacc

SEQ ID NO: 3384 - DNA, 350 bp, Zea mays
  Clone ID: LIB3116-026-P1-K2-A2
ccgacccacgcgaccgcccacgcgtccgcctggcaatgggcccgttgttgacgggcctaatcgtcggcgccaacagcctcgccggcggaaacttaaccggcgcgtccatgaacccggcacgctccttcggcccggccctggccaccggggactggacaaaccactgggtctacggatcggcccgctgctcggtgggcccctggcaggcttcgtgtacgagtcgctgttcctggtgcacaagacgcacgatccgctgctcaatggggaaatctgacgaccatcagcccctgtgtgtggcgcatgatgcttcatgcttgtttctgtaaaacaggtcatttatctgcaagcat

SEQ ID NO: 3385 - DNA, 333 bp, Zea mays
  Clone ID: LIB3116-026-P1-K2-A3
cggaggaaggaaagaacataggcagccgaagcttttgttgcgaggcagggccatcgtccgccatgacgctctccctctccacctgtttcctccccatccccgccgccgcgaggaccaccgcccgaaccctacgctccgtggtcccctcccaggggatgcgtgctcgatgcgcaagaaggggttgcacccggagatctacgaggacgcgaaggtgtactgcaacggcgagctggtgctggtgacggggggcaccaagccggagtacacggtggacgtgtggtccggaaaccacccctactatgtcggcgacacctcggcgctcgtggtcatgga

SEQ ID NO: 3386 - DNA, 337 bp, Zea mays
  Clone ID: LIB3116-026-P1-K2-A4
acccacgcgtccgcccacgcgtccgcccacgcgtccgcccacgcgtccgtgatcgcgagcgcaagcacgtacgtggtcggaagctcaagttagaagaagcaccagtgcctgatcgatggcggcccaggctctcctttccggccggcagttgttgggccgccccgtgcagtcgccgtctttaggtcgtcggcgaggaaggcgcccttcgtcgtaagggccagttccagccctccagccaagcaaggtgccgacaggcagctggggttcgcgtccaagcagtccctctcctacctcgatggcacgctgcccggcgactatggcttcgacccgttgggcc

SEQ ID NO: 3387 - DNA, 385 bp, Zea mays
  unsure at all n locations
  Clone ID: LIB3116-026-P1-K2-A6
gaccacacgcgtccgaatttgttccttgttgactgatccgaacccttacgaccttttggtccccgagatagctaacatgtacaagacggaccggcacaagtacgagaacaccgcgaggacctggacccagaggtatgccatgtagtattttctctacctggcctttggggtcctgctgcgttgtgttgccgggacctggacgtgcctccatgtattcgttctatccttcctgtataatgatgaaccgaattgggtttgcagtacagtgccgcgtgtggtgctgaatgctgctgtattgtgtcacttggaagctgtaattctcagtgtcaaaaaaaactggtacttggaaaaaaaaaaaantnntaaaatttatttttattttttt

SEQ ID NO: 3388 - DNA, 161 bp, Zea mays
  Clone ID: LIB3116-026-P1-K2-A8
gcgtccggcatgcatatgagtatctccaggcttttaggtgtacgaaccgggaccgggcatagaggaggtgaaatgcttcggactgccgggggcacaatatctgttgccggcatttgcaggaagggggcatgcaaggtcggcccgtggtctaactagcaatc

SEQ ID NO: 3389 - DNA, 261 bp, Zea mays
  unsure at all n locations
  Clone ID: LIB3116-026-P1-K2-B10
aaacccgggccgaccgcacgcttccggccagttcaagcgccatctttggccctttactcgcttcgccgacaagtgccaaatcntcgccaacttttccaaggtcctgcggcgtaacataaaaaaccacctctgccttgacctcgtccgccaggtcccattcttccagcacatgtactacctctgctctataacattttctacagggtgaaatccttaatctttcccaaggtagaaaccatcttaagggaggtctacttttta

SEQ ID NO: 3390 - DNA, 224 bp, Zea mays
  Clone ID: LIB3116-026-P1-K2-B12
gataagagcaatgctttacattttggctagtattcggtaatgatggattcacatactctgggatattgacctgtctcgatgctagaaaagtggcatgatatcatgcctgcaatatcattagtttatttttagccatagtttcagattgacagcatgcccataattagctcacatcagaggtaagaatttgtagtaaacatcattccatccatgatttggtgctc

SEQ ID NO: 3391 - DNA, 240 bp, Zea mays
  Clone ID: LIB3116-026-P1-K2-B2
gcgtccggcgtcccaccgggacctccggcgggcccgcgcggtttcgctgaacatcgtgccgacgagcacgggggccgccaaggccgtggcgctggtgctgccgcagctcaaggggaagctgaacggcatcgcgctgcgggtgccgaccccgaacgtgtccgtggtgacctggtgatcaacaccgtgaagactggcataacggccgacgacgtgaacgcggcgttccgcaaggccgccgcc

SEQ ID NO: 3392 - DNA, 178 bp, Zea mays
  unsure at all n locations
  Clone ID: LIB3116-026-P1-K2-B3
acgggccgaccacgcgtccgcccacgcttccgaaagcccttggttgccatnnttanntcctaatgaaatgaaccaagaccgggagccttttatacggttgcgctggagttctaaacctctgtaatatctgatgttcttgtggatacctgtttcagaattttcggttcctgaacccagt

SEQ ID NO: 3393 - DNA, 214 bp, Zea mays
  Clone ID: LIB3116-026-P1-K2-B4
aaaaaaaaaaaaaaaggaggagaaaaaaaaaataaaaaaaaaaataaataaaaaaaaaaaaaaaaaataaaaaaaaaataaaataaaaaaaaaataataaaaaaaaaaaaaaaaaaaaaaaaaaaaaataaaataaaaaaaaaaaaaaataaaataaaaaaaaaataaaaataaaaaaaaaaaaaaaaaaaaaaaaaaaaagaaaattggtaat

SEQ ID NO: 3394 - DNA, 232 bp, Zea mays
  Clone ID: LIB3116-026-P1-K2-B5
aaggggcccaaacaaccaccggttgaacaagttgcagccaaacaacccggggttccaacgaagcttgggcttgcattattttaccatgttttccatggggctgctccaccccgtcgtcccggagaaacaaagcgagggggaggtccgcccccaacgaccaccaccagcagcagggccacccccacgggcggggaccagggcgcccacgtgccccaagggtgggccaagagga

SEQ ID NO: 3395 - DNA, 248 bp, Zea mays
  unsure at all n locations
  Clone ID: LIB3116-026-P1-K2-B8
aaacccgggccgacccacgcttccgaccctacaagatccactcttccgaacacgtgcattcaaccncatacctcttctatgggccgccgtaaattaaataaactgccgcgcccaacaacacccacaaaactgaaaaaaccttgcctttacccaacttaatatccttccaaaacacccccttttgccacctttccttatatcaaaaaatcccctacctatcacccttccaaacatttgctcacccttaa

SEQ ID NO: 3396 - DNA, 382 bp, Zea mays
  Clone ID: LIB3116-026-P1-K2-C1
gtttcaactaatcagtttactaggatgaattttgctacggtggcactgctcattttgttgaacgggatgtgcatagttgcatactgggatcatgaaacgatggctgaagaaaccaccttgctggcaaattcttatggaagaaatgaaggacccaaggcatacatcatggaagaaagctgatggacaatagtattggttcaaaccgtgagttttcaatcgatgatatgtctcatccaaaggcaccacatactgagctcaagcaaccctcatacttagctcctggttgctcaagcaaccctcttaagcaaccctcatacttagctcctggttgcattccctaaagttcatgcatacatatatagccttccactcatcatatgct

SEQ ID NO: 3397 - DNA, 207 bp, Zea mays
  Clone ID: LIB3116-026-P1-K2-C10
cgcacgcttttcacctacctcaagattttcatcattcccccaaaagaatccaaccgtgcggccgctttcatacaacttgatggctctacaataaattcacctaaatccatttcactttccctctatatacaacattttatacttaaaaactcttctttacccaacttaattcctctttataacatccctctttctccactttcctta

SEQ ID NO: 3398 - DNA, 361 bp, Zea mays
  Clone ID: LIB3116-026-P1-K2-C3
caaatgcacagtgacgtcataaagcatttctggttcccttcgatggttttgccattttgccggtgtagcattggtggacggttaatttcctgcgatttgcaggccgcaggtaagagtttttgcagccttagccaaagtgtaggacaaattcaatctgtgagatagcatcttggataacctgtcacctcgaccatgttcgtcgtggccagttgtagacgtcttggttgtgcaagaaagtttctctcgaggacagttgctcgttttgttagggccatcaatttttttgggcggcttgtaagttatttgagaatcccacctcaggttgaggggttgtattctcgagtcgtcaaagtttagtacc

SEQ ID NO: 3399 - DNA, 357 bp, Zea mays
  Clone ID: LIB3116-026-P1-K2-C5
cccacgcgtccgcccacgcgtccggcatgagggaatgatcagcttaggcagccgagcctctgcggagatgaagaagtaagctggagttaggactaagagttactgcacctacttgatgtcgacggtgtctcaaaataagttgcggcctaccgaaattatatgaatcaatcaatttggtctttgtcacagatcgtttttttttgtttgttactagtacttgtacaattgtactcctgcctgctactgtccttatctgtttgaataactgctgtgttgccatcttatgtgtacaactctcgaaactcgctgccgttcgatgtatttgagcttttggtatgcaattaaatggttgcattc

SEQ ID NO: 3400 - DNA, 171 bp, Zea mays
  unsure at all n locations
  Clone ID: LIB3116-026-P1-K2-C7
tgacctggctggatcccaccgccgcgctcactacggcggcgggtacatcagctacggcgcggtgcggtgggacaacgtgcccggctccccccncggccccagctactacaacttccgcccgggcggccaggccaacccctaccaccggggctgtcccgcatcaccctcttc

SEQ ID NO: 3401 - DNA, 380 bp, Zea mays
  Clone ID: LIB3116-026-P1-K2-C8
cggacgcgtgggcggacgcttgggggcccatttacaaggtgctggacatcctgcagaaggggttctaccgttccaacgcggggcgcgaggccttcgtggagatgtgcgccgacgactacgtgcagaagatgaccttcgacagctacctttacagcgcgtcgtgccgggcaacccgttcgacgacatcaagctcgccgtcaacaccatcggcagcctcgtcagggccaccgaactgcgccgggagatggagaaggtcaccttgtgagccgccgcccgcgacgtcattgccgtcaaaatggtgtcgcagctgatcggccggtgtattagtagagatttgcggctgatcgggttaatttaggccaacatgcctgggcagtggg

SEQ ID NO: 3402 - DNA, 64 bp, Zea mays
  Clone ID: LIB3116-026-P1-K2-D10
aaaacccgggccgacccacccttcctctaactaccaacaaccaaatttcctccttctctgtcac

SEQ ID NO: 3403 - DNA, 355 bp, Zea mays
  Clone ID: LIB3116-026-P1-K2-D11
cttccaacaagcaaatcgcttctggcagcaagaccctgcaggaacttgaagaagactttatgtgagaggcggacattataaatgccatgctgaagatttccttgaactgcttctgtcgaagacagaaggggtaccacaggcttgtgagatactggactaaatgactcatgggcaggccatggtctgttattatctcctcttgctgttggggtctatgtaaaccttgtttacttgctgaaaaaacaacggtgcatgctctaactgtggttgatgtaatggtctgttgcccatcaagttgaaatggtaatggaattatggtttcctggatttttcaaacaataaagacatggcagca

SEQ ID NO: 3404 - DNA, 230 bp, Zea mays
  Clone ID: LIB3116-026-P1-K2-D5
ggagggcgtcggccagaacttccgcagcatcggcatgaacgtcaaccccatcgacgtcaagttcaccggcaaggccaccttcgactaatcacacttaacgtacgccgcacgccccagccgggatccaaattaaagaacttcttcttctattaattacagttattgtaatttggctgctggtacgggggtggcatgatttgagatgtgcatgatgatccttgtgtaatttt

SEQ ID NO: 3405 - DNA, 232 bp, Zea mays
  Clone ID: LIB3116-026-P1-K2-D6
ggagggcgtgggccaaaacttccgcaatatctgtatgatcgtcaaccccatcaactccaaggtgggcgttataggccaccttggactgatcacacttaacgtacgccgtacgccccatccgggatccaaattaaagaacttctttttctattaattacagttattgtaatttggttgctgtcacggtggtggcatgatttgagatgtgcatgatgatccttgtgtattttta

SEQ ID NO: 3406 - DNA, 363 bp, Zea mays
  Clone ID: LIB3116-026-P1-K2-D7
caattaactagcttcttctagctctagctaggctcgtctgctgcaagaaggtaacagcgcaggcatggaggggaaggaggaggacttccgcctgggcgccaacaagttctcggagcgccagcccatcggcacggcggcgcagggcacggacgaaaggactacaaggagcccccgccggcgccgttcttcgagcccggggagctcaagtcctggtccttctaccgcgccggcatcgccgagttcgtcgccaccttcctcttcctctacatctccatcctcaccgtcatgggcgtttccaagtccacctccaagtgcgccaccgtcggcatccagggcatcgcctggtccttcggcggcatgatc

SEQ ID NO: 3407 - DNA, 368 bp, Zea mays
  Clone ID: LIB3116-026-P1-K2-D8
gttttgccaacaatccaaatctttgtggccctggtacttcgaagccctgccctggggctcgggccttttccccacctcctccattcaatcctccatctcccccaactcaatctactggtgcttctagcactggagcaatagctggaggtgttgtgctggtgcagcattggtgtttgctgttcctgcaattgcatttgcaatgtggcgccgtcgtaaacctgaagagcatttcttcgatgttcctgccgaggaggatccagaagtccatcttggtcagctcaaaaagttttcattgcgggagcttcaagttgcaactgataatttcagtaacaggaacattttaggaagaggcggttttggaaaagtgt

SEQ ID NO: 3408 - DNA, 262 bp, Zea mays
  Clone ID: LIB3116-026-P1-K2-E1
acggcaaggagctcgacggccgtaacatcactgttatccaggcccagtcccgtggcggtggccggggcggcggtggctacggcggcggtcgcggcggcggcggttatggtggcgggcgccatgacggcggttatggcggcggtggcggttacggcgtcggcgcgaggttggtggctccagctacagaggctgtgtgccgctactgtggttggaacgtggtgtaaggccgccgtttacctttaagtttttgccgttttctttt

SEQ ID NO: 3409 - DNA, 298 bp, Zea mays
  Clone ID: LIB3116-026-P1-K2-E10
cggacgcgtgggcgcaaattgcaccaagtaaatccatcgagaggccgtcgacaggggaattaatggcgtcgtcgtctagcagcagccaccgccgcctaatcctcgcagccgccgtcctgctctccgtgctcgcggctgccagcgccagcgccgggactcctgcgtgccggggtgggccatcccgcacaacccgctcccgagctgccgttggtacgtgaccagccggacctgcggcattgggccgcgcctcccgtggccggagctgaagaggagatgctgccgggagctggcggacatc

SEQ ID NO: 3410 - DNA, 323 bp, Zea mays
  Clone ID: LIB3116-026-P1-K2-E11
cgcagaggacgccgccggcgagcacaagtaccagttcctaaggtcgcagcgtgtgcgtgtccgtcgtacgttctggccggccgggccttgggcgcgcgatcagaagcgttgcgttggcgtgtgtgtgcttctggtttgctttaattttaccaagtttgttcaaggtggatcgcgtggtcaaggtccgtgtgctttaaagacccaccggcactggcagtgagtgttgctgcttgtgtaggctttggtacgtatgggctttatttgcttctggatgttgtgtactacttgggtttgttgaattattatgagcagttgcgtattgt

SEQ ID NO: 3411 - DNA, 88 bp, Zea mays
  Clone ID: LIB3116-026-P1-K2-E12
caaaaaaccaaaaacgcaccgtcctgtaacgaattcactaagttctagttcttttgtgctttgttaagaatataaacaatgaggtttc

SEQ ID NO: 3412 - DNA, 307 bp, Zea mays
  Clone ID: LIB3116-026-P1-K2-E4
ccgccttcggcgaggcccgcgtgacgatgcttaagacggcggcgaaggccaagccggcggcggcgtccgggagcccgtggtacggccccgaccgcgtgctgtacctgggcccactgtccggcgagccgccgagctacctgacgggcgagttcccgggcgctacggttgggacaccgcggggctgtcggcggacccggagacgttcgccaagaaccgggagctggaggtgatccactcccgctgggccatgctgggcgcgctcggctgcgtcttcccggagcttttcgcccgcaacggcgtcaagttc

SEQ ID NO: 3413 - DNA, 376 bp, Zea mays
  Clone ID: LIB3116-026-P1-K2-E5
ggccacgcgaccgggcgctcggaaaactccacggacagcgaaggaggtgaaccaaggacgacgtatctgtcgccggagaaggtaagcatcgatccgccgtgtcctacgattcgtttgtcttgctccaggcggcgagcagcagtgggggtcgtcctcgcgatccgccttaaagcttcgcggatcccacccaaaattaaaatcctctcggaaataagagacgcgaatccctggccccaagccccgaaacctccgagttctctcgccaatttgatccgcctaaccgtcgccgcccgtccgccggtcggccttgactgctccgtcgcacgtggcggttcgcagcgcggaatctaccttgtgctgacagatccggggaaac

SEQ ID NO: 3414 - DNA, 388 bp, Zea mays
  Clone ID: LIB3116-026-P1-K2-E6
gggaaagccactctcatagccgcagttcgtactccaggtctgtgtccagggagcgctcaggtggatctgcgaggtgtgtcgtcctaggtggttataagatatgcgctgtatttgcatctatcagaacttgtgtacttcgtatattacgaacttgagaactgtatggatgtgtgcattgtgccaaattatgttcattctgtgctatctttctgatgctatcttgctattgtgggtttgaacttggtaatttagtttacaaaatcattcgaaaaaaaaaaaaataatggtccacaacgtcgtatggggcaggattggtccttggaaaaaaaaaaaaaaaagaggttgttttttaaaggggatccaaaaattaccttaaaaaaaagggggg

SEQ ID NO: 3415 - DNA, 346 bp, Zea mays
  Clone ID: LIB3116-026-P1-K2-E8
cccacgcgtccgcgggtaacatcgacaccgttcggttggagtccttgctcttccagtgggggaacagcctttgccaaggcgccaacctgccacttccggtgcctttcaaggtggacaaggttgagggcgggatcaggctagggttcgtcgcggcgaggacggcgcgacgcggacgctggtgtacatcgattgcctggtctctccggccccggatggctctggtccggtgttccgagcgatcaggaacggtcctatgaaggacagggagccacctggggagcccaggatcatgaaaagcctccttcaggctctttaaaagtctattcagatcgctcgtgtttgaccg

SEQ ID NO: 3416 - DNA, 160 bp, Zea mays
  Clone ID: LIB3116-026-P1-K2-E9
gtccgaattcccgtcgacccacctccgcgaaccttgggcggacacttggacttcctattgcgaggatagcccgaagggcgtgcttatacaccaaacggggtctaaaccaaaacttgacaacctaaaaggcttgcaagacattaaacataaaatttacttt

SEQ ID NO: 3417 - DNA, 450 bp, Zea mays
  Clone ID: LIB3116-026-P1-K2-F11
ggcaaacctttctccctactctcagcaacattaatttcttccattcaaccaactgtgtacactgaaccctgctgcttattggcagcaacaacaactactaccattcagccagctagctactgcctactctcagcagcaacaatttcttccatttaccaattcgccgcactgaacccctctgcttatttccagcagcaaatactactaccatttggccagctagctacaacaagccccgcttccttcttgacacaacaacaattgcttccgttctaccagcagtttgtggctaaccccgcaacccttttacaactgcaacagttgctgccctttgtccaacttgctttgacaaacccagcagccttctaccaacaacacatcattggcggtgccctcttttagattgcttattagttgtcattcaataatgaagttttttggctgatgtat

SEQ ID NO: 3418 - DNA, 375 bp, Zea mays
  Clone ID: LIB3116-026-P1-K2-F2
ccagggcagctctggtggctgatgagatagtttatcaggctgaattcttctccttcggaacgaaggacctgacgcagatgaccttggggtacagcagggatgatgtgggaaagttcattcccgtctatcttgctcagggcattctccaacatgacccttcgaggtcctggaccagaggggagtgggcgagctggtgaagcttgctacagagaggggccgcaaagctaggcctaacttgaaggtgggcatttgtggagaacacggtggagagccttcctctgtggccttttttgccaaggctggggctggatggcgttttttgctcccctttcagggttccgattggtaggctagctgcagctcaggtgctttgtt

SEQ ID NO: 3419 - DNA, 156 bp, Zea mays
  Clone ID: LIB3116-026-P1-K2-F3
tagacgcgagcgccccttttttttttttttgaacataacgttgggatacagtttttagactgttaaacgaaagaggaatagaaaggtcgcctcacggaaggtcctttcttgggaaagtgaggaaggggtacatcagttttccttcgccggcgtttt

SEQ ID NO: 3420 - DNA, 209 bp, Zea mays
  Clone ID: LIB3116-026-P1-K2-F5
accacgcgtcctaaaaacttcttcatcgcctcctttgactgttggagtagtttggcccccaaaccccccgacagaaccaattacatacactcgcgaggcccccaaaaaaaaaatccaaactgaaccccctccttctaacaagatggtgatgcaatcatgaaatgattataatatacagacgcactcctgtttgtgttcagccccagccc

SEQ ID NO: 3421 - DNA, 225 bp, Zea mays
  Clone ID: LIB3116-026-P1-K2-F6
gcaagtttcgctacgtagcagtgcaataaaaaaagtatccgcaatggcgagcagaaccatgggcctttcctccacggccttcggcggcaaggccctgaacatgccgtcgtcgtccgccttcggcgaggcccccgtgacaattcgcaagacggcggcgaaaccaaaccagcgggggcgtccgggagcccctggtacggcccccaccgcgtgctgtacctgggccca

SEQ ID NO: 3422 - DNA, 123 bp, Zea mays
  Clone ID: LIB3116-026-P1-K2-F7
aaaaaccgggccgacccacgcttccgcaagtctctctacgtaccattccaaaaataaaacacccgaaatggcaaccaacacgatggcctttttctaaacatccttggccgaaaaaaccataaa

SEQ ID NO: 3423 - DNA, 368 bp, Zea mays
  Clone ID: LIB3116-026-P1-K2-F8
gcaatgcatattgaggttgatagaagtggaaaaattcccatgttgaggttccgagaccgtgaatcatatgcacagaataggagtaaagagtacgatgccattgcaatgaagtaccttacctatgtacttttcctccttggggtcggtttctcttctattgacttaagtatgaaaagcacaagagctggtactcatggatactttcttctatgacaagctgtgtgtacatgtttggtttcattatgatgtgcccccaattgtttatcaactacaagctgaagtctgttgctcatatgccatggagacaaatgacctacaagttcctcaacactataatcgatgacctttttgcatttgtcatcaaaatg

SEQ ID NO: 3424 - DNA, 287 bp, Zea mays
  Clone ID: LIB3116-026-P1-K2-F9
gacgagaaccgccactcctcgaaatctttaatgattttctgcggcgaaccccttcgtgacggaacccattgggagaggcctggccatcaatcaccaaggacttcaccgatttgatcggcaacactcctttgttgtacctaaacaaggtgaccttgtattcactttctttttatatcgctctaactttctgttattttattctttcttccttactttatataatttggtttctttacttttatttggttttctattttttaatttacttttaaatattgtttatttat

SEQ ID NO: 3425 - DNA, 433 bp, Zea mays
  Clone ID: LIB3116-026-P1-K2-G1
actagttttagcccacccgtccgccgaaatttaatccaggaacttcctcgccgagaaaaaggtcgggaaggtggacatgcttgatggcgtgaccatcctccggtccgagaaggtcaaggatgagctcatccttgacggaaacgacgtcgagctcgttctcgctccgccgccctcataaaccagaaatgccatgtgaagaagaaggatatccgaaagtttttggacggtatctatgtgagcgacaagggcgtcatcgaagaggagcagtgagcgacagagtagccgaaatgccaggagatgaatatgaatgtcgtttgagttgcaattttgggagactgaatgtgaaccatttttctcattccttaaatagttgactgccggtgttcgtggtttaaaacggaatttagtcttattaactggatttgcgtattcc

SEQ ID NO: 3426 - DNA, 427 bp, Zea mays
  Clone ID: LIB3116-026-P1-K2-G10
cctacggcgaggtcctcgagtccaagatcatcctcgatcgggagacgcagaggtcccgcggcttcggcttcgtcaccttctccacggaggaggcgatgcggaacgccatcgagggcatgaacggcaaggagctggacggccgcaacatcaccgtcacgaggcccagtcccgcggcggccgtggaggcggcggcggtgggtacggtggtggccgtggaggcggcggctacggcggtggcgggcgccgtgatggcggtggcggctacggcggtggcggcggctacggtggcggcggcggttacggtggtggtggcggcggttacggcggtggcaaccgtggcggcggttacggcaactccgacgggaacttggggaactgagcggtggggcccgcgcggccaagttttcctgttcgttaccgtgatgtt

SEQ ID NO: 3427 - DNA, 444 bp, Zea mays
  Clone ID: LIB3116-026-P1-K2-G12
aggaacttccccgacaatggcatcatatcgtgcatgagccacagcacggacaacttgtacagctcgaaacggagcgcggtgattagagcctctgacgatttctggccgagagaccccgcttcccataccatacacgtcgcgtccgtcgcttataacccgtctttcttggggagttcatgcagccagactgggacatgttccatactgttcatcccatggctgagtaccatgctgcggctcgagcggttggtggctgtgccatatatgtcagcgacaagcctgggagccatgacttcaatctgctcaagaagctcgtgcttcccgacggatcgatcctgcgcgcaaagctccccgggaggccaaccagagactgcctcttctctgaccccgcaagggacggcaaaagcgttctcaagatatggaacctgaacgaacactccggcg

SEQ ID NO: 3428 - DNA, 69 bp, Zea mays
  Clone ID: LIB3116-026-P1-K2-G2
aaacggaccgccgggcgccgaccaggccaaccagcccagggacaaaggggttaaagcgcgggggaacca

SEQ ID NO: 3429 - DNA, 351 bp, Zea mays
  Clone ID: LIB3116-026-P1-K2-G3
ggacgaggaggtgcagagccccctcgccttcaagaagccccgcctcctcatgaccgcgtgaaaccgttgcgcgcgcgggcggcggatctcatctaatcacccgtccaagattttggtctgcagctgccgagttcagcggtggaagtggaacacactatcgttcattcatttcgtatggtgccagtagcgctattgtttgatttttgtggctgctcctcttgtacagtaccgagtgcgagaaaagatgcatagtcatcgtatacataccaatacaataccgtacctataggtcttcctattcctgtggaagagtagaacttgtatccttattagctgtcagttcatacacac

SEQ ID NO: 3430 - DNA, 253 bp, Zea mays
  unsure at all n locations
  Clone ID: LIB3116-026-P1-K2-G4
cgtccggaacaagaagtnccaaaaccccctcaccttctagatctctctcctcccaanaaccacatgagacgggtcttttctacagacgggggggcccaacaaataacccgtccaaaattatggtctgcacttgcctatttcaccggtggaagtgaaacacactatcatccattaatttcaaatggcgccagtagcgctatagttagatttttttggctgttctttttgtacagtacctattgctaaaaaagat

SEQ ID NO: 3431 - DNA, 522 bp, Zea mays
  unsure at all n locations
  Clone ID: LIB3116-026-P1-K2-G6
gggtgcgacccaccgccgtccgcgtatctaacaccannatccattttatattatacataccgactatgccacacggttaacacacacttattgagaaatgcagagacacgccaatacggaaatgtctagaaaatcggccgccgcttaaggggatgtctctcagcggtcgagagaacaatgtgctaggggtgtatcactatcacacccaaaaacacccaacttctgctcttacgtaagagttgccaggagtaccgattacacctctggatttgagaatcacgtgcttatataccctggtatgtggccaataatttacaaagaactattctgtatgtattatgtaagaggaggagagggttaagggatttaccccggtgtgaagatatcgcattanttcgagggaaccctagatgctgtcgcagtaaagaatcgtcaacaagggcgttctaaatatggggccaaaaagccaaaaaaataagtgattcgtttttagcccttataaaaagaaaacggattcttgaa

SEQ ID NO: 3432 - DNA, 430 bp, Zea mays
  Clone ID: LIB3116-026-P1-K2-G7
cgatctaaaccaatccattttatatattctatttatcatgccaacggttaaacaactggttggaaatgtatgacagccaggtggggaatgctaaaaaatcggccgcgcttaagggatgtcctcagcgtcgaggaacatgtgctagggtgtatacttcaaccccaaaaaacccaactttgccttacgtaaagttgccagagtacgattaacctctggatttgaaatcactgcttatatacctggtattggccatattttacaagaacattctgtagtattagtaagaggaggaaggtttaaggttttacgccggtgtgagatattctattatttgaggaaccctaaattttgtcgcattaaagaattgttaacaagggcttttttaaattatggggccaaaatgcccaaatatattaagtgtttttgtttt

SEQ ID NO: 3433 - DNA, 147 bp, Zea mays
  Clone ID: LIB3116-026-P1-K2-G8
cccactcatccacccactcttctctttttagtcgttaaaccaatacataaaaactttgtaggcaatataataatattcttgcgaacactcataaaatctgaccacctaaatgatccaactcctcctcctggaacttgttcaccattt

SEQ ID NO: 3434 - DNA, 272 bp, Zea mays
  Clone ID: LIB3116-026-P1-K2-G9
aaaaacccgggccgaccacacgcgtccggttacacgcaagcgcaagtcctcaacttttcttattcgctgcctcaaatcccctgctacaccgccttcttcgcggttccgccagcagcctcccctgcaaccgggaattcgggataagaggaagagaaaccgttcggcaaaaggaaaggagtccagagcgataaaagaatctttgaccggagtcctgccaggctgataaaatcctgtaagccatggatttactgttaggttctggaagattcttt

SEQ ID NO: 3435 - DNA, 400 bp, Zea mays
  Clone ID: LIB3116-026-P1-K2-H11
ggccggcttcggccgccacggcggcggcgtttagcagcacgtcgtcaaggagaagttcgaggaggtcgacacggtctaacgcgccggcgccaaccaccaccaccaccatggtcaccacggcggccacggtttcttggtgcgcgagaccagggtcgaaaggacatcaacacctgcaccggcgaggtccacgagcgcagggagagcttcctcgccagggctaactgagccgcccggcggccggcatccacgcccgttcgtgcttgcctgcgtgccttatgtatgtctgtggttgactggttgtgcagggtcatcgtacttggctatcgtacgtgcacgcactcagctcctgtacgatttacgacaataagcttgtgacctgaataaaactttttgtaatctt

SEQ ID NO: 3436 - DNA, 250 bp, Zea mays
  Clone ID: LIB3116-026-P1-K2-H12
cggacgcttgggcggacgcgtgggctataactagtcggcacgcgtgggctcaactgttctctggccgccgctctagttccggtttgccttgagggagcacgtggcggccgaagcaccccggttcggatacgatacacggttcagtgcgatgttataacacgtctttattggggagttcatgcagccagactgggacatgttccatactgttcatcccatggctgagtaccatgctgcggctcgagcggtt

SEQ ID NO: 3437 - DNA, 392 bp, Zea mays
  Clone ID: LIB3116-026-P1-K2-H2
cccacgcgtccgcggacgcgtgggggccgattttgttacagtgcagtctaccaatggttccggacttcccgttaaaacgcgcattgctcacatcaagatctctctcgtagtcgtgcaagtgaaaatgttcgttcggttgctttgatgcgcacgtaggctgtaggagtatagtgctactcctgtgtatgtcccccggttttttatttggtggtaaaaggagctctgacatgagagcagacacaaagattgacctttctcctgtagacgacgcagtatgctcgtcagctcgtcaggatgtagggctatagtagctgggtagcttgactctttcctctccgccttgtcctgaaacaagggctttcgttgttgttttgtggtctttcaattatttt

SEQ ID NO: 3438 - DNA, 394 bp, Zea mays
  unsure at all n locations
  Clone ID: LIB3116-027-P1-K1-A12
aacgggcccgaatcccgggccgaccaacccttccaacccttccggaaaacctgcctttttttttttcaattttccggggccaacttaatgggtggggtttctggaataaatatccttccccccaaccccataggcccgaatcttgaaatgggttaaatcttcgaaataatggatttctttagtgtnaaaaaaaaaaaaaaaaaaaaaaaaaaaaaaaaaaatttttaaatttatatataataaaaaaaaaaaaaaaaaaaaaaaaaataaaaaaaaaaaataaaatttgggccgccctccttaatgaatcaattttacctacccctttcttccaacttattatttttttatttggtcccctaaatttaaattatctgccctcttttttaaacct

SEQ ID NO: 3439 - DNA, 331 bp, Zea mays
  unsure at all n locations
  Clone ID: LIB3116-027-P1-K1-A2
cccaggccgaccacacccttcacgtttttttccttaaaaaaaaaaaaaaaaaatttttaattaaaaaaaaaaaaaaaaaaaaaagagaaaaaattaaaaaaaaaaaatgtaaaaaaaaaaaaaaaaaaaaaaaaaaaaaaaaaaaaaaaaaaaanggggcccccctttttaaaaaaccaaattttctttccccttctttccaaataaaaattttttttttttgtcccccaaaataaaataaattcccccctttttaaaaactcttaacttgaaaaaaccctttcttacccaaattaaatccctttaaaaaaaatcccttttttccaatttt

SEQ ID NO: 3440 - DNA, 163 bp, Zea mays
  Clone ID: LIB3116-027-P1-K1-A5
ccgggccgcccaacccttccgttattttaaaaccgaaaccccccccctttttatttttttttcgaccacaaactttttccagccttcatcatgtgttcctaggattgcaaccaaatcagccaaattccataactccataaaatggtctcccttttaaaatgaa

SEQ ID NO: 3441 - DNA, 375 bp, Zea mays
  unsure at all n locations
  Clone ID: LIB3116-027-P1-K1-B10
aacgggnccgaaatcccgcggtcgaccacacccttcctttgttcttcgcaccttgcttcgccctaatttacttggttggccccccttccccccgcggggttttaaacaactcttgtttgtacaacaattccccccctcctcattcccactttttctttaggaattacgtcctctttaccatcttgaacaacaccgcttttccttactcattaaccaacgccatttccttttttatctctatttccaccaagtccttccccataaggcccattgtggaattactttttgcttttttttttacacattttttgtatttcacttaccaaattatttaattatccttttcttattaaccttctctttttttttatttta

SEQ ID NO: 3442 - DNA, 293 bp, Zea mays
  unsure at all n locations
  Clone ID: LIB3116-027-P1-K1-B12
aacgnggcgaaatccccggcggaccacacccttccgccaacccgtccggccggcggcaaggtctctatgaaccaccgaatcgcaaaggtccgcgggcgtttatcaaccttgaagatggaccccattaccaccaacttttacccgttgataaccctaacccccggcggcctaaaaaaaaccggcaagctgaacctggcggtccgtttaacttttacggaatggcccaacaagtttgtaaaattctgaaagccttttatatcaaaaaattccacttacatcttaccttaattatc

SEQ ID NO: 3443 - DNA, 431 bp, Zea mays
  Clone ID: LIB3116-027-P1-K1-B6
cttccgccacaaaaataaaaaatttttttaaggaatcttagttttaatttcttccgaagggtccaatggttgaaaaggtccttgaaggggtccggccactgttagataaaataagacctttaaatgttggcctaaataatgaagcacaaattgcccccaattggagtagtactacccttccataaaatggaaaacaaggacttattggggttaaccagttaactgttccaataaaatttttgcccattaatgaatgtgaaagtttttttatgggtttatttggattgccacctttttaagtttttcaacttaataataatcctgaaatgactgtacttagcaggcttttttatggaaaactgcatgctgggtttaatgactgggttgatgtacctgatcatccaattgatcaattgcaaccaaggccagcc

SEQ ID NO: 3444 - DNA, 403 bp, Zea mays
  unsure at all n locations
  Clone ID: LIB3116-027-P1-K1-C1
caagccttccgtttttttgtttttaaacccttttttgaattttttcttgggcctctggttcctgnnncccgaatggctttttttgaatccagcactgagaaaccctggaccaccccaaaaaaatccattaaggctgttccatttaaccatccaaaaaccttggccccaaaaggttaaaaccaacacaaggttgttttaattggtaccaccatcggtaatcccttaaagaccacttaaggcccttcgttaaacatcctaataaacctaatggttgtcaagtcccttgtttttgttccctttttcgcaaccaatggaggcatccttttaaaatgcctttaaagaaaaaatggaaaatgaatggttagtttatttttcccggggaagagccctaaatttttttaat

SEQ ID NO: 3445 - DNA, 431 bp, Zea mays
  Clone ID: LIB3116-027-P1-K1-C10
ccggcccggaatccccgggcggaccacacccttccgttaccagcaactaagcaggcgaaagcagaccacacccacttggttagaaccaccaccaggggcgccggcaatggcggcctgcataacctcctcgtaagttttggcgggggcccttaagggcctgccgcccttgggccgccggccttcttctttggccgtggtttgttcaaaaaagaaaatcaagaccgccaggccctacggaatgggggggggcctgcccgtcaacttcaaccccaccggaagaaaggccaaggccagggccttgtcccatttcgtcaccaattccggctcaaccgtggacggttccggccaattttccaacaaggataactgttttccaaccgggaacttttccttcgttggaaccattggcctttttatctgggcctcaacct

SEQ ID NO: 3446 - DNA, 79 bp, Zea mays
  Clone ID: LIB3116-027-P1-K1-C11
ccggcccgaatccccgtccgcccccccttccgttcctaaaccccaaccgcctcccctttttttttttttttttttttag

SEQ ID NO: 3447 - DNA, 484 bp, Zea mays
  unsure at all n locations
  Clone ID: LIB3116-027-P1-K1-C2
aaaaaaaaaanaatannnaaaaattaaaataaaatttttttatatttannaannnaaaaaaaaaanaaannggganaagggattaaaaaaaaaaaaattgaaaggtaaaaaaaaaaaataaanaatataaaaaaataatattatataaaaaaaaaaaataaaaaaaaataaaaaaaaaaataaaattaataaaataaaaaataaataaaaaaaaaaaataaaaataaaaataaaataaataaattaatataataaaaaaaaaaaaaataaataaaaaaaaaaaaaaaaaaaataaaataaaaaaattaaataaaaaaaaaataataaggggaggagggataaaaaaaaatataataaaaaaaaaaaaaatataattatataaattaaaataaatatataataataaaaaaataaaaaaaataattaaaattaaaatatattaatattaaaaaataaatataataaaataagaatatattataaa

SEQ ID NO: 3448 - DNA, 372 bp, Zea mays
  unsure at all n locations
  Clone ID: LIB3116-027-P1-K1-C3
gggngggccaagccgaccgaacagaaatcaaaacaagcacttcaacttattacggcccctgccaacaaacacacaaagcgtggcacccaatggttaattagcggaaggtgaactactcttcgaagaagttaaggtcgttgcccccggccggtttcggccgcaacggcggcggcttcaacaacaacttcttaaaggaaaagttcaaggaggtcaacacggtttaacccgccggtgcaaacaacaacaacaacaatgttaacaacggcggccacggtttcttgttccccaagaccagggtcaaaaagaacataaccacttgaaccgggggggtccacaaccccaggaaaagcttctttgccagggttaattaag

SEQ ID NO: 3449 - DNA, 451 bp, Zea mays
  unsure at all n locations
  Clone ID: LIB3116-027-P1-K1-C4
ccgnncggaaatnccggggcggcccacagccgtccggttcctggattccctgaagatcttaagttggaggtttgtttggatgaggttgcctaagggctggggatcatggtcccaaaccgggggattgaacctgaaaaccttgaagttggggtttttttgcaaccccttaattacggagctaatgatctacttttgccctaagttttttttgaaccatgctccattttttttgtaaccccagattaatgccaaatttagttgaaattaaaggtttaagtttgctggttttttgcctaatgtttccagtcctggggccatactttgttttttaagcgacaaaaacttgttgaaaactagttaatcttagctcctgggtaatgggggtttttttaaccttaatgtttagattttgtcctaagttcagttaaaagaattatttttttgggttgcc

SEQ ID NO: 3450 - DNA, 323 bp, Zea mays
  unsure at all n locations
  Clone ID: LIB3116-027-P1-K1-C6
ccgaaatnccggggcggaccacagccgcccgggaccccttggcttaagggtaacagttaacataatcccgtcgtaagtcgtaaaactagctggtagcaacctaaaaggacccggcggtccttccttccaaacgtccttccccttgggcccctccgttttggcaacatggccccgttggcctccgccgccttaattacttctttccaaaggctggggtccgccgccgtttttcccgtagcctgttggtcctggggctgttgttcaaccggtggtggtttttcttactttcctactgtttaatggtttttttttccctttttttt

SEQ ID NO: 3451 - DNA, 335 bp, Zea mays
  unsure at all n locations
  Clone ID: LIB3116-027-P1-K1-D10
cgaaatnccggggccgaccacacccttccgcccacccgtccgaaaaaaaaagcctgaaccttttgccgttgccgaaccggttccgcgcgggaaccctccggggccggggcggaagccnaaaaacttaaccaccccgaatggaaaggaaaaaaaggctttgttggcaaaaataatggccaaaatacccggttacaaaaaaagctaagttaaggaagcaaacaacaaggcggaccccgccggtaagaacagaaccagttcttaaggtcgcatcctaaactcgtttcttgcccttgcccggtccttggtcaacaaaaatttttttaggggggggtggg

SEQ ID NO: 3452 - DNA, 402 bp, Zea mays
  unsure at all n locations
  Clone ID: LIB3116-027-P1-K1-D11
ggcggaccacccgtccgtttaacctggggggccctaaaacaacaaattcaaggaggaaccaccattgcttttaagggctgaataaaaacaccaggccgtgccaattnaatttccaaaaatttcaccaaaaaacttaaggcccttcaccaaaggaattgtttttaccattttccactttttaattattgccctttgaaaaatgaaccgcttcaattaattaaaattttttaagggtttaataacttgcggcaaatctttttgttggccatttaaaaccaccaggaccttatttccacacttgttttctttttaaagatgaagtcctaaaaaccttattttacctgaggcaacttaaccttactccaaccttttgttttgaattgcttttcaaaaccaggtttt

SEQ ID NO: 3453 - DNA, 371 bp, Zea mays
  unsure at all n locations
  Clone ID: LIB3116-027-P1-K1-D5
caaaaaaacaaaatgaaacctctaatgggaattaatttaaatgaaataccgcctccatatttcaagtttaaaattacaaaaactaagtttccctttnaaaaaaaaaaaaaaaaaaaaaaaaaaaaaaaaaaaaaaaaaaaaaaaaaaaaaaaaaaaaaaaaaaaaaaaaaaaaaaaaaaaaaaaaaaaaaaaataaaaaaaaataaaaaaaaaaaaaaaaaaaaaaaaaaatataaggggctccccttttaaaaaatccaaaattaactccccgttaattccaaaaaaaaatttttttttaatccccccaaaaaaaaaataaatgcccccttttttaaaacctttttctggaaaaaacccttgctttcccc

SEQ ID NO: 3454 - DNA, 365 bp, Zea mays
  unsure at all n locations
  Clone ID: LIB3116-027-P1-K1-D7
cggaatcccggggccgcccacacccttccgggaacctcctaactttccaccaattcctattgaaggtccaaaaagtaccaaaaagtcggggggccataaaaaatcgtgggaggcaccancctttatccacccttaaaccaaaaaccaaaaaccttctggagcctcccaggaccaaagtttcgataaactaaatgatttaccaccccttagtgttgttaattttagggaagaggaagaccagttcctgcctgcccttaaggaaaaaagccttgcctaacaagaagcccgaaaatttccaaaggaggaagaagaaattcttttcctacttaagggtccacttttaaggaaactaccaaaaatccttc

SEQ ID NO: 3455 - DNA, 63 bp, Zea mays
  Clone ID: LIB3116-027-P1-K1-E1
ccaacccttccgcttgaaaaaaataaagaaaatgcccccgactaactcccgcttgaacttccc

SEQ ID NO: 3456 - DNA, 207 bp, Zea mays
  unsure at all n locations
  Clone ID: LIB3116-027-P1-K1-E12
caaccacacccgtccgaaaccccngaccaaacgttaagtttcaattatgggaaaaacacaaaaccaagcgcgagattttaattaaaaattggctcgaaaaacaaaccaacctttaatttctcaatcccttcctattccttaaaacacttaactaccttttccttacctttctatatctttttttatttcataattctttcttctttc

SEQ ID NO: 3457 - DNA, 413 bp, Zea mays
  unsure at all n locations
  Clone ID: LIB3116-027-P1-K1-E6
cggggcgcgaccacagccgncctcccggtccaaacaccaagccacttgaaactttcttttttccctaaaaggcccctttaagggggaagcacaaccctttttttggggggttaaccaaacattttaattcttcccgccacccccccaaaactgaatgcctcccttccagaatccattggagcccacactacttcttcctgcatttaatccggttaaaaccatttttttctaaccatccattaacccattatcctgaatgtaaatttgtttaaaggaacaaaaaattttcaattattaaaaatccgtacctttgccttaaatgagaccaatattgaatgttaagacctaataatcttgacccatcattccttccttccagttagaataaaattggatgagtttatagattctgg

SEQ ID NO: 3458 - DNA, 417 bp, Zea mays
  Clone ID: LIB3116-027-P1-K1-E7
cggaatcccggggcggcccacacccttccaaaaacaaataaccttgggggccttcctttttggcggcggcggcccaggtccctttgattgccgccccggaaaatgggggggggaaggtttcaacatgctaccttaaagggcccaagcgtggtaaaggaaattttaattgaactgaccctggttttaatcgttgaaggtttgtggaaaatccaccattggaccaggcaaaggaaaactagatccttttacaacatgcttgacaggggccaaatcagcgtcttcgtcaaggagtagttcttacttgtaaacactgaagtttttttttccagatgtttttgaaaactaattttttgaaaagcttgacaaagtgaatgctgtgaaaatttggcttgaaaataagcttaaccatttgggacc

SEQ ID NO: 3459 - DNA, 206 bp, Zea mays
  unsure at all n locations
  Clone ID: LIB3116-027-P1-K1-F12
acgggnccgaatccccgtccgccccacccttcctaaaccccttaccaaacgctaatcttcttttatccgacaaccaccaaaccctgccccccgttttaattaaaaattgcttcgaaaaccaaaccaaccttattttttccaaccctttctttacctctaaactcttattctcccttccttcttattcttatttctttattttaatt

SEQ ID NO: 3460 - DNA, 442 bp, Zea mays
  unsure at all n locations
  Clone ID: LIB3116-027-P1-K1-F2
ccccgggccaaccaacccttccnaaaccccttgtccaaccccttgtcctcattattctttaaggtatcccttctcttaccacggagggtctaacatactaagtttgctgtgtcaccccattacacttatttttattgaaccatttttcttaatcatttgttaccattactccccctatcttaataatttttttttttttttccccataactttatttcacccttttttaactaaaaatatttttaaattctttttttttccctactttttctatattatatatctcctatttatctcttattattactttctattaaacccttattattttgcgtgttgttcctatatttctttattttttattactttttttattttttattttttttttatttttttttttttttttttttcattattttatctattttttttcttaatt

SEQ ID NO: 3461 - DNA, 187 bp, Zea mays
  unsure at all n locations
  Clone ID: LIB3116-027-P1-K1-F4
cgaaannccggggcggaccgaggcgtnccaatttcccaaaaccctaaaccagggcccatttttttaagcccacccccttctttccaagggccggtttaaccactttaattgtcgggatacccaacttaatcccttaaaggacccaggacccgttggttttggttttggaccgaaaattgccaggatt

SEQ ID NO: 3462 - DNA, 294 bp, Zea mays
  Clone ID: LIB3116-027-P1-K1-F5
cgaaatcccggggccgaccaacccttcctccaacccttccgcttgggtaccaactttaataacttgaacttgccccccgccgtttggagcaacgtccaacccttgttcttgaagaccaacccaagttccttaatcttggtgaagaacttcaaccgttacttgcccggcgggaacgaaaaaacggcgccgccaagaacctcccccttcctcgctttaatgaacggcttttcttcttaatccgccaagaaccccttaatgtttttaacaataaccggggccaagaacggtttgaac

SEQ ID NO: 3463 - DNA, 364 bp, Zea mays
  unsure at all n locations
  Clone ID: LIB3116-027-P1-K1-G1
aaatcccggggccgcccaagccttccnnaaccccttggccaacccattcaattccttttttttcttaaccgcaaattccaaaaaaaccggggtttttttcctgaaattcccagttaaaacaaacnccttcccttctaaattctttaaccctttcaaaacctgaacgtccaaggccttttccaagaaaaatttccttaggtttggcggctttttaaaaaaaaactttaagtttttccccagttccaaaatcgggaacaacagcatcctaacttacaatatcttttcctaaggcccaaatttttaaactaaaccatttaatcccattaattaaaacgttggtttttttccctccttcctttttaaa

SEQ ID NO: 3464 - DNA, 366 bp, Zea mays
  Clone ID: LIB3116-027-P1-K1-G11
gaccacacccttccgtttttcaaaaaaggtaatggttggtaacctttaattcctttgtcaattcctcccgatatgtttaaaattataatggggagggcattaaccccaacacccataaacattgttcttgcccctaaattcaaagggcctttcattgaacttttccatttgttaattccaaaacccattaaattccttccttttcgtaaggctttttaccgccaaaaccttccaaatttaaccaatttctttgccactgcttgggatttcctaatagtaatttttttccaagccttcctttttgggcttccagggggatcaaaaattgctcttgtccaccaaggttaatttccaattaacttgttt

SEQ ID NO: 3465 - DNA, 447 bp, Zea mays
  Clone ID: LIB3116-027-P1-K1-G12
gggccgaccacacccttccaaaattcccttacttaagtttactttccatttttccgcccaccaccaaacccgggcgtccgtttaaatttaaaattgcctgggaaaccaaccctaccttttttttccaaacccctttcctttcctttaaacactcattaaactttgcttcatctccttttttttatttttccaataactactccaccccttccaatttcattaaccaacctatccttatttgttaacaaatttcttctccttctttcttatccattatccatttttattttcccatttttttttcctttcttgtattggcgtaccaaattttttttttatattatttttaaattacttattattattactattctccccttttttttattttttattttttcttatatatttacttcttctcctttctttccttctctattttattta

SEQ ID NO: 3466 - DNA, 290 bp, Zea mays
  unsure at all n locations
  Clone ID: LIB3116-027-P1-K1-G6
caacctaacaaactttaacttccttttccaattacttttactcttactcaatttcctcggtgccctgtctttttcctaaattgttttgtcctataaccctacttnaatccctttccttttttaaacattcctccaatttttcgtttccgttccctcccaaaccttcaaatttttccccctacttaattcaacccttcaaaattccgttaaactttttccttaattctccttattccaatttttttcccttcaattaatcgaaccttttgttgtccgaaacacctttaata

SEQ ID NO: 3467 - DNA, 427 bp, Zea mays
  Clone ID: LIB3116-027-P1-K1-G7
cccgggcgggccacacccttccaaaaaaaaaaaaaaaaaaaaaaaaaatttaattttaaaaaaaaaaaaaaaaaaaaaaggaaaggggaaaaataaaaaaaagggaagggattaaaaaaaaaaaaaaaaaaaaaaggggcccccctttttaaagatccaaattttcctcccccttctttccaacttataattttttttttgttgcccctaaattaaattaacttgcccgcgttttaaaaccttttaacttgaaaaacccttgccttccccaacttaattccctttaaaaaaattccccttttcccaacttgctttataaccaaaaggccccccccggttcccctttccaaaaatttcccaaccttaattgcaaattggacccccccttttaccgcccattaaaccccgcggttttttttgtttcccc

SEQ ID NO: 3468 - DNA, 227 bp, Zea mays
  Clone ID: LIB3116-027-P1-K1-G9
cgaaaaacccggtccgaccacacccttccgccaacccttccgtttttaaaccccaattctcttcttcgaattttaataccccttcttgcggggttttcttaactttgggcagggacaacaactccttcaaaaaccctttaacaacctacttcaatttcttcaattcaaaaatcatccttaatccgaaaacccattatttcccccttttttctcttcataactttttc

SEQ ID NO: 3469 - DNA, 414 bp, Zea mays
  unsure at all n locations
  Clone ID: LIB3116-027-P1-K1-H10
aaannccggggcggcccaacccttccaaccaaaccagccaccctaaaaaaacttattttcctcccctgtcaagtttcctttgccttgtccccaatcccgttttgcctgccagatccaacctttcaaaattacccaaccaattcccttttttgtttcccccaatgccgaagaaccattcaacccccaattaccatcaacctaagaaaaggaagtttttgttgaaccaccaccacccaagaaggcccccaaacttaagttacctgaatttcttccagttgccggttccccagcccgcgttttccttcgttggcttttacggcttttcaaaggacaaccccttcctcttcctcccaatcgttaaccccttcaattttcccttaaaggccttctttagcccctttatacaaccttttg

SEQ ID NO: 3470 - DNA, 386 bp, Zea mays
  Clone ID: LIB3116-027-P1-K1-H12
ggaacccggggcggaccaacccttccgatggcctggaccctttgaaagctctttaataatccggaaaccaccaaaacctggctggcgcggagaagttccaaggggtggcgaagccattccacccatttgttcccaaggaagattcttttttttcgaaatttaaagtggagttgtttaaacttgtttaacagttaattggtaatcacttcctgaacacttacccaaattttggcaggaccatacctgtcggggaagcaaaccgttacccaaaggttcctgtccccaggttcctggaagctggtcgatttgttttaaaagctgttccaaatgaatctgttttggtaacaataaggcctgttttaacaagcagggcctaaatgtccttt

SEQ ID NO: 3471 - DNA, 430 bp, Zea mays
  Clone ID: LIB3116-027-P1-K1-H3
cgggcggaccaggcttccgtttttaaaccgcaaccgccttaatcttgtttctttcttggaaccaaccaagcccttaatcggggggtcaacttaaacccaagttagcggttaatccttatttcctaaaaaccttgaccggattaattttttaaattaattaaataaacagttgttttgacctactttccaagttttagtttaaaaatcttttaaaggaaacaacttaagttccagttaaccgaattccgcccagaacatcccgtcctattgcttaattttgaacctttccagtcttttcttactttattttccttattttaaaacattttttttcttccatttttcttttaaaataatcccttttcctgtaaacctaattttttttttttaattgcctttcctttttttttcctagttttttgggtccctt

SEQ ID NO: 3472 - DNA, 296 bp, Zea mays
  Clone ID: LIB3116-027-P1-K1-H4
cggaatccccgggcggaccacaggcttccaaatccttcctaataatcacttttgtcctgtttattattcaaagccaccaaaaatttttgagccgggattaaaatccttcctgtaggggaaataaaaaacctgcctagccatcctacaccctatttgaatttaccacctttttaaccaccttattccccttttaaatcaacaccatttaaataatatttccataacatttttttttcctcaaaaaaaaaaaaaaaaaataaaaaattaattttaataaataaaaaaaatataataaa

SEQ ID NO: 3473 - DNA, 314 bp, Zea mays
  unsure at all n locations
  Clone ID: LIB3116-027-P1-K1-H7
cggggcgggccaacccgaacacggccagcccccttagcccccttttcctttcctttctcttccctcccttcctccccactggggccgcttttttccaataaagtgtttagaaccaaaaaatcccttaaggnttccaattaattccttaacgcaacctcaaccccaaaaaacttaattagggtaatggttaacttatttgcccatccccctaataaacatattttccccctttaacttttaatccaactttctaaatatagaactttttttccaaacttaaccaacactaaacccttattcgttctatttttttt

SEQ ID NO: 3474 - DNA, 335 bp, Zea mays
  unsure at all n locations
  Clone ID: LIB3116-027-P1-K1-H8
cccgggccgaccaacccttccgaaaaaaaaaaaaaaaaaaataaaaattaaatttaaaaaaaaaaaaaaaaaaaaaaaaggaaaggtgggctttcctatttggagagtccaacctaacnaccccttccttccaacttaaaacttttttaatatttcacccaaaatcaaatcaactgcccgccttttaacaccttcgaacctgaaaaacccctgccttacccaaattaaatccctttcaaaaaaatccccttttccaaatttcccaattacaaaaaacccccaacccatccccctttccaaaaatttcccaacccaaaatccaaaatggacccccc

SEQ ID NO: 3475 - DNA, 423 bp, Zea mays
  Clone ID: LIB3116-028-P1-K1-A10
aaatcccggggcggaccacacccttccaaccttagttccggaaattgccgcctttattttatacgcccgaagccttgccgcccaggttggacccttccaaggtggggggggggttcttccgtttaaccgccggcaaggtcggcccacctttttcgttggccccaaaaatcggcccgttcggtttttcccccaaaaagatcgggggggccatcgccaaggaaccggccaaggactgaaagggcttccggttaaccgtaaagttaaccgtccaaaaccggcaggccaaggtttccgtggtcccttccgccggggggtttgtaataaaggccttaaaggggccaaaaaggaaccccaggaaggtcaagaccttaaagcccaggggcaccataagccttaacaacttatataaaatcgccaggacct

SEQ ID NO: 3476 - DNA, 350 bp, Zea mays
  Clone ID: LIB3116-028-P1-K1-A11
gaaaccggggcggaccaacccttccgccaacccttccgcttaagccgggtgttaatgtccggttcccagggccccaggtcggggcggagggttacaaaggccagccggggcccccggccctacttccgttgttctttcgccccggcctgcccagcaaaaaaaaaggtgcagcgcagggccaccaacccaacaatcttggtcgcaacttccaagggcaaccacaacaacggccagcccccgcaacaggcccaggccccgaacaacggttcaagccttggccccagaaaaaagccgccttctcctccaaggccgttcgccgccgttccggggcggttccacaacaagcaggt

SEQ ID NO: 3477 - DNA, 365 bp, Zea mays
  Clone ID: LIB3116-028-P1-K1-A2
gggggccgcccacccttccaattagaataaaccctccattggtgtttactgttaatttggttaaccatgaggggggtggtttcttacttggttctgggaccaatgcctaaaaaaaccaccttgttgccaaattcttttggaagaaataaaggacccaaggccttccttaatggaaaaaagttgttggccaatatttttgtttcaaaccggaagttttaaatcgatgatttttttaatccaaaggcaccacatactgagcttaaaccacccttaatacttagttcctggttgttaaagcaaccttttaaagcaaccttaaaacttagctcctggttgcatcccttaaagttaatgcattcattttt

SEQ ID NO: 3478 - DNA, 474 bp, Zea mays
  Clone ID: LIB3116-028-P1-K1-A6
cggggcgggccacaggcgtccggccaaataatttgttgggggggaccaaaaaaattggttttgggggctctgaattgtttagagggggccggttgatgatgtcgaaagggaccattaacattttaagggttggatggtggttttggggggcgggtaatatcaatatatacgggtggccaaactagttgggtggatggagtttgaccgtggtggggtaattggaatggggttggggatagtttcccaggatttttaatcggttttccatgggctttggggaccctaaatggataagaccggttaccaaggattgatgtaggttaaaagtctaagggttcatgacagctgttagtggggccttttgtggtccaacttttgttcttgttaaggaggctggagtctgtttatttggcaaccattttggttttgtgggttggatgtcaaaaaaaaataattctttttttctttcttttt

SEQ ID NO: 3479 - DNA, 302 bp, Zea mays
  unsure at all n locations
  Clone ID: LIB3116-028-P1-K1-A7
aaaaccggggcggaccaacccttccgngaacccttggtttttcctgaagttggcctttaaactcctaagccccccccggcggcccgttccaattgtagattttttcgggtgttcccatccaacccagttccagttaacttgggcgggcgtcctggccgggccaagcgccgggaagtttttttaccaagccgggctttttcctcctttgttgggggctccggtttaagttggccctgggcgcagccggggttttttaatgacccgtggtggagctccattttaagcggccggacggtccggtt

SEQ ID NO: 3480 - DNA, 337 bp, Zea mays
  Clone ID: LIB3116-028-P1-K1-B1
gacccggcgtccgcccacccgtccggaatttttaattaatgagttgtgggtggggcctaatgtcaccccaaccagaacgtaaaccaggtgttggttttagaggctttttttaaggattttaaatggccttactccaccccggggtccgaaaccaaggttcctgtttttttggcggcattccgggtaactcttaagttcggggttccgcctgaagaaccaggacctgcagaacctgcggaatctcttactggtccatggccaactgtttggactgatggactaaccagtcttgatcgttccaaaggacgatgtctttacattgggcccgtttcttggg

SEQ ID NO: 3481 - DNA, 372 bp, Zea mays
  unsure at all n locations
  Clone ID: LIB3116-028-P1-K1-B10
gcggaaatnccgggcggaccaacgcttccgccaacgcttcggttaaaccttcattttacttttggccggaaatctttgccaaacggggaggtttgaatttggcccggggaggacaaaatccaagccaaaggcataataacaaggaaacccaagaacttaaagcaaggccgaagccggtttggtccaaaaaaccgaatgttaaattggtcctaaattttttgcaagctaagttgtacttcggaaagaacgccaagctaaaggcttctaaaaggaagttccaggatgtggccaaagattcctataaccctaataaccaaagtaccttccatagggggggtcctgaaaacctgcccaagtatgggaccactaaca

SEQ ID NO: 3482 - DNA, 392 bp, Zea mays
  Clone ID: LIB3116-028-P1-K1-B11
ggcggaccacacccttccgaattaccaacgtttttgggacctatttaagtctccagctccgttaacataatggaaaggggcaggataataaaaacgggggccggttttatcgccccacaaattaatgaaggcggtttaaaatttatcgcccttgattagcgtgaaagcagtaggccaaataccaaaattggttcgttggcctggttaaccagccattaagcttactggccagaccagattgcttaccgttgggggtttgaactgttgcctacttgtttcaaagggtttccacatcctaatttagtaaaaaaaaatgatttggggctttgttcgactaggcatttgtgttttgtcttaggggtggggagctgttttaccctacttttcttttt

SEQ ID NO: 3483 - DNA, 351 bp, Zea mays
  Clone ID: LIB3116-028-P1-K1-B4
cggggcggacccagccgtccgcccacccttccgataaattttttcaaggagtgtcccagggccaaaaacctaagaaatttgatatggtttggcaactctttggggggatttgttgttgcaaaatttgccctaaagcaccctgaacacgttcaacagttgattttggtgggtcctgctggcttttaataaaaaacagagcttagttttgaggggttaaccaagtttcgggcaccatggaagggcttgctaatgaatcgtttttgggggtccaattttactccccaaagggtatttaggggatggggtccttggggtccaggtttagtccagagatttaccagtgccaggttt

SEQ ID NO: 3484 - DNA, 385 bp, Zea mays
  Clone ID: LIB3116-028-P1-K1-B5
tggaaaaccggggcggaccacaggcgtccgccacacgcttcggttgattttaaggccggttgtttgccggccaaacttggattggaaccaggggcccttggggttgttaaaggggcaaagcgtaggaaaatacatgctttaaaataaaaatcccgttttgggcagttggaatttgcccaaaacaaagggcagattgcttggcagcagttttaacccaaggggaaggccaaaaagggggggtttttttccggtggcaggagggggagcattttaaggtaaccggccgaccacagaggtaggggggtggtaactgggggtggcaaaggcctagccgacttccagaggggggggaagctttggtaccttaaaggtgggtccggggatg

SEQ ID NO: 3485 - DNA, 303 bp, Zea mays
  unsure at all n locations
  Clone ID: LIB3116-028-P1-K1-B6
ccaaggcgtccgncaacacttccgttaattttaatccccgtacttttctttccaacctcccaatcaacccaggggccctttaaatttttaagggggcaaaccataacaaaatccatccttccaaatcaaaatccccctttatccacttttaattttcccaaatcaaaagtcaaaatccatttaaccatccccaacccaaaagtaatcccaaaaatttccttttcttctccaaccacaaaaaataaaccatttttatttatcctatctccctctcaaaaaatgtattttttcccttttatttct

SEQ ID NO: 3486 - DNA, 338 bp, Zea mays
  Clone ID: LIB3116-028-P1-K1-B7
cggggcggaccaagccgtccgccaacccttccaaagcaggttcgatttattattattactagctggtccaaatactacccggcttgccagcaagttggccaggggcccaaccgtaataatggcctcttcggaaaccgccgtcgccccgttcaagggtttaaagtccgccgccggcttcccggtgtcccgccgaagaaccagaagcttgggaaacttaagaaacggcggagggatccggtccatgcaggtttggccggcctacggcaccaagaagttcaagacgctttcttacctgcccccctttgtcaacggacaacctgttgaagcaggtggactac

SEQ ID NO: 3487 - DNA, 488 bp, Zea mays
  Clone ID: LIB3116-028-P1-K1-B8
accggggcggaccaacccttccaaaaaaaaaaaaaaaaaaaaaaaaattttaatttataaaaaaaaaaaaaaaaaaaaagagaaggggaaaaaaaaaaaaagggaaggagaaaaaaataaaaaaaaaaaaaaaaaaaaaaaaaaaaaaaaaaaaaaaaaaaaaaaaaaatgggggggctgttttattggtttaaattttttattctgttgttttggaatgtaaattttttttttttgggaataaaaattaaattttagggggggtgttttaaaaattgttttttttaaaaaacttttgtttatcaattttttttttttttgttaaaaattttttttttgttgtgttttgtaatataataaaaggggtaaaaaatatttttttttttaaatattttgtaattttaattttttatttgtattttccttttaaattttttattatatgttttgttgtgtgttttttctttaattttattttttttttttta

SEQ ID NO: 3488 - DNA, 384 bp, Zea mays
  unsure at all n locations
  Clone ID: LIB3116-028-P1-K1-B9
aaancccggggcggaccacacccttccggggacccttgggttgggacgtaaacgcgcataaggccgccgccgccccgccgggtggttggccgacaccgcccggcgggaggccaaaatgccgttaaagaggttcggggggatcggccaaggggcctttgtaaactacggcagggggtttggccgcttggtcgtaatcgtcgacgtcgtcgaccagaacagggtttttgttgttgcccccgccttggttggttgccaaatgaacttaaagcggttttccttgcctgccataaagattgacattaaacttgtccaaaagaagactccattgttcaaggcattggtggaagcttttttgaaaagcaagtgggagattagtttatgggg

SEQ ID NO: 3489 - DNA, 410 bp, Zea mays
  Clone ID: LIB3116-028-P1-K1-C1
ggggaccaggcgtccgaaatccccccggagaccgggctgccggggttaatgtcgggcgcaaacccgcccccggccacctggaactactgggccgattctcggacccttttcgttttaaacatggcgctaatgggcttggccgagcaccgccgcctccaggactgggtccaacccggcctccatgggcaagcagaacttcctgggcctcaagaagttcctggccggttccggggacccgtcttaccccggcgggccctttttaaacccgttcggtttcggcaggaccgagaaggagatgaatgacctcaacctcaaggggatcaagaccgcaggtctcccatgttcgccatctttggtaacttaatccaggggttcgtaaccgtcgtgggcccgttcaaaaactttgttta

SEQ ID NO: 3490 - DNA, 303 bp, Zea mays
  Clone ID: LIB3116-028-P1-K1-C12
ggcccggatccggtggaccaacccttccggacccttggcttgttggtaattttttgcaacgacaactgcggaccaaattttgtggggttgggaactaaaactgcacggatttgacatagttgataggttttggcattcgccccacctctttttctcaaaaaaacatttggagttgacatttttttttgatttgatggttttatgttatttttgtcaggttgaatttcttgtttgaattttttgggagggttttttttaaaaatttacaaattgttggtttttattattttatattatttttta

SEQ ID NO: 3491 - DNA, 387 bp, Zea mays
  Clone ID: LIB3116-028-P1-K1-C4
cggggcggaccacagccgtccgccacacccttccaaggaattcccggccaggattaaatttaaaaaaaaccgccaccaaccggggatgccttccttgaacttgtggaccaacataaacttgaaggggttggccacttccgccttcttggccgaagcttccaagtccgttgccaacataatgggaaagcccaaggcctacttaatggttgttttaaagggttcggtccttttggcttttggaggtccccagaacccaccactttacggggggctgttttccatcggaggcctgaaccctgttttgaccaaaaactttattgctggcttcgtttttatcctgaagtaaaagttgttttttccaaagtaacccttttacctaaagttttt

SEQ ID NO: 3492 - DNA, 197 bp, Zea mays
  unsure at all n locations
  Clone ID: LIB3116-028-P1-K1-C5
ggcggaccacaggcgtccaccaaaaatatccggccaaccccaacctcctttatcttattcaggcaagaacccataacccagaaggcttgggaatacccgggggggttcccaacccaacggccaattnttcctcttcctccttagccgggcaaccaagggccgcctcctcctttgtaaggcccccaagccttccccac

SEQ ID NO: 3493 - DNA, 381 bp, Zea mays
  Clone ID: LIB3116-028-P1-K1-C8
cccggcccggaatccccgggcggaccaacccttccgcttgggccggggacaacccaattcgaacctttcggaaagaccaaaaaaccggaggagatggttggtaccaagcagactgttggaaagtccacggaagggaaggttcccaggaagcagtttgccaccaaggttgcccgtaggtttgccccaaccactggtggagggaaaaagcttaaccgttaccgccctgaaactgttgccttccgggggatccgaaggtttaaaaaaagcactgagctgttgatcaggaagttgcccttccaaaggctcgtaagggaaattgcacaggacttaaaaactgatttgcgtttccaaagccatgcggggcttgccctccaggaggct

SEQ ID NO: 3494 - DNA, 450 bp, Zea mays
  unsure at all n locations
  Clone ID: LIB3116-028-P1-K1-D10
cgggnccggaaacccggggtggaccacacccttccggggcccttcttgattggtggcctaatttgattcggttggttttggggggaccaccagggtgggttgaccgaagaggaaaaattttttccttggaatggttgtttgtttttagattaaaataccaaaatttttttttggttggaataacaaatgatttttgaaccattttttcaaaaaaaaaaaaaaaaaaaaaaaaaaaaaaaaaaaaaaaaaaaaaaaaaaaaaaaaaaaaaaaaaaaggggggggccgttttaggggttccaggtttccttccccttgcttgcaacttattagtttttttttggggtccctaaaattaatttaattggccgcggttttaaaccgttgggcctggaaaaaccttggggtacccaaattaaatggcttggaagaaaatccccttttcgccagtt

SEQ ID NO: 3495 - DNA, 319 bp, Zea mays
  Clone ID: LIB3116-028-P1-K1-D12
ggggggggccaagcctaccgcccacccatcctaaaaaaaaaaattttttttttctaaacccaaataaatcaaagggtgcatgtttttttcttaagagaacgataaaaatctaaaccttaataccagtatattctacttttattaaaaatttatttagttaatctaaaccatgtgtttttaattctttttctaaattctgaaaattttctataaggatccttttaccaatcttaataaatttttttttaatttccaaaaatttaatctttatccaattaatattttatttatttttttctcttaattttatctataaaat

SEQ ID NO: 3496 - DNA, 381 bp, Zea mays
  Clone ID: LIB3116-028-P1-K1-D2
gggcggaccacaggcgtccggggccgccgccggttaatttgccgccgcattaatgctattaccttactaaaccgccccggcttaggcttaatcccaagcaacaccagggcccgggccaacagccgaatcaaagcccgggccagttgaagggaacctgcggggtgggcagaaccccgatcctgggccagggcgtcaggtttttggggcataagggcagccggacggggacgccttactgttggcttaagggccagtcgttgcggcagcagtgttgccagcagttaaggcaggtggggccgacaaaccggtcccaggcgatcttgggttgggtcctccagtccatcctgcagaagaagccgaaaaggggccaggttcgggggt

SEQ ID NO: 3497 - DNA, 361 bp, Zea mays
  Clone ID: LIB3116-028-P1-K1-D4
cggggcggacccaggcgtccgggccgtttttccatttaagtaccatggccttgtaccattttttaaaggaaaccaggtctttggaaattttcgttggaatttggccgtggttaactcgtggtttcatgccatccttaaggctccgttgggccatcgttttgggggggtttgaaatggaatggggtggattcccgaatcagccgggttattgaaataggaggtattttcaaaaaaaaaaaaaaaaaaaaaaaaaaaaaaaaaaaaaaaaaaaaaaaaaaaaaaaaaaaaaaaaaaagggggggccgttttaggggatccaggtttccttccccgggcttgcaacgtattagtttttttttgg

SEQ ID NO: 3498 - DNA, 264 bp, Zea mays
  unsure at all n locations
  Clone ID: LIB3116-028-P1-K1-D5
gaanaccgggcggaccacaggcttccgttttcttccccttttaacaaagtcctcctttttttagggttcctaagggttttttgaaggggcaatgtcgccggttgatggggagtaccattgcttcgtcggcggccttgcttgggccaccagcaacaagtcgttggaaaatgctttcgcctcttacggcaagatcctcgattccaaggtcataaccaaccggaagacggggaggtcccgcggttttggtttcgttaccttttcttc

SEQ ID NO: 3499 - DNA, 457 bp, Zea mays
  unsure at all n locations
  Clone ID: LIB3116-028-P1-K1-D6
ggcgggccaagccgaccangaacccttggtttttaatttaaaaagaatttttttttcctaggaccataataccaaaggggggcttaaaataacaaatgagtgaccccaattttttccttattatttccatttttccttttccaaaaatcctctgtcctataattaatgtttttttaacctaaccattttaacctttcaaatttccaaaatttttccaaataaaaaaatattatataaattttaatataaattatcataaaaaatttaattaataaaataaaaagtccttcctttttaaagtaccaaacttaccttccccgttcttccaatttataatttttttattattttcccctaatttaattcaatttcccctcttttaaaacctttttccttttaaaaccctttcctttccccaatttattcctttttaattaaatttctttttttccaattt

SEQ ID NO: 3500 - DNA, 390 bp, Zea mays
  Clone ID: LIB3116-028-P1-K1-D7
cggggcggacccacccgtccgccaggggggtccattaacccacctagggttttggggccgccgccgccgccgccgccgagggggaaccattgccgtggacgaggaccttccggatcaagaagaacctggcaaaaaaaatgccccagaaccgcccaatcccttactggatccgattgccccctgccattaccataaggtccaacgccaagcgcaggccctggcgccgaaccaagctcggtttttgagcgtcggaattggccggctgttgcttcggaaggctagggtttaagagctatcttccttttgtttaataaatgggtcagtttttttgtaagctagcaagggttgttttgacccttttattaagattttggtgagcggggatgttaa

SEQ ID NO: 3501 - DNA, 433 bp, Zea mays
  unsure at all n locations
  Clone ID: LIB3116-028-P1-K1-D9
cggnccggaancccggggcggaccaacccttccggtggccttgaaccaaaaaataaagggaagtttgttgcctgaataagtaatgggattgtacggaccatatttgggctccaggggactttcaagtgagccaagggattacaaatgcaaggggcttaaaaataactaaaaagttgggtaaactggtagcctaacatggggactcctaacaacggccctttttggggccaattttgttgtccggcctggttcttttgaaactgtgttttggcaaccaaattaacaacgtggaaccgacaagccattgtttcctttaagaagggcagccgaccaagaagataagaaggatgtgccaaggccgggaacatactccaactttttttttaacctaattttttccttggccagaatgtactcggcaatgcttttgact

SEQ ID NO: 3502 - DNA, 407 bp, Zea mays
  Clone ID: LIB3116-028-P1-K1-E1
gggcggacccaggcgtccgcccacccgtccggaaattatggggctatggtgaataaaccactggtaaggctgtttggctcagttgtttcgggtggaccataaatgatttaatattaatcctgcgtaacattaattaactgttgggcaaaattgatatggctttcctgaaaaaaaaaaaaaaaaaaaattaaaataaaaaaaaaaaaaaaaaaattaaaaaaaaaaaaaaattaaaaaaaaatggggggggccttttaggggatcaaggttaactaccccgggcttgcaacgaataagtttttttttggggtccctaaaattaaatcaatgggccgtggttttaaaacgccgggccggggaaaccccgggggttcccaaattaaatggcttggaggaaattccccttt

SEQ ID NO: 3503 - DNA, 411 bp, Zea mays
  unsure at all n locations
  Clone ID: LIB3116-028-P1-K1-E12
gggnccggaatcccggggcggaccacacgcgtccggggcacgctgggggtacagttccttattggcttaggttccaaactggcagtcttttaagggggttgatccgaatgcgcggggaaggatttttttggttattttttacgcaaccgtaatttggttggttgaaattaaaaacgtcgggatttacatcgggacggcaactgccggggggatatttaacgggtaattacttaaaataagttggggttccatttggttggtttttttcccaatgggggcgatcggtttaatggtggttttgggcagggggctaagtaacaaggccaaggccgggggttcacattaccaggagcagagcaatgaaggttaaggtgaaggcgaaacttctactttttaatgggaaaaggttaa

SEQ ID NO: 3504 - DNA, 380 bp, Zea mays
  Clone ID: LIB3116-028-P1-K1-E6
aaccggggcggaccacagccgtccggccacagggaacccgctttcttaatccggtttccgtggccgggggccgcttaacttaagcgccttaaccccaacggaggcggggggaacctttgaagtaccggacccggcttttggggccaatccgggtaaggggttcgatgtccgtttgcccctgatggatccgaaccggttgaccggccccgccggttccgacgccgacattgccattgactgggataccgatgcctttgtgatcccaagttttagggttgaagaatttgttttcggtgactgggaagcttaacgggttaccgatcctgaacaacctccaaggcccagcaaggttccagggaccttttattttggaccacacg

SEQ ID NO: 3505 - DNA, 164 bp, Zea mays
  unsure at all n locations
  Clone ID: LIB3116-028-P1-K1-E9
cgggncgggaannccggggcggaccacacgcgtccgaaggcgggggttcaggaactacggaaggtttggccggttttgcggggccaacggcttgcggaacttatatggaagcggcgaccagcggaactgggccaagttcgtaacccggggcctgtttttctttt

SEQ ID NO: 3506 - DNA, 367 bp, Zea mays
  unsure at all n locations
  Clone ID: LIB3116-028-P1-K1-F11
gggaaanccggggcggaccacaggcgtccggcttgggttggggacggggccgcccggccttaaggaataaactaactcttgccttaatacgtatcaatagccggggaggtccgtgtttgtggtaggttttacgcgacctaagttggggggcaggttaaaaccccgaccgggctggaagaagcatcgttgggtggacaggttaaccaaccagcagaaacgtaatcaaaatcaatggacaacaagccgttgcctaattcaaaaggcaagccccttgcccccggaggagccccgggggggggcttgcttggggcggccggcttccaaccggggtggaacaacaacttgttcaagttttaaaaggccaagt

SEQ ID NO: 3507 - DNA, 375 bp, Zea mays
  Clone ID: LIB3116-028-P1-K1-F12
cggggcggaccaacccttccgccaacccttccggtggggtgggtttttccttcccctccggtccgggttcggtttcgggaggttttccggggttcggtttcggggttaaccgaaccaaaatgccggcgccgaatgttgagaaccgttgtttcgtcggcggcctcgcctgggccacggacaacaactccttcaaaaacgccttaagaaccaacggcaaggtcctggagtccaaaacaatcctcaatcggaaaacccaaaggtcccccggtttcggtttcttaaccttttcaacggaggaggcgatccgaaaccccatcaagggcataaaccggaagaagctgaacggcctaaacataaccgtaaacaaggccaata

SEQ ID NO: 3508 - DNA, 380 bp, Zea mays
  Clone ID: LIB3116-028-P1-K1-F2
ggggcggaccacacgcgtccgaacctggtgctgggcttaaggggaggaatgttaattttcttgaaaacattgactggcaggacaataactttggaggtggggggctccgccaccattgataatgtgaaggccaaaatccaggacagggagggtttccccccggaccagaagcggttgatttttgccggaaagcagttgaaggatggtcgaaccttggttgactccaacatccaaaaggggagcaccttccatttggggctccgcctgaggggcggattgcaaatttttgtgaagaccttgactggcaaaaccataaccttggaggtggagagctttagaaccatcaacaacgggaaggctaaaatccaggcaagggaggg

SEQ ID NO: 3509 - DNA, 334 bp, Zea mays
  Clone ID: LIB3116-028-P1-K1-F4
ggcggacccacgcgtccgccacacccgtccgaatttaccagcgactaatttggcttgagcagaaaaaacccacttagttgggagcagcacaaacggcgggggggatggcggcctcaataatctcctcgtaagttttggcgggggcgcctaaaggcctgccgccctttggccgccgggcctcttcttttgccgtggtttgttccaaaaaaaaaatcaaaaccgccaagccctacgggattggggggggcctgaccgccaacttttaccccaacggtagaaagggcaagggcaagggcgtttaccaattctttaacaagtacggggcgaactgtta

SEQ ID NO: 3510 - DNA, 436 bp, Zea mays
  Clone ID: LIB3116-028-P1-K1-F5
gaaaccggggcggaccacacccgtccgttggagcaccataaggtgccccagcaccatctggcatagcagttggaaaaccccctggaggagggccggcccttgttccggcctaagggggaaaaactatttcaggactgccctttctttccgtggccggatcaaccaattcgttcgcttaaaagccaaaggtttggggccggacttggggttttacggcctaaaggcgatcaccaaggttttaaagagcggcttaaacccgacgccggtgttccagtgcagcaggggccctttcgccaggtccatgctgttccagttttacttttgcgcgggggggaacggaccgttaattgactgccccgggccgaagaagttcacttgttccagggagatccttttccaccctttcaagaaggggttgctaaagcagaagtttaac

SEQ ID NO: 3511 - DNA, 433 bp, Zea mays
  unsure at all n locations
  Clone ID: LIB3116-028-P1-K1-F6
gggaannnnggggcggaccacaggcgtccgaccaattaaattcttgggccggggcaaatgtcgccaccagggatgacaggtaaggtttcgtccaatcgaagtagggttatttaatgcggggatcagatttggggctatggcattaatggttccctgtggtggggcaccatgcattttggtttaagttggtcgatgcgaccaaagtggtttttgttggttgggagctggggtcctgaatattaactttaataatattaaaatgggcccgaaaaaaaaaaaaaaaaaaaaaaaaaaaaaaaataaaaaaaaaaaaaaaaaaaatataattaaaataaaaaaaaaaaaaaaaataaaaaaaaaaaatgggggggggccgtttaaagggatcaaggttattttcccggggttggggaggtaatatttttttttatgg

SEQ ID NO: 3512 - DNA, 216 bp, Zea mays
  Clone ID: LIB3116-028-P1-K1-F8
cggcccggaatcccggggcggaccacacccttccggactggtttaatggattctggaaaagatcttgcttttttggcaccacagggtcggggatgttttgcaactgcggatcaagctgcggttgcggttaaagctgcaagggcggcaggaagtcccctgacctggaggagacaagcaccgccggccaggccaccgttgtcctggggggggccccgg

SEQ ID NO: 3513 - DNA, 429 bp, Zea mays
  Clone ID: LIB3116-028-P1-K1-F9
ccggccggaacccggggggaccaaggcgtccggttcagggccaggtacccggtggtggccggtttggcggccgacgcttgaattgggaggtttgggggtaaattaattttgtctggcttttgggggggttaagggtggggctggttggttggtggttggtggtttggttaccaaataatttgaatggaaggacgtttgtgatgggcctgttgaatagttggggttcttagtcctggattacactgttgggttaccacatgacatgatgtactggggggggcttgggtggtggggtaattccatgaccatgatcagtattttgattaaaaaaaaaaataaaaattataaataataaaaaaataaaaaaaaatatataataaaaaaaaaaaaaaaatggggggggccgttttaggggatcaaggtttactt

SEQ ID NO: 3514 - DNA, 397 bp, Zea mays
  Clone ID: LIB3116-028-P1-K1-G3
gggcggaccacaggcgtccgcgttgaaggctttgaaattcccacaggaatataccagattcggggattttgaactgcatgacctgggccttttagccaactggcaattgggggtaatattaaggggggaggctgaaccatttaaggttttgaagggggggccagatagacctgaagtggggctcgtgaatttaagggggttaaaaggcaaatttgatgggccctcatcacttaaggatcgtcttattaatataatttttgcaaaagatgtcttaggggttgttgaaggaccatccaaggggatgcagggccccttggaacacatccacagggggtggctgtttatttatgacaggcataaccttgaacatgcaggttttatttgtccaaaagcccat

SEQ ID NO: 3515 - DNA, 401 bp, Zea mays
  unsure at all n locations
  Clone ID: LIB3116-028-P1-K1-G4
gggaannccggggcggaccacacccgtccggtcagacggaatggtccaagtttttggccattccaggggggccaggtaaaggttgtgggggccttggcccaaatccttaagatggagaatcggttgaaggaattgaggggttaactgaactgcctaaaaaaagacctaaagttgggcctcgcaaagcccaatcagatgtattaggaaggagaaccaagctgtcaacacatccaactttttgtaataggaggcggcagatcaagcagggttcaaatcccaactgggcaactactactgttgaagcccagggttcaaattggcccaagtttttggccccaagccgttttggtgggaggaaatgcttcgatccctttggtctgcactggactgaacatgatgaa

SEQ ID NO: 3516 - DNA, 481 bp, Zea mays
  Clone ID: LIB3116-028-P1-K1-G5
gaaaacgggcggacccacgcgtccgccaacccgtccgaaaaaaaaaaaaaaaaaatttaaataaaaaaaaaaaaaaaaaaaaaaaaagaaaaaaaaaaaaaagggggggcggttttaaagaaccaaacttaccttccccggccttgcaaggtaaaagtttttttttggggcaaccaaaattaaattaatggcccgcggtttaaaaacgtgggactgggaaaaacccgggggtacccaaattaaatggcttggaagaaaatccccttttcccaagtgggggtaatagcaaaaaggcccgaaccaatggcctttccaaaaatttgcccaccctaaagggcaaagggacccccccctgtacgggcccttaaagcccggggggggggggggttccccccagggggcccgttaaattggcaagggcctaagggcccgttcttttggttttttccccttcttttttggcaacgttggcgggttttcc

SEQ ID NO: 3517 - DNA, 392 bp, Zea mays
  Clone ID: LIB3116-028-P1-K1-G6
gaccaggcgtccggcccaaagctttaggtttgggggatgggttttatatctattttcctgaaagggcccatggggggcgggacctgttccatgcaaataaaattttcccccaccatccattgtggccggccattgcggtcactggaggagctttagaggaaccagttgttgtcgttgtggggattttccaagccaggttccaaaattcctccttgccccccttttaaaaacggtcctaaggccccgttgggtttaattagtctcggttgggttcacagggcctaaaagtgttaaaacttaattaaattcctcataagaatcctaaaatgtcctttaccatctttccgccttacctttttttccactgcatttgaattaaataaggggcaaaa

SEQ ID NO: 3518 - DNA, 255 bp, Zea mays
  Clone ID: LIB3116-028-P1-K1-G7
cggaataccgggtcggaccacacccgtccgttaaaaaggccgttttagcaggcacagaggttggaaaattttgttgaaaattttggggggccggtttttgaaatggccaaaggcaccaggatcccaaaggatgttccaccactaacagcagcaggtgcaaatcctgttgaagacaaagcttccttgaaagacctttttgggcaaacagagaacagggttttttctgcctccccagctccggatgatccaaaggcc

SEQ ID NO: 3519 - DNA, 296 bp, Zea mays
  Clone ID: LIB3116-028-P1-K1-G9
cggaatacccggtccgaccacacccttccgaaacacttccggaagccccaagtccatcgtctccacacaaggtccaaaaggcttcttccagggttggggtcttcctggccagcgtaatccgcttgaacttccacaactgtttcttaaatggttgcaacggttcggtccttttgaaggccagtgaccgccagccggaaaaaaacgccaagcccaacctgaccctgcaaggtttcgacttaatcaaaaggatcaagcataggctgtaggccactttcccccttccggttttttctccg

SEQ ID NO: 3520 - DNA, 211 bp, Zea mays
  Clone ID: LIB3116-028-P1-K1-H1
aattgggccccgccctgtaccggcccattaagcccggcggggtgggttggttccccccaggggtgccgttccacttgcaagcgccttagcccccgttcttttggtttttttcccttccttgttggcaccgttggccggttttccccgtaaagttttaaatcgggggttccttttagggttccatataagggttttacggaacttttacccc

SEQ ID NO: 3521 - DNA, 382 bp, Zea mays
  Clone ID: LIB3116-028-P1-K1-H10
ggaatcccggggccgaccaacccttccggccgtggaacagccaataatggccttttccttttggcgggggcaaagaaggagggcgggaggagcagtcgccatgtttggcttaatccacaaaatcgaggagaacctccacatggggggcgaccccaaaagggaggttgagccccacaggagggccggggggcaccacaggagggaggagggggggcaccacaagaaggacggcggggagcttaaggaaggcttcgtggaaaaaatcaaggccaagatcaccggcaggcacggcaacaagtccggcgaccccaaggaaaagaaggccaggaaaaagaagagggggaggaagaaccccggcaggggccacaaccccaacggcggc

SEQ ID NO: 3522 - DNA, 364 bp, Zea mays
  Clone ID: LIB3116-028-P1-K1-H2
cggggcggaccacaggcgtccggttggattgggttaaaaggcaattttggtttctaggtttccaggggggtccggggaagaggaggccggttttttgatatttttgggccacgacaggaatccagggaaatttgaagtaaaggttttggttgcaaagccattgtttgttgttccagttgcgggggtggagcttcctaatagggttcctaatggattccatgccttttttgtaactggggaccaactggttcgccaggcggaggggcagggaaaatacggaacctgcagattttgaacacccgggtccatgtgggaggttatggcaggccttgtttttgtttaggccaggttttttccacatgtt

SEQ ID NO: 3523 - DNA, 416 bp, Zea mays
  Clone ID: LIB3116-028-P1-K1-H8
ggggcgggccacacccttccgttcttggcttagcttgcaattgcttttaggtgctaccgccatctctcttttgttgtggaggggaatgtaaacgccgggcgggtggcaaaaattcccatggcaaccttagccacaatggccctgttgaagcccgccgccaaggcctgggggcggttggatctttctacaagaatcggaatggttttgttgttcttctgaccggggatgactgcaaaaaaggttgtttttttattttatgattttttaataatttatattgtatttaattattatcaacttttaaaccctaatattctttgtttttgtgttctaataataaataaaaattaaggtttttccttttctttttattaaattttatttttactttattgcttcttaaattcttttctttt

SEQ ID NO: 3524 - DNA, 473 bp, Zea mays
  unsure at all n locations
  Clone ID: LIB3116-028-P1-K1-H9
gggnccggaatcccgggccacaacctttggaagctgccccgcagggagcagggcttgcccttcgttaccaggtggcgctccaggtccaggataacttacaagttttaccgggttttcccaaacggcaaggtgcattacttcaacccaagggccggcttttacccggagaaggtaaaccccggcggggggggcgtgggccaaaatttccgaagaatcggcaggaacgtaaacccaatcaacgtaaagttaaccggcagggccactttcaattaataaaacttaaggtacgccgaacgcccaagccgggatccaaattaaagaacttttttttttattaattccagtttattgtaattgggctgctggtccggtggtggcttgatttgagatgtgcatgatgatccttgtgtaattttaaaaaaaaaataattttattataaaataatattaaaaaaatttattataaatttttt

SEQ ID NO: 3525 - DNA, 240 bp, Zea mays
  unsure at all n locations
  Clone ID: LIB3116-030-P1-K1-B11
cgggnnggaaatcccggggcggcaccacacccgtccgacacccacacaagtggaagttggctagttcctaaccgagccagaaaaacgaaccccggccagttctttaacccccgcccgagggaaaaaaagnccagttagaaatattgtccaaggccatccggtccagcgccggccagccggggccggggccggccccaacaatcgttcctgacttgccggaggaggagggattctctattt

SEQ ID NO: 3526 - DNA, 252 bp, Zea mays
  Clone ID: LIB3116-030-P1-K1-B12
cggaatcccgggcccgttttggaggacccaggcttccgtccccttgcttgcgacttattagtttttttatggggtaacctaaatcgaattgattgcccgtcgttttcgaccgtcttacctgggaaacccctgccgttccccaccttaatcgcctggcagaccatccccttttcgccggttggcgtattagcgaaagggcccgaaccgatcgcctttccaaccagttgcccagcctgattggcgattgggccc

SEQ ID NO: 3527 - DNA, 244 bp, Zea mays
  Clone ID: LIB3116-030-P1-K1-B3
aaaaaaaaaaaaataaaaaaaaaaaaaaaaaaaaaaaaaaaaaaaaaaaaaaaaaaaaaaaaaaaaaaaaaaaaaaaaaaaaaaaaaaaaaaaaaaaaaaaaaaaaaaaaaaaaaaaaaaaaaaaaaaaaaaaaaaaaaaaaaaaaaaaaaaaagaggaaaaaaaaaaaataaaaaaaaaaaaaaaaaaaaaaaaaaaaaaaaaaaaaaaaaaaaaaaagaaaaaaaaaaaaaaaaaaaaaaaa

SEQ ID NO: 3528 - DNA, 444 bp, Zea mays
  unsure at all n locations
  Clone ID: LIB3116-030-P1-K1-B9
gcccgaaanccccgggccgcccacacccttccaattaaaaccaattaccaccataaaattcccattattgacccaccaatgccacccaagaaatggtcctacctaatcctgctggggcttactcaaaatcctcttccccaacccattttccaacattcttaacaacctccaatactttccttttttccccaatacttttaaccaccgtttttttaagtttttaaaaccccaatttttaaaccttccagaatccaccagccaatcccagcagccatttaaccttaataacccttgttcttccaacacccgtaagccttataccaccatttccctttgttccatttgttgcaccaaaccataaaggcccaccacctccaccaccttttcctagaaaaccttgttgcctactttaagaaccagaagttttttccattaaaccaactg

SEQ ID NO: 3529 - DNA, 381 bp, Zea mays
  Clone ID: LIB3116-030-P1-K1-C10
cggcccgaaatccccgggccgaccacacccgtccggcaatccaactgcaaccaatttggttccaaaatattactgcttgtccaaatcaatttttttagctcgcccagaaaaagggggggggacgccaaaataaccttaaaaaagcagtacacgggcttttccaactacccatccaatttaaacctcttttcaaattccccgaacccttcttccaaaacaaagctaaaattctttttttacctggccaacccaaagcctgcttcctccttttccgggagccctaactgaaacctggcgaacccgatgatctaaaaccggttgaagcaactgaaggacaaaggcccgtggttattgcccccaaacgccggggccaaccccatt

SEQ ID NO: 3530 - DNA, 312 bp, Zea mays
  unsure at all n locations
  Clone ID: LIB3116-030-P1-K1-C11
cgaaanncccgggccggccacacccttccaaacccctcccccaagtcctacaagccctttctcccttttcccaattgcccccctgtgctaagttttattccaaatatgcgctgccactttacaatcaacctaaaccttaaggttctgcttccttatcccataatttgccagaaaaattgtctgttcccaatttttatccttttaatccttttgaatgcccctaattccattatcctttcccctttctctatttataccttcctttttatctttttaaaaattttttcaattatccacctatttatttttctt

SEQ ID NO: 3531 - DNA, 389 bp, Zea mays
  unsure at all n locations
  Clone ID: LIB3116-030-P1-K1-C4
aaatnccggggccggcccaggcgtccgaaatcgatccccctggatgtcggacccctgaaccattttaccattccttgcccaattgttagaggggggcttcgaccaggtgaggggggggccccttccttttttaaacaccaaaaaggccatgtaaatccatttgtggagtaatttgccccaaggggatgtaataaaagggttcatcaaggaaggacccaaggtcccaccccaccattttccccagttaattgccccatttttaaagtcgtaaccactgcctggcctggctggctctggtggtcaaatcttgattaagttggcctcgtcctccccccattataattggtggttttgatgtcctgttgcgtcgtcaaaccacatcctttttt

SEQ ID NO: 3532 - DNA, 470 bp, Zea mays
  unsure at all n locations
  Clone ID: LIB3116-030-P1-K1-C5
cggggcgaggcccaggcggtccgcccacccttnccgccacacccttccgttgaaggtgtctgttccggcacaccatttctccaacattgtgaacggagttcttttagatttccgttttgtccccctacacctttaaccaacggggtttttcggtttgtagaaacacccaatttttaacaccttcacaggatccacacaggcatatcgcagttggctattttactttaatacaccctggttcttccaacattaataagccttattccagcagttcccttgggggcattaattggcccaaaacataagggcccaccacctccaacaccttgtgctagcaaaccttgttgcctactttaagaaccagcatttttttccattcaaccaactagctgcattgaactttgtttttaatttgcaccaccaccaactaccattaagccagttttttgttgcctacccccagcaatttt

SEQ ID NO: 3533 - DNA, 222 bp, Zea mays
  unsure at all n locations
  Clone ID: LIB3116-030-P1-K1-C9
ccggcccaaanccccgggccagccacacccttccgacacaccccgggcctttcgccgacaccctaaaatgtcccccaaaaaccggaacctgaaggtgggccactcttaataaaccatgcgggcccccctaanttcctttttcccgaaccttttccccccaaacggcttaaatttcgccaagcccttttttttaaagcccttttccaaaattttaaccaaggc

SEQ ID NO: 3534 - DNA, 368 bp, Zea mays
  Clone ID: LIB3116-030-P1-K1-D10
aacgggtccgaaatccccgggcggaccacacccgtccgaacccccccgcttgggcgaattcaattcgccataaacccaagggaattgggaagcccggttaggttccttgtggttagggggcgccaaaagcaaaaaccttgaagaaggttaataaagaacaagaacccaacccaatcaaaaaacggaaggcaacgccaagggttggtcttcgccccggaacccggaaaaaatctgtcctgtttcgttggttcgccccgggccgcctgttgggggtccctttaattttctctggtcagacttttgtttgttttttttaatatctctttatttatatatttaattcatgtttttggttttttttatttttt

SEQ ID NO: 3535 - DNA, 396 bp, Zea mays
  unsure at all n locations
  Clone ID: LIB3116-030-P1-K1-D11
cgggnccgaaatccccgggccgaccacacccttccgccaacccttccggaaggttaaaattttttccttttaaagcctgcccccctttctccgggtggtttacttgggttggttgagcggtcccaataaccgtttttttgaacttttgccttgaggaaatcgtttggtaaatttttggatgattcgtttacatcctatttcgtcaattcttgaaaataaagtgaatttttactttttgtttaatttcccttgaacctttggaatttgtccgtttttaaccaaattttttaatcatccctaatttttggccaatattatatattaatttattgggggtgtggggttgtttaaattatttactaattttgtgctttcttttttttttttccaatttta

SEQ ID NO: 3536 - DNA, 414 bp, Zea mays
  Clone ID: LIB3116-030-P1-K1-D3
gggccgaccacaggcggccgaacgaacccaacaaaccaataccaataccagaggttttttgatttaacttttaaccgttagatcgggccacgtggttggttaaccggggcacacggttagaaaagcaggatgtcggccggaccggggacctgaatcgccataatcttggccataatcctgccgccgttgggggtttttttaaagttcggttgcggggttgggttctggatctgcctaatcctaacctttttgggttacttccccggattaatttacgccgcttgggccataaccaagtagccggccgaagcaaagcaaccacggccccttgaattgacttccgccggtgcgttagcttgcaatgttttgggatgggattcctttctttttggttaagtggctgctgctcctgtt

SEQ ID NO: 3537 - DNA, 333 bp, Zea mays
  unsure at all n locations
  Clone ID: LIB3116-030-P1-K1-E10
cgggncggaaatcccggggcggaccacacgcgtccgttattatgaaagccacccaacgccattttattttttgtttgtttgccaaaaagtccgcgaatggcggaatggcaaatttggcagagattttaaacaccttaccaccaagtttgggggttgttccttgccgattgcgacggatcgaccggggtttgcagtccaaagcaagctacttaaccatgcaaatggaaaagctgggcttaaattttgccggccgggcccggtttggggggtttctggggtccctttttgatcggcaggaggtccggtgacccccacccccttccctaggccaaa

SEQ ID NO: 3538 - DNA, 411 bp, Zea mays
  unsure at all n locations
  Clone ID: LIB3116-030-P1-K1-E11
ccggccgaccacacccttccaccaatcctaccgcccttcattttcttttttatattttaccctttcccaaaaanacccgactgtttttatttttaaattttcgaatgaaaaaacatcntaccaccaaattatatattttatcctttacattttttacgattcaaccttttttattatttcaatccattttttttttctttctaaattttttaatttttttattttttttcctttttttccttcttctatattttctttttttccttctttttttttcttttattttctatttttttttttctttttttccttttttatttttttatctttttgtttactcttttttttatcattttatattattatttcttttatttatttatattttttctttatattttttctttaatt

SEQ ID NO: 3539 - DNA, 261 bp, Zea mays
  unsure at all n locations
  Clone ID: LIB3116-030-P1-K1-E12
acgggnccggaatcccggggcggaccacacccttccggggaaaaccctgcacacacaataatggggttaatttccggccacaattcggccgtaaagggggggcagaacaacttggcgggttacttcccaaaccggccgacaacaatccgaaagaacatcccgttgaaggaggccggcccggccaaggaaatgagaaagttcttgaaaaacccgtggcctaccctatttaaattgcttccaaccaaattccagttcatcaag

SEQ ID NO: 3540 - DNA, 454 bp, Zea mays
  unsure at all n locations
  Clone ID: LIB3116-030-P1-K1-F10
cgggnccgaaanccccgggcgggccacacccttccgccaacccttccgaatccaataaaattttacctttccaaaaaaaattaccatgcccctgggggagggttaacaattttaagttgggcactggaatatataaaaaatttgtggtttcctccttccagtttgtgtttgaaccaattgataaccattttccggataatcctcaattgatttcctttacttttcgggtaatacaatttgatttgaaaccaaatggtgtttcctttggtaggccactaaatttggcatttagtcttgatgggggttttgttgaacccaaaccttaagggaatgcatctccagtggacttgattttaaaatttgtccttccattcgcttttaaattcctttataaaaccaaccttaaggccagggttgttactttgcccaaaaaaattgggtgtatggttgtttt

SEQ ID NO: 3541 - DNA, 448 bp, Zea mays
  Clone ID: LIB3116-030-P1-K1-F11
cgaaatccccgggtggaccaacccttccgccaacccttccgcgacacccttggaattttattcggttgcccttttttttttttttttgtttttttttttttttttttttgttgttttttttattttttttttttttttttttttttttttttttttttaaaaaaaatttttttttttaaaaaaaaaaaaaaaaattttaaaaaaaaaaaaatttaattaaaaaaaaaaaaaaaaaaacttttccaaaattttatattttttttttttaaaaaaatttaaacctttttattttaatcccctccttttaaaatttaaattcaaacccttttattttttttaaaacaaatttttctttttttcaatcttaataaatttttttaacctttttaaaaaaatttttttcttttttttttaccaaatttttataaaattttttttcccccctttt

SEQ ID NO: 3542 - DNA, 437 bp, Zea mays
  Clone ID: LIB3116-030-P1-K1-F5
gccccgccgtccgtgaacttaatttaatctgtaacccatggcttttttcaccactttccaaggtttattctgggggggttccataatttttttggcgtgctttattcttaatccccccccaccaggtggccaacccaaaaaggccagcattgttgggaccttgccattgcccaaaacagggccttcggccaccatacttgttagccgtattgccaccggcccttcctttttaaattccggttttaatgagtccttttgcaaaaggactaataagtcttttaaaaccttgttcttttgcttggcaagttgtcacccataataatgaattcatgatcctgcgaaaccttaatgatcctgcgaaaccagacggcaaaagataaggttagttaaatcctgtttaaccaaatttttttttaccacccaattttcccatttta

SEQ ID NO: 3543 - DNA, 489 bp, Zea mays
  Clone ID: LIB3116-030-P1-K1-F7
cgaaatccccgggccagcccacccttccgaaataaaaatttttattccaatccatcctctttagctaaaaaaaatccggttcgcccgaatggattatctccccttgggggaggtccacaaaaaaattaccattaaaccataccaatagcctacggtctaccatacttaacggaatcaaaccaccggaaaaaaaaaggttaatcgtaaccaaaaacaaccacaggccaatccttccttggaagtaaaaattttccatttattaacccctttcctaattttttcctttctacaaactctatcccttttttaaatatttttattttttttactttttttatatgggtgtggtgtttttttatatttttatttaattctataaatatgttttacttcttttatctatatattttattcttctctttatttcttttattcatttttttattactatattttttattttttttcttccatatattttttccctat

SEQ ID NO: 3544 - DNA, 291 bp, Zea mays
  Clone ID: LIB3116-030-P1-K1-G11
aaaaccccgggccgcccacacccttccacgaccccttggaaccattcttttccttttttccccccccggccccttttccttcacgaggagtccaatttaaaaatcggtgggcaccataaccaacccaataatccctaacttcttaaacatatattaatctttttcaacgcaccttaacttcaaaattaaccccccaaatccaactttttataaccctttatttctacttaactcttttaaccaaactaattaacctttctcctactttccaatattttttttaaaatttta

SEQ ID NO: 3545 - DNA, 351 bp, Zea mays
  Clone ID: LIB3116-030-P1-K1-G5
aatcccggggcggcccacgggcgtccggaatagaattttttttggccggccataaaaccccttatacttgccgcccgggaacccctccggggcgaacaaggtcaaccaggccctgggggagaaactccggccctcttacggggccgcttccgcaaaaccgggggccggtgaaccaacccttggccccacctgccggggttcggccgccggggcccccttagggggggtcatgtcctgggctccctgggcccccacataaaccacaaacccaaatctggctttgcaggaccatggccggatctgcaaagaacttttaaaccttcctaaaagggaacgggggctggcttttaa

SEQ ID NO: 3546 - DNA, 170 bp, Zea mays
  Clone ID: LIB3116-030-P1-K1-H12
ccttccttccggcttccgcaatcccatcggggtccccattcaaaaggccccttccctgaaaagcacgcgttccttttgaaagtccgccagcactaccaagaccccaacccagaactttttaaccaccaagttctgcctccccttaaccataaacccaatattcaaaacct

SEQ ID NO: 3547 - DNA, 274 bp, Zea mays
  unsure at all n locations
  Clone ID: LIB3116-030-P1-K1-H7
ttnnnnttttttttnttnnttttttttttttntnntttnttttttttttttttttttttttttttttttttttttntttttttnntttnttttttttttttttttttttttttttntttttttttttttttttttttttttttttttttttttttttttttttttttttttttttttntttttttttnttttttttttttttttttttttttttttttttttttttttttttttttttttttttttttnttttttnttttttttnttttttttt

SEQ ID NO: 3548 - DNA, 462 bp, Zea mays
  unsure at all n locations
  Clone ID: LIB3116-030-P1-K1-H9
gggnctgaaatccccgggccgacccacccttccgcgacacccttggccgacacccttggccgtccccttggcttccagggtaaactgaaccttaaccgacaacaacggccccgggggcggcttaaaaacaatccatatttttcccgccgtcttcggcccttgcggttcgaaccgtattaaccttttttacctacccatgatcacaatttgcttgtttactactactactgaataaaaaacctttcccgccacgtggtccttgtttttttttttttaaaaaaaaaagaaaacccgcccatttccttttggttgtttggttaatttttaagttcatccggcctttattaatttccatttccccagtcccaactcttgcccatgcatccattttcctaataatccactaacttttttttgttaaaaaaaaaattaaaatataataaataattaaaatattattat

SEQ ID NO: 3549 - DNA, 489 bp, Zea mays
  Clone ID: LIB3116-031-P1-K1-A11
gaaaaaccgggccgaccacacgcgtccgcccacgcgtccgcgaacgcttggggtattgttcaacgacgtgccaatgcaataaactgagtgtatcatattggaccaaaaggggaaaaaaaaaaaaaaaaaaaaaaaaaaaaaaaaaaaaaaaaaaaaaaaaaaaaaaaaaaaaaaaaaaaaaaaaaaaaaaaaaaaaaaaaaaaaaaaaaaaaaaaaaaaaaaaaaaaaaaaaaaaaaaaaaaaaaaaaaaaaaaaaaaatttttttttttggcccttttttcaagggacccattttcaaacataccggtgaatagaaaataaaaaattttttatatattttcaaaaaaaataaaaaaaacggccaccaattaaaaaaagtggaaatgaaaaaaaaccttggtaacaacaaaataataacctttggaaaaaaaatccttttttaaaaatttggtaaaaaaacaaaaaactccccaaataattttttttta

SEQ ID NO: 3550 - DNA, 407 bp, Zea mays
  Clone ID: LIB3116-031-P1-K1-A12
aactgccatcttcttccccagccgttgtgcctttccccctgccaccaaggtccaaggtctccggagcgcgacctggctgcaacgcaggcaatggagtcgccgttccgcgcggacctgctgagggggaaggcggcgctggtcacgggcgggggctccggcatcggcttcgagatcgccgcgcagttcgcgcgccacggcgcgcacgtcgaactcatgggccgccgccgcgaggtcctcgacaaggccgtcgccgcgctccggtccgagggcctaaggggctgcaggcaggcgaacactttgtagttgtaactttggagtttaatattgccaatgcctttacttatcaaatgaaattcacaatgctccataccatgcttcaagctagtaaacaattcagcaacccaaga

SEQ ID NO: 3551 - DNA, 372 bp, Zea mays
  Clone ID: LIB3116-031-P1-K1-A2
aacggtgacggagttggagtccacgtgtcttttcgagtacgacgagtacaagaggggggggttggattacaagcagaggcggcacctcggcaaggccggccccatcgccgccggcgccttcgcactctacgagaagcacgaggcgaagaaggacccggagcacgcgcaccgccacaagatcgaggaggaggtcgcggcggcggcggccgtcggctccggcggcttcgccttccacgagcaccacgagaagaagaaggaccacaaggaggccgaggaggccggcggcaagaagaagcaccacttcttcggctgattgatcctcccgtatcgtcgtccctccccgtgtgctacgcgtgcctgtgagagtgatat

SEQ ID NO: 3552 - DNA, 260 bp, Zea mays
  unsure at all n locations
  Clone ID: LIB3116-031-P1-K1-A5
aaaaaaaaaanaaaaaaaaaaaaaaaattaatttnnagaaaaaaaaaaaanggggaagtgaaaaaaaaaaaaaaaggggggcgcccaaaaaaaaaaaaaaccattaaaagataaaaccctgaaataaaacaaaaaaaaatattaagaaaaaaaaacaaacaataaaaaaatgaaaaaaaaaaaaaaaaaggaacggaaagaaacgcacaggaaaaaaaanattataatttattttttttttttttaaacggcacccnggg

SEQ ID NO: 3553 - DNA, 129 bp, Zea mays
  Clone ID: LIB3116-031-P1-K1-A7
ccgaccaaaaaaaaaaaaaaaaaaaatttaaaaaaaattttaaatttcaaaaaaaaaaaaaaaaaaccgccaaattttaaaaacaaaacgccccccccaacacaaaaaaaccccacaaacacccttccc

SEQ ID NO: 3554 - DNA, 251 bp, Zea mays
  Clone ID: LIB3116-031-P1-K1-A8
aaaaaataaaaaaaaaaaaaaaaataaaaaaaaaaaaaagaaaaaaaaaaaaaaatgtaaaaaaaaaaaaaaaaaaaaaaaaataaaaaaaatataagataaaaaaaaaatgaaaaaaaaaaaaaaaaaaaaaaaaaaagaaaaaaaaaaataaaaaaaaataaaataaaaaaaaaaaaaaaaaaaaaataaaaaaattaaaagaaaaaaaaaaaaaaaataaataaaaaataaaaaaaaaaatatattat

SEQ ID NO: 3555 - DNA, 528 bp, Zea mays
  unsure at all n locations
  Clone ID: LIB3116-031-P1-K1-B6
aaaaaaaaaaannaaaaaaaaaataaaaaaaaaatttaattttttaaanagnaaaaaaaaaaaaagggaaggaaaaaaaaaaaaaaaagaaggggagggcgggnaaaaanaaaaaaaaaaatataataaatatataaataaaataaaaaaatataattatttaatatataaaaaatataagtaaataataaagaataatatatataaatattaaatataaaagaataaataaaaaaaaaaaaaaggaaagatatatatagagaaaaaataaaaaaaaaaataaaaaaataaataaataaataatatatatgatatataagaaaaaaaaaaaaaaaaatataaatatataattaaaaaaaaaataaaaaaaatatataaaattaaatgatagaaaaagaatataaaatataaaaaaaatataattaaatataaataaaaataaatataaataaaattaatatataataatatataatataaaatattaataaaataatatataataataagaatatattataaatatat

SEQ ID NO: 3556 - DNA, 202 bp, Zea mays
  unsure at all n locations
  Clone ID: LIB3116-031-P1-K1-B8
gaacgggggaannaaaaaaaanaaaaaaataaaattaattttaattttaagaaaaaaaaaaaaaaatggaaggtaaaaaaaaaaaggggagggggaanaaaaaaaaaaaaaaaataaaaaaaaaaaaaatataaataataaaaaaaaaaaaaataaaaaaaaaaaatatataaataaaaaaaaaaaaataattaataataat

SEQ ID NO: 3557 - DNA, 469 bp, Zea mays
  unsure at all n locations
  Clone ID: LIB3116-031-P1-K1-C10
aaaaaaattaaaaaaaaatattttaacatttttttatanacccacaaaacacaaaccggcttgtttttttttaaaatttttttgcccaacacaaaaattcanaacaatataaatattctatttcttaatctttttttttcttttttctcattattttctacttttattttttatttatttattttttaaattttattctttttaatttttcactcatctttcttatatttttttacttattttattttttaatctaattaaattttttttttcatttttttattttaattctttttcatttcctttttctttatctctaaaatacttttttccatatatctttaaattatattttttatatataacaatttattttttatttttttatttttctctttttttatttttttttttcttttatctattcttttttttattattatttctatattctcattttttatttata

SEQ ID NO: 3558 - DNA, 240 bp, Zea mays
  unsure at all n locations
  Clone ID: LIB3116-031-P1-K1-C12
acccacgcgaccgctacggcgaggcccgcgtgacaatgctcatgttggcggcaaaggccaagccggcggcggcgtccgttttccaaaggaacgggcgccgaccaaangctgaacctgggcccactgtccggcgagccgccgagctacctgacgggcgagttcccgggcaactacggctggaacaccgcggggctgccggcagacccggagacgttcgccaagaacctttagctggaggtg

SEQ ID NO: 3559 - DNA, 282 bp, Zea mays
  unsure at all n locations
  Clone ID: LIB3116-031-P1-K1-C2
tttaaaaaaaaaaaaaaaaaaaaaggaggggtttatttaaaaagaggggggggaaaaaaaaaaaaaannanaaaaanaaaattataataaaaanantaaaaaaaaatgttaaagaaatagaaattataaaataataaataaaaaaaataaatataagataatagaaggaaaatattatgaaataaaaaaaataaggaataaaaaaaatatattataaaaaaaaaaggaaataaattaattataaagaaaataaataaaaaatataaaaaaaaattaaataaa

SEQ ID NO: 3560 - DNA, 402 bp, Zea mays
  unsure at all n locations
  Clone ID: LIB3116-031-P1-K1-C7
gggaaaccggggccgaccaacgcgtccgaaaaaaaaaaaaaataaaataaaaatttaattttttaaaacaaaaaaaaaaaaaaacgccagcgttaaaattaaaaaaaaagacgggccaaaaacaccncccaatttaaagaaacccaacctaccaaccccagccacccaacaaaaataccttttttaaagccaaaccaaaattcactgccctgccctaaaaacaccaactacttacctggaaaacccctgcccatccccacttaaattgcctggcaacacatccccctttcccccgctgacaaaaactctaacaggccaaacccgatccccctcccaaaaaaacccccaacctaaatgccaaacggccccccccctgaaacacccacaaaaccccgcccattg

SEQ ID NO: 3561 - DNA, 312 bp, Zea mays
  unsure at all n locations
  Clone ID: LIB3116-031-P1-K1-D10
gaaaaacggggngggacccacgcgtcacgnatgtattcaaccttttttaaaaggatttgcctccgactggcgcacggaagccacgggggcgaggggtttaacactcagctgggcagcaaaaaaaatcgagacgcaggagtcatggccaccgtcagcgccgccgtggtgaccaccatcgttgcccgcgccgcgatcgccaggcccaatgctctagggctgcctgccctgagggcaaggagcgagagggtgcggtgcatttactccaaggacgcggccccagtcagcaccaagggcgcaggctcgtcgctgttc

SEQ ID NO: 3562 - DNA, 358 bp, Zea mays
  unsure at all n locations
  Clone ID: LIB3116-031-P1-K1-D3
aaaaaaatttaaaaaaaattttttttttaagngnaaaaaaagaaaaaggggagggttaaaaaaaaagggggggtaaaaaaaaaaaaataaanaaaaaataaattataaaatatatattaaaaaaaaaaaaaattaaaaataaaaaaaaaaataattaaataattataaaattaaaaaaaataaaaaaaaaattaaaatataaaaaaaaaaattaaaaattaaaaaaattaataataaaaaatttatttaaaaataaaataaataaaaaaaaaaaataaaaataaaaataataatataaaaaataaatatataatatatattataaaataaaatataataaaaatttattatatataat

SEQ ID NO: 3563 - DNA, 322 bp, Zea mays
  Clone ID: LIB3116-031-P1-K1-D6
aaaaaaaattttattttaaaaaaaaaaaaaaaaaaaaaagggccgggcttaaataaaaaaaagggccggcccaaaaaaaaaaaaaaaaaaaaaaaaaaaaaaaaaacgggcccccctcttaaaaaaaccaaacttaacaacccctaccatcccacataaaaactttctaaaactttccccaaaaaaaaaaaaactgccccaagtttaacaacaccgaaacttgaaaaacccctcctccccccaactaaatccccttaaaaaaaaaccccttttacccaactgccaaaaacccaaaaagcccccacacaaactccttctcaaa

SEQ ID NO: 3564 - DNA, 450 bp, Zea mays
  unsure at all n locations
  Clone ID: LIB3116-031-P1-K1-E1
aaaaaaggtccggggggaaaaaaaaaaannnnaaaaaaaaataaaataaaatttttttttattncaaccaacacaaacaaaaactggttctttttttttttaaaaaattgcccgccccacaaaaattaaaaataaattaatttacattttttttttatcttttcttttctttatttcttttttatcactacttcttttttttttttttttttttttttttatcttttattatctttttttccttctttttctattttttcttttatatttttcttttccttccttttacttatttctctactattctatttttcccctttttatttttttttatttctacttttattccctttcttttttttattattctattttttctcattatttttctcttctcttttttcatattcctattttttttttcttcttattttttattttattattttt

SEQ ID NO: 3565 - DNA, 439 bp, Zea mays
  Clone ID: LIB3116-031-P1-K1-E10
gttttccaggcggcggcgcggtagcttgatatcgggcgaccgagcaagcgacggccatggggttctgtcagacgcgcgattttctcttctgcggcatatgcggcaccctcctaaccttcgactccgtccgttccgcctcctgccctctatgcggcttcaagcgcgatgccaaagaaattgaagggaaagaaatacagtacacgatgaccgccgaggatattcgaagagggttaaagacacaaacggaggacgttgttgggcaaagaccagtgacaaataaagcctgtccaaaatgcgacatccaaaagctgaattttacaacatacagatgcgttcagcagatgagggagagacgacgttctacatgtgtaaaggatgcggctgtaatttcaaagacgaatgaggagttatcctaccacttctacggatatatggcatt

SEQ ID NO: 3566 - DNA, 272 bp, Zea mays
  unsure at all n locations
  Clone ID: LIB3116-031-P1-K1-E9
cgggnccggaaaacccggccgaccacacgcgtccgactagttctagaaccggcaatgtggtttgttttaacccaaacccctttggggtggtccgggggataatctaaaacggggacggcaaagaaaccataacctggtcactaaactagctaggtccctactgcttttaaaagtctggataataaaccgggatgtcatgaccggtatttcctttttaatcttgttgcttgcttgtctgtccatctatgtaataataaattaataattgatcc

SEQ ID NO: 3567 - DNA, 118 bp, Zea mays
  unsure at all n locations
  Clone ID: LIB3116-031-P1-K1-F10
aaaaaaanacaaaaaacaaaataaattttattttaaaaaaaaaaaaaaaaaacggagcgtttaaaaaaaaaagggggcggcaaaaaaaaaaaaaaaaaaaaattaaaaatataactct

SEQ ID NO: 3568 - DNA, 396 bp, Zea mays
  Clone ID: LIB3116-031-P1-K1-F12
ccttaatgacgctcttgcttcgcattctttttagctggcagctgtggttcctgtgcatgccgattaataggcgatggggatggaaaggagcttttaagacccacttgcctccggaaacaaggagccgccttacaattggtgttggttccaattttgcttgccaattccttcggaggatgctcggtatgttatttacgtacagctttatctttctgttagcattgctatgatgagaaataatacagtgtgcctcggtgtaatattcatgttccttggagctgtatgttttgtacttttgtatataaatagttcaagttccacgagtggttgctttaaaaaaaaaaaaaataattaaaaataaattaattatataaattatttataatccttaaaata

SEQ ID NO: 3569 - DNA, 469 bp, Zea mays
  unsure at all n locations
  Clone ID: LIB3116-031-P1-K1-F3
aaaaaaaaaaaaaaaaaaggaatttgtagaattaaaaaaaaaaagaaaagggggnnnaaaaaaaaaaaaaaaaaaaaaaaaataaaaaaaataataaaaaaataaaaaataaaaaaataaaaaaaaaaaaaaaaaaaaaaaaaaataaatataaaaaaataaaataaaaagagaaaaaaaaatatattaaaaaataaataaaaaaataataaaaaaaaaataaaaaaagaaaaaatataaaaaaaaaaaaaatgaaaaaaaataaaaaaaaaaaaaaaaaaaataaaaaaaataaaaaataaaaaaaattaaataaaaaaaagaaataaaaaaaaaaaaaaaataaaaaaaaaataaaaaaaaaaaataaaaaaaaaaaaaaaaaaaagaataaaaaaaaaaaaataaaaaaaaaattaaataaaattaaaaaataaaaattaaaataaaatataaatataaaaataaa

SEQ ID NO: 3570 - DNA, 403 bp, Zea mays
  Clone ID: LIB3116-031-P1-K1-G7
cccacgcgtccgcccacgcttccgcttacgcgttcgaccagaggacaagtactctcgccggggatacctgttgaagaagagatgtgggacttctgccaacgcagaatccaggaccgaagtactgaagcttcaagtcaactgtccaacctgcgatgttcttttggggtcaatgcttgttggttggaatgtaccatcttcgttctcgaatatttggggtccgttagttcaattttgaactaaaccgcgacaaataaaaaagagcggagggagtagaatataggtatttctgagaactgaaatcaaacactggtaggcactactatgtcatcctgcatcacattctgtcactacatgtaatgctatgtgtttttggactgttgacatgctttattagttactgctt

SEQ ID NO: 3571 - DNA, 76 bp, Zea mays
  Clone ID: LIB3116-031-P1-K1-H1
aacctttgggggctggggttggacctttgttttttaatataagcctctattaaatacgatgtaaaatagttaagat

SEQ ID NO: 3572 - DNA, 270 bp, Zea mays
  Clone ID: LIB3116-031-P1-K1-H10
acatatactttcctcaaatctagtcttaactagaaggtgtctatttttctaaatcacttataacaaccttctattgtggcctttttctaaaagcctgtcttgaattacttttttttcttccttttaaggtttccaattgctattctatcctcactttacttcctaatcttagtctttctcctcgtttttaaccaaattccctacttttttattaattttctcatcaacactatctttacaatacctttctattttaacattttttttttt

SEQ ID NO: 3573 - DNA, 90 bp, Zea mays
  unsure at all n locations
  Clone ID: LIB3116-031-P1-K1-H11
aaaaaaaaaaanaannnnnaaaaaaaattaaaatttaaaaaaaaaaaaaaaaaaaaaggggggggaaaaaaaaaaanggggagggggnaa

SEQ ID NO: 3574 - DNA, 144 bp, Zea mays
  Clone ID: LIB3116-031-P1-K1-H12
gggtggatccggcggacagcgtcacagatcttagctgatgtgatttatgaatgaaaggaggtgggcaaatttacgacgagggataacgggaaagcaagggatatggatttgtttgtcaaactgatgatggtaggtgtgcggaat

SEQ ID NO: 3575 - DNA, 290 bp, Zea mays
  unsure at all n locations
  Clone ID: LIB3116-031-P1-K1-H2
aacgcgtggcccggccttaaccaagggtttattttttcctctcgaccgccctggttggggggggttttctccttgaagggaactgcgttacccggccccggttgtgcgtggcgtcagcacgccccgcgggcaggagggtgaggctgctgagcgtgaggtgcgagcagggagccaagggcggnggcgggctggacgtgtggctgagccgcggggcgatgctgggcttcgtcggagcggtggccgtggagctgaccaccgggaaaggcgtgcttcaaaatgtgggattgacc

SEQ ID NO: 3576 - DNA, 145 bp, Zea mays
  Clone ID: LIB3116-031-P1-K1-H3
cccaaaccacaaaaactacctgcggggggttttcaataaagggtgttgggaacatgaccaacccaaagggttactttttgtggttctgggactacaagtacaatgatgagaacaccgcctcctttgtaaccctaaacaaggttgg

SEQ ID NO: 3577 - DNA, 345 bp, Zea mays
  Clone ID: LIB3116-031-P1-K1-H4
gcgccgccaaaaagcacgaggcccgtgagcccggcactaagcttgttttttgggcccggtccgagcacggcacggtagaataagcgggcgggctggaacaggaaactaggcacggcgggctagcccggcacggcctgtttacctttaagcccgttaaacccgttttttttttacactaaaacgtgcttaccggcccgtttagcccgcttttcggcccgttatttcgtgctaaacgggccggcccggcccgtttaggcccgctgcgggccgggcttggacagaaacttaagcccgctggctcagcaggcccggcccggttttggccgggcttcaccgggcccgggc

SEQ ID NO: 3578 - DNA, 366 bp, Zea mays
  Clone ID: LIB3116-031-P1-K1-H5
gcgtccgaaattgcccaattacaacatcaatcctgggtttattttaccatacaaaccatggcaacgcagcaggggcaacaatttgtaccagcactgagccaactagctgtggagaaccctgtcgcctacttgcaacagcagttgcttgcatccaacccacttgctctggcaaacatagttgcataccaacaacaacaacaattgcaacagtttctaccagcgctcagtcaactagccatggggaaccctgccgcctacctacaacagcaacaactgatttcatctagccctctcgctgtggttaatgcacctacatacctgcaacaacagttgctgcaacagattgtaccagctctgactcagcta

SEQ ID NO: 3579 - DNA, 451 bp, Zea mays
  unsure at all n locations
  Clone ID: LIB3116-031-P1-K1-H6
gacccacgcgnccgcactcatcttttcgcgttttgaacctttaatttttcttccactcgccagtcgcagaagcacctgtggccatggacgccagcggagccggtagcaaggggaagaagggtgcggccgggcgcaaggcaggcggccccaggaagaagtcggtgacgcggtccgtcaaggccgggctgcatttccccgtcggccggatcgggcgctacctgaagaagggccggtacgcgcagcgcgtgggcactggcgcccccgtttacctcgccgccgtcctggagtacctagccgccgaggttctggagttggcagggaacgcggggaaagacaacaagaagacgcgcatcatcccgcgccacgtgctcttggcgatccgaaacgacgaggagcttgggaagctgttggcaggcgtcaccattgggcacgggggggttcttcccaacat

SEQ ID NO: 3580 - DNA, 436 bp, Zea mays
  unsure at all n locations
  Clone ID: LIB3116-031-P1-K1-H9
gcagggatgatgtgggaaagttcattcccgtttatctggctcagggcatcctccaacatgggcccttttaggtcctggaccggaggggagtggccaagctggtgaagtttgctacagagaggggccgaaaagctaggcctaacttgaaggtgggcatttgtggagaacacggtggagagccttcgnctgtggccttcttcgcgaaggctgggctggattacgtttcttgctcccctttcagggttccgattgctaggctagctgcagctaaggtgcttgtctgaggctgcctcctcgttggcaaccggattgcctgctgctggtggatgtggtgatcaacagtattattacagagccatgctatgtgaacattactagtagcagtgctcataaaagctacaatcccatctcccttttttttccagtcatgtaaaac

SEQ ID NO: 3581 - DNA, 238 bp, Zea mays
  unsure at all n locations
  Clone ID: LIB3116-032-P1-K1-A12
cggacgcgtggggccgtcaccctcgctgggatcctcggcggcggcgccctcctcgtctacagcaccatctccctctccggcgaaggatatccaatgcatgcgcttcttgcgattcgtcatgtaaaatcagggtgtctgtctataatctagcctccatggatgctcaaccttcgtcatgtaacaataatcagtgctactcttcattacataattttgatgctntntntaaaaaaaatta

SEQ ID NO: 3582 - DNA, 391 bp, Zea mays
  unsure at all n locations
  Clone ID: LIB3116-032-P1-K1-A3
aatcccgcgtttgagacccccttcttcagccaaactagaaactacgtaccttgaaccaaaaccctgggtcatctagcacaaatatattttttttccttttcgcctcgatatatacgaacggcagtcagccaaactaattccacaatgtatggctgttccatggcgtgcagatgacgagagtttagtggtcatgcaccgtttccttgagaagattgagggggaggtacttgagtattcgtccaaagatgtcaacgaaaccgaagtgggcatgtgataaagactttagaccattagtacttgatgttggcgaaaaggctatactngtactatttatttacagaatgaacatgtgatgtaaccctcgatttcatgaggcatgattatgaaaaat

SEQ ID NO: 3583 - DNA, 443 bp, Zea mays
  Clone ID: LIB3116-032-P1-K1-A7
gtcttgtgttgttcggagcgggcagcatcactcagccccatcccaatcctagtcgatcttcttcccctcctcaaggaagaaaagaagctgaaccatggggaagagaaagtcagctgctaagccacctcctaagaagcggatggacaagcttgacactgtcttttcctgcccattctgcaaccacgggagtagtgttgagtgccgaattgacatgaagaatctgattggcgaagcatcttgtagaatctgtcaggaaaacttcagcacaactgttaatgcactcactgagcctattgatatatatagtgaatggattgatgagtgtgagcgtgtcaacactgttgaaggcgacgatgatgcgtgagcttgccccatgtgatgaaactgttacctacaatcgtaatgtaatgtgctggtattctcgaatgccatagcccatagtc

SEQ ID NO: 3584 - DNA, 412 bp, Zea mays
  Clone ID: LIB3116-032-P1-K1-A8
agcctggccacatggccagggactgctccagtctgcggcggcggctacggcggtgggcggcggcggcggtggaggcggctgctacaactgcggccaggccggccacatggccagggactgccccagcggtggcggcggtggcggagggaggttcggcggcggcggcgggggtggcggcgaccgctcctgctacaactgcggcgaggccggccacatcgcccgcgactgccccacgtgaggtgtgtccgcgttcgtccgtccagccagatcagatcggatcgctccaccacctgctgttctgatggcgccggccccttctagatctagcttaaaaaacacccccctctcgctgtgtgtcggagttaccgtttagttttggcgatccgggcacgagtgcccgctgcctcttttc

SEQ ID NO: 3585 - DNA, 316 bp, Zea mays
  Clone ID: LIB3116-032-P1-K1-B4
tcggaaagaaagctgatggacaataatattggttttatctcttagtattcaatcgatgatatgggtgatccattttcaccacatactgagctcaaccaaccctcatacttagctcctggttgctcaagcaaccctctcaagcaaccctcatacttagctcctggttgcattccctaaagttcatgcatacatatatagccttccactcatcatatgctggtatccgatctatatatagacacatatgatatgttgcatatcgccaggttcttatatcaagtcccttgagtagtatgagttggaaaacctatctaaa

SEQ ID NO: 3586 - DNA, 412 bp, Zea mays
  Clone ID: LIB3116-032-P1-K1-B5
gccaaggcttccggccgagaacaagttcatctgtccatgccactgtctctccagtacaacaaccagggcaaggtggggcgtggtccggcgcctctgtgcgctggccctggttcacgccgacgtcgacgacggcaaggtcctcttcgtcccgtgggtggagaccgacttcaggaccggcgaggacccgtggtggaaggcatgaggatgatccgaaaccagcggtgctcagtgctcacacatgagacctacgtatgcctccgttccttgtgatgaggaaatatgcttgcgttcgttctccgtgggcgttgttcctacaaattcacttgctttctgtctctctctctatatacacactgtataaaacaagaacagctgtttatcatctcttcttatataaccttttgaacactct

SEQ ID NO: 3587 - DNA, 408 bp, Zea mays
  Clone ID: LIB3116-032-P1-K1-B7
cggacgcgtgggcgacaacgccgtcgctctctttgccgggggcagaggtgacgaggaggaggtccagaaggagaacatcaagaacgccgcctcctccaccggcaacatcacgttgagcgtcaccaagagcaacccggagaccggcgaggtcatcggcgtcttcgagagcgtgcagccgtccgacaccgacctcggggccaaggcgcccaaggatgtcaagatccagggggtctggtacgctcagctcgagtgattcgagtgtctaactgctaggtgtccgaccgtcctcatggatcttgggaagggtgtcgtaccatggaaaactttggagagcagaggaggaatcgtgtatgtaatgtacttgtttaatgcaaatatcgggactgtcgctttttttaattttcatat

SEQ ID NO: 3588 - DNA, 304 bp, Zea mays
  unsure at all n locations
  Clone ID: LIB3116-032-P1-K1-C12
gcttacgcagtgaccaaaccaaaacctctctctattctccatccattctctccgctcatcctcagccgtcgtgtttacaactttagcgggccttaccctcntccaanggaccaaggggccaccatgagcgtggtgatcctggacggctccacggtgcgcggcttcttgtcggactaggcggtcttcgcgcgcagcctgtactcgcggttctcctcgctggacgccaacggctacggcgtgctgtcccgcgccgagctccggctcgcgctcgagtccttcctcctcctctacagcggctgctttt

SEQ ID NO: 3589 - DNA, 438 bp, Zea mays
  Clone ID: LIB3116-032-P1-K1-C2
gggcccttccatgatacagcagatgcagcagccttgcaatgagtgcaaggggactggagagagcatcaatgagaaggaccgctgtccagggtgcaagggtgagaaggtcattcaagagaagaaggttcttgaggttcatgttgagaaggggatgcaacacaaccagaagatcaccttccctggtgaagctgatgaagcgcctgatactgtcactggagacattgtattcgtcctccagcagaaggatcactccaaattcaaaagaaagggtgaagatctcttctatgagcacaccttgtctctgaccgaagcactatgtgggttccaatttgttcttacacatctggacaacaggcagcttctcatcaaatcagacccttgtgaagttgttaaacctgaccaattcaaggcgattaatgatgaggggatgccaattta

SEQ ID NO: 3590 - DNA, 393 bp, Zea mays
  unsure at all n locations
  Clone ID: LIB3116-032-P1-K1-C6
cgtccgcccacgcgtccgcaagtagcgacagctcgactattatttgtgagagtgatccggcgcttagaggggatggttaatatcgccgcgggcgcctcaactnctgcggcgctgtgcttcgcggccctggtggccgtggccgtctgccaaggcgaggtcgagcggcagaggctcagggacctgcagtgctggcaggaggtccaggagagcccgctcgacgcgtgccgtcaggtcctcgaccggcagctaaccggcggcggcgtcggcggtccgttccggtggggcaccgggctccggatgcggtgctgtcagcagctccaggacgtgagcctcgagtgccgctgctccgtcatccggtgcatggtcaggggcctactaggaggccatgccgtc

SEQ ID NO: 3591 - DNA, 114 bp, Zea mays
  Clone ID: LIB3116-032-P1-K1-C7
aaaaaagggccgagcccacgcgtccgcaaccagacagaaaccaacactcatgtgcctaactttttcggctacaaaaactacggggcgggttttttttacaacagggcgtgctcc

SEQ ID NO: 3592 - DNA, 421 bp, Zea mays
  Clone ID: LIB3116-032-P1-K1-D1
cggacgcgtgggcggacgcgtgggctcccgtcttctctccgtcgccgcccagccgcagtaaggaggaaggagcaggaagatgccggcggggcacgggctgcggtcgcggacccgcgacctgttcgcgcggcccttccgcaagaaggggtacatcccgctcaccacgtacctgcgcacctacaagatcggcgactacgtcgacgtcaaggttaacggcgccgtgcacaagggcatgccgcacaagttctaccacggccgcaccgggagcgtctggaacgtcaccaagcgcgccatcggcgtcgagatcaacaagcaggttaatggccgcatcatcaggaagcggatccatgttcgtgtggagcatgtgcagcccttccgttgcacaaaagagttccgcctgaggaaaagccaaaatgaccag

SEQ ID NO: 3593 - DNA, 413 bp, Zea mays
  Clone ID: LIB3116-032-P1-K1-D11
cacacgttcacggtagcgagagcttatctttttcggcggtgaagatggtgtcgctgagggggcataatcggctcgccggtggcgtcctcaagtgtgggaaaggcaaagtctggcttgaccccaatgaagtcagcgagatctccatggctaactcccgccagaacatccggaagttggttaaggatgggtttatcatcaggaagcctcagaaggttcactctaggtcccgtgcaagaagggcacatgaggccaagcagaagggaaggcactctggatacggcaagcgcaggggtaccagggaggctaggctccccaccaagattctgtggatgaagaggatgcctgttctgaggcgcctgctccgcaagtaccgtgaggccaagaagatcgacaagcacatgtttcatgacatg

SEQ ID NO: 3594 - DNA, 289 bp, Zea mays
  unsure at all n locations
  Clone ID: LIB3116-032-P1-K1-D12
ccacgcgtccggtcatgcccatacattttgtgcaggcaccttgaccatggttttctgctgantggatataatacttgtgagttcccccccattctcctgaaggacaagccttactggatcatcaagaactcgtggggcgagaactggggggagaacggatactacaatatatgcaagggttccaacattcgcaacaagtgctgcgtctattccatgttctctaccgttttctcagtccactcctcgaatgattttactcttgtcatctgttataatactttattccata

SEQ ID NO: 3595 - DNA, 450 bp, Zea mays
  Clone ID: LIB3116-032-P1-K1-D3
gtccgaccagcgtccgttcgtcatgaaggcgtgggcgaagacctacttttagacaagcacgtgaagttcctcggcgcggatctggagcgtacaccaaggcgctcgacctcgagctcgatctcacggacaaagggctgggcgtgcgctcgaagaggttcgctctcctggccgacgacctcacggtcaccgtcgcaaacatcgaggaaggcgggcagttcacgatctccggcgctgaggagatcctgaaggcgctttagaagctccgtctcctctagaagccgcagcaacgatcggtctatagtttgaactcgcctttgaataacttgtcgttgggcaaggtctaagtcggtgttgtgtatggaacggtcgtcactgagtcatgcacgatttggtattccgtgttggttatggtcaccggtttgaggaaactttttgatcccgcgtggccac

SEQ ID NO: 3596 - DNA, 195 bp, Zea mays
  unsure at all n locations
  Clone ID: LIB3116-032-P1-K1-D8
aaaaaccgggggggcaagcgtcccggacgcgtggacaggacacttgggctttctttgtttataggcagcacactcanctaggcagcatattttatcgagacgcgggagccatccccaccgtcagcgccgccgtgatgaccaccatctttgcccgcgccgtgatctccatgcccaatgctntatggctgcctgcgt

SEQ ID NO: 3597 - DNA, 500 bp, Zea mays
  Clone ID: LIB3116-032-P1-K1-D9
ggaaaaccgggcggccacgcgtccgactagttctagggcgtgtgtgtggcgtttctcctccgtcgtctgtcgaggcgtggtggggtgtatcttgcggggcgcggggccgctcgtccgttaggtgcagcgtcgttggcgaggccggtccgtgcgccgtctgcggtcgtttgtaggacccttaccggacgcttcgtctgctccggttggccaccctatgtttggtcaatatgttctttcgtctacttttgcttatttaccatttcgtcgttctcaattagtggtataggtttatgttttttcttcttttctattctttgtcttattttctatagtattgtatgttttacttttaattttttattttatttatttttatatattattataacttttttttttttattttcaaatattcttatttttattttatttttttttttttactcttctatatttttatttcttctatagcattcgcttttcatattcttttatttttt

SEQ ID NO: 3598 - DNA, 435 bp, Zea mays
  unsure at all n locations
  Clone ID: LIB3116-032-P1-K1-E1
cggacgcgtgggtggctgcccctgcctccaccactgcggcggcggcggcagcgctgctgctgctgctcctcctgtcgctcgccgcggcggcggacatgtcgatcgtgtcctacggggagcgcagcgacgaggaggcgcggcggatgtacgcggagtggatggcggcgcacggccggacctacaacgccgtcggcgaggaggagcggcggtaccaggtgttccgggacaacctccgctacatcgacgcgcacaacgccgccgtcgacgcgggcgtncactccttccgcctcggcctcaaccgcttcgccgacctcaccaacgacgagtaccgcgccacctacctcggcgccaggaccaggccgcagagggagaggaagctcggcgccaggtaccacgccgtcgacaacgaggacctgccggagtccgtcgactgga

SEQ ID NO: 3599 - DNA, 294 bp, Zea mays
  unsure at all n locations
  Clone ID: LIB3116-032-P1-K1-E10
ggggggagccacgcgtccggatgggaggacccttgctgactacaacanctagaatgagagcaccctccacttggtgcgcgggcttatttgtggtatgcagggcttttttaaaacccttactggcaagaccatcactcttgaggtggagtcttcagataccattgacaatgtcaaggccaagatccatgacaaggtaggcatcccgcctaaccagcatcgtcttatctttgccgttaagcagctgaaggatggactcacccttgcggattacaacattcaaaaggagagcaccct

SEQ ID NO: 3600 - DNA, 364 bp, Zea mays
  Clone ID: LIB3116-032-P1-K1-E3
cggacgcgtgggcgacgatcacacacacgttttttatcgagttcgttcgatcgtgaccgtgacgcaggaagctataagctagccaagacaggaataataatggcggcgtcgacggtggcgagcctctctgtcccggtgacgacggcgaccttcgcggcggcggcggcggcgggcggcgccgacgtgctgatcgtcgtcccgaggagggcgggcgccgggcgcgtcgtctggttccccgcggcggcgcgccgcggcggcgggcggttggtcgccgtgcggtccagcgggccggccacgccgtcggagatctccgacaaggtgtcggagagcattaagcatgcggaggagacgtgcgcggacgacc

SEQ ID NO: 3601 - DNA, 426 bp, Zea mays
  unsure at all n locations
  Clone ID: LIB3116-032-P1-K1-E6
ccgcccacgcgtnccgctgtggaaagtgcctcctcctctctatgtaagaaggactacanaactggctaatggttgtatgcttgggaggaggaagcgggatgccatggatggagaagggcgggaggtgcttgatgagtaagaaacgggcttctggggtcgatttgcttctgagttgtttattttatatcgtcgcaatttcgtggttgtcgtttggttattctgtgaagcagccaagccaagctattgttatgaaaatttgtcgtctgtaagcatgtgaacttccgacgttgccacatgctggatcagtctgaataagtaagtatgcagctctaggtggtcagctgcgtctaccacaatgagcatgtacgtatggagaaatatctgtgaacccattttgtttatgaataagatttggttttttcggtt

SEQ ID NO: 3602 - DNA, 350 bp, Zea mays
  unsure at all n locations
  Clone ID: LIB3116-032-P1-K1-E7
tgcttctacgagaggatatagagaggaagatcttgctcgtccgagaccatgaagagcagcccacacctggtgctgatcctgtgcctccaggccgctctggtcatgggcgtcttcgccgctttggctaaagaaaatgccctggttgagagcaaggccatcgacatcaacccggggcagctcaagtgctgcaccaactgcaacttctccttctcggggctctacacctgcgacgacgtcaaaaaggactgcgaccccgtctgcaagaagtgcgtcgtcgccgtgcacgcctcctactcgggcaacannnagnttaggtgcaccgacaccttcctcggcatgggcgggcccaa

SEQ ID NO: 3603 - DNA, 326 bp, Zea mays
  Clone ID: LIB3116-032-P1-K1-E8
cccacgcgtccgggagggcgtctgaggccactaggctgctggccctgatgaagcagaaggggtgcgagcccaacgtgctggtgtacaactccctgctcgacatgcacggcaggctggggaactcgaagcaggccgagaagatctggaaggagatggtgcggcgcaaggtccggcccgaccggatcagctacacggccatcatcctggcgaacaaccgggcgggggagctggaccgctgcatggagctctaccaggagttcagggagaccggaaggaaggtggacatggtcatggctggcctcatggttgggtgcttttcaagacca

SEQ ID NO: 3604 - DNA, 162 bp, Zea mays
  Clone ID: LIB3116-032-P1-K1-E9
ggtttggaattacgggccggcccacgcgtccggcgccaggcactgccaagccaagctcgtatatctcggggaaacacggcaactaacccgaggggcgaggttattaatatggacggcgccaacactgccaaggagcgacaccagaagaacgacgtccgcaac

SEQ ID NO: 3605 - DNA, 442 bp, Zea mays
  unsure at all n locations
  Clone ID: LIB3116-032-P1-K1-F2
cttgaccctttggacatccgacctcacggaggatggtgctgatgagggcaaagatgccccgaaaggtgatgcaggcgagggacagtaatcttcggagggggtgcaaagttgttcgagccccaatgttttagatgctctatgctgtcgaagctgtgctgtgccattattgtagctgatttcgtctccattcacttcttttttcttgttagtaggctggtagtggtcgaattaatttgctttgtgttgccgctagtccatgtggactggtattgttcccctggatttatttggcaagcgtgtccgtgctcgctctagcgttttattgagctnttaaagtcatcgcattcttttttgattgcaatcagttattggctggatatgcggtggctgtttggatcagaagtacagccggagtttccttaccgagcgtgttacatgtgga

SEQ ID NO: 3606 - DNA, 437 bp, Zea mays
  Clone ID: LIB3116-032-P1-K1-F5
ccggcgtccttggctctgatagctggctccaggacgtacgtacgtacgtagatcgatccatcgatcgctagctagctgacgaccatggcgtccctctcctctgccgccatcaccgccccttccttcacggccgcgcccgctcgcgcagtggtcagcaggaggtccttcaccgtgcgtgcctctctccgcaaggccactgccaccgccgccgtggccgttgccgccagcgtcctgcttgccggcggcggcgccatggcccaggaggtgctgctgggcgcaggcgacggcgggctcgtcttcgagcccagccagttcaccgtcaaggccggcgacaccatcaccttcaagaacaacgccggcttcccgcacaacgtcgtgttcgacgaagacgaggtgccgagcggcgtcgacgcctccaagatctcgcaggaggagta

SEQ ID NO: 3607 - DNA, 271 bp, Zea mays
  Clone ID: LIB3116-032-P1-K1-F6
ggagttgtttgccttcttgaggccatctttatcaaacctacccatgacaagcaggagtggagatgtcagtcctttatgggagacttgagttccgcttgaaagaaatgacttacgaatactgggaccttcattgccatcgtgttggatatgacaacaaaaaattacctaaagcaacccgtgctattaatcgtgccaatcatatgaacggtggcagtttcccaacaagtgctccacctcgggtgcttgcagttgatattccaacaagcagctc

SEQ ID NO: 3608 - DNA, 248 bp, Zea mays
  Clone ID: LIB3116-032-P1-K1-G1
cggacgcgtgggtaaccgtcgaagcgttctttctcttttcttctttttcacgcacgccgggggatgattagaaaacgaacaggatctcgaagctgagtttatttgttacggtggtcgataaggtcaaggcttctgctgttacacctttggatccaatccattaagatgaattacccttgcatctattgtaattgtgtggttatccaaaaagggtgcatttaatcattactatttttttgacggggtgt

SEQ ID NO: 3609 - DNA, 321 bp, Zea mays
  Clone ID: LIB3116-032-P1-K1-G10
cccacgcgtccggacgaccctttccagttttctggcgtcgccatggacaactgatacaccggaccgtcgtctctgtttgcggttctgtcaagtgtgcatggaataatactgtaactgtgtttcctgccgggcaatgcactgtgatatgatgcccaacgaataaatgtcgcttttatttttattcgacttcccccctgtaccgtgtggaaataaacctattataagcatcgtgttgaaactcatgatatgcatgagcagctagtgaaaagtttgaatcctagatgaattgaaacacactattatatgattgctaaataatat

SEQ ID NO: 3610 - DNA, 414 bp, Zea mays
  unsure at all n locations
  Clone ID: LIB3116-032-P1-K1-G12
aaaaacngggccgacccacgcgtacacccacgcgtccgaaaaaaaaaaaaaaattttttaaaaaaaaaaaaaaaaaaaaaaaaaaaaagaaaaaattaaaaaaaaaaaaaaggaaaaaaaaaaaaaaaaaaaaaaaaaaaaaaaaaaaaaaaaaaaaaaaaaaaaaaaaaaaaaaaaaaaaaaaaaaaaaaaaaaaaaaaaaatgggggcccctttaaaaaaaaaaaaaattatcaaaccctataaaaaaaaatataaacttttaaatatgaaaacaaaaaaaaaaaaaaatacccactttaaaaaaacataataaaaaaaaaaaccttgtataaaacaaaataaaaaactttacaaaaaaaccacttttacataataagtaaaaaaaaaaaaaaaaaagccccaacaaaaact

SEQ ID NO: 3611 - DNA, 452 bp, Zea mays
  unsure at all n locations
  Clone ID: LIB3116-032-P1-K1-G3
cggacgcgtgggaatccacacaagcacttcgacgtcacacgggcgctgcgcacagacacaccaagcgtcggcaccaatggcttactaccaggaggtggactactgctcggaggaggtgaggtcggtggccccggccggcttcggccgccacggcggcggcgtccagcagcacgtcgtcaaggagaagttcgaggaggtcgacacggtctcacgcgccggcgccaaccaccaccaccaccatggtcaccacggcggccacggcttcgtggtgcgcgagaccagggtcgaagaggacatcaacacctgcaccggcgaggtccacgagcgcagggagagcttcctcgccagggctaactgangccgccggcggccggcatccacgcccgttcgtgcttgcctgcgtgccttatgtatgtctggggttgactggttgtgcagggtcatcgtacttg

SEQ ID NO: 3612 - DNA, 414 bp, Zea mays
  Clone ID: LIB3116-032-P1-K1-G5
cgaggcgtccgcccacgcgtccgcccacgcgtccgcggacgctttttcgagaccggctgcccgaccccggggcggcgatccctctgcacccctgggtttgcgctgccagccccaatctctcgcatccctgtcaaccatggcggcgtcagcaggcggaggcgcggtgcgcgcgctgtcccagaaggagcaggacatacagatgatgctcgcggccgacgtccacctcggcaccaagaactgcgatttccagatggagcggtatgtctttaagcgtcgcaccgacggcatctacatcatcaacctgggcaagacatgggataagctccagctcgcggcgagggttattgttgccattgagaacccacaagacatcatctgtcagtcggtccgcccctacggccagcgtgctgtcct

SEQ ID NO: 3613 - DNA, 257 bp, Zea mays
  Clone ID: LIB3116-032-P1-K1-G7
cacgccttctcggactactcgctccttttcatgttttcggcctggtgctgcactcgggagtcatggtttccctacttgtgggggaagtacagccaccggcgccaccactccaacacggtgtccctggagcgcgacgaggtgttcgtgcccaagaagaaggaggcgctgccgtggtacaccccgtacgtgtacaacaacccggtcggtcggctggtgcacattgtggtgcatctcaccctttggtggtcgttgtacct

SEQ ID NO: 3614 - DNA, 254 bp, Zea mays
  Clone ID: LIB3116-032-P1-K1-H2
aaaaaaataataaaaaaaattttttttttttaaaaaagaaaaagaaaaaaaataagaagagggggggtattaaaaaaataagaggggggaggaaaaaaaaaaattattaatggaatgggtaaagaaaaaaaaaaaaaaaaaaaaaagaaggaaaaaggagaaaaaaagagaagaaagaaaaaaaaaaaaaaaaaaaaaaaaaaaaaagagaagagaaaaaaaggaaaaaaaaaaagaaaaatataggagggaag

SEQ ID NO: 3615 - DNA, 112 bp, Zea mays
  Clone ID: LIB3116-032-P1-K1-H7
caaaaaaaaaaaaaaaaaaaaaaaaaaatttatattataaaaaaaaaaaaaaaaaaaagggaggggaattttaaaaaaaaaaagagggacaaaaaaaaaaaaatggggcggc

SEQ ID NO: 3616 - DNA, 298 bp, Zea mays
  unsure at all n locations
  Clone ID: LIB3116-032-P1-K1-H8
gaantaccgggccggccgacgcgtccggcgacggcgttgttcctgagatggcagcgtacctttagggagcgctgaacgtaagctatgacagtgtgtaccactctggggggggttccaatgatgaacaaaggccctggtatggctctcctgctatcctcaagcaatggttgcatcatcttctcagctgacatagtgacatacaagaggagctagctgccggaacagacagaaactggtatgtgtcctgcatctgacatgacaccattggccaccaaagggcaaaggggaattttctctc

SEQ ID NO: 3617 - DNA, 302 bp, Zea mays
  Clone ID: LIB3116-033-P1-K1-A10
ggaaaaccggccgaccacgcgtccgggagggcgacggccgcgatgaaggcaatggttgcttgcggcgcgagcagccaccacctcgtgcccgttgcggccgaggcggtggcagactgcgtgggcatgcttgaggacgccgtggacctgctgcggcagtcggtggaggcaatggagcgccttggcaaggagcccggcagcgccagtgcagcgccagcgggcaggccgggcggagcgttaggttccaggtgaacagcgggcaaacgtgggcgagcgccgcgcttacgaacgacggtatgtgcatt

SEQ ID NO: 3618 - DNA, 430 bp, Zea mays
  Clone ID: LIB3116-033-P1-K1-A11
cccacgcgtccgagaacaagcccgccggactggtcaagctgaacccggcgagcgagtacccgcccggcctggaagacacgctcatcctcaccatgaagggcatcgccgccggcatgcagaacactggctaggcggcttctcttcactcacctgcagagtgcaccgcaataatcagcttccggtggtggcgttttgtcagttttggatggaaatgccgaactggcagcgtctgttttccctatgcatatgtaatttcctgcctctttatattcactcttgttgtcaagtccaagtggaaaatcttggcatattatacatattgtaataataaacatcgtacaatctgcatgctgttttgtaataattaattaatatcccaaaaaatataattttttattataattaataattttatatatttaatatttta

SEQ ID NO: 3619 - DNA, 253 bp, Zea mays
  Clone ID: LIB3116-033-P1-K1-A12
acccacgcgtccgaataagacgacttgtttcattgattcttgatgtagatcgagcttcttttgcaccacagggtcgaggatgtcttgcaactgcggatcaagctgcggctgcggctcaagctgcaagtgcggcaagaagtaccctgacctggaggagacgagcaccgccgcgcaggccaccgtcgtcctcggcgtgcccctggagaagaaggactttcctctatttgtctatgttctctttcatatttcttct

SEQ ID NO: 3620 - DNA, 303 bp, Zea mays
  Clone ID: LIB3116-033-P1-K1-A2
tggatataactgtgctcatgaacattttttttttaccatattcagtgctccaaacgattggtaccgatgcggtaatatggtatccattttggaagttgacgactgcaatagtcacacattcatacagtttgacccagcccctaggagaggcgagccagatgtgacacgaagaacaccggactattcctttgagttgtggtgttaccaattcccagcttgtgctgtgataattgatgtcaacgtctgctggatcaagggccagacagaaataacaggggaataccaaagcactttgcgaaactt

SEQ ID NO: 3621 - DNA, 325 bp, Zea mays
  Clone ID: LIB3116-033-P1-K1-A4
aaaaaaaaaaaaagggggagcccaccacacaacctaaaaaaaaaaaaaaaacgataaaacaaaaaaaaaaaaaaaaaactaaaaacaacaaagaaaaaaaaaaaaaaaataaaacaaaaaaaaacaaaaaataaaaaaaaaaaataaaaaaaaaaaaaaaagaaagaaaaaaaaaaaaaaaaaaaagaaaataaaaaaacagaaaaaaaaaaaaaaagataagagggaacaaaaaaaaaaacaaaaaaaaaaaaaagaatgaaaaaaaaagaaaaaaacaaaaagaaaaaaaaaaaaaaacaaaaagaaaaaaccaaatcaaaaa

SEQ ID NO: 3622 - DNA, 403 bp, Zea mays
  Clone ID: LIB3116-033-P1-K1-A8
gggatataactgggctcatgaacagaaggttgtcaccatattcagtgctccaaactattgctaccgatgcggcaatatggcatccattttggaagttgacgactgcaatagtcacacattcatacagtttgacccagcccctaggagaggcgagccagatgtgacacgaagaacaccggactattcctttgagttgtggtgttaccaattcccagcttgtgctgtgataatcgatgtcaacgtctgctggatcaagggccagacagaaataacaggggaataccaaagcactatgcgaaacttgaggtcctcattgccattggtcagtgcaagagatgtctgcaatcctgagagaaagcaattgtgccaagccatgcccgagtttcagccttttcaggtgata

SEQ ID NO: 3623 - DNA, 262 bp, Zea mays
  Clone ID: LIB3116-033-P1-K1-A9
acccacgcgtccgatacaagtcagctcaacttcaacggttttgtttctggacctgctttcactgaaagacctggggtttaacccggactagggggggaagtactacgaggaaactggaatggatgagcagcgcataaagatcgaggagctacctcaggctcgttcatacagatcttcgtcacttcttgtgcgcagagctgctcgcctacagcaataatggtgagcattgactgtggacaagggggtgagaaagccttggaag

SEQ ID NO: 3624 - DNA, 170 bp, Zea mays
  Clone ID: LIB3116-033-P1-K1-B2
cacatgggctaaataaagtgtgcgtcgtctgttctggtggtggtagtggggcgcggtgccggatgtgtgccgctgcagcttgtgtctctgttttgcttcatgttctctgtctatctactctcatgtatggcagtttgggtacgggtatatcaagcatgttcagtcttctt

SEQ ID NO: 3625 - DNA, 419 bp, Zea mays
  Clone ID: LIB3116-033-P1-K1-B3
cccacgcgttcgtggtcatgcagcaaccatttctgttcgtgcagctggtaaagaccttatgaaagcatctgctgttgctgctgttgcacctacttgggctggaccccttcccatcgtatttggccgcggttctgatatggaaactaggtacgggcttctacgaggaaccctcagggctccagccctggctggatgatgtacaatgttctggtgagcaatgagaagtcgatccagtctcagtacaagtcccacgtctacgccaaccctgacaacgtgacgccagatatcatcgagagccgatacgagttaaccaaaagaaaaggcgcacggttcgtccccgcggcctttctgacaggccttcttgatcctgtccaaatcgagggaggagtttctgcagttgttcgccaagttagacggag

SEQ ID NO: 3626 - DNA, 302 bp, Zea mays
  unsure at all n locations
  Clone ID: LIB3116-033-P1-K1-B8
acggtcccgacccactcttacgataccaacatgctacatacaaagttgtantttattacaacaanagaacaacaaaggggacgaagatattatcactactgatggtccttacaaatattacatttgttgctaactcaacaatttaaccttaatgctcacatgcttctatatcttcctttttttcaccataccttccatcaataatatttcagtatttgaaaacccatttctttaaccatatatacttcaacaatctattttaacaagtaacatatctttatcactcatgttatttactacaa

SEQ ID NO: 3627 - DNA, 404 bp, Zea mays
  Clone ID: LIB3116-033-P1-K1-C1
caggaatagcaaaaatatttgttggcgagcttattttaacaggcaagttcagaataatacgttggcttttttttcctatggagtccgattttctacagcgtagctgaaatgtatattatgtacgttgtctaaggatgataaccaacatccaactgtaagctcacctagtatgatcttgcttttttagctggcttctgcattctgtggtccattttcttctttccacctcgctacgatccaaggaacttgctagcagaatttgtaggttccaacagaagggatggctttcttggttggtgctttctcttgacaatttcactgtgtattgcatcaagagtagtcatgagtgagaggaaggattcaggacccatcaagccttgtcacatcatggaggcatacagaag

SEQ ID NO: 3628 - DNA, 425 bp, Zea mays
  Clone ID: LIB3116-033-P1-K1-C2
cggacgcgtgggtccgggcttacccgatggcacggctgcactggcttgaggctgtcctgccgctggggatcatcggcggcatgctctgcatcatgggcaacgcccagtatttcatccacaaggccgcgcacggcaggccgaagcacatcgggaacgatatgtgggacgtcgccatggagcgccgcgaaagaagctcgtggaacaatcctccggcaactagggtattgatcaacctcaaacttttctggatgttgacgaacctcgttcaaaagcacagaagtactgctcttttgtttcctgtacaattggaaccaagacttgtttgttttgctttgaaatatcaacagttcggagaataatctgtatctgacatctgtttaattgaacaaagccaaatactttgtcaaaaaaaaaaaaaatatttt

SEQ ID NO: 3629 - DNA, 67 bp, Zea mays
  Clone ID: LIB3116-033-P1-K1-D3
cccacgcgtccgcggacgcgtgggctgaaagaaagacgaggtaggaattctctccctcagggaaggg

SEQ ID NO: 3630 - DNA, 464 bp, Zea mays
  Clone ID: LIB3116-033-P1-K1-D5
ccgggccggccgacgcgtccgtccaccgtcaactgccgccccaacggcagttttttttacgtggcccacatgtgcggcctggggctgaatgtccgcggggccagccgcgttcctcgagtccctcgtcgtcgccgacgtcgccgcgctcagggacggcaccggcaccctcaccgtcttcaccaacgagcagggcggcgccatcgacgatccgtcatcgccaaggtcaccgaccaccacatctacctcgtcgtcaacgccggatgcagggacaaggacctcgcccacatcgaggcgcacatggaggccttcaacaagaagggcggggacgtcaagtggcacatccacgacgaccgatcgctgctcgcattgcagggtcctcttgctgcaccaactctgcagttgctgacgaaagaagatttgagcaaaatgtacttcagtgacttcaagatgattgacatcaatgg

SEQ ID NO: 3631 - DNA, 284 bp, Zea mays
  unsure at all n locations
  Clone ID: LIB3116-033-P1-K1-E2
actccgcgctagctgaggacggtacagcggttcataggtgcgacgtacgacgacgacgacgcaggcgccacacatggcatcccaggtctccgccgccgtgccccggttccacggcctccggggctacgccgcgcccaggtccgcggtggcagcgctgccgtccgtgagggtgggcaggaagaggtctcgtcgcagggcatccgctgcgactacatcggctccgccaccaacctgatcatggngacgacgacgactctgatgctgttcgcggggcggttcgggct

SEQ ID NO: 3632 - DNA, 439 bp, Zea mays
  Clone ID: LIB3116-033-P1-K1-E3
ggagtattctacccttacaaccgtggtgcactatttactgcattggttgtcatctatgcactcacttcaggaattgctggatacgttgctacctctttttattctcagctggaggggacaaactgggtgaggaacttgctattgacaggatgcctgttctgtggacctctcttactgacattttcttcttgaacactgttgctattgcttatagtgcaacagcagcactgccctttggcactatctgtgtcattgtgctcatctggaccttggtcacgtttcctttgcttgttttgggtggtattgctggtaaaaacagcaaaagtgagttccaagcttcttgccgtaccacaaaataccccagggagattccttcacttccctggtaccggagaaccattccacagatggctatggctgggttcttgcctttcaacgc

SEQ ID NO: 3633 - DNA, 441 bp, Zea mays
  Clone ID: LIB3116-033-P1-K1-E4
ccctctctgcctgaccagctaggatcagcgtttgcagcaatggtgatggcgtcgtcgagcggggtgaggagctgcagcgccgtgggcgtgcccagcctgctggcgccgtcgtcccggtccggccgcctggcgccgttctgcgccaacgccaccacctctggccgcgtcaccatgtccgcggagtggtgcccggccagccacgccctgcccacctcgacggctcctctcccggggacttcggcttcgatccgctgggcctcgcgaccgtgccggagaacttcgagcggttcaaggagtcagaggtgtaccactgccgctgggccatgcttgccgtccccgggatcctggtgccggaagctctgggcctgggcaactgggtgaaggcgcaagagtgggcggccgttccccgcgggcaggccacgtacctgggcgccccggtgc

SEQ ID NO: 3634 - DNA, 370 bp, Zea mays
  Clone ID: LIB3116-033-P1-K1-E8
accgaacggaagcgagacccccggcggctagtgagatggacggcggcgccggcgaggaggggaagcaggagcggcacctggtgctggcccacaagctcttccttctatcccacccctccgttgatgacttctccaaggtcgccctccgcgccgaagtcctcgacaccgtgaaatccgatgattggcgacgctgtttgagtcgctggtcgccgcgggtgtgctggagggggacgccgcgctgctggccgagatgcgtgggaggattgacgaggagatccgcaagctagatgagaaaattgctgatgcggaggagaacttgggtgagagcgaagtccgtgaagcacatcttgccaaatctttgtacttataa

SEQ ID NO: 3635 - DNA, 401 bp, Zea mays
  unsure at all n locations
  Clone ID: LIB3116-033-P1-K1-F3
ccgggncgacccgcgcggccgcggcggccatggccgaacgcaccttccaaatttcttatatggcgcgcgagaggaactccgagaaggacaatttttacaaaggcagcgagctanaagccaacaagaaggccatgaacatccagtgcaagatctgcatgcagaccttcatctgcaccaccttctaggccaagtgcaaagaacatgctgggcgaggcatcccaagaacgacctctaccagtgctttcctcaccttaagaattagtaagcatgcataagcatatgatctgctcagctaaaagacaagttctacatatatatatatacgctgtgtgtcaatgaatgggttgtaggctgctgttgatgcggcttgctcgatcgtgttgccccgtctgattatttac

SEQ ID NO: 3636 - DNA, 438 bp, Zea mays
  Clone ID: LIB3116-033-P1-K1-F9
cagcattcaaaaacacaccaagcgaagcgctttagcaacgacctaacaccaatggctaccgggatattagccctccttgcgcgtcttgcccttttagtgagcgcaacaaatgcgttcattattccacagtgctcacttgctcctagtgccagtattccacagttcctcccaccagttacttaatgggcttcgaacatccagccgtgcaagcctacaggctacaactagcgcttgcggcgagcgccttacaacaaccaattgcccaattgcaacaacaatccttggcacatctaaccctacaaaccattgcaacgcaacaacaacaacaacagtttctgccatcactgaaccacctagccgtggtgaaccctgtcacctacttgcaacagcagctgcttgcattcaacccacttgctctggcgaacgtagctgcatacc

SEQ ID NO: 3637 - DNA, 443 bp, Zea mays
  unsure at all n locations
  Clone ID: LIB3116-033-P1-K1-G11
cggacgcgtgggcgcgggccctccacaaacctattccatttgaccttggtgactacagctgtaatttgttgttggatgatgtatgctatcgtttaccttgctcagatgaagccattgatcaaccccatcctgagcggggagtgatctctcctctgcattaaaaagaatgaaagctagatctgcttaccattattcaatctgtgaacttcctattcatttggccccacctgatgaaataaataaactgccatgagttttttttttttttgctactccttcactgcanacattgagaaggttcgctgtgattagtgtatgcaattgtatgatatacgcaataataatagtatctaaatatctgtgtgccgctcattggaatgtctgggtgcgtgtacccaacttttgtcgtcacgactcaggtgtttgtctgcttgtaatggaat

SEQ ID NO: 3638 - DNA, 227 bp, Zea mays
  Clone ID: LIB3116-033-P1-K1-H2
aatgtccgaatccagcatgcagttccatacatatttttataccggatcacccaatgcaatgtgggaatgtgtattgtgtaataagcaataccatatattctaccattctaccgcttttttattttctaacgccgagcattcatgtactgtgtattttatgatgaccgccctgtgtgctcgtcaaagacatctgctatatataatcatctttggcgagattaattatt

SEQ ID NO: 3639 - DNA, 324 bp, Zea mays
  unsure at all n locations
  Clone ID: LIB3116-033-P1-K1-H3
cccgggccgacccgcgcgnacgcccacgcgtccaacccggcctaccttggcttgtttatccggtacggatacctcggcatcggggagcctatgccgaagatctgcggggtggccaagctggacttggaccgcgccggcacgggcgactgcacggtggcgcggcgcgacttcgggcccgggtgcttcgcgggggagccgttcttcgtcccgacgacgtggagggggacgtcaacgaggacgactgctacttagtgtgctacgtccacaactagcgctccggttagaaccaattcttggtgatttactcttgtattcttcattttt

SEQ ID NO: 3640 - DNA, 347 bp, Zea mays
  Clone ID: LIB3116-033-P1-K1-H8
gccactcctacaagcaacatcaggaacacatttacactagaggtgctcaacctgctcggcaggtgtaaccaagactatcggggtgtctacacaacattatatcataatacaccactcgttcaagaatacgaagagctcaggatgtgcatgagatcactctgaatcaaaatacataggtccattcgttgaagatcaaatatgaaattggactatataggatgctgctacgctgacttctatatcatattcgatacggctaatcactacggatagcatttgggacaccatttatagaccacatagcaatcgccgatgtagctattcgctacctaatatgtaaagactga

SEQ ID NO: 3641 - DNA, 363 bp, Zea mays
  Clone ID: LIB3116-034-P1-K1-A11
gctggatcttggcacgatggacaagacaaattattccggccttgcttcctacgttgctggtgcaagttgaccgtaccctttcctggaaggacgtcaagtggctgcagacaattacctcgttgccgatcctagtgaaagggatcgtgactgcagaagacactaggcttgcgatcgaatatggcgctgctgggatcatcgtgtccaaccacggcgcgcgccagctagattatgttcctgcgactatcagctgcctggaagaggtcgccagggaagcgaaaggccggctaccggtgttcctcgacggcggtgtccgccgtggcacggacgtcttcaaggccctggcgttgggagctttaagagtgt

SEQ ID NO: 3642 - DNA, 426 bp, Zea mays
  Clone ID: LIB3116-034-P1-K1-A2
gtccgaccacgcgtccgcccacgcgttcgcggacgcgtgggcggagcgtgggttactgcgatgattttcctgggcccgacaggttatcaaagactcaaggacatggtggatgacaagatacattcgagaggacgtggtcctgtgcagatactcacccggcaaccagcagaggggcggtctcgtgatggaggtctccgctttggagaaatggaaagggattgtatgatcgcacatggagcagcttgcttcctgaaggaaaggctgtttgaccagagcgacgcatacaggagtccatgtatgcgagaaacgaggtctgatagcaagtgctaacctaaagaaaaaactcgtcgaatgcaggggctgcaagaacaagactgacattggccaagtacacataccctatgcttggagcttttgtttaggagc

SEQ ID NO: 3643 - DNA, 245 bp, Zea mays
  Clone ID: LIB3116-034-P1-K1-A4
acgcgtccgggcatttgagcaagaactgccctgaaaacaatcatggcatctatccaaagggtggttgttgggaggtatgtggcgaagttacggacttggccagacattgtccgaataaagggagacaagatttgatatcctccagagatgatgatgtcaacatggaagagcacagtcaggaatgttctgcggttcaccatggtggagatgacctagaagatgattttgttaatgaagaagaacca

SEQ ID NO: 3644 - DNA, 444 bp, Zea mays
  Clone ID: LIB3116-034-P1-K1-A8
cttcagtctctctcgggcactggatcactgcgtctcgctgcagcattcatacaaagatactttcctgaagctaaagtgctgatatcgtcgcctacctggggtaaccacaagaatatcttcaatgatgctagggtaccttggtcagagtacaggtactatgaccccaagactgttgggttggattttgagggaatgatagctgatattgaggctgctcctgaaggatcttttgttctgctacatggttgtgctcacaacccaactggaatagacccaactcctgaacagtgggagaaaattgcagatgtcattcaagagaaaaagcatatgccattctttgatgttgcatatcaaggttttgccagtggaagccttgatgaagatgcattttctgtcaggctttttgttaagcgtggcatggaagtgtttgttgcacattcttac

SEQ ID NO: 3645 - DNA, 181 bp, Zea mays
  Clone ID: LIB3116-034-P1-K1-A9
cccacacaaacgcttcagtctctctcttccactcacatttttgttttcccgccccagcaaccatacaaagagacgtgtttttaaactaaagagctgggaccaacaaccacctgccttaaccacaaaaatcattccaatgatacaacgcaaccatgaacagagaacaggcactatgacccca

SEQ ID NO: 3646 - DNA, 166 bp, Zea mays
  Clone ID: LIB3116-034-P1-K1-B11
aggtggatctactcacgatggaccatgctttttattctcggctggcttctctacggagctggtcaagcttaacgaactcaagggtggaaagacactaaggttcaagggccaatcacatatcttcagataggacggacaggactacctagtgaaccagacactaatc

SEQ ID NO: 3647 - DNA, 156 bp, Zea mays
  Clone ID: LIB3116-034-P1-K1-B12
gcgtacgcagcaacgtgtccgtcatcatccagcccacgtccaataagaccatcgccgactacggctgtgcggagttgtatacaataccagggcgactacatgctcgtcaggcaggcctacttcggcaagaccgacttcgtgggcatattctatacc

SEQ ID NO: 3648 - DNA, 443 bp, Zea mays
  Clone ID: LIB3116-034-P1-K1-B4
acgcgccgaaaccagaagatccattggcgatctcttgaaggttttgctaatagaggtgctgtccggttcttgcccaaaagctcatcctcctggagagtacaactgacggtggcatatgaagttcctgaaattttggccccagttgcatcagcactgaaaccgtttctggaaagcttgcttctcaaaggtttagagcgctttgccacatttgccaaggagcgtaatagcaagatactagtacaccatactagttccattctagtgaagccacataacaatgcatgtaaagaatgatgtcattatggatgtgcccaaataatgtacccaaagagaagtgaatacaaatctgtcaaaagttgaagtctgcttcatgctgtatgtcattgtagtgttataacgccattataaaatcttgaatataattattggtagcattacatgcc

SEQ ID NO: 3649 - DNA, 452 bp, Zea mays
  Clone ID: LIB3116-034-P1-K1-B5
ctttcacaaccaaaccatcaaccaaccaaccaaccatcaacatgtctgacaacctccgcaagggtctcggcgagcaggcgtcggagaagatcacccccgactcccagaagtccaccacctccaagatcggcgagaacgtctccggtgcagctgacaaggcggccagcgctgtccagcctgagggccagaagtccaccacccagaaggtcggagatgccacccgtggcggctccgacaacgcccagaaccagggcgagggtgtcctgaagcaggctcaggatggtcttagcaacgctgccgctggcgtccagaacgctctcggcggtggcaagcagtagattacttcggtagtgctgttgcggttcgactttcccttgcggcttagattggccaggtggatatgattatacccctatgatacgaattcaatgaacaaaacctttgatcaaaaa

SEQ ID NO: 3650 - DNA, 292 bp, Zea mays
  Clone ID: LIB3116-034-P1-K1-B6
gtcaagttcttcacagagacagaggagaacaaccttttgcgaggcccaaggaccgcagtcccatatttcctatgacttcaattgtgcaattttagaagtctattcgaatctgtaagggctaaagatcaatcagatgtgtttattgttttaggtccagattatagtgcaatctgatgcgtttgatttctgttttcctttaaccacatgtacaatagaccatcgggacagtcatatgttcctgtatctcttcggtgacactgccaaagttttgtttgtgattttgttcccgtgc

SEQ ID NO: 3651 - DNA, 422 bp, Zea mays
  Clone ID: LIB3116-034-P1-K1-B7
cccacgcgtccgcccacgcgtccgatcctattatgggagctttaaggatagaatgaaccagtgtagtagagaagacggaatgaatagcatgtctcaaatgatgcagcatacttcagcctaatatcccttcccattgtttcattctatcctattatgggagctttaaggatggcttatccaaataaatatgagatttatcgaagggttgacactctcaatggaaaagagaactatattcttatagctgaattcacgaacaagccaactcctgatgagatcaccagtgctttcaaaggacaaaaaagggaagaaaaggcatcttctggattctggggtttcttaagtggtttattttaagtcaagcgatctgctgtacggcgatgcaatccttctcgtatatttttatctgataagggatgtaa

SEQ ID NO: 3652 - DNA, 217 bp, Zea mays
  Clone ID: LIB3116-034-P1-K1-B8
cggacgcgtgggcggacgcgtggggttttttattagaagtggcgagccccgagagcgggtgtagttagtggctacgggcgggcgggcgcggcgtctgcggcggtcatgagcagtgggagcgagagcactaccgccagcaggtggcccgagctggtcacgctgcgcgcgctgtcttccgactctcgtgagcatcttctgctgccgtgggccggcactg

SEQ ID NO: 3653 - DNA, 224 bp, Zea mays
  unsure at all n locations
  Clone ID: LIB3116-034-P1-K1-C2
acgcgtncggaccccttctatattacaatcgattccactctttctttttctaactgccaggcgcctgcatagagcgtgatttctcatgaccggggtgccctaaacacaattcacaagctcattcataacaacaacgttctctgggtacaccctgacaatgccctacttcatctccttacgatcacctcccctttcgacacttatcaaactcctgatactgtcac

SEQ ID NO: 3654 - DNA, 405 bp, Zea mays
  Clone ID: LIB3116-034-P1-K1-C3
gcctagctctatagctcgagtattgcttgctctccacaagaaacaaagcagagcaccaacaatggccgccgcctcctcgtcctcggtcctcctgctgctcctggccgccgccgccgccttggctggcatgagcgccaacgccgccaccttcaccatcaccaacaactgcgggttcaccgtgtggcccgcggccaccccggtgggcgggggcacgcagctgaacccgggcgggacgtggaccgtcaacgtgccggccggcaccagctccggccgcgtgtggggccgcaccggctgctccttcaacggcaacagcgggagctgccagacgggcgactgcggcggcgcgctggcctgcacgctgtcggggcagccgccgctgacgctggccgagttcaccatcggcgg

SEQ ID NO: 3655 - DNA, 292 bp, Zea mays
  Clone ID: LIB3116-034-P1-K1-C8
cccacgcgtccgcggacgcgtgggcctttttttcctctctctactctccaagttctcgtggggcgtcgaccgctctacacgtgggttgccaacctggacaccgaagtggaagaaggaagcagtcagcatatggattcatggatcagcagccagccttctgtgagccttgacctgtgcgtgggccttgccccgttcagacttcaccaccaggcgccggtggccgtcttctttcccaggcccaagctgcttgtcgaggagaactttctcctgccgccttcaaagaaagaaccat

SEQ ID NO: 3656 - DNA, 454 bp, Zea mays
  Clone ID: LIB3116-034-P1-K1-D1
ctctgagaatgggaagcgggccaaggaattcatggagaagggtcagctcgtgcctgatgagattgtcgttaatatggtgaaggaacgccttcgtcaaccagacgctcaagaaaatggttggcttttggacgggtacccaagaagctattcacaggccatggccttggaaactcttgaaatccggcctgatactttcattctgttagatgttccagatgaactccttgttgaaagggtggttggaaggcggcttgatcctgtaacagggaaaatatatcatttgaagtattctccgccagagaatgaagaaatcgcttcaaggcttacacaaagatttgacgatacagaagaaaaggttaagttgaggctggagacttattaccaaaatatcgagtccttgctatcaacatatgagaacattattgtcaaagtgcaaggagatgccacagtggat

SEQ ID NO: 3657 - DNA, 328 bp, Zea mays
  unsure at all n locations
  Clone ID: LIB3116-034-P1-K1-D10
cggggcgaggccacgcgtcacanccattattgaccgtctcccttatgcgtttgttatttaaagagagcagagaagagcaggtgggggtgtctgttatcatccacaggggcgtggaaaagctccacatggggggcgaccacaagaataaggaggtggagcaccacaagatggccgaggagcaccacaagaaggatgagggggagcaccacaagaaggacggtgggtagcacaaggtatgcatcgtggtaaagatcattgacaagatcaccgtctatgctctgttacaagtccgtctaccacatggaaaagaaatacaagaaatataaga

SEQ ID NO: 3658 - DNA, 385 bp, Zea mays
  Clone ID: LIB3116-034-P1-K1-D3
acaccaccacctcgccggccacactcgtctttctcacgagccacagcccacaggcacaggcaggctctcgagctcagtccacccatcgcaggggatggcgtcgtcgttcgccgtggcaacggtcccgtcgctggcggccccggcggccaagaagcggtccggcggcgtcacgtacgtggagggcatgaacgcctacagcggcctcaaggggctcaacaaggtgaacatgctcggggtgcgcaagaccgccgactactccttcgccaaggtcgtggcgtcgctcagccccgcgggcaggaagcggcgcggcggcgcgttcggcgcccagatgaacgacgccgccgagatcttcaggatcgccgccaccatgaacggcctcgtgctc

SEQ ID NO: 3659 - DNA, 166 bp, Zea mays
  Clone ID: LIB3116-034-P1-K1-E1
gaatcatcttacctgttcagatttcttctcctcttttcgcaacccggtttgccgaccaggtgccggctttccagagtagccaggcgaatcccgagtctggtttgcgcgatggctgaggagcattccaacccccattcccagctagctgcggagagggaggttatgg

SEQ ID NO: 3660 - DNA, 341 bp, Zea mays
  Clone ID: LIB3116-034-P1-K1-E10
gacttccggtgcgccggcgcccgcttcttctatgtcgaggccgaggcggctgcgtgggagggcgacatttggagcatgtggggaaccgagccgttgccggtgccggtgccggtgccggtgccggtgcgttcctgttgtgctggtcttgctctctgccgacggtagtgtcttggtacaacagccggaggatgtgtatgctaggtagctagttgactagatgcgatggtgtgccgagtgtgcatgttggcgttggtccaactacattgattgtgcacacttgtttctgtcttcttgtccgggcagacttgcttttttttattcttgagcaacttctgtatttt

SEQ ID NO: 3661 - DNA, 454 bp, Zea mays
  Clone ID: LIB3116-034-P1-K1-E2
cacaagcacttcgacgtcgcacgggcgctgcacacatacacaccaagcgtcggcaccaatggcttactaccaggaggtggactactgctcggaggaggtgaggtcggtggccccggccggcttcggccgccacggaggcggcgtccagcagcacgtcgtcaaggagaagttcgaggaggtcgacacggtctcacgcgccggcgccaaccaccaccaccaccaccatggtcaccacggcggccacggcttcgtggtgcgcgagaccagggtcgaggaggacatcaacacctgcaccggcgaggtccacgagcgcagggagagctttctcgccagggctaactgagccgtccggcggccggcattcacgcccgttcgtgcctgcctgcgtgccttatgtatgtctgtggttgactggttggggcaggtcatcgtacttgggttatcgacgtgcacg

SEQ ID NO: 3662 - DNA, 435 bp, Zea mays
  unsure at all n locations
  Clone ID: LIB3116-034-P1-K1-E4
acccacgcgnccgccacgcgnncgaaaaaaaaaaaataaaaatttttttatttataaaaaaaaaaaaaaaaagagagcgagaaatttaaaaaaaagggaaggaacaaaaaaaaaaaaaaaaaaaaaaaaataaataaaaaaaaaaaaacaaaaaaaaaaataaaaaaaaaaaacaataacgggccccccctttataaaaacaaaatcaccccccccctccttccaaaaacatatcttcctttttagttcccccaaaaaaataaaccttcccccaattataaaaactcttacccagaaaaacccatttattccccacataataagccattcaaaaaatacccctttttcaaatcaatcaaaaaataaaaatcccccccccatatatccctcaccaaaaaatgttcccaccttaaaaaacataaatccacacccccc

SEQ ID NO: 3663 - DNA, 367 bp, Zea mays
  Clone ID: LIB3116-034-P1-K1-E6
gtcgtccatggcgcggcaccgacaaggcggtgcccttggaactcgcgctgtccgtgtctgtctcgtgggtggttgtgtaagagaaggtatgcatctgctgcttgacaggatagtctgggtaccaggtgcgtcgtcgtctccttgagacgaggagagatcggtggccgttggaactgcctttgatcttgatgggtggatccggccgtgctgttgttgtaactgcttgtaagggtgatggacattattcgttttattccttgttggctgttaatcctgagtagattatggtgctgaggagatatgtggtttctgtgggagactactttaaccttgttagtaatgtgagctgatcgtttaggtgtataat

SEQ ID NO: 3664 - DNA, 381 bp, Zea mays
  Clone ID: LIB3116-034-P1-K1-E8
cccaaccaaacccgcacgactacgacaccaagttgaggagctcgagggcaccaatcatggccggcgtgaactccagcgtcgtcgggctcaagcccgccgcggcagtgccgcaggccgccgccgcctcatcgccggcgaagcgggtgcagctggccgcgcccgagggccgccgcgccgctctgctcggcctggcggccgtcttcgccgtcacggccaccaccgggtcggccaaggccacgatcttcgatgagtacctcgagaagagcaaggccaacaaggagctgaacgacaagaagaggctggccaccagtggcgccaactttgcgcgcgcctacaccgtggagttcggcagctggcagtttccctacaacttcactgggt

SEQ ID NO: 3665 - DNA, 407 bp, Zea mays
  Clone ID: LIB3116-034-P1-K1-F1
acaccactccgtgctagctgaggacggtacagtgttacagaggtgcgacgtacgacgacgacgacgcaggcgccacacatgggatgccagctctccgccgccgtgccccggttccacggcctccggggctacgccgcgcccaggtccgcggtggcagcgctgccgtccgtgagggtgggcaggaagaggtcgtcgtcgcagggcatccgctgcgactacatcggctccgccaccaacctgatcatggtgacgacgacgacgctgatgctgttcgcggggcggttcgggctggcgccgtccgcgaaccgcaaggcgacggcggggctgaagctggaggcgcgcgacttcggcctgtagacgggtgaccccgccgggttcaccctctgcgacccgctggcctgcggcgc

SEQ ID NO: 3666 - DNA, 335 bp, Zea mays
  Clone ID: LIB3116-034-P1-K1-F11
atgaatgctgctgagattactgacaagtttgtattacactccctgcgccagcgacactggtacatccagagcacttgtgccacaactggcgagggtctgtatgagggcctggactggctgtccagcaacattgcgagcaaggcttgaggcctaccttgaatatcaactgcgaactgactaggagctccggatgtatcatggaaactcaggacagaatcgcagttgcaatctgttagattcttctaccggcactatatatttttttttgtttgatgtgtaatgatgttactggtcaacgcttattaccctactatactgttggatgttctttggac

SEQ ID NO: 3667 - DNA, 240 bp, Zea mays
  Clone ID: LIB3116-034-P1-K1-F3
cccacgcgtccgcccacgcgtccgcggacgcttgtttgggtccttcttcgagcagaatgacatgttccgcctgaactatggctaaaagacagtcgaaaactcttgtgatgaacgaatttgttaagggcttcatgttgagacgatgaataccgactgtcgccgctactctcatctcctttgtatctcctctgttggctgattaaactgttattacaagaaattgctggacttgttttttcc

SEQ ID NO: 3668 - DNA, 125 bp, Zea mays
  Clone ID: LIB3116-034-P1-K1-F7
aaaaaaaaaaaaaaaaaaaaaaaaaaattatttaaaaaaaacgggcgatcgttaatataggatgcaaacttactaacgcttgcgtgcaaataaatagattttttttatagttacctaaattcaat

SEQ ID NO: 3669 - DNA, 97 bp, Zea mays
  Clone ID: LIB3116-034-P1-K1-F8
cggacgcgtgggcgggtggagctctatttattcccacgctcccgcctccccggcaaacacacttacgcccgccgaggccgcattctagcacgttgtt

SEQ ID NO: 3670 - DNA, 442 bp, Zea mays
  Clone ID: LIB3116-034-P1-K1-G4
ctgcgttgcgtcttgggggagagagagaagtgggagacccgcgagaggctgccgtgtagggactagggaccgtagagtaagcgacagcgaaggagggagagggggatggccgggatcgggccgatcagacaggactgggagccggtggttgtgcggaagaaggcacccaccgccgctgccaagaaggatgagaaggccgtcaacgccgcgcgccgctccggcgcggagatcgagaccatgaagaagtacaacgctggtatgaacaaggcggcgtccagcggcacattcctcaacaccaagcgcctcgacgatgacacagagaacctcgcccatgagcgagttccaagtgacctgaagaaaaatctcatgcaagcaaggctcgataagaagttgacccaggcacagcttgctcagatgatcaatgagaagccacaagtgatcc

SEQ ID NO: 3671 - DNA, 411 bp, Zea mays
  unsure at all n locations
  Clone ID: LIB3116-034-P1-K1-H10
cgtacgagagaaagcaggagcaccatttcggttctattttcaagccacggaaatggcgcactacgacggcgtgttcgcggacactggccgggacctcnaggctggcttctccggccactcctcctcccctctgaagcccgcggcctcgccgaggcggcccggccgcatgttctgcgacccctgcgacgacggcgacgagctccacggccgtcaccactacctcgacatctgctttcggtgccgtaaactcctgtccggcaacagagacatcttcatgtacagaggtgacctgccgttctgcagcgaggagtgccggcaggagcagatcgagatcgacgaggcgagggagcagcggctgaagcagaccgggcgggccgagcagaaactgcagctggagcagaagcagagccc

SEQ ID NO: 3672 - DNA, 443 bp, Zea mays
  Clone ID: LIB3116-034-P1-K1-H3
cccacgcgtccggaagctctcaactacttatttttcctgattcctctgatcaacgttatgagtccattcttcgtgaagtcctttgctgttgtttggtcagcagatacagttgctttcttcgtgatgtatgcatggaagcttggatggctgcaaaggttgaaatgaagatttttggtgtgctctcttggtgatgtgtgtatgaaagcttggatatttggtttgaaaaggtggagtcggtagctttttgctgagagaaacatttgtcctcaaaattttcacatcttttggagggagctgcatgattagtttattccaagatttagttcatatagccttttatatcttgtgtatatgcagggagtatgaaaaaacagcctttcacatttaagtgataaatatatgtacctgaagtctggacatttttgttgactacgaactgaaca

SEQ ID NO: 3673 - DNA, 348 bp, Zea mays
  Clone ID: LIB3116-034-P1-K1-H4
ctccacacggtgttcagtgtagagagagagtatttttttatacctctgatcaaccatatgagcccgttctttttaaaatccggcgcggccctaaaaacatcatatacattttctttcttcgtaatgtatgcatctaatctttaatgtctgcaaatgtttaaattaacatttctcttcttctctctttattactttttgtattaaaccctttttattttatttctaaagttttagtttctcactctttttctcttataaacattcttccttataatttttacatcttttctattattctctcactattcgcttattccaataattttattcatttattcctttatctct

SEQ ID NO: 3674 - DNA, 449 bp, Zea mays
  Clone ID: LIB3116-034-P1-K1-H6
taaattcttttgttggaactgaagagtacttatctccagaggtcatcactggtgtaccggatacatgtgccattgattggggggctcttggaattctcttgtatgaaatgttgtatggacgtacaccttttcgaggaaagaacaggaaaaggacatttcataatatcctgcacaaagaccttacatttccaagtagcattccggttagtcctgcggctaagcaattaatccatggattgctacagagagatccctcttctcgacttggttcaagtgctgctgcaaacgatatcaagcaacatcccttttttgaagatatacactggccactcatccgttgcatggagcccccagagcttgatgttccactgaaactaactcggaaggaacctgaacaaaaagtgaagcctgaggaggatatatactcatgttcagattattgagacatt

SEQ ID NO: 3675 - DNA, 348 bp, Zea mays
  Clone ID: LIB3116-001-Q1-K1-A11
acgaacaaaggatcgactcacaacgctcttttttaaatacgatctacacatcgaatatcacttgccattccttcactattagggggattcaacaagcatccgtgtcgaaatatggctctcaaattaagttccgaattattacatgctgccaaacgtgagtgtgggtgccatacacaaaaagcaagctactcatacaatggcacacgcaaatagagctcttgcacattttcgttaatccatgaacagaatctagctatgtagacacatggatccatacatcttgatcggaaaataatcaatagaaggagaatcggacgatatctttttcgaaacaaataactcataaaa

SEQ ID NO: 3676 - DNA, 407 bp, Zea mays
  Clone ID: LIB3116-001-Q1-K1-D12
gttagacgcaagcgtacggtctggactatacaaacttatgtactcttgccttccaacatgtcaacggtttatcgggtgagcctaaatgcatgaactggacgacgaaatacaacaatatgactcggactaccgtatcttcacacaacttaataacatgtgctaacatgtatactatgacacctagagtaatcacctataggttacgaccagttgccacatcacaatgaagctcaggatgaatggcactgcttatataccctgtattggccctatttgacaagaacattctgtggtttcactcagagggaccagtgctattgacagacccctagcgagatatcgtatcattctaggaactctatattctgcaccagtgacgaattgtcaacaagggcgttataaatatg

SEQ ID NO: 3677 - DNA, 181 bp, Zea mays
  Clone ID: LIB3116-001-Q1-K1-D9
aacttgcccaaaattctgagtcgaattttaatcactctcaggtcagactcaattttccaagtgcggattcatacaattgatgggtggttaaataattaccggatacaccgattttccgaacaacgatgttccaaacatcacgaaaatttacgaagactccgtatagattaaatatcataat

SEQ ID NO: 3678 - DNA, 388 bp, Zea mays
  unsure at all n locations
  Clone ID: LIB3116-001-Q1-K1-E4
caatggggtcttctggagctgctgtttacccacattggccaaccccagcaatgatgtatccgcattgctatgacaatgttggttcaatgatttctcaggttcctctgtaccaatctttcaaccatggttagtagattctgcttactggaaagttgggaaccgttctctgttgaacttgctatattgtgccgtcctatgttaagtggagttactttagattcgagccatttcgattacagaaaattccaaaaaattcatgtaatgtcgaacgtattagtttgtataatggggagtcctaattcgttgaaactaatatcgtgaactagtctggaactgtaattcgtgtctaatatctagttctcgtctgcaaaaaaaanaaaaataaaaa

SEQ ID NO: 3679 - DNA, 74 bp, Zea mays
  Clone ID: LIB3116-001-Q1-K1-H12
tcgaaaaagcgtgcatgacgacgaaataaatctaatataaagaaacaataaaaaaaaaaacaaaagggggggat

SEQ ID NO: 3680 - DNA, 407 bp, Zea mays
  Clone ID: LIB3116-001-Q1-K1-H2
aagagcatctatggagactgcctttcgtcgtaggaagttatttgcatcccaaaatgtgttggcagctacaaatttttattttcattctaccagaggacaattggacaccaaaggccaaagccacggaggacagcacgataacaagcaaataaccatacgctaatgatagagaagagaaatgatttctgagagaatgtgggcagattgttaaaaccaccgcgacaactaaaatatgtagtgctttatgtaatagtgaactagcaatggcatggactttgccctgcttgttttctttatgtgatatactagtgatgttgtggacaaaaaaaaaaaaaaaaaaaaaaaaaaaaaaaaggagaaatatataaaaggattaagtttacgttcacattcatgctaagaaataa

SEQ ID NO: 3681 - DNA, 409 bp, Zea mays
  unsure at all n locations
  Clone ID: LIB3116-001-Q1-K1-H8
nncgccacgcctnccggcccatattttcggaagattgctggccttatgggaaaaccaatttttggcctgaaaaagcagagaggctgcttgagaagaaagatgataatgcttcacagaaggaagagacacaggtaggaaggctcttgcgtgttgccaaacgcgacgacagaaaaggaaaccttgatgatattttgcttgtgcataagcttggggaaaggatgcgcacaatgaaagaagacttcattatgctttgtctgcaacagttttgcaagcactgccaccatcctatcctatctggcaaaagttgggtttgcactagctgtaaaaatttccatctatgtgacaagtgtcatgcagaggagcagaatacagcacagaaggacaggcattcggccaccacanaacaaga

SEQ ID NO: 3682 - DNA, 292 bp, Zea mays
  Clone ID: LIB3116-001-Q1-K1-H9
cccacgcgtccggatcttagctagcagtttgttttcatttgtatgagcgatcgaaggctgggaaagatgaaaaagaacacagaaaagggaatgagaaattgactaaagctggtcatttttcctctccacaggctcaactctgtatgagaaaaaaaagacatttttccggtcactgtgattttgcatgatcccttcatgtatactacgcttgtaaaccaaatgagcatttccccaaaaaaaaacctgagaaagactgacacaaccacagtcaccactgctagccataaagaca

SEQ ID NO: 3683 - DNA, 344 bp, Zea mays
  unsure at all n locations
  Clone ID: LIB3116-002-Q1-K1-A11
aaaaaaggatcgacgcggaaagttccgattgaaataggatctaaacaaggaagagcacttggcattcgttggttattagaagcatcccaaaagcgtccgggtcgaaatatggctttcaaattaagttccgaattagtagatgctgccaaagggagtgggggtgccatacgcaaaaaggaagcgactcatagaatggcagaggcaaatagagctcttgcacattttcgttaatccatgaacagaatctaggtatgtagacacatggatccatacatctcgatcggaaaagaatcaatagaaggagaatcggacgatatctttttcgaaacaaataananacaaaa

SEQ ID NO: 3684 - DNA, 243 bp, Zea mays
  Clone ID: LIB3116-002-Q1-K1-B3
ctagttctagatcgcgagcggcgcccttttttttttttttttaacaggtagaagaaatacgataatcccaggtttgaacttgaatcccaccagaaacacggagcatccacagaatacacaccagccctagtctaatccaatcgacatcgacagagtaccagtagtcttataacagagagagagagagagagaaaaaaagataaaaaaaaaaaaaaagtaaaaacaaagaatgtattaaagaaa

SEQ ID NO: 3685 - DNA, 64 bp, Zea mays
  Clone ID: LIB3116-002-Q1-K1-C9
aaaaaaaaaaaaaaaaaaaaaaaaaaaaaaaaaaaaaaaaaaaaaaaaaaaaaaaaaaaaaagg

SEQ ID NO: 3686 - DNA, 176 bp, Zea mays
  Clone ID: LIB3116-002-Q1-K1-D2
gagatgtaatagtttgtcagttgacagcagggatctaatttagcaggtcaaagtggtttagacttttataagggaggctgacccgtcctgaattacacattgtagtacaagtctgcatatttttaagcatgcaaaaattcaaatttcaaaaaaaaaaaaaaaaaaaaaaacaaaaa

SEQ ID NO: 3687 - DNA, 108 bp, Zea mays
  Clone ID: LIB3116-002-Q1-K1-D4
cacatggatggaatccatgtgtactcgtctgctgttctttccttcccaattcccatgttcgaatggagtggggattcatggacatgctatctcctttctgaccatcat

SEQ ID NO: 3688 - DNA, 91 bp, Zea mays
  Clone ID: LIB3116-002-Q1-K1-E11
aaaaaacaaaaaaaaaaaaaaaaaaaaaaaaaaaaaaaaaaaaaaaaaaaaaaaaaaaagagggaaaaaaaaaaaaaaaaaaaaaaaaaaa

SEQ ID NO: 3689 - DNA, 244 bp, Zea mays
  Clone ID: LIB3116-002-Q1-K1-E12
agtcgctgcctgtgacagtgcataccgtcgtagatccagtgctctgtacatgtaactgctggttaagggctcgaacttgaaggccatcaaccatttgccaacttcatggactatgtggcgagacatgccccttgtacgggtttcgcaatatcatgtctcctatatctggctaataatgacgaaagatataaacgcatacaacaaaataaaaaaacaaaaaaaacaaaaaaaaaaaaataataac

SEQ ID NO: 3690 - DNA, 227 bp, Zea mays
  Clone ID: LIB3116-002-Q1-K1-F7
gccagtagtggagatcgagtagcagcggtagctaggtgcagggccaagtggtgttggctggatgagatgagaggaggtgcatcagtgcatgcattaggtagtaggggtgttaggagtactgcgttttttttactgctgtactacagtctgctgttcctagatgctgttcactcgttcagttcagtgcatatatatgatgctccagctcttatcaactacaaataata

SEQ ID NO: 3691 - DNA, 101 bp, Zea mays
  Clone ID: LIB3116-002-Q1-K1-H12
aaaaaaaaaaaaaaaaaaaaaaaaaaaaaaaaaaaaaaaaaaaaaaaaaaaaaaaaaaaaaaggaaaaaaaaaaaaaaaaaaaaaaaaaaaaaaaaaaaaa

SEQ ID NO: 3692 - DNA, 324 bp, Zea mays
  Clone ID: LIB3116-004-Q1-K2-D6
ggcaaagatgccccgaaaggtgatgcaggcgagggacagtaatcttcggagggggtgcaaagttgttcgagccccaatgttttagatgctctatgctgtcgaagctgtgctgtgccattattgtagctgatttcgtctccattcacttcttttttcttgttagtaggctggtagtggtcgaattaatttgctttgtgttgccgctagtccatgtggactggtattgttcccctggatttatttggcaagcgtgtgcgtgctcgctctagcgttttattgatcttttaaagtcatcgcattcttttttgattgcaaataaataaa

SEQ ID NO: 3693 - DNA, 349 bp, Zea mays
  unsure at all n locations
  Clone ID: LIB3116-004-Q1-K2-F8
cacaaagtgcaattccattccaagatacagcgaaatcttcaggtacgaggagaaagcatggcctgcttgtgcgtgtgactagttgggcaccctgctgggtactggaatggaaccacgctcccttgttgcttttgtttggtacagtgctggttgttgctacctatatttgctttacagcagcgtcggtgtgtagctcttttaggaaactgagatgttggtttggcctggaaacttaacaatatcgtcacacacatatatgtacatatggggatgaagatatgatcgtcagtatgccatcctttaaaaaaaaagattctcattttaaaaaananaannnaaaaanaaaann

SEQ ID NO: 3694 - DNA, 456 bp, Zea mays
  Clone ID: LIB3116-004-Q1-K2-H2.F2
agaaaataaaagcggtagaatatatgggattgcttattacacattcacacattgcattgggtgatccggtatatatatgtatgtagctgcatgctgaaaacgtacatgatgcattagtgtatatatatagattcatgatggctgcttattgtcccatgtgaggaactcccctgacacgaagttgtagtggccgccgaccagcttgagcgtcccgttggccagcccatccttgacgaaggggtaggtcttgaggttctccagggacaggttaacggcctccttgggggcctggccggccttgagaggctcgaacagctccggcttcttgtcatagacctcggtcttgaacttgtggaacccgtccttcaagcgctcgacggggtcgtccatggcccctcccctgccttggagggtgggtagccttctggttctccgggagggacacggacgcgtggg

SEQ ID NO: 3695 - DNA, 458 bp, Zea mays
  Clone ID: LIB3116-004-Q1-K2-H2.R2
cccacgcgtccgtgtccctcccggagaaccagaaggctacccaccctccaaggcaggggaggggccatggacgaccccgtcgagcgcttgaaggacgggttccacaagttcaagaccgaggtctatgacaagaagccggagctgttcgagcctctcaaggccggccaggcccccaaggaggccgttaacctgtccctggagaacctcaagacctaccccttcgtcaaggatgggctggccaacgggacgctcaagctggtcggcggccactacaacttcgtgtgaggggagttcctcacatgggacaataagcagccatcatgaatctatatatatacactaatgcatcatgtacgttttcagcatgcagctacatacatatatataccggatcacccaatgcaatgggtgaatgtgtaataagcaataccatatattctaccggttttattttctat

SEQ ID NO: 3696 - DNA, 53 bp, Zea mays
  Clone ID: LIB3116-005-Q1-K1-A4
aaaaaaaaaaaaaaaaaaaaaaaaaaaaaaaaaaaaaaaaaaaaaaaaaaaaa

SEQ ID NO: 3697 - DNA, 55 bp, Zea mays
  Clone ID: LIB3116-005-Q1-K1-E5
aaaaaacataatcgagacgcatgaacagacacataaagaacaataaaacacataa

SEQ ID NO: 3698 - DNA, 113 bp, Zea mays
  Clone ID: LIB3116-005-Q1-K1-F3
aaaaaaaaaaaaaaaaaaaaaaaaaaaaaaataaaaataaaaaaaaaaaaaaaaaaaaaaaaaaaaaaaaaaaaaaaaaaaaaaaaaaaaaaaaaaaaaaaaaaaaaaaaaaa

SEQ ID NO: 3699 - DNA, 128 bp, Zea mays
  Clone ID: LIB3116-005-Q1-K1-F5
gaactatcactgtagcagagcattaagcgcggacaacatactacactacgcacaacgtaaccgatacacttgacagcggtctagtgctcagatgttctgatcgagtccatatattctacggcacattc

SEQ ID NO: 3700 - DNA, 426 bp, Zea mays
  Clone ID: LIB3116-006-F5-F2A
atgcggggacataaatgattgacaagatgctggtaaccaattcatgggaattggggggtttccacaacaaaaattgcaagaaaacgggcgtgcatacaaaatgatgcccaaaagcgcagatcacagcaatacattgttttttttattttagacaaaaaaaaatctttgcaggaaagcatcccgtatgagaaattggagcacctcgttgttgccactaccaagtagaactccactggagactggtacggcaaacttcagttaatcccaaacttgcagactgggcacagtttctttcttctaagccactcgtcaatacactttttatggaacttgtgaaagcaaggcaaatggcggatagtttctcccacagaaggattttcaagggagacagaacatggatcttcagacttgttctagatcgcgatc

SEQ ID NO: 3701 - DNA, 448 bp, Zea mays
  Clone ID: LIB3116-006-F5-R1A
cccacgcgtccgactagttctagatcgcgatctagaactagtctgaagatccatgttctgtctgccttgaaaatccttctgtgggagatactatccgccatttgccttgctttcacaagttccataaagagtgtattgacgagtggcttaggagaaagaaactgtgcccagtctgcaagtttgggattaactgaagtttgccgtaccagtctacagtggagttctacttggtagtggcagcgacgaggtgctgcaatttctcatacgggatgctttcctgcagagatttttttttgtctaagataaaaaaaacaatgtattgctgtgatctgcgcttttgggcatcattttgtatgcacgcacgttttcttgctatttttgttgtcgtaatccaccaattcccatgaattggttaccagcatcttgtcaatcatttatgtcgccgcat

SEQ ID NO: 3702 - DNA, 453 bp, Zea mays
  unsure at all n locations
  Clone ID: LIB3116-006-F5-R2A
cccacgcgtccgactagttctagatcgcgatctagaactagtctgaagatccatgttctgtctgccttgaaaatccttctgtgggagatactatccgccatttgccttgctttcacaagttccataaagagtgtattgacgagtggcttangagaaagaaactgtgcccagtctgcaagtttgggattaactgaagtttgccgtaccagtctacagtggagttctacttggtagtggcagcgacgaggtgctgcaatttctcatacgggatgctttcctgcagagatttttttttgtctaagataaaaaaaacaatgtattgctgtgatctgcgcttttgggcatcattttgtatgcacgcacgttttcttgctatttttgttgtcgtaatccaccaattcccatgaattggttaccagcatcttgtcaatcatttatgtcgccgcattaaaa

SEQ ID NO: 3703 - DNA, 536 bp, Zea mays
  Clone ID: LIB3116-006-Q1-K1-B4.F2
acgctgcatcaggaaggaacaatcttctcagcttgctttccatattcagccattaggggcgacgagtaacataccattcagttctcattatatcagctatagtatgctcccctatgttgccgggggggggacctgttcacaggaaaatggcacactcatgtcatttttcgcacctgcacttgaatcagtgcctgaaggctcccgtttccactgtaaacttctagcgccagctttcatcggagcacgccctctaaaggaaccaccggggtgaacagctcttgggtatgccatcctaccatgcctaccatataatgatgatcgtccaataccaggccaaccataaaaatgagctgcttcatgagaacttcgtcgaacaaccttgagaatacgagtcataaatgatgtgccattcaacgacaacgctcgttcagctgattctttgtgtaagaactctacataggcagaccctgttggctgacccgttgcagcattagtgacaatgactactttcagtactgcaccaaacttgttgaaat

SEQ ID NO: 3704 - DNA, 523 bp, Zea mays
  unsure at all n locations
  Clone ID: LIB3116-006-Q1-K1-B4.R2
ctagaacttttcaaggattctcagcggtctgcaccatctgttccggtttcatatagcacatcacatccgacagtggatgcagattcgagaacactttatgttagcaatgttcactttgctgccaccaaggactcattatctcgccatttcaacaagtttggtgcagtactgaaaggagggaggggcactaatgctgcaacgggtcagccaacagggtctgcctatgtagagttcttacacaaagaatcagctgaacgagcgttgtcgttgaatggcacatcatttatgactcgtattctcaagggtggtcgacgaagttctcatgaagcagctcatttttatgggtggcctggtattggacgatcatcattatatggtaggcatggtaggatggcatacccaagagctgttcaccccggtggttcctttagagggcgtgctccgatgaaagctggcgcttgaagtttacaggggaaacgggagccttcangcactgattcaagtgcaggtgcgaaaaatgaca

SEQ ID NO: 3705 - DNA, 261 bp, Zea mays
  Clone ID: LIB3116-006-Q1-K1-D11
tcgcggacgcgtgggaaaaaaaaaaattaaaattttttaaaaaaaaaaaaaaaaaaaaaaaaaagggaaaaaaaaaaaagggtaaaggggtaataaaaaaaaaataaaaaatttgtattatttattattaaaatataatttttttattttatttatttttattttttttttttttttttttttggggggggcctttttaagggttcaaatttttttttccgttttttgcgagttatttcttttttttttggggcccaaaat

SEQ ID NO: 3706 - DNA, 98 bp, Zea mays
  Clone ID: LIB3116-006-Q1-K1-D2
aaaaaaaaaaaaaaaaaaaaaaaaaaaaaaataaaaaaaaaaaaaaaaaaaaaaaaaaaaaaaaaaaaaaaaaaaaaaaaaaaaaaaaaaaaaaaaaa

SEQ ID NO: 3707 - DNA, 461 bp, Zea mays
  unsure at all n locations
  Clone ID: LIB3116-006-Q1-K1-F4
attctctatggtgcgccaggtaccggaaagacgcttctcgcaaaggccgtcgccaaccagaccagcgcaactttcctgcgtattgtgggtagtgagttgattcanaagtaccttggagacggacccaggctagtgcgacagctcttccagaccgccgccgagaacgcgccttccattgtcttcatcgacgaaatcgacgctattggtaccaagcgttacgagtcaacatctggtggtgagcgcgagattcagcgaactatgttggagctactcaaccagctggacggtttcgatgaccgtggagacgtcaaggtcatcatggccaccaacaagatcgagacgctcgaccctgcccttatccgtcctggtcgtattgaccgaaagattctcttcgagaaccccgaccaaaccaccaagaagaagatctttactctccacacttncaagatgtcactcaacga

SEQ ID NO: 3708 - DNA, 125 bp, Zea mays
  Clone ID: LIB3116-007-Q1-K1-E4.F1
aagcagtataataacaccggaaattcacgtcgatcagctagtcactgcctttgcagggtaatcgaacggcagtgcctgcacgtcgtcactgtagcgaactggtgtcccagaaaaccgtaccccca

SEQ ID NO: 3709 - DNA, 413 bp, Zea mays
  Clone ID: LIB3116-007-Q1-K1-E4.F2
agacagtgtaataacaaccggaaattcacgtggatcagctagtcactgcctttgcagggtaatcgaacggcagtggctgcacgtcgtcactgagcgaactggcgtgcctgaaaccgtacgccctcagcacctggtcgtcggcgaagttgagcgcgcggcgcatgccctggtcgcagctgtccccggagtagtgctcgttgcgctgcccactgcacggctgacaccccgtgaagtgcgtcacgaacgggcggcgccacccgtgcaccccggtctccggcagcccggccccgcccagggcggcgttccttggcaccgcgtactccgcgtgctccctctccgcgtgccggctccgcagcgcggcagctcccggccggcggtccatcgcctcgtacctctccgtcatgttggcgagc

SEQ ID NO: 3710 - DNA, 413 bp, Zea mays
  Clone ID: LIB3116-007-Q1-K1-E4.R2
gctcgccaacatgacggagaggtacgaggcgatggagcggcggccgggagctgccgcgctgcggaggcggcacgcggagagggagcacgcggagtacgcggtggcaaggaacgccgccctgggcggggccgggctggcggagaccggggtgcacgggtggcgccgcccgttcgtgacgcacttcacggggtgtcagccgtgcagtgggcagcgcaacgagcactactccggggacagctgcgaccagggcatgcgccgcgcgctcaacttcgccgacgaccaggtgctgagggcgtacggtttcaggcacgccagttcgctcagtgacgacgtgcagccactgccgttcgattaccctgcaaaggcagtgactagctgatcgacgtgaatttccggttgttattatactgtct

SEQ ID NO: 3711 - DNA, 295 bp, Zea mays
  Clone ID: LIB3116-008-Q1-K1-A12
cccacgcgtccgcagagttcgttcggcgctcgccggggtgactgacgtttctgtctccctgccgtatagtaattgctgcgctagcacgtctcgacagacagacagatagatagataaacatgcgccatcgtctatagcggaaagatgcaataatgtgtatgcatgtattcgcgcggatcgatcgtttccctctgaactaagattcttgctcttttcggcttacaaaacaaaaagccgctgatggagacaatggaagagcaacgagacaatgacaagggactacaacatgaccaaa

SEQ ID NO: 3712 - DNA, 110 bp, Zea mays
  Clone ID: LIB3116-008-Q1-K1-C10.F1
cctcagagggcgcctttttttttttttttttgaatgataaatgtttcgataccgaagaattcaatgtcacaggagaaatccaaacagttgaaagctaagggtgtcattga

SEQ ID NO: 3713 - DNA, 537 bp, Zea mays
  Clone ID: LIB3116-008-Q1-K1-C10.F2
gaaatgatcaaatgtttcgataccgaaggagttcaatgtcacaggagaaatccaaacagttgaaagctaagggtgtcattgaagccattgaagcaatccggcagcagcatactagagactgaggtatatacacagggttacaatagcagcagccccatcatgctcgtttatttacagtggcaggggcgattgctctaggcagagccgaaggtgttttcaccactgtaggtcatgtaaaggaagccatcctcgtccttgttctcttcgtagattgcagacatcaaagaggcagttggtggcaaggtgttcttcacaaagacaaagatggccttctctgggctcagcttgattctcttcctcaccacatagacaaactggccgacagtgagatcagcagggacaagggacttcttcttatcaatctcggggacatcagttttgccagctttctcaacaatcacaggaattctgtcgggatacttatccctgatcctggcagattcggactgccttttctcgaggtcgtgctccattttg

SEQ ID NO: 3714 - DNA, 638 bp, Zea mays
  Clone ID: LIB3116-008-Q1-K1-C10.R2
ccataataaataagggcgacacgccatccccaccgaaccctacccctacccgcgacttcgctcagcttccgccgatcggcttgccccgtcgatttcgccaacccctcgacccgatcggctccattgatcgtacctcgtcgtccggttgtcgatggccaggacctctttcaaaatggagcacgacctcgagaaaaggcagtccgaatctgccaggatcagggataagtatcccgacagaattcctgtgattgttgagaaagctggcaaaactgatgtccccgagattgataagaagaagtaccttgtccctgctgatctcactgtcggccagtttgtctatgtggtgaggaagagaatcaagctgagcccagagaaggccatctttgtctttgtgaagaacaccttgccaccaactgcctctttgatgtctgcaatctacgaagagaacaaggacgaggatggcttcctttacatgacctacagtggtgaaaacaccttcggctctgcctagagcaatcgcccctgccactgtaaataaaccagcatgatggggctgctgctattgaaacctgtgatatacctcagtctctagtatgctgctgccggattgcttcaatggcttcaatgacacccttagc

SEQ ID NO: 3715 - DNA, 245 bp, Zea mays
  unsure at all n locations
  Clone ID: LIB3116-008-Q1-K1-D12.R2
gctgcgcgctggggaggcggactcggagagggagcgcgccgagtacgcggtggcaaggaacgccgccctgggcggggccgggctggcagagaccggagtgcacgggtggcgccttccgttcgggaggggttcacggagtgtgagccgtgcaatgggcaacgcccgagcactacttctgggacagttgagaccanagcatgcgccgcgcgctcaacttttacgactaccataggctgagggcgtac

SEQ ID NO: 3716 - DNA, 149 bp, Zea mays
  Clone ID: LIB3116-009-Q1-K1-C6
cggctgcggtacgcgattccaattcgagcacgcgtacgcgcacgtgtacgcagtccatcagggtgtctaagcctgcttagatgtgccttagcttgctggaagtggtaacttgacctggcatcagattcatttaagatcactgaaggaaa

SEQ ID NO: 3717 - DNA, 165 bp, Zea mays
  Clone ID: LIB3116-009-Q1-K1-D4.F1
ggaaagtaaatatttttctatttgaattttttttcattcagtaaacggccagcgatttcaccgccagctttacacaatcgaaccgaggggcttgggttttataccaatcggagagtacacgggtgtaattcggacaatccgtcgatccgtcccttctggccgtcg

SEQ ID NO: 3718 - DNA, 521 bp, Zea mays
  unsure at all n locations
  Clone ID: LIB3116-009-Q1-K1-D4.F2
ggaaaagtaaatatttttctatttgaattttttttcattcagtaaacggccagcgatttcaccgccagctttacacaatcgaaccgacgggcttgggttttataccaatcgtagagtacacgggagtaattcgtacaatccgacgatccgtcccttctggccgtcggtcgtccttgctcttccggagttccgctgacggggggaagacatgaactctgaagcgagaggcggcggttcctgctcctcagatcttgtccttgagcttatcgcccttgacgacggggttggcgcgcgcgatggcgtcncggccggcggcccggaaatcgaaggcgcacgcgtgccgctccgggtagcggtgcacgccgcagaaggtagctccgcagcggcacgcgaaccccgtcaggcccacgcgcttccggcagctggagcacctgcccgccttggcgccagcaggggccgtcgcgggaggttcgagatcgggagagaccgccgccgcgccggagactgccgaggaggaatgc

SEQ ID NO: 3719 - DNA, 631 bp, Zea mays
  unsure at all n locations
  Clone ID: LIB3116-009-Q1-K1-D4.R2
cccacccagaccaaacccaggcttcccgttccctcgcttttgtccggcggccatggcggaggagcagcagcatcagagatggcaggagggccaccgcctgtgcgccaacaattgcggcttcttcggcagccccgcgacgctggacctctgctccaagtgctaccgcgacctataccagcagcagccagcaggcgcggcggcgggcccctccgctcccaccgcgtcggccttccagcattcctcctcggcagtctccggcgcggcggcggtctctcccgatctcgaacctcccgcgacggcccctgctggcgccaaggcgggcaggtgctccagctgccggaagcgcgtgggcctgacggggttcgcgtgccgctgcggagctaccttctgcggcgtgcaccgntacccggagcggcacgcgtgcgccttcgatttccgggccgccggccgcgacgccatcgcgcgcgccaaccccgtcgtcaagggcgataagctcaaggacaagatctgaggagcaggaaccgncgcctctcgcttcagagttcatgtcttccccccgtcagcggaacttcggaagagcaaggacgaccgacggccagaagggacggatcgtcggattgtacgaattact

SEQ ID NO: 3720 - DNA, 94 bp, Zea mays
  Clone ID: LIB3116-009-Q1-K1-E10
aaaaaaaaaaaaaaaaaaaaaaaaaaaaaaaaaaaaaaaaaaaaaaaaaaaaaaaaaaaaaaaaaaaaaaaaaaaaaaaaaaaaaaaaaaaaaa

SEQ ID NO: 3721 - DNA, 311 bp, Zea mays
  Clone ID: LIB3116-010-Q1-K1-C9.F1
agtatatatatagtatcaaatcatatcatcgtggaccaattaatatatggttacagcagatgcaatcggatcaaccaacatgcaggtagacacacgtacgtacatgagcacaaagactgacgccaaacatgcagagagagatagcaaactgaagaactctgtttctctctctctcacacacaccacacaatacctatgtatggcagcagctcggcctcgcttattattgttcaaccacaccacaagctagatagataataatcatatccatggtcgtcgatcgatgtgatcagcagttgcaggggtcgcac

SEQ ID NO: 3722 - DNA, 560 bp, Zea mays
  Clone ID: LIB3116-010-Q1-K1-C9.F2
agtatatatatagtatcaaatcatatcatcgtggaccaattaatatatggttacagcagatgcaatcggatcaaccaacatgcaggtagacacacgtacgtacatgagcacaaagactgacgccaaacatgcagagagagatagcaaactgaagaactctgtttctctctctctcacacacaccacacaatacctatgtatggcagccagctcggcctcgcttattattgttcaaccaccaccacaagctagatagataataatcatatccatggtcgtcgatcgatgtgatcagcagttgcaggggtcgcacttgcagttgccaccgcagctgcagccgtgggcggcctcgccggactccgccgcggcctcgacgaactcgggcgcggccttcttctccggggccacgccgaggacgacggtggcctgcgcggcggtgctcgtctcctccaagtcagggtacttcttgctgaaaaggacagcgcgcaaatggattgaactactcgatccaaattaactttgttcttggctggttggttggttggtttgcaatggaaaaa

SEQ ID NO: 3723 - DNA, 628 bp, Zea mays
  unsure at all n locations
  Clone ID: LIB3116-010-Q1-K1-C9.R2
cccacgcgtccgtgattcttgaagagatcgagcttcttttgcaccacaaggtcgaggatgtcttgcaactgcggatcaagctgcggctgcggctcaagctgcaagtgcgggtaatatatatgataatatataagtgcaccgtgcatgattaatttctccagccttcttcttgtctagttaatttccatttatttattttttccattgcaaaacaaacaaacaaacagacaagaacaaagttaatttggatcgagtagttcaatccatttgcgcgctgtccttttcagcaagaagtaccctgacctggaggagacgagcaccgccgcgcaggccaccgtcgtcctcggcgtggccccggagaagaaggccgcgcccgagttcgtcgaggccgcggcggagtccggcgaggccgcccacggctgcagctgcggtggcaactgcaagtgcgacccctgcaactgctgatcacatcgatcgacgaccatggatatgattattatctatctagcttgtggtggtggttgaacaataataagcgaggccgagctggctgccatacataggtattgtgtngtgtgtgtgagagagagagaaacanagttcttcagtntgctatctctctctgcat

SEQ ID NO: 3724 - DNA, 98 bp, Zea mays
  Clone ID: LIB3116-010-Q1-K1-F4
aaaaaaaaaaaaaaacaacaaaaaaacaaaaaaacaaaaaaaaacaaaaaaaaaaaaaaaaacaacaacaaaaaaaaaaaaaaaaaaaaaaaaaaaaa

SEQ ID NO: 3725 - DNA, 80 bp, Zea mays
  Clone ID: LIB3116-010-Q1-K1-H3
aaaaaaaaaaaaaaaaataaaaaaaaacaaaaaaaaaaaaaaaaaaaaaaaaaaaaaaaaaaaaaaaaaaaaaaaaaaaa

SEQ ID NO: 3726 - DNA, 240 bp, Zea mays
  unsure at all n locations
  Clone ID: LIB3116-011-Q1-K1-A9
cgccgctgttcaaagacagatacccgcctatagactcctagatacagccttgatgcttgtactcggctcgtcgcgcgccacgggcatgcaggcagcagcgaaaaggccggtttctttacctaaaaatctgtgtaaaacattactatatatcacacagtctaataatacccgtgctagtacatgggaaaggttactatcnaaaaaaaaaaaatgaaaaagaaaggaaaatataataaatag

SEQ ID NO: 3727 - DNA, 457 bp, Zea mays
  unsure at all n locations
  Clone ID: LIB3116-011-Q1-K1-C11
cggacgcgtgggcggacgcgtgggctagatcgcgagcggcgcccttttttttttttttttttttactcaagctatatatggttattggcaagtaataagtatacatcgtatctgcaaccggtgctgtaaagtgggtgagtaaagagggaaaattgtatgccaatcagaatctaggttttatgacgaacggcatcttatccacgaacggaggatcagaatacttcccggtcaggatctgcgaggcgatatggaaattcgcagcttccgtgtaatgtatcccatcccagttgtgaaacnaattcagtggggtcgatgcacccttttgcggggaccatcttactctccnnagacaccgtgtgtccacatggtacgttaccatcgtagttcaggggtgggcctncggatccacagcacgcctgagtggcgtgctcgaacctgaggaagtcgatgacgaggc

SEQ ID NO: 3728 - DNA, 242 bp, Zea mays
  Clone ID: LIB3116-011-Q1-K1-C12
cggacgcgtgggcggacgcgggggttagatctcgagcggcgccctttttttttggtgtttgtttactcaagctatatatggttattggcaagtaataagtatacatcggatttgcaaccggtgctgaaaagggggtgagtaaagagggaaaattgtgggccaatcagaatctaggttttatgacgaacgggatcttatacacgaacggaggagcaaaatactttccggtcaggatcttccag

SEQ ID NO: 3729 - DNA, 207 bp, Zea mays
  unsure at all n locations
  Clone ID: LIB3116-011-Q1-K1-C9
cccacgcggncggcanagagaaccaaagaacagangaggagcacgagaaggggcgggagagggcaagcgacanccagnncagaaaggagaagaaggggcgacacgnacgcaggacgacgacaccagagcaagaaggacccaganaggcaacggaaacgaggaaggaagaagagaaagcaagggacccgcaaaaacaggagngacaaa

SEQ ID NO: 3730 - DNA, 470 bp, Zea mays
  unsure at all n locations
  Clone ID: LIB3116-011-Q1-K1-D9
ctgggaggcattcttatgaatctgtctctagcatccctcaaaagtcgctctacctcaatgagcaatacttgaatgtgaaaaaggctatggtcgatgctttctttggtcctcctgaacggagtgtatatagtgcatctgttcaaagcactcttttgcagatggcaaaggctgtacttggcaggttcagtgacatatcatcagttaaactaaaaatgccgaatatccatttcttacctgttaatatatcaagcaaggatcacggcagcattggaaagttcgatgatgatgtatatcttccgacagaatgggatacctaagggatcgattgaaagtagtttgagttggtttaggacaaagagnnngtacaagacaaacgtagtgtatggtggaagaagggtataatanatttctgcttcatgctttgttcattatctaataacgataatcagaaggtttacttatggtaaaga

SEQ ID NO: 3731 - DNA, 210 bp, Zea mays
  unsure at all n locations
  Clone ID: LIB3116-011-Q1-K1-E10
cacacnannccnagagagcagggtttaactccgaatactcatccgacacccccgggggctccattcaccagccctggggcaagaacaccagagcgcgaggcccaaagggggagcgggcacacacgccgcccgcaaagccaatgcccgagcgggcgacccacggcacccaaaacggcggccgcatggagacaccgcggcccgtgccaccac

SEQ ID NO: 3732 - DNA, 274 bp, Zea mays
  unsure at all n locations
  Clone ID: LIB3116-011-Q1-K1-E2
tagttctagatcgcgagcgttngacgtgattcgggcgctgcgcacagacacaccaagcgggggcgccaatggcttactaccaggaggtggactactgctcggaggaggtgaggtcggtggccccggccggctttggccgccacggtggctgcgttcatcatcactgtcttaaggagaagttcgaggaggtcgacacggttttacgcgccggcgccaaccaccaccactaccatggttaccacggcggccactgcttctttgggcgcgataccag

SEQ ID NO: 3733 - DNA, 106 bp, Zea mays
  unsure at all n locations
  Clone ID: LIB3116-011-Q1-K1-E9
cggacgcgtgggnaanaaaaaaaattaagaatcaatgggaaaagaaaatactcgaggactaagggagacaataaataggggaaaggagcgaacattaaaaatacaa

SEQ ID NO: 3734 - DNA, 79 bp, Zea mays
  Clone ID: LIB3116-011-Q1-K1-H2
acgtacgtccccctatattgagttaattgcgctccagaccatattacgttccaaccactaaagcttaggtctatgtttc

SEQ ID NO: 3735 - DNA, 310 bp, Zea mays
  Clone ID: LIB3116-012-Q1-K1-B7
agcaaaaggtcgtcaattaattaactcaataacaaatcagctgctcgttttgatttgcattacacgctgcttctacagttccactacctctttcatcatcttcttctctctaccactaacactgggggtcactgaactgaacgtgagctacgacagaaagcatcatgtagttcatcataaggaggattgcgaaaggggggaaaacgagggggagcgattaaattagagcaaaaggaacctaagctttgggggtggactttctgggcgtacggtggtgcgttactcttctgggctggagtcggacaccggc

SEQ ID NO: 3736 - DNA, 314 bp, Zea mays
  unsure at all n locations
  Clone ID: LIB3116-012-Q1-K1-C6
aagctggtggaggacaccaccgaccacgtcctccgcttcgaggtgccggagatgatagagagggaccggttctcgtggttcaaggacgaggagttcgcgaggcanacgatcgcggggctcaacccgctgtgcatccagctgctgactgagttccccatcaagagcaagctggacccggaggtgtacgggccagcggagtccgccatcaccaaggagatcctggagaagcagatgaacggcgcgctgaccgtggagcaggcgctggcggcgaagcggctgttcatcctggactaccacgacgtggtcctggccta

SEQ ID NO: 3737 - DNA, 383 bp, Zea mays
  unsure at all n locations
  Clone ID: LIB3116-013-Q1-K1-D10
ggatcagtcggtggagccatgcttgcccaatgtgtgggggttcatgggtgaaagttgtttgagcgctgtatttggcaacaacttcgctgctaattgctttcctgacaaacatgtatggagttccatagttatgcatctaacgctaggctactaggatcaggttcagccgttcatgccagatggttggtctacaggcacatgcacgtggcacgaccactgtggaagtctggtagaattaggagctattctgggggtctgaatatgtaactgacatttgcattatgctgtctagtgtattattaaccagtgactntccttgctaaaaaggtgtagcatcgctacttgttcaaaaaaaaaaacatgactgactgactggatggaat

SEQ ID NO: 3738 - DNA, 90 bp, Zea mays
  unsure at all n locations
  Clone ID: LIB3116-013-Q1-K1-D3
cccacgcgtccgnnaaaaaaaaaaaaaaaaaaaaaaaaaaaaaaaaaaaaaaaaaaaaaaaaaagggaaaaaaaaaaaaaaaaaaaagaa

SEQ ID NO: 3739 - DNA, 184 bp, Zea mays
  unsure at all n locations
  Clone ID: LIB3116-014-Q1-K1-B7
cccacgcgtccgggaaaaggccgtgtgtttatttagttagacttgatcacaccaaaagctgtgcctggagagatggctgaatctgctgtgccttcctttttcacgatccatttgttgttctcgtctgcttaaactcttggcgtgatctggacgggaaaaaaaaaaaaaaaaaaaaaaannnnna

SEQ ID NO: 3740 - DNA, 74 bp, Zea mays
  Clone ID: LIB3116-014-Q1-K1-D7
aaaaaaaaaaaaaaaaaaaaaaaaaaaaaaaaaaaaaaaaaaaaaaaaaaaaaaaaaaaaaagaaaaaaaaaaa

SEQ ID NO: 3741 - DNA, 188 bp, Zea mays
  Clone ID: LIB3116-015-H1-F2A
agcggttcgacatacacgagtgattaattaggcgcgctatgtttcctttgtcggtagcatcgatgacaacatcttcgcttatcttgaacaaatagcaatcctttttttctctatggtactgtgcttccctcaagtcagcaacacaccgtctaacttgttcgccacggtactcaataaccatttgaccc

SEQ ID NO: 3742 - DNA, 227 bp, Zea mays
  Clone ID: LIB3116-015-H1-R2A
catggatgggggctcttcgccgcaaggaatattcaggagggtcaaatggttattgagtaccgtggcgaacaagttagacggtgtgttgctgacttgagggaagcacagtaccatagagaaaaaaaggattgctatttgttcaagataagcgaagatgttgtcatcgatgctaccgacaaaggaaacatagcgcgcctaattaatcactcgtgtatgtcgaaccgctt

SEQ ID NO: 3743 - DNA, 290 bp, Zea mays
  unsure at all n locations
  Clone ID: LIB3116-015-P1-K1-A2
cacgacgtcacgcccacgcgtacgcggacgcgtgggtgaaagagttcgctgctcaacaagacgacnacctgtagaatacagaagggacttaaacggtttgcatactgttttatagaactaacatcttctatgtagcaacagggatacaggtcatccaattaagtattaccaaactacgaatcccacattttggacactgctaggactgtaaatatttaacattgtaaatctaaacccaagcattctgcgatattatgcatctccgcgtcggaaatgatttctggggcgat

SEQ ID NO: 3744 - DNA, 441 bp, Zea mays
  Clone ID: LIB3116-015-P1-K1-A8
ttacagtggacgcgtgggcgccggcgcggattctgcaggaggcacggtgctggaccagaaggtgtggttccgcccgctcgaggacgtcgagaagccgccccccgccgcgtgagccgcgcggcgctgctaggccagcccacactgctgctcgctcataaaaagggcggcgggagagcctggcagtggcaggcaccctgctcgtgctcggctgggctgggctccctgcttatatcactacaatattatactactagtagtggtgcttgatagcagtgtgtggctgtgctaataccagtataatactggttctactataatacagtcgtatcaggcatggcgtgcatcaggactggttgtgatagtagcaacgtgatgctcgtgcctgtaataagaacaagcaggcgatgtgtgcctgtgatgtaccggtgtcgtcagtgttat

SEQ ID NO: 3745 - DNA, 456 bp, Zea mays
  Clone ID: LIB3116-015-P1-K1-B3
actagttctagatcccttccctgcctagaacttgctttgcttcaccccatcacagcttttggtgccgcgtcatcggcgagctggccggcggcgaccggataaactaagccagacccttcgctccgaaagtcgtctctcgtagagagcacttgctcacctgctcctcgccctcctctgctggcagtggacttgcgcggagtggagatccatccggacctggttcgatttcttcatctcggttgcttctctgtccagtgggtggatcactggattgtgggttgtgctaactgcaggctggcttgtcagcctatcataaggaaagtgaaaaagagacaacaaagcaatttgttgtctcattcttaggagctggcgagcactcggcatggcagatgctagttcgaggactgacacctcgactgttgtagacatggatgataagaatcaaaggttagaaaa

SEQ ID NO: 3746 - DNA, 294 bp, Zea mays
  unsure at all n locations
  Clone ID: LIB3116-015-P1-K1-B4
aacaattattaatctccataccaacatagaattttcttttcttcaccccatcccaatttcgggcttctacttatacatgaccgggccggccctcaccatatcaactatccctnacccttacctcatcaattcctctttcttatataacactttctcatcctcctcctacactactcttatctaccatcacttcctctttaacatcatccattccacccttctactatctcttcatctttcattcttctctatcctaattactaaatcactttcattttatatctacatcttaac

SEQ ID NO: 3747 - DNA, 309 bp, Zea mays
  Clone ID: LIB3116-015-P1-K1-B9
gttccaaattccaggataaccttataaggcgccgtaccaagtcaacaggtccgggggcactgaggcgtgggggggggaaaaaccctaactgggtctgggccaggaacaagaaggaagcgacggtcgtcaagcaggagaggagatgtgatcgatcagtacagactagattcgttcgtgcgcgcgtcgtcttaacttcaggttaagggaaacaataattcaaccgtcggttaattgctcgccttaattacactgctctactacgtactgctaccaccaccaccaccatattgaccaaattaagcttgggat

SEQ ID NO: 3748 - DNA, 433 bp, Zea mays
  Clone ID: LIB3116-015-P1-K1-C10
aattatcccataaaaaccctttccaaacacccgattcacattcaaacaaataccgtggacatgagctccaacgacgtggggcggccccgtcgacaacgagtacaagtctcgcaccggccaatcagagatccccgtccagagcgacgaggccagcattgagcgtactgagtatgatgctggtggtgactccgacaagcagttagagaaggatgagaacgacgccattgacaggagcaacattatggatgagcgcactcgtggtgcggccaagaagcctggagcctacaccgagcccggggatgaggaggatgttgataagttgactgctggcggtcaggatggtacctctttgggccgtcagtaggagtcggatactatatcctttttgacaccacagcgaataagaattttttctatcaaccataaaaaaata

SEQ ID NO: 3749 - DNA, 340 bp, Zea mays
  Clone ID: LIB3116-015-P1-K1-C5
gcgcggacgcgtgggttcaaatcacaccaaattatcatcttgtggagatcaagaaaatcaatggggacagccttgagtatcatagcgttaggaaccaaagcatgagaccggcactagaagatattgtgtgggcatggcatggtgaacaacctgacgagaagtagattcatcaactttagataatcgtcaacctacaaccttagatattatgacaggtgtaatgctattagaaagtgtatcaggccaaaaaaaatgtcatgggacttaataatattacttctatgttgtttttattctcatgctcatgctgtcatgcagtaaagtgttctttctattgacc

SEQ ID NO: 3750 - DNA, 107 bp, Zea mays
  Clone ID: LIB3116-015-P1-K1-D1
aaaaaaaaaaaaaaaaaaaaaaaaaaaaaaattttatttaaaaaaaaaaaaaaaaaaaaaaaaagaaaagggaaaaaaaaagggagaggggggggccccccttttaa

SEQ ID NO: 3751 - DNA, 362 bp, Zea mays
  Clone ID: LIB3116-015-P1-K1-D10
atcctattcagacaagtttctgaagattcattttgttaacaagagctccaatctttgccgggttcataagaaggccaggttggatcctttgcctgctggcagttgacaggatcttaggtttccctgctatggttagggcttagaagtgttatatggtcttcggtgaacaaatttaatgtgttttttttataaataaaaattaaactggttatgactatggcccaaatacatattttgggctgggatcgtaaggatgttgcatggtgaacagatttaatgtgttttttatagttgattacatgcatggatcgtgttgatccttgctgctgtatgatttacccaccactttatttattattatt

SEQ ID NO: 3752 - DNA, 429 bp, Zea mays
  Clone ID: LIB3116-015-P1-K1-D11
aaaaggagaactcttatggagttttagcgatatcagtttcaaagccaacatctcaaccttgcgataaccatgaataatggcctggctggattggggtatgatggactgggtagactccttggtatggcgaaaacaactggaactgttccagatggactacctcctccaagatctgcactgctgtcatcttgtatgggactggttcaaccaaatgagtaggaaaggatggtggggcagctttaatgggagtggtaaagataaagtccaccttgatacgccggagtccagagttcgagacttctgtcgtgatctatttcattgttgtgttgcttgtcttcagattcaagcaagaaccaagctgcatctgaaaccattgagtctttgctgcgtgtgtgttgttggatgaatgttcatctgactcaaccctat

SEQ ID NO: 3753 - DNA, 288 bp, Zea mays
  Clone ID: LIB3116-015-P1-K1-D4
ccggaggcgccgtcgggggccctcctgatcggcgacatgatctcggactcgtcggcgtacgacgcgggctgcgactccgggttcgacgacggcggctgcttcgatttctagcgcgctccggtggcatgggtggtgacgccacgccgcgcatcagagacggagaggttcccgtcttggatttgccttttgtgatttgtttccttctgtacgcaatctatgtaattgtcggaacgaaatcaatcaagattatgcatacatatatggtattgatgctgaaagcgtgacatt

SEQ ID NO: 3754 - DNA, 377 bp, Zea mays
  unsure at all n locations
  Clone ID: LIB3116-015-P1-K1-D5
cacacaagcacttcgacgtcgcacgggcgctgcacacagacacaccaagcgtcggcaccaagggctgactaccaggaggtgggcgtactgctcnnaggaggtgaggtcggtggccccggccggcttcggccgccacggaggcggcgtccagcagcacgtcgtcaaggagaagttcgaggaggtcgacacggtctcacgcgccggcgccaaccaccaccaccaccaccatggtcaccacggcggccacggcttcgtggtgcgcgagaccagggtcgaggaggacatcaacacctgcaccggcgaggtccacgagcgcaaggagagctttctcgccagggctaactgagcccgcccggggccggcattcacgcccgttc

SEQ ID NO: 3755 - DNA, 303 bp, Zea mays
  unsure at all n locations
  Clone ID: LIB3116-015-P1-K1-D6
gcgaacgaggatgactggtctcccaccggcgacgtctacgtcggtggaaccactgggcttctgagctgggccgtcaccctcgctgggatcctcggcngcggcgccctcctcgtctacaacaccagcgccctctccggctaaggatatccaatgcatgcgcttcttgcgattcgtcgtgtaaaatcagggtgtctgtctataatctagcctccatggatgctcaaccttcgtcatgtaacaataatcagtgctactcttcattacataattttgatgctatatatatataccccatccctccct

SEQ ID NO: 3756 - DNA, 359 bp, Zea mays
  Clone ID: LIB3116-015-P1-K1-E1
cccacacgtccgggcccgacaccatgctccttatttttccgggaacccaacaacaaccccgggttgggccccaacgcccgggggtgggggcacaagccttccattttcttcctggcggacccctcgtcctccccctgccatcgcatcgtcagtttcaaaagcaggaggctgccacttcgctctctccacatcgccgctgccgctgccgccggggcagaggaagaagaggcgcaactaggtggaagtgtgaacgcggtcgacgaggaggaagcggagaataaggtggtggtgcccgagagacaggacccgatgctggtactcaagttcatctggatggagaagaacatcggcatagcact

SEQ ID NO: 3757 - DNA, 460 bp, Zea mays
  Clone ID: LIB3116-015-P1-K1-F3
gtccttcaccgtgcgcgcctctctccgcaaggccaccggcaccgccgccgtggcaatggctggcagcgccctgcttgccggcggtgccatggcccatgaggtgctgctgggcgcaggcgacggcgggctcgtcttcgagcccagccagttcaccgtcaaggccggcgacaccatcacattcaagaacaacgccggcttcccgcacaacgtcgtcttcgacgaagacgaggtgccgagcggcgtcgacgccaccaagatctcgcaggaggagtacctcaacgcgccaggcgagacctactccgtcaccctcaccgtgccgggaacctacggcttctactgcgagccgcatcaaggagccggaatggtcggcaagatcaccgtcaactaattaagctagctatcgatcgatatccattcatgtattagcttgtgctttctgctttgtactccgccgatctgt

SEQ ID NO: 3758 - DNA, 329 bp, Zea mays
  Clone ID: LIB3116-015-P1-K1-H10
acagcagatcaacaaatggttatttatgtcacttattagcattatgtcactcgccacaagctggattactggaaatacagatgaaggatgagtaacgctgaaaaggtattactggcaacacatgtcctggaagcctgagttcagctacgatcaaccatggagggcacatcacttccactttttgaacttgccgccgccgaacatgccgtgcccgtgcttgccatgcttgaacttgccgtgcccgtgcttgaacttgccgtggtggccgtgaccatgcttgaacttgccgtggccaccatacccgtgggccgaaccaccgtgaccatagt

SEQ ID NO: 3759 - DNA, 204 bp, Zea mays
  Clone ID: LIB3116-015-P1-K1-H12
gctctagccactctccacgctcccttctcccctgcaaacacactcacgcccgccgaggccacgttctatcacgttgtagagtcgtgcaccaccacctcctgactccattcatgagttccagtccattcttggcctggtcgttctgttgttcggttgggttcattattactttttttatactttttatttattcaattttctttt

SEQ ID NO: 3760 - DNA, 261 bp, Zea mays
  Clone ID: LIB3116-015-P1-K1-H2
catggatagtggctcttcttcgcaaggaatatatatgttggccaaaaggttattgacttcgcgtggggttcaagttaaacggtgtgttgctgactttagggaagcacattaccatatagaaaaaaaggattgctatttgttcaagataagcgaagatgttgtcatcgatgctaccgacaaaggaaacatagtgcgcctaattaatcactcgtgtatgtctaaccgcttaaaataaaaaaaaataataaatataataaaatt

SEQ ID NO: 3761 - DNA, 331 bp, Zea mays
  unsure at all n locations
  Clone ID: LIB3116-015-P1-K1-H3
cgggaaccggacaagaacacttgagtacactttccaagtgacactcaggactgaagagggtgggaatcttatggctgcaaaggccaagcaccgaagaaatggnttttgttgtgtgacccagccagccctacgcannnatcctgaggaagaaacaactgcatgcgctttggaaatacctgtccctttaattttctatacatactatccataagacaatgtaggggtacccaggcctctccgggctccaggatgggctatctcgtaaaactcttgcgtgcgtgtatgtatggtgtgagagaattcgcaaagtggacttctggttgtaattctt

SEQ ID NO: 3762 - DNA, 385 bp, Zea mays
  Clone ID: LIB3116-016-P1-K1-A3
acgcttacgggcgattttttgatctggaggttgtagcgctcatcatcgccgtcttaggcgggatgcttcgcgccctcggttgctctggccaatctatgcgcaaggggctcaacggctggaacaaatcctcgtcgatgctcagggacgggttcggggtgaagtattccggattccttcacataatgccgagcgaggtttgtagaggagattgacagattcagccgatttgcgctcgtcttcgtcattttttttgcacccagagtttctagattttctttacaagtcctcccccatagtttttggcaattgtggcgacaagttttggagttctccccgtcggaagagattgatgagagatgtctccgttgaaccagcaacaggttct

SEQ ID NO: 3763 - DNA, 92 bp, Zea mays
  Clone ID: LIB3116-016-P1-K1-B10
acccacgcgtccgcccacgcgtccgcccacgcgtccgtagttctagatcgcgagcggccgctcgcccacgcgtgcgactagttctagatcgc

SEQ ID NO: 3764 - DNA, 403 bp, Zea mays
  Clone ID: LIB3116-016-P1-K1-B2
cccacgcgtccgcccacgcgtccgtgaagaggcctcctgtcgggcgcggagagagcttcatcaccaaggtcatgtggcggaacatcgtcgggcagagcttgtaccagctggccgtgcttggagctctcatgtttggcggggaacgtctcctgaacatccatggcgcggactccaaacccgttgtcaatacgctcatattcaactccttcgtgttctgccaggtgttcaacgagataaacagcagggagatgcagaagatcaacgtcttccgcggcatgttcggcaactggatcttcatcggaatcatagccgcgacggtggcgttccaggtggtgatcgtcgagttcctcggcacctttgccagcaccgtcccactcggctggcagctgtggctggtgagcgt

SEQ ID NO: 3765 - DNA, 184 bp, Zea mays
  Clone ID: LIB3116-016-P1-K1-C10
cggacgcgtgatcatacacgtgggcactgttttttcaccgttgttatcaccggcagtgggggcgcctaggcaggggcgggagactgtgccactccatgtcctaaaatgacctcaccgcgccagctcgtgcccaagaaggatgatgagtacacaaaagacgccaaagctatctgcgtccttgtcc

SEQ ID NO: 3766 - DNA, 391 bp, Zea mays
  unsure at all n locations
  Clone ID: LIB3116-016-P1-K1-C8
cggaattncccgggctcgatcccacagcagtccgcattcttcccggagtctttagtatttttagacagtatatctatatagatagaccttagagccgagtagcagagagcagggccaggccgatataatagaagtatgcagctaccttacagagaaagagctcaaagagaatagtagtatattaagtaagcaagccccttcctagggtagcaatattattcattcattttagtagccaactagggagactagacaagatatctcattttcccaggatagtaaatcagattagtctatatataaataaaaaataaataaaaaaaataaaaataaaataaaaaaaataaaaataaaataaaaaaaataaaaaataaaaaataaataatgggct

SEQ ID NO: 3767 - DNA, 402 bp, Zea mays
  Clone ID: LIB3116-016-P1-K1-D1
cggacgcgtgggcggacgcgtgggcggacgcgtgggcggacgcgtggggcaagagcatgtaggatgcttcaactgcagcctctacgttaattacccaagctaccgcaacttgttccccatctgggctctcggtgagtaccatcgtggccttcgtgcaaagaaagacaattgagtccgtgtgtgtatatatatagtacgtatagcattgtgaggaataaaacaggttgcgtcggtggtgagtgcgcaaaaacaagatgtacttttatgtaggtgtaccacagtgtacaatgttggtcgttgttagactgtaaggctatcatgacgggtatattgtaatatatatcctttaaaaaaaaaaataattatttatttttatatttattaataaatattatggggggg

SEQ ID NO: 3768 - DNA, 453 bp, Zea mays
  Clone ID: LIB3116-016-P1-K1-E2
cattaatcttgacttagctgggttaattgagatgctcgaaggccgtcgaggtagccaaggattgtacatgggttgtatgaaatcagggatggtcataagtgaagagggccaacaatggtatgaacctgagtggtggaaatttggagattcaaaaacgtattttcgacacgcttctggttctttgtttatcctctcaaaaaatttggctcgctacatcaacataaatagtgcgtcactgcagagttatgcacacgatgatatatcagtaggttcatggatgatgggactgaatgcaacttacgtggatgatgaccggttgtgctgcagcagttccagacaagagaaaatctgttccaatgcttgagcggaaggcgtggctgctggcctgttgctgtacatcctgatgaaaattttgcacacctgtcattttgtatacactgctttcgtgaaccg

SEQ ID NO: 3769 - DNA, 257 bp, Zea mays
  Clone ID: LIB3116-016-P1-K1-F8
cggggatgacgagcccaatggtggccaccccggtccagttccacacaaccggccgccagagcttctgctaattttccttagccaacccatcaaggaggcggcgattcgcggcggtgaaggcgtccgcggagaccattgcgaccgagaagctgggcatcaaagtggttcgcaacccgcccgagtcccgtctctccgagctcggcgtccgccaatggcccaaatgggggtgcgagaagagcaagttcccgtggacctac

SEQ ID NO: 3770 - DNA, 118 bp, Zea mays
  unsure at all n locations
  Clone ID: LIB3116-016-P1-K1-G2
tcgntccgaaaagctcgacctagttattttctcgcgcttgctctacaagaaaagcaacccatcacagcgctctttcgaggcggataggacaggatctagaggtcgctagccatggcgg

SEQ ID NO: 3771 - DNA, 301 bp, Zea mays
  unsure at all n locations
  Clone ID: LIB3116-016-P1-K1-G5
cccacgcgtccgnntttttttttttttttttttttttttttttttttttttttttttttttaagtgtttttttttttattgtaagttttttttttttttttttttttttttaaaaaaaaaaaaaaatttttttttaaaccaccacctttttttctaattttccaaaaaatcttttttcccccccctccaattaccaaattctattccccctcaaaacccttaaacccaaaaatttttttataacccccatcaaacccaaaaaatttttttatccccccccccccctacttatttaaccctt

SEQ ID NO: 3772 - DNA, 306 bp, Zea mays
  Clone ID: LIB3116-016-P1-K1-G7
caaaagctcgccgcaagtgtatacatccttaggaactagcacaggcccaagggatacacgtgctggttccaataccaccagcgcgcaccacctctcgtacattatccttggtcttcacctccacctacacctacatctcaagctaccgaacatcaggaacgagaagacagggttagactttgtcgaagccctcttcgctagtggaggtatcgaccatcactcgtcgctataccccgatggcgatcgacgatcgtgagcttccatgttatgtgttgtgatacttgagacttttattatgactatgta

SEQ ID NO: 3773 - DNA, 199 bp, Zea mays
  Clone ID: LIB3116-017-P1-K1-A10
atcgagtccaagcattcaccggaggatcccatatcacactctccagtaaccgtccgcttcgccagcctcatctctagcccagccgtatctcctcctcctccgccgccgccgcaactatcctaatggctcgcttcgccgtggtcgccgccatcgtcgccctcctcgccgtcttcgcggtggctcaggccccgaccacagc

SEQ ID NO: 3774 - DNA, 136 bp, Zea mays
  unsure at all n locations
  Clone ID: LIB3116-017-P1-K1-A4
aaaaacccgggccgaccgacgcgtccgaaaaaaaaaaaaaaaaaaaaaaaaaaaaaatttttttaaaaaaaaaaaaaaaaaaaaaaaaagggggaattttaaaaaaaaaagggggaanggcccccccttttaaaaa

SEQ ID NO: 3775 - DNA, 415 bp, Zea mays
  Clone ID: LIB3116-017-P1-K1-A5
cccaaccaggacagcgtccacagaaagaagaaagagcacagagagtggagtagtggacagacgcggggagctctgcgtctctacgagcgcccatcctccgtccgcgccaccgccgcgcccatatccttcgccccgccccgacgtggcgcgtctgcctccaccgccgttccgccccaccgccgcatcccaactcgagttgaacattgaagtgactccgactttaatcctcactggatttggtgcttttattgctttatggatcctatcttctgttgttgctgcagttgattcagtccccctgctcccaaaattgctggaattaataggaactgcttacacaatttggttcatcgcacggtatctccttttcaaggaaagcagagatgaactgtttgcaaagttcgaagatctcaaa

SEQ ID NO: 3776 - DNA, 257 bp, Zea mays
  unsure at all n locations
  Clone ID: LIB3116-017-P1-K1-B10
acgggtcgtcgtcgaagctgtgttgcgtctagtatttctactgagccnnacngnccnatgactgtgcntatatagctccccgctggcctactcangacncaataatctaatgtttagagcttaccaggttttacagctctatcagtttacttttgtttttctgctcttcgttttttaagaattatttctattgtgtgaattaattagtgctttccttctagttttctgatcaaaaaaaaaaaaaattggctgtcgct

SEQ ID NO: 3777 - DNA, 323 bp, Zea mays
  Clone ID: LIB3116-017-P1-K1-B5
gcatcgtggagaagatcaagggcggcggggagcataaggaaggcatcgtggagaagatcaagggcaagatcaccggcgagcgcggcgacaagtccggcgaccacaaggaaaagaaggacaagaaaaagaagaaggagaagaagaagcacggcgagggccacgaccacgacggcggccacagtagcagcagcagcgacagcgactgagatctggtgtcgcagcacaggtgcaacacaagtatgcttgctggatggaggattcataccagctgatgctgatgtagtgtttcactggtgtcatgcatgcatgtatcgtgctattat

SEQ ID NO: 3778 - DNA, 340 bp, Zea mays
  Clone ID: LIB3116-017-P1-K1-C1
cccacgcgtccgtgtaattccagtggacaagacacataactttgatgttatgtatggcttggtgaagaaaaactgggagattgcgaagatgggttgctcttggcgttgttgtttttgaggcagtgctctttctattagctctggttgtcagggcaatgaacaaacctgcggagtatgacagtgatgatgaaattattgcaattggccgaagccctaccatgcggcagccattgatccatgcccaaaatgtgccggccaccggtgttcctgtcccaacactcgatcagcgttcaagtagaaatgatgcctggagccaaaggatgcgagagaagtatggtct

SEQ ID NO: 3779 - DNA, 472 bp, Zea mays
  Clone ID: LIB3116-017-P1-K1-C2
gcggccgccttttttttttttttttttttttttaacgacggtaggtttttaactgctgaaactgaagtatctgtgttacatgggtatgttcacagcagatgaacttttactagcagatgaactttacagcgttacatgtgtatgttcacggcagcaccctgtgtgtatgtgtatgtgtatgcgcctgcgcaacctactacttcgcggcctcctcctccccctcctcctccttccagaccggaaggatgccttgcccagccagcctcttgtagacccagaacaccacgtacttggccgttatcctcttctcatcgatcaggaacggctcgatggtgctcacttcgttgctgtaggacgatagcgcaaagcccttcggtcctgtgaggtctccttttggaaagaaggcccaaaaataataagggacgtcggtctttatgaaggatcccttcaacgtgtttgtttggaaggcgag

SEQ ID NO: 3780 - DNA, 114 bp, Zea mays
  Clone ID: LIB3116-017-P1-K1-C4
cccacgcgtccgtataaatagtgttgtcaactctgtatatcattatattacgatgattatagtggtgatgaacataataacgcaataaaaccatgcaggcgatttgtgagccat

SEQ ID NO: 3781 - DNA, 88 bp, Zea mays
  Clone ID: LIB3116-017-P1-K1-D12
gggatgatgatccacaatcccatctaaaactaaaagagttaataaagattgttaaggtgagggaaaaaaaaaagagagggggggaaaa

SEQ ID NO: 3782 - DNA, 375 bp, Zea mays
  Clone ID: LIB3116-017-P1-K1-D2
cggacgcgtgggggagccaacagcacctccaaggtcctttaaaggaaaaaacttgttctcggtggttgacaaaaactcatccgagggaaattccaggaactaccggtttcgaagggcccagcaacagaaagtcagaactcacaacaggggtccaaatttgttaagacaggtttagatagttcaggtaacattgggagctcatcaattgcacctccgaagaaagttcaccctggatcaaatggaatgcttccggcagaagaagcggatatgccatcacatctctctatatccactaagatgctaccaccacccctgaagagcatgctgccactgccacccaaaagcatgcccccaccaccacctaagaacatgcct

SEQ ID NO: 3783 - DNA, 295 bp, Zea mays
  unsure at all n locations
  Clone ID: LIB3116-017-P1-K1-E11
gcgacccacgtccacactacacgaaccattttcaccaaccagcagccgcaccacgcaccgancgcatagcgatggcgtcgtcaccatgatggcgtccttcgccgccgtggcggtggccgcgccctcgcgccgcggcaccttcgccgtggtcaggtccgccaaggtcgtccgctgccaggagcccgccacgctagcagcaaccgaggccaggcccgccgccgacggacgccgcgccgtcatgctcgcggctgctgcggcggtcgtggcagccatcttcggtgcctgcgccgccatg

SEQ ID NO: 3784 - DNA, 407 bp, Zea mays
  Clone ID: LIB3116-017-P1-K1-E5
cggacgcgtgggaccactccgcgctagctgaggacggtacagcggcacataggtgcgacggacgacgacgacgacgcaggcgccgcacatggcatcccagctctccgccgccgtgccccggttccacggcctccggggctacgccgcgcccaggtccgcggtggcagcgctgccgtccgtgagggtgggcaggaagaggtcgtcgtcgcagggcatccgctgcgactacatcggctccgccaccaacctgatcatggtgacgacgacgacgctgatgctgttcgcggggcggttcgggctggcgccgtcggcgaaccgcaaggcgacggcggggctgaagctggaggcgcgcgactccggcctgcagacgggtgaccccgccgggttcaccctcgccgacacgctgg

SEQ ID NO: 3785 - DNA, 332 bp, Zea mays
  Clone ID: LIB3116-017-P1-K1-F1
cccacgcgtccgggttctcctaagttgtcgagtgtcgagtctatagggtcttggtcgtatagctttcttcagtagctccagcccggctggaacttggaaactggtttatacttgtactccctaccggaatttggctctttgctgagtgccaaaaaaaaaaaaaaaaaaaaaaaaaaaaaaaaaaaaaaaaaaaaaaaaaaaaaaaaaaaaaaaaaaaaaaaaaaaaaaaaaaaaaaaaaaaaaaaaaataaaaaaatataaaataaaattaaaaaaaaaaaaataatattatttattaaatattaattaaaaaggggggggggcttttttaa

SEQ ID NO: 3786 - DNA, 371 bp, Zea mays
  unsure at all n locations
  Clone ID: LIB3116-017-P1-K1-F5
cggacgcgtgggcgcctcttccaactgctgcgccgagaaacgtgccgcctggtggtggcgcgcgagcggacgccgccgggactgctggcggcnctgctccttctgatgcgagttccggcggcgctcctccttctgacgcgcgtcacacggctaccggaagtagcggtatgctgcttgtggtgctggtttccgcggctctgctgatctgattctgagcagacacatgagactgtatagtagacagagccgaagcaaatgcaaatctccgttggattcgatcaagctttgaccagcgatataccatacactngtttttctcgggtatatatgtttgtatttggccgcatttttcacgtccacatgtgtaaaaa

SEQ ID NO: 3787 - DNA, 356 bp, Zea mays
  Clone ID: LIB3116-017-P1-K1-G3
gagaaatatgaggacaaggttgatgcttttggtgagaaggctatgatcgaactgaagaagtatggagtgccatcttcgatgagaagtgcctatcgaagattccaaagggcctcaaggataagaagcactagattggtagtaaggtacttgatatgaatcaacacccacgttaagtcacaccttccttgaaggatggtgcttggtcctggtctctagttgatagtatataatctgtatgggcaactctggtgtgactgacactttgatctgctgaaaattgttgatcttgtttttggtttcaactttcagcatacttgcctggaagcttgaaacatatcacgcgctctatcaatgtc

SEQ ID NO: 3788 - DNA, 133 bp, Zea mays
  Clone ID: LIB3116-017-P1-K1-H4
aaggaaacaccgccgccgccgcgccttccattttagtactcgcggaggaaaggaacaccaggcagcgccatggtcacgtgggggaccgccgtcgtcgtgctgtccccgccgtccgtgggcgggcttttttggg

SEQ ID NO: 3789 - DNA, 200 bp, Zea mays
  Clone ID: LIB3116-017-P1-K1-H9
cccacgcgtccgttttttttttcgaaagagcgcaggaggactgcgcacccatatattaaaggagagggaaaataaagggccataatgatgatatccatctatctatctatgtaactggtttatgtaccatgtacctgtttatgtaactggttaccagtgttatccatctatctatctatctgtgaagacttgagtcttct

SEQ ID NO: 3790 - DNA, 315 bp, Zea mays
  unsure at all n locations
  Clone ID: LIB3116-018-P1-K1-A6
cccacgcgtccggctccgtgacctccatgaaggaggccccgtccgtgtccggcgccagcgggtgcgaccagtccggcagcgggggggagaccttngccgccgcctaggagccccccgggggagtggcgcaagggggcgggcggggtgtgtgttgttgcgccctggtggagcgggagcagcgacgccggccgatcggtcggcccggcccggtagattccgccatgctatagagcgcctgtgcatacagcttttagctctggagtctggattccggcagtgatgcatgcgtcaaggatttattattatagtttgttg

SEQ ID NO: 3791 - DNA, 306 bp, Zea mays
  unsure at all n locations
  Clone ID: LIB3116-018-P1-K1-B3
cggacgcgtgggcggacgcgtgggcggactctttttcggacgcgtgggtggtatctccggcgggctcttggcatacttcctcctgtacatnctcnacctcccctactacttcaagttgaatacaaattcataaagatgcatatatataatatagctccgcctccgatcctcctctctgcgtgcaaaggtatgccatttcagcagtgacgagcatcgtggatacatgcaattcctctgcacatggatggattgggatgtaacttggaactgttaatttttttttactttgatttggatgtnnnnnaa

SEQ ID NO: 3792 - DNA, 73 bp, Zea mays
  Clone ID: LIB3116-018-P1-K1-B9
taaaaaaaaaaaaaaaataataaaaaattttttttattaaaataaaaaataaaaataatattgggtaataaaa

SEQ ID NO: 3793 - DNA, 427 bp, Zea mays
  Clone ID: LIB3116-018-P1-K1-C6
cacaacatcatcatcatcatcttctcgctagtctagcgagcccttatagttaattaagctaggggatcgatccaagagaagaaggagcagcacataggaatggcgtcgctctcgatgacgacgagcgcagcggcccgcgcgcagtggacgcctaggcagaacaagctgttctagcaggcgctggcggtgtacgacaaggacacgcccgaccgctggcacaacatcgcctgcgccgtcggcggcgggaagtccgcggacgacgtcaggcgctactacgagctgctggaagaggacgtcggccacatcgagtccggcaaggtgcccttccccgcctaccgctaccccgccggctacggtgccgtcgacaggctgaaacagctgaagatctaggaggtcaattgaacatataggacgaacgatcgatgat

SEQ ID NO: 3794 - DNA, 161 bp, Zea mays
  Clone ID: LIB3116-018-P1-K1-D1
gatagaggtgcaggtcggaagggtcgacatctataggaccgtgtcagagctcatggaccaagggtcgtcgtcggcgatgcgcgcgagggctaaagagctcgctgcaaaggtgagagccgcaatggcgaaaggcggttcgtcggacgcccacgtgaaagaca

SEQ ID NO: 3795 - DNA, 339 bp, Zea mays
  unsure at all n locations
  Clone ID: LIB3116-018-P1-K1-E11
cgcggacgcgtggngatacggtcgtctggcaactgtgttgcctcagggcggacccgggggcgtggctgtcgtacttcnntaactcgccgagagtcgcgccggcnnaaagcggttggggtccagcgtcccggctttctctcacggnncggtgaccaaaannntcggcagggcggaaccatcanncccaaggggcttgccgctcnngtggcgacntnntcgcgtnncttccaacccnntgagcaaggggcctatcaangggaagcagcncgctagtncagcatgccgcccagaggcttgttgctntgtcggcggtcngnngcgtcggaccccctcggcagt

SEQ ID NO: 3796 - DNA, 120 bp, Zea mays
  Clone ID: LIB3116-018-P1-K1-E2
gcaaagctagcaccttccttctccttcgctctacaagctcgatcgaccgacatggcctagaggacgaacgcgatggcggcgccgcggccgcttctgcgccggatgcttttttttctggag

SEQ ID NO: 3797 - DNA, 84 bp, Zea mays
  Clone ID: LIB3116-018-P1-K1-E9
aaaaaaaaaaaaaataaaaaaaaaaatttttttttataaaaaaaaaaaaaaataaaaagggggggttttttaaaaaaaaaagag

SEQ ID NO: 3798 - DNA, 193 bp, Zea mays
  Clone ID: LIB3116-018-P1-K1-F2
cggacgcgtgtgaaaaaaaaaaaatataattttattttttaataaaaaaataaaaaaatattgtttgggtattttaaaaaaattggggggagaaaaaataataaataataaaaataattataattaaaaaaggccgccccttttaaaagatccaattttacatacccttccatccaactttttattttttttt

SEQ ID NO: 3799 - DNA, 409 bp, Zea mays
  unsure at all n locations
  Clone ID: LIB3116-018-P1-K1-F3
cccacgcgtccgcggacgcgtgggcgctggacttgaagggcctgccctcgctctcgcccgacgacgacnacgaggtggaggcggtggccaagaagccgcttcgcgcggccctggcggaggccggcacggtcaagtacgtcaccgcgccctcggccgcgtgatcccgtgctctggccttcccccaccgcgcaccgtaccggtggccgcgcgctatagcttgtgtgtgtgtggccatcgcggaacataagaagaatctctcactataaaggccttcgttctgtgtttgcattttggttttggattagggtgtctaatttttcaccagttccttttccccttgtgtaagtgtggagcttactatatagctagcgcccatttcaaggtgctgcaagcgttggtcaggaattgg

SEQ ID NO: 3800 - DNA, 460 bp, Zea mays
  Clone ID: LIB3116-018-P1-K1-F4
acctgtggtgtgattgagttgcagggatggttagcgacgatgagataaggagagtgccggagctgggcctggagttgccgggagcctccacgtcgggcagggaggctggccctggcgctgcgggcgcagaccgcgcccttgcccagtcgtccacggcgcaggccagcgcgcgccgccgcgtccgcagccacgccgacaaggagcacaagcgcctcaaaaggttactgaggaacagggtgtcagctcaacaggctagagagaggaagaaggcttatttaactgatctggaggtgaaggtgagagatctggagaagaagaactcggagatggaagagaggctctccaccctccagaacgagaaccagatgcttcgacagatactgaagaacaccgctgtaaacagaagaggttcatgatgcactgctagtggagagggccacggtcaataccactgaatgac

SEQ ID NO: 3801 - DNA, 412 bp, Zea mays
  Clone ID: LIB3116-018-P1-K1-F5
aatgccatcgttgggaggcacacccctggtaccttcactaaccagctccagacctccttcagggagcctcggctgctcatcggtgccgacccaaggactgaccatcagccaattaaggagtctgctctggggaacatccccaccattgccttctgtgatactgactctcccatgcggtatgtcgatatcggcatcccagcgaacaacaaggggaggaacagcattggatgcctgttctggcttttggccaggatggttctgcagatgaggggcactatcctccctgggcacaagtgggaggtcatggtggatttgttcttctacagggacccagaggaagcaaaggagcatgaggaggaagctgcttgtgcccctgagtttgccgcaatcactgattaccaaggagctgatc

SEQ ID NO: 3802 - DNA, 377 bp, Zea mays
  Clone ID: LIB3116-018-P1-K1-F6
accattagcagcagcactgcagcagtagccatatgtctcagcaccagcagacagcagggaggaacacgattagcggcgccggtccggatctgcaactgccaccggggttccggttccacccgacggacgaggagctggtgatgcactacctctgccgccgctgcgccggcctgcccatcgccgtccccatcatcgccgagatcgacctctacaagttcgacccatggcagctccccaggatggcgctgtacggcgagaaggagtggtacttcttctccccgcgggaccgcaagtacccgaacgggtccaggcccaaccgcgccgccggggctgggtactggaaggccaccggcgctgacaagcccgtgggcacgccc

SEQ ID NO: 3803 - DNA, 310 bp, Zea mays
  Clone ID: LIB3116-018-P1-K1-F7
gactagttctagatcgggcacggcgatagggtcctccgggagatgggcactacacggcaggacagccctcgtcaccggcgggacccgcggcatcgggcgtgcggtagtggaggagctggcggcgctgggggcggccgtgcacacatgctcccggaaggcggaggagctcggcgagcgcatcaaggagtgggaggccaggggattcagcgttaccgggtccgtctgcgacctctccgagagggaccagcgggagcggttgctccgcgaggttgccgaccgcttctgcggcaagctcaacattcccgtaaac

SEQ ID NO: 3804 - DNA, 262 bp, Zea mays
  Clone ID: LIB3116-018-P1-K1-F9
cccacgcgtccgaccgcatcctctcatcagcttccttccacattcgtctcgagatctcgcgcggtctccatggacgcgatcgacatgcctggtggatcccctccgcgacttcgccaaggacagcgttcgcctcgttaagcgctgccacaagcccgaccgcaaggagttcaccaaggtggctgcgctgacagctatcgggttccgcgtcataggctttctctgctttttccgtaagctcatctttattcccatcaacaacatt

SEQ ID NO: 3805 - DNA, 211 bp, Zea mays
  unsure at all n locations
  Clone ID: LIB3116-018-P1-K1-G1
agagcttacgctgctggggttatgggcgagcccgttcgtgctccgggcgcgcatcgcgctcaggctcaaaggcctcacctacgctgactccnaggagaacctcgacgacaagagcgagcttctcctcagctccaaccccgtgctcaagaaggtgcccgtgctcatccaccacggcaagcccgtctgcgagtcccagatcatcgtgcagtac

SEQ ID NO: 3806 - DNA, 237 bp, Zea mays
  Clone ID: LIB3116-018-P1-K1-G4
aaatgttacatggtctgtttggcatcaataatgcatgtttaacctgagcttggcgatgggttatgcagaacggaaactctggtgtgaatagaaaatcatgaagggaaggagttgaccggacccctacttgtacgtctccccggctgtgtaggtagattgtcagttggggttccgaagtactctactcatacgtgtgtatgacagtttatttatgaaacaaaatacgcattgatcgtt

SEQ ID NO: 3807 - DNA, 110 bp, Zea mays
  Clone ID: LIB3116-018-P1-K1-G8
ctccctgaccgttggcttactcgttggatttctttcacaaagtattggtgtcaatcctgaaagcactcttactcaaaacgggcggacatcttaaccttttaatatttttt

SEQ ID NO: 3808 - DNA, 301 bp, Zea mays
  Clone ID: LIB3116-018-P1-K1-H8
aggaccggccgccgagccgtggctaaccgagcacggcgacttctcccgcgtgttcctggcgcggggccagcgcgggggccacgggcgctcacttcgtagcagtccgtgccggtgagcagcacaagagcggcggcctcgggatgcggatcagggggctgctgatagtgcacccctacttcagcggcgcggcggacattctgcgactaggggacgactgggaaggcgcgcaaggcgcgggccgacccgttctggcgggtcctgtgccctggcacccccgggctcgacgacccttttttcaacc

SEQ ID NO: 3809 - DNA, 224 bp, Zea mays
  Clone ID: LIB3116-020-P1-K1-A12
acacccttccgcccacccgtccggtcctttttttcaaactttttttgccaagagcacaaggccctgaccttgagccagttttgggccagggggggggaaaccgatttaaggtttacactggtaaaggtttaattaaccgacaactatacccctgaaagttattacccccagttggtactaacaaaggagggagattggcttagcgacacaggcaaagtgtaaag

SEQ ID NO: 3810 - DNA, 271 bp, Zea mays
  Clone ID: LIB3116-020-P1-K1-A3
ccacacccttccgaaaaaaaaaaaaaaaaaattttttatttttttaaaaaaaaaaaaaaaaaaggggaaaaggaaaaaaaaaaaagggggaaaggggcgccccttttaaagaatcaaagttaactaccccgggattgcaaggtaaaatttttttaaaaggggacccaaaattaaataaatgggccgcggtttaaaaacgtggggactggaaaaaccttgggtgtcccaaattaaatggctttgaaaaaaatccccttttttcaagtggggg

SEQ ID NO: 3811 - DNA, 94 bp, Zea mays
  Clone ID: LIB3116-020-P1-K1-A6
gtcgaggagttcgggagggcaccaataagggccggggtgaactccagcgtcgtcgggttaaagcccgccgcggaagtgccgaaggccgccgccg

SEQ ID NO: 3812 - DNA, 111 bp, Zea mays
  Clone ID: LIB3116-020-P1-K1-A8
gccaaaggaatcttttccaaaaaaaaggttgttttgaaattctttttgaccagggcctggttttttttttgggacatttaatacaagaatacatggggatgcaatagtttc

SEQ ID NO: 3813 - DNA, 404 bp, Zea mays
  Clone ID: LIB3116-020-P1-K1-C10
acacccttccgcggccccttggaacccggaaaaggttcttatttttgaatcgcagggccataacctgaactggggttttaaatgcatgggctggttactttggtaataagggcataaaagttgttttttccaatggccagttggccttggttccaatgaaattaggtgggatggcaaaatcagtaccatttgttgcgaccccaaagggaagggggaggggtttgtttcctcgtccggttcgggctggaatagttggatttccaaatgttggcaaattttccttgattaatcgtttgttaaaacgaaaaatgtgcccagcagaacctaaggccaggtttaacaggaaagctgaagtggtttcgttttggaacagacctaaagttgttggattcacctggaatttt

SEQ ID NO: 3814 - DNA, 456 bp, Zea mays
  Clone ID: LIB3116-020-P1-K1-D10
acacccttccgaactttataaacaataattaacagattaaattattcctttgaacgaccgttaacagggaagggtgtccatagccttggggggggtttaactgttttgcaactaaattaagttttcaatgagtccaaacttaaatggaaagaatttttttggcccttgccaaaaactactttaaagcttgcagcctataattttgttttaaaatgttaattccaacatgctactactgttgttagtaaagtagtcattttttttaagttgatttttttgatagcctttacatgccttcaattcaataccgattttaactggatccgatccatgccatgccatgccccttatcctgacttccagggctcggcctttttattccagacaaacctgtgcttggtcttttactggatcgtgttgtcgttttatacattattatttttttttttttttttt

SEQ ID NO: 3815 - DNA, 320 bp, Zea mays
  Clone ID: LIB3116-020-P1-K1-D12
cgcgccaacccttccgttccaccaaaaccccaaaatcaattaaccattttttttggaaacctttgcctaccagtagcgtttatttattaaaggaggaggctaatcctaaaaaaatcctaactcttgaaactaaaattaccctgtttttaaaacctgttaataagtccaattttccgaccccttaaaggattcaaggcttattaaaaaataactctaagtttggttttttcccaaattccacatggcagtaaaaataaaaaccttgttaggttaaaaaggttaaaaacctcaaataattttaaaagccacctaaggttgag

SEQ ID NO: 3816 - DNA, 348 bp, Zea mays
  Clone ID: LIB3116-020-P1-K1-D6
aattggccaatataaattaactaggcctgatcttttattctttcccccatacctctaattcggaactcgctcccttcacaaaagttggggggtttttaatcaaaatcctttttttccttaaaattaaactttaacttcttattcctccttaaataattttttctttccctccaaaaaaaattaattttaaaaattaattttcttcctttttaattattccaaccttactatttctttcattcttttttatattttttttttatttttatcctaaatttatttttacattcctattttttacaattctttttttccttttttaatactcttttcttatttcacttatat

SEQ ID NO: 3817 - DNA, 274 bp, Zea mays
  Clone ID: LIB3116-020-P1-K1-D8
cccacccgtccgagcccaccagctaattggcttgtctccgtccgccggccgtccgtggtcaggcaaagattcgtttccttttgggggctcctatcctttccttccttcctgggaacctttcccctgaaggcttgccttttccctgttttgggatggctattggtggcgcctttatgttttttgtttttttttttttttcttttttctattttgtttttctttgttttttatattattttctcttttgttattttattttattatctttgttttt

SEQ ID NO: 3818 - DNA, 164 bp, Zea mays
  Clone ID: LIB3116-020-P1-K1-E10
acacccttccaaccttcccttttcctccagcacaattttttataatccacttttaatccacaaccaggagcggtttttttaaaccagaggttggaacccaataaccataatatatttccaaaacatcccttcctataatttatttaactataccaaattcccaa

SEQ ID NO: 3819 - DNA, 334 bp, Zea mays
  Clone ID: LIB3116-020-P1-K1-E12
acacccttccgttccaaatccacccacaaaacctttaggagccttattttttttaattcgtaatagcgcggccgggagtttccgaatttggatggggaaatgcttttcctgaattgaaggatgcttttggttccgatgatcccagactccaaaggaaagctttaaatttaatccaatacttgttgaacaactccaaggcaaccaggagtgttgccacaaagcttggttttccaaagctgatgatccaccttgggtccagcgatgattccttagggcgtgaagctgttttaggcggcctccttgatttgccccggaccaggacatttgttaaccc

SEQ ID NO: 3820 - DNA, 259 bp, Zea mays
  Clone ID: LIB3116-020-P1-K1-E7
gggtttcccgaacttccccgccatttacaaattttacagcaacggaatccccttgccggcggagaccggtttagaggccatggggaaccttcttcccccccatggtaaagctgtgggaggacacaaccgaccacgtcctccgttttaaggggccgaaaataataaaaaggaaccgttctttttggttaaaggtcaaggagtttttaaggcaaactatctctgggttaaaccctttgtgaatccatattttatctgtttt

SEQ ID NO: 3821 - DNA, 199 bp, Zea mays
  Clone ID: LIB3116-020-P1-K1-F1
ccacacccgtccgcccgggctggttagttccgttcaattggcccgcctaacctttagcctcggggccaggggaacagtggcgatgctgatgcaaggccccttgttagtgacggactgtaccccgacgggcgtagggtggttgtcttcgtccgggcggggtcggttgggcccggcggtcgggcccacggggaagcggggc

SEQ ID NO: 3822 - DNA, 69 bp, Zea mays
  Clone ID: LIB3116-021-P1-K1-A12
acaatccgggcttggatgtccgggggcgcagtttcctagttccggacttgttccgggggaacccttgaa

SEQ ID NO: 3823 - DNA, 446 bp, Zea mays
  Clone ID: LIB3116-021-P1-K1-C4
aggcttccgccaacgcttcggccaacccttccgccaacgcttccgagacaattccggagacctacgtcctgaggcccttaataaactaacatgcgatggaataaacagggggtggccacttccattagatttccagggattaatgtttgcccgcaattagggaaatttgtcagacctaaccattggtgggggcaatgtaccgaactggggtttttgggccataattgtcagttaacaatggtaggaggcttcctaatttgtgctgtttaagaccaatggcaatgctacttggtctaaggggtgttacccaggttctttctgggaactttagttggctggatccttatggtaatgtggcgaatatgggaccataatatgttttaaaaaaaaaaaataaatataaataattattataaataaaaaaaaaaaaggggcggccgttttag

SEQ ID NO: 3824 - DNA, 228 bp, Zea mays
  Clone ID: LIB3116-021-P1-K1-C8
gggccgaatcccgggccgaccacccttcccacagttttaacctagtggaaccggatttaattattaaaaccaggttaaggttcaattaaggggtttttttcccaacccaagggtgtgaaaaaccaaaataaaaaaggttttttggaacccgaaaagcatttaacggttttccgccatcccaaccttttttataatggtttcgccaataatttgttcaaaccctttgcc

SEQ ID NO: 3825 - DNA, 158 bp, Zea mays
  Clone ID: LIB3116-021-P1-K1-D2
gccagccgaacaaggtaaaggcggcccagaaccccctgttgttgccccccaaggccaactccttgggccacttgggaaggtccactgccaacggcaagccccccaaggccaaggagggaatgttcgtaaagaactacagttactagttttagatcgca

SEQ ID NO: 3826 - DNA, 330 bp, Zea mays
  Clone ID: LIB3116-021-P1-K1-E6
gcggaccaacccttccggggttttcccctttaaccccggcaagtgttcttctttggttcgttgaaccgggaaaaataaaggcggaaaccaggattaagcgccgggcggttaaaggcgaagcccctccaaatcctgggcctattcaaggtgctcccccgcttggtcgttttgaaccttaattttaccttttggcccttttactgcaagtgccggtccaagagggattcgccgagccttttaaggccccccagggccataatgtcccccttaaaggagaaggggatcgacttgccaatggttttttgttccccaacccgggacatagccaag

SEQ ID NO: 3827 - DNA, 387 bp, Zea mays
  Clone ID: LIB3116-021-P1-K1-E9
gaccaacaggcaccataaaagggggaatccattaccaccattggaccaccattgaaagccaggatattttccttccttgaggcggctggttttttttacatgggtggttaacgcaacaattttccttaaatgttaacaagctctaatagtttccttttttccccaataccttcaataaatattagcttaagtttgtgaaaacccagtttttaaaccatttaggcttaaacaggcaatcgcagaaggcaacataccttaatggcccttgtggggtaaacaatcgccagccttatttttggtgcagtaatgggtccaaacaataagggaacaacagttgaagaaactggggctacctgggatcaaccaagtagttttggcaaacctttt

SEQ ID NO: 3828 - DNA, 285 bp, Zea mays
  Clone ID: LIB3116-021-P1-K1-F10
cgcgccacacccttccgaataaggttttatccctttatcgaacttttctcagaaaaccaaaccaaaaccccttccgaaggtttattttttaacacgggcgagccttccccaaaccaaacccatggcgaccaacaccaaccgccgaaccaacggccaaaccttgttcgccggcccggccctggtcttgttcccctgaaactaggccctcgcaatttaccttccaaggggcaacacggcccccttccttttttatatggggtccttttctattttattttttttttt

SEQ ID NO: 3829 - DNA, 245 bp, Zea mays
  unsure at all n locations
  Clone ID: LIB3116-021-P1-K1-F6
ccgtccgttttgggcctaatttggtccttttacacaatttatacttttgacctcaacaagaacaaggattcgggtgtcctttagttttgggtgcacctcctttcctgtaaatgacctgaatgtaaacatggggggggccatcggggtaaatttaaacatggttttttgcatttaaaatccatcctttcctgttnttaaaaaaaaaaaaaaaaaaaataataaaaaaaaaaaaaaaaaaataaagg

SEQ ID NO: 3830 - DNA, 220 bp, Zea mays
  Clone ID: LIB3116-021-P1-K1-F8
ttccccttctttccaacttattacttttttattagggcgagctaaattaaattaacgggcggccgtttaacaccttcttaactggaaaaaccttgcctttcccaaactaaatcgctttgcagaacatccccttttcgccagttgccttattaccaaaaaggcccgaaccaatcgcctttccaaacagttgcccaccctgaatggcaattggaccccccct

SEQ ID NO: 3831 - DNA, 268 bp, Zea mays
  Clone ID: LIB3116-021-P1-K1-G1
agccgtccgaataaggtgggggcttagggatggttacctttttagaccgctcctcccaccctgggtttttaattgtttaaagctggccagggggcttaatttggttgggggccgccccctaaggggggctagggtggcccgctcaactaaggagggcccttaaaggcgtcgggtcgggggtttaaggcgtgggggtttggtaaactggggatggggggccgggaggctaaaatatataataataaacctaaattggcaaggcaatggt

SEQ ID NO: 3832 - DNA, 197 bp, Zea mays
  Clone ID: LIB3116-021-P1-K1-G12
acacccttccgaaccattcgcggaaataattgtcccctttatcatattccatccaacctttcctaaccagcgagtctttttaaacacctgtaggcttccattaaaccaaactgttaagagataattttaatgccccccaagctttccttttaaagttttttccttttccttaaaaaatgttttatgtaacccctttt

SEQ ID NO: 3833 - DNA, 358 bp, Zea mays
  Clone ID: LIB3116-021-P1-K1-G2
aaacctggggaaaccttttgaacaggtggttttttgttggaccttccaaatgggtaacagggttgttccaaagggcccgattgaggaagggttaaggcaaaccctgcctgttaatgatggttaaattccagagtcctggttagcaaggtcttttaagattaaccaggctgggtttctgaggggcacctttattgtaattccaatgggcgtttccaggaccaatgaggagctttgggatggtaaattttaggaggaacgctttaatccaacaaaactcctggccattctaaaggttccatcctattgggcccgggcagacaatttaatttccaaatgttttttttgcaaaaaaagattt

SEQ ID NO: 3834 - DNA, 172 bp, Zea mays
  Clone ID: LIB3116-021-P1-K1-G3
aaaggaggacctcgaccagggcaaacccccttcgttcggttccctggctgaatccccaaccgacggctcgttcgaaaggaaggaggctggctttaaccatggcgtttttgccgttcggcagcaccgaaccggcggccgtgccggcaacctaaggggggccccggccgttccc

SEQ ID NO: 3835 - DNA, 289 bp, Zea mays
  Clone ID: LIB3116-021-P1-K1-G5
tgtttttttttcttgccggccgccaaagagatcgccatttggactgagtccttttcgtttttgtcggccgcaagggagctttttcgggccgccgttttactcggttgccagggagaaccagccgttggttgaacctggccattaatttcttagccgggcccaggcaactgaccgtccaaccgtcgttgaatcggccggcagccatactcggttgttaagtctggccggcgaaccggggccctgggggctttcccgtcggggggcgcgtcccttattgcggccccccccc

SEQ ID NO: 3836 - DNA, 325 bp, Zea mays
  unsure at all n locations
  Clone ID: LIB3116-021-P1-K1-G8
acacccttccgttgccccgattcttttccaatggtttttggttttggcctcgttggaactttacccggttgggcaatccaaagtgggtggggggggccggncctttaccaaaagtttggttaacttgaaccgtcagaattggcttagggttgccttaacaaaacagcaacaactgccaatttcaaacgggggaaggttaccaagctgctgaattttaacccaaacacatctttaaaacctaattaatcaaacaaccttttttttccttgataaaaaaaaataaaaaaaattatttattaaaatattttattataaaaaaaaaata

SEQ ID NO: 3837 - DNA, 377 bp, Zea mays
  Clone ID: LIB3116-021-P1-K1-G9
ccacacgcgtccggaaaaggcaaaccaaacaggacttttggggttcggtcttcttcctggccgttgttgccgttccctttgtgcttaatttttcttgccggttgttgccttccgtccgggtccagatccggcaacaaaccgatccggggccttcaacattggcggggccggaagcgggaccaaaggcggcggaagccttggttttggggttggggctggggctggggggggccaattccaggggcgacgcgttttgggggttgggccggagcttaagggaccccggcggggttctgaaaagttggaacccaaggttggtaaacccttgaacttggttcaacgtaacttgggacgggaaaaacggtgtaaccggctta

SEQ ID NO: 3838 - DNA, 297 bp, Zea mays
  Clone ID: LIB3116-021-P1-K1-H12
ccgaaaggcccgggccgaccacacccttccaaggcaatgaacaattttttgtggatattgtttaaggaagcactaaactccaatgctatctggagtccttgacaagaccggtggcaagctaatccaaacatcaaaaaaaggtcctaccagccttaataaaaaaaaaaaaaaaaaaaaaaaaattacaaataaaaattttataaaaaaaaaaaatggggcggccgttttaaaggttcaaagttaacttccccgtccatgcaacttaatagttttttaatagggcaaccaaaattaaat

SEQ ID NO: 3839 - DNA, 313 bp, Zea mays
  Clone ID: LIB3116-021-P1-K1-H4
atttggaaaagcagaatctgttttgaagaaacttgagggcctaataagggctcatgatgccggacagccttttgatttcctttgtggcctatacccttaactaggaaatttgagcgaggccaatagggtttggaatgggataaagtccaaattctcgaaggtaactaacacaagctaccttggcatgcttaacgctttttacaagctcaatgattttgacgcgttgaagcagatctttttggggggggaatttaatattgaaacctttgatgtaaagctgccgaatttgatgattcgcagccatctgaaggtt

SEQ ID NO: 3840 - DNA, 352 bp, Zea mays
  Clone ID: LIB3116-022-P1-K1-A12
cggaccacacccttccgccaaggcttccggggacccttggttgttgtctaactggcaccttagaaggcccattgggggcccaccattggcggccaaatttttttgcctcctaatgctcctgggcttttttgaaggggctgttaccgggccctttttcccgaatggttaacaggctcttatggcttccttttttcccccgtacctttaaccagcggggtcttgggtttgggaaaccccaattcttaaaccttttaggttccaccaggcattcgcagttggctttttacctttataaccctggttcctccaacattaataagccctattccagcagttacttttggtgcttttt

SEQ ID NO: 3841 - DNA, 221 bp, Zea mays
  Clone ID: LIB3116-022-P1-K1-B1
ccacacgcgtccgttggttggttcggggtcctgatttactgttggtggacctactctagtagaggtggatgtggaacaggcgcactggttccatgtgtcccaaggggccattttgttttgccacgtaggcccatactacaattggcggttttgtgttgcatatggggttggagagggcctactccaaattcaggcatgtgggaaatgggacctttggattt

SEQ ID NO: 3842 - DNA, 392 bp, Zea mays
  Clone ID: LIB3116-022-P1-K1-B12
cccacgcttccgccaacgcgtccgggtttttgtccaggtggctggccagaaaccattaacgggttgcccaagcctggcggggtaaatggcttttttggcaggcggttttccttggggccaaaccacaccttgggggtttaactgggcccaggggtgggacccaagcttgggaaaggagggaccatttgggtttttggttttaactaggaaggaggtcccaggattttttagaaaacgggaccaggtttgggcctgccttccttggttgtaaccttagatgactgaaaggtccctttacctttggcggccagaccatttggcctttagtttttgcatggattatggggaggtctgttatataatatataatataaatattttatttatttata

SEQ ID NO: 3843 - DNA, 377 bp, Zea mays
  Clone ID: LIB3116-022-P1-K1-B8
aaataatctaacacccgattcgctcttgactttggtggaggggttaagcgtgccatctaaggcgggggagcactaatttccggctttgcttgggaccaagggtgttgcgggccccgcctttttaagggcaaagtccttgaatgacgggtctgaaacaggcgttgttggaaacaaaaagggccagctggagcagtcacctgatctccgggccgttgaacatttggatctcgccatgtttaagcgtctgaagtattctgggccattgggatcgctgcctattgacagcttgataaagcggttgaccagtgggtgaagtccagcgggcagttaattttgcccactgggttacctactgatgatcaaatggcaatcccgga

SEQ ID NO: 3844 - DNA, 362 bp, Zea mays
  Clone ID: LIB3116-022-P1-K1-B9
ggtttgtgtggcccccaaaggcttggcctgttacgtccatagggtcttccatccaatggttaaggagcagggttccttcgccggttttaaggccgaaagcttcgggaagaatctccaaagggagggcagttttctgagggttggggggtaaagagcgatgggttgaacattcgttcgttttccacacgtgtccaactcctaccggaggggccctgccattggcctagaccggatattttaatggctccaatattaattttaatttcctttggctccgtccttttaaaaagctttttgttttttttggggttctccaaagagttctttgtacctatgttttacaaatcttttatttgtttaaa

SEQ ID NO: 3845 - DNA, 361 bp, Zea mays
  Clone ID: LIB3116-022-P1-K1-C1
cccacccttccggggacccgggggcaaaacccccctgggtttggattgatttgtttggctggaggggccgggaattaagcttttacttcctcgctgctgggggggaagggcctggatttcggaatttgggacctaccaaaaccccccggggattggattgatttgtttggttggccagttaaaaaaacatttattccaattccaccgggttttgctggataagtcgggaaataagcttttggtgcgcccctcctgggggtgcaaggcttgcattcccggaattgggaacctataaaacccccttgggggaacctaaattaatttcccggccgccggttttcaaacgtggggccgggaaaac

SEQ ID NO: 3846 - DNA, 352 bp, Zea mays
  Clone ID: LIB3116-022-P1-K1-C10
aggacccttggccggacccttggccgtccttttggccggccccttggcccgggcccggaaggagtcgttggcaaggaagctggccgcccgaataagcgcattgagcagggcaaccgacaacgcaatgaagttcggaaggaacctttcaatggcttaaaaccgaaagggccaggccaagacaacggggaggatcctgaggatcgtggccggggccaacgccctggttggttaagcctaattcccctgggtggggcggggctccggctatatataatccttttccctaattttttcaactttgccggtaattccggttattagaacaaacgcaacggagttttgggttccttgc

SEQ ID NO: 3847 - DNA, 322 bp, Zea mays
  Clone ID: LIB3116-022-P1-K1-C2
cccacgcttccgcccacgcgtccgggcgttttgtttgtttgggatggaaaggccgaccgggcggggtttgttttccctatgcttaggtattttccggcctttttttatcaactctggtggccaagcccaaggggaaaatctgggctttttttccatatggtattattaaacatggtccattcggcaaaaaaaaaaaaaaaaaaaaaaaaaaaaaaaaaaaaaaaaaaaaaaaaaaaaaataaaataaagggggggccgttttagaggtcccaagtttccgtccccgggcttgcgacggattagtttttttttggggccccct

SEQ ID NO: 3848 - DNA, 73 bp, Zea mays
  Clone ID: LIB3116-022-P1-K1-C8
ggacccgccctgtaccggccctttaagcgcggggggggggggggttccccccagggggcccgttacacttgcc

SEQ ID NO: 3849 - DNA, 63 bp, Zea mays
  unsure at all n locations
  Clone ID: LIB3116-022-P1-K1-C9
ggaanncgggccggaccgagccgtccaactagttctagaccccaccccaaaattttatattgt

SEQ ID NO: 3850 - DNA, 366 bp, Zea mays
  Clone ID: LIB3116-022-P1-K1-D2
cccacccgtccgaacaggattccaaagccttttttgttttggagaaatctgatgtggctctagaaggaaaagtagtggggcatttttggttagttcccaatgcaaaccaagctttcttttgggttaccctcaggagggtttttcttggaagggttggaacccctgccaggctggctgttagaggtttttttttggtccttaaaaagggccagggctttggattgctgggcccaattggagccgggaaaccatcttccattattttgtggatgggcctcattaaacctacttttggtcctgcttttgtccccggatgggttttaattttggccttgggcgccttttttccaattttgggggggggcc

SEQ ID NO: 3851 - DNA, 301 bp, Zea mays
  Clone ID: LIB3116-022-P1-K1-D4
cccacgcttccggacaagggggttcatggttgttaaaaggctgcttgaggttcctgttgcccagtaaaccggaggggtcctgccttttactctttggaggaaggtggtccaaagcaccaatttgcctttaacggcccaagccttggggtttaatagatcctccccggaaccaattactccatgtttttagcaccaggtgtttaataaacacttccctgaaacatttactccaacacttgcttgcatttaattgttgggcaccaggtggttttgttgctgggtttagcttggccattattta

SEQ ID NO: 3852 - DNA, 358 bp, Zea mays
  Clone ID: LIB3116-022-P1-K1-D9
ccaaggcttccggtttttcaatccgggattttacaatccagttaaacggcccaagatggaaatggaaaagctcttagcccaattggttgaaaccgaaagggccaaccccctagttctgggccttgtttgttttaacatcgtaccggttggttggaacggttccttggccactgggcccaaccttaagggtccagtaaccaaagggaaatggggggctgttcccattccatctatgttgactgggaaaggatggccacgtggggctgccaccagccaattcggtaagcctgctgtccacatggcgagggtggccttaaaaggaaaggcatttgagtggtggggccaaaatccttttagc

SEQ ID NO: 3853 - DNA, 361 bp, Zea mays
  Clone ID: LIB3116-022-P1-K1-E12
cggaccacacccttccgaaaaaaaaaaaaaaaaaaataaaaaattattttttaaaaaaaaaaaaaaaaaaaaaaaaaagaaaaaatggggcggccgttgtgggggtccaaggtttccttccccttccttccgacgcattactttttttatagggcaccctaattcaatttaactgcccgccgtttaccaccgccgtgcctggaaaaccccggcctttcccaaacttattcgctttgcacaaattccccttttcgcaggctggcttattaccaaaaaggcccgacccattcgcctttccaaacatttccccacccttatgtggcaattggaccccccccttgtccggccctttaagcccggg

SEQ ID NO: 3854 - DNA, 312 bp, Zea mays
  Clone ID: LIB3116-022-P1-K1-E2
ccaacccttccgccaacccttccggaaggtttggaaaacctaaatgagttggccagggctggagggcccgtttacccactagggggtccagatgaggggcttaaaaaggaactaatggtttttgaaaatcctggcctgaaaatggaaggcttagggcccttggggggcaccagcctaaagttcaaagtccactcctttaaaatccgtaggggcatcctggggctcattttagggttcgcaacattactgtgcccaccacacctaacagtattcaggggtgttccaaacccaccgttgtaagccgacgttttg

SEQ ID NO: 3855 - DNA, 311 bp, Zea mays
  Clone ID: LIB3116-022-P1-K1-E3
ccacacccgtccgggaaacgggccctgggtttaattaaaattggttccactatctgtccatgtaggaaggatgggaatggtggggcttcttcataaggcttttgcttactttgcccggacccaggagggttttttggaaatcgatgaaccccgggggtcattagctgttgcccttggccagataaaggaaagggttttcaatgccattttccgggccgtatcccccgttatggttggcaggttaggctccgataagtttgcagcgttattgaaggccggaccagactggaggaaagcgttgggccagtttt

SEQ ID NO: 3856 - DNA, 325 bp, Zea mays
  Clone ID: LIB3116-022-P1-K1-E7
gaccgccttaaccaccaaaaaggacttcgtgttcggaaaaagagggaggcccatggggccacggtccaaagaaccctgaaggggctccaccccccgaaggcttcttccaacaccctgttaaacgccaggagcagttcccgctggctgccctaaatcgcctagctggccaagaaacatgcttatatcgcagaggcttagggagcccaacaccctcaaggttcacttgaagtcgggggttaagcctaagggcctgtacatcgtccccatccagcatacctacccggtttgggagcccttttttttgaatgtggatgactacaccttt

SEQ ID NO: 3857 - DNA, 215 bp, Zea mays
  Clone ID: LIB3116-022-P1-K1-E9
cttttgtcttgcaacgtaatagctcttttttggggcgacctaaattaaattaacgggccgccgttttccaccgcctggcctggaaaacccctggcgttccccaacttatccgccttgcagaccatccccctttggccggctggcgtattaccaaaaaggcccgtaccgttcgcccttccaaacagttgcccatcctgaatggcaattgggacccc

SEQ ID NO: 3858 - DNA, 383 bp, Zea mays
  Clone ID: LIB3116-022-P1-K1-F11
aataaaacggttccttaagatgcggaacctttcaagaaggagccgaagagccagccatggttgggtttaggaccgattgccggggtttccagcctgaacctaagttggtccccaccaccccagccttattaggccggcccagcaccggccccaaccttgcccgggaattggcttggccactagaccgggttgggaacccataaatatccttagttttggggtttaagggtccgcttttgtcggggttttacgccctctggtcgcatagttctggatgtaaagaaaggtagccggtcatgcccataactggaggtcgaatggaattttttggggggttttaactctacgtggcctttgaatttggcatgtctaaggataaggtt

SEQ ID NO: 3859 - DNA, 423 bp, Zea mays
  Clone ID: LIB3116-022-P1-K1-F12
ccaacgcgtccggggaaatggacgaggggccctccaccaaactcgaaggccttccaggggttcttttggggcttccgggctttaacgttgatcctgaaaccagggtttttggggctgggtatttggtgaccggggaaatggtccagggacctccaaaagggcagagaagggtggggccggtgcctaagagggctaaggttcgaccacggtccagtgcccggccccgttttgtgaagcggagggggacccattcttcccagagatgttgttcccgcttctgaagatgtaaaaggtaacggttcccacaggggtccaataccgtgcctgaagatgcagaatcacctccccattacttatttgataatggcatccgttttgtttgcctgccattttaagcgtgttttgctaatattgcatttgggc

SEQ ID NO: 3860 - DNA, 372 bp, Zea mays
  Clone ID: LIB3116-022-P1-K1-F2
aaaccaagtaactggcattttcctccgggttccaagttttagcaccccacccctcggtttcggcattgtcgggccccgccaggggcggcagaggttttggccagagggcggccccaagccccaccgaagaggtcctgcccgccaccttccagggcttaaccaacccgccattccgaaggctgtctagaaggggcggcttaaagcccttttccggcctattttacaagaagacccgcggggggctcaaaacctttctgaagaacgtaatccgggacgccgtaacttacaccaagcacccccgccgaaggacctgaaccgccatggttttcttttaccccctcaagcaacagggccgaaccctttacggttttg

SEQ ID NO: 3861 - DNA, 201 bp, Zea mays
  Clone ID: LIB3116-022-P1-K1-F3
cccacccgtccgccaacccgtccgggggggtcaacccggccggtttcaaccccctcttttgaagaagcggcccggacctttgttaccctagaaggaaggccccggcggccaacaagtccccggggaacgtggcgttccgggggcccggaaacaacttccccccggccttcccaaggttcgaaaaggccaaggccccccaga

SEQ ID NO: 3862 - DNA, 403 bp, Zea mays
  Clone ID: LIB3116-022-P1-K1-F6
ccattcaaccaacggcctacattgaaccgggcggtttattggcagcaccaccttttaccattaagccggttggttacggcctactttaagaaccaccaactttttccatttaaccaattggccgaactgaaccccgttgtttattggcggcagcaattcctactaccatttagccggttggctgcagaaggccgggcttccttttggccacagaaccagtggctgcctttttaccagcagttgggggttaacccggaaacccttttacaactccaacaattgtggcccttggtccaactggcttggccaaacccagaagcctcctaccaacaccacattattgggggggcccttttttagatggctaattagtggtaatccaatattaaagtttttgggagga

SEQ ID NO: 3863 - DNA, 289 bp, Zea mays
  Clone ID: LIB3116-022-P1-K1-F9
cggaccacacccttccgcccacccttccaacctttctggatttcttcttttggtccgattaaagaaccagccggccagccaaggccaccggagcccggggccggccccccggccagcccaaacctcctcccttccctttttcttccgtttccaacagcaaggcatgggggaaaaggcgaggaccttggcccccaaactaaaattcccccaggggaagcacgacggccttccgttgccaacaagcccgttgaaccggccgtcaccccttggttggcgccaccgcaacccc

SEQ ID NO: 3864 - DNA, 382 bp, Zea mays
  Clone ID: LIB3116-022-P1-K1-G10
acacccttccggcccccaagagaaacccttttccccattctgtcggttgaggaagaggaggagaagaggaggaggttggtttcctccgattgggcctaatggtccaagcgttggttccgtcccaaggtccttcccccgttgttgtttccaatttaatcgttaattcggtttttatcattcggggattggggtcttcggggttggttggttggatctgccgggttttgccattcccggtttcggccgcgtccttggtccaggtgtccccgttgttcgtcccattggccggggccttggccttttgttggtacgggttggggggcaccttatcggccaaccccgaggtgcggttacccaatggatataaggtcgtccgttgtcc

SEQ ID NO: 3865 - DNA, 209 bp, Zea mays
  Clone ID: LIB3116-022-P1-K1-G11
tttcttgcgacgtattagcttttttttgggggaacctaaatcaaattaacgggccgccgttttccaccgtcgggcctgggaaacccctggcgttccccaacttattggcctggcagaacttccccttttggccggttggcgtattaccgaaaaggcccgacccgttggcccttccaaccagttgcccagcctgattggcgattgggccc

SEQ ID NO: 3866 - DNA, 155 bp, Zea mays
  Clone ID: LIB3116-022-P1-K1-G7
tccggaccacacccgtccgaacaaaacaaaacaaataagcaattatttctatcaaagagccagcaaccaccccggggggggcttctattaaaagcaaggaggcacccctcccccctttgaaccacaagcccatggcaaaaaggaacggcaaaaac

SEQ ID NO: 3867 - DNA, 362 bp, Zea mays
  unsure at all n locations
  Clone ID: LIB3116-024-P1-K1-D7
cctatcttcaacatatcttatcttcatatctccancaaacantaacagcccttttttaaacacttaatggaagcccttatttntcaccttnatnacntttttttaactcttctaaaaactccaactcaatttttttcttatnaacttcnntctttcatttatntcctttcaacttattaaaacactctcatttatattttttcatcaataactaacaaaaaaatcatatacactaactatttctacaaattataacttaatatatatctttcctaataccataacctattcacatctttanattttcataacccttttctttctcttcctaacattacctatcttattacttttatttttat

SEQ ID NO: 3868 - DNA, 670 bp, Zea mays
  Clone ID: LIB3116-025-B6-F1A
acttactagatgcccaaatcgattaatactactatttacagcaagtcacgaaccatgtttaaagtaaactgcaccctctcaccaaaagcgcccctagattcaagggtaactgggcagtaacaagcatacatggtagctggacaagattacacagctagcgggtttaccctttcttgcaaacataacaatagtttagcttagttgctgacgccatgaacataggctagggtttaaccaacagggagcaatgatcacttgcatgagcgtgccattgctcgcgatcgatgggggcaggcacagcaaccatatggtacgcgtacgtcatgatccatcgaccctctccttatgcattgaggtggctcagcatccatggtggcagacctgcgatgcggagctgcggttgcgcctgccccggcagtggctgctgctgcgccgccgcaggcagcttctcagctcctatctcccattgtcaacggcgggaagcagatgttgtgtggaggcggcaatccctgctgatcctgcctcatcatgaagggagacgatgatgagcttgtctgggcctgggcatgtgtctgctggtcccactgcacctgctgctgccggctcgcgaacgccttctagctctccgcaagtacttctgcagagcttgttctcctctgcagtgactctc

SEQ ID NO: 3869 - DNA, 328 bp, Zea mays
  Clone ID: LIB3116-025-B6-F2A
acttactagatgcccaaatcgattaatactactatttacagcaagtcacgaaccatgtttaaagtaaactgcaccctctcaccaaaagcgcccctagattcaagggtaactgggcagtaacaagcatacatggtagctggacaagattacacagctagcgggtttaccctttcttgcaaacataacaatagtttagcttagttgctgacgccatgaacataggctagggtttaaccaacagggagcaatgatcacttgcatgagcgtgccattgctcgcgatcgatgggggcaggcacagcaaccatatggtacgcgtacgtcatgat

SEQ ID NO: 3870 - DNA, 599 bp, Zea mays
  unsure at all n locations
  Clone ID: LIB3116-025-B6-R1A
agccaccttatggccgagtctatttctgagctacagaagaaggagaggtcactgcaggaggagaacaaggctctgcagaaggaacttgcggagaggcagaaggccgtcgcgagccggcagcagcaggtgcagtgggaccagcagacacatgcccaggcccagacaagctcatcatcgtcctccttcatgatgaggcaggatcagcagggattgccgcctccacacaacatctgcttcccgccgttgacaatgggagatagaggtgaagagctggctgcggcggcgcacagcagccactgccggggcaggcgcaaccgcagctccgcatcgcaggtctgccaccatggatgctgagccacctcaatgcataaggagagggtcgatggatcatgacgtacgcgtaccatatggttgctgtgcctgcccccatcgatcgcgagcaatggcacgctcatgcaagtgatccatgctccctgttggttaagcctagcctatgttcatggcgtcacaactaagctanactnaatgtatgtttgcaagaaagggtaaaaccgctagctgtgtaatcttgtccagctaccatgtatgcttgttactgc

SEQ ID NO: 3871 - DNA, 353 bp, Zea mays
  Clone ID: LIB3116-025-B6-R2A
agccaccttatggccgagtctatttctgagctacagaagaaggagaggtcactgcaggaggagaacaaggctctgcagaaggaacttgcggagaggcagaaggccgtcgcgagccggcagcagcaggtgcagtgggaccagcagacacatgcccaggcccagacaagctcatcatcgtcctccttcatgatgaggcaggatcagcagggattgccgcctccacacaacatctgcttcccgccgttgacaatgggagatagaggtgaagagctggctgcggcggcgcagcagcagccactgccggggcaggcgcaaccgcagctccgcatcgcaggtctgccaccatggatgct

SEQ ID NO: 3872 - DNA, 368 bp, Zea mays
  Clone ID: LIB3116-025-P1-K1-A11
ggatctggaacctagggtttggtttggtggttttggtcctccgcaaaaatcccgaaaaccagggttaggggaggcaagacccggaagcggggaaggaccaaggttgccaacaccaggcccaagttcgttttaaaggaaaacggccaggattccccccaggtaacccggttgttcggaaccggccggggcagggccatttgcgtcaatggacccccccgcttttgccatatccggggtaagatgcacaaaagggtttggatcggggttgggaacattgtcctcgtgggcctccgggattaccaggacaacagggccgacgttatcctaaagtccatgaacgacgaggcccccttgttaaaggcctacgg

SEQ ID NO: 3873 - DNA, 217 bp, Zea mays
  Clone ID: LIB3116-025-P1-K1-A8
ccaacgcgtccgattggttttagaccggtcgggcgcggcctgcaattgcaagccggggaatccaaaaagccggcccggccgaagggtcaatcgttgtttccgccggttgcaagatcggagccagcagggacaggtcgtcggggaactagccttgctgaaccccggggaaaaaaagggaaaggtgaaaaaagggtggttggcggtccccttcgggccg

SEQ ID NO: 3874 - DNA, 367 bp, Zea mays
  Clone ID: LIB3116-025-P1-K1-B1
cggccgcgtgggtttaaagaaaggaattaaaccagttttaaggtcctgtcgggataggacccttagggggggcccattccgttttacttccggggattttaactttgaaacgggaggcgccgggaagcggttaaaaatggcccaggccttaaaaaatttgtccaggcaaggccaatttttccggggtaccaaagggcagaagcccaatcccgcctggatttttaaaatttgcgatggggggcgtccaaaggggtaaggaaattaattggggtgggcttaggaaaccggggccccccaaaccaatttactttccggtgggggggggggggggaagaagggtggccatgtggcctttttcaactgggtt

SEQ ID NO: 3875 - DNA, 409 bp, Zea mays
  Clone ID: LIB3116-025-P1-K1-B10
gccagttgaggcgccagggttgggccgccattcccggggtcaacaagggccaaatcgggggggacttcccgaagggcttccgccggaacataaagtacaacttttgcttgaacttggtccgccaggtccaatttttccagaaaatggacaacctggggttcaaaaccatttgcaacggggggaaatccttaatttttccaaagggaaaaacaatcgtagggaagggcaacgtggtgcaccggatgctgttaatcgggcggggccacctgcattgcagccagttgttgcggaacggcccaacaagcagttgaaccttggggcctggcaacttaagggggaacaagctgtttgcggggtgcctgcgccgcccgttcttggaacgcttcccaacgttgttgggaaccttggt

SEQ ID NO: 3876 - DNA, 159 bp, Zea mays
  Clone ID: LIB3116-025-P1-K1-B3
cccacgcttccgaaggccaagggttgccagtttaatttcttaaggtaaggtaccaggagcgggaccttgttaaacggttgccttgaaattttgaacctttgtaatatttgaggttttgggggttccctgtttaaaaattttgggttcttgaacccagtt

SEQ ID NO: 3877 - DNA, 407 bp, Zea mays
  Clone ID: LIB3116-025-P1-K1-B6
gaccgaccacacccgtccaagcacacctaatggccgagtttatttttgagttccaaaaaaaggaaaggcaactgaaggaggagaccagggttttgaaaaaggaacttgcggagaggcaaaaggccgtcgcaagccgccagaagaaggtgcaggggaaccagaaaacacatgcccaggcccaaacaggctaataatggtcctccttaatgagagggcaggatcagcagggatggccgcttcaaaacaaaatttgtttcccgccgtggccaatggaaaatagaggtgaaaagctggttgcggcggcccacaagaagccattgccggggcaggcccaaccgaagttccgaatggaaggtctgccaccatggatgctgagcacacctaaatgcataaggaaagggtcgatg

SEQ ID NO: 3878 - DNA, 181 bp, Zea mays
  unsure at all n locations
  Clone ID: LIB3116-025-P1-K1-B7
gtggtggtggtggtggtcgtaagggaacaacggcaacccgcaacggccgttgcttacggggcggtgttcgttcggccggggcttgggctttttccggggaacgggggcaaccaagccgggcttgttcttggacccggccccggtggaaaggaaggaagaccactnttatctttttttgtcc

SEQ ID NO: 3879 - DNA, 428 bp, Zea mays
  Clone ID: LIB3116-025-P1-K1-B8
accgagcaagggacccggggcggagaaaaaaagaaaaaacgtttttttcttttgggggtcccggttcccaaacctttggttggttgcctgcctgcctgcaaaagggagttggtattggggtttaagcccttcttaaaggagctgagggacctgcaaaaggaccccccaacataatgcagggcaggtcctgttgggggggccatgtttaatgggcaggcaccatttttgggaccacctgccagcccttatgctgggggggtttttttagggaacattaatttccggccagattaccctttaaaacttccaagggtttttttaaggacaaaggttttccatcttaattataccagcattggagagttttgcctggccattttaaaagagcaggggagccttgttttgacaatttttaaggtcctgttttc

SEQ ID NO: 3880 - DNA, 309 bp, Zea mays
  Clone ID: LIB3116-025-P1-K1-C10
gccgtgttttacgctttcccaaatcttgtggtcgaagaattcgggggagtttacaggtggattggggagaggagtttaaacaataattttaatgggtttagggtttaagaacctgaggcgtacttgaatgggtggaatggttattcaaaggaatgttgatcaaaaacttttccgttttaatttaaaaaaaaaaaggatcaaaaactgtttcccttttttttttaattttgggaacaagggtttaatattaggcttaaactggccatattgttaattaaaggtttgggaaccaaatgttttattggttgt

SEQ ID NO: 3881 - DNA, 397 bp, Zea mays
  Clone ID: LIB3116-025-P1-K1-C6
gcccgccgttgagggcttccagaaggaacactttccaggcggaagcggcggaaacggccaaaagggccgaccaaaaccagaaccagggaggcctgtccttaaaggtaagcatggccggccccccttacttaaggaggggggacctccggttgtccaagggttccagggagttaaggggggttttggacccccttttaacaaactctttttccgggggggaaaagggcggggggaacaacaaccagaacgccttggtttacaaggccaaggacgggaacttaatgctcgccgaaaacgtgccctgggatatgttaattttttcgtgcagaaagttaaggataatgaagggttttgcctttgaggccaggggatcgttgatccatacataaacagaggt

SEQ ID NO: 3882 - DNA, 364 bp, Zea mays
  Clone ID: LIB3116-025-P1-K1-D12
gttggttgttaccataaagaaggggaggccacttgagccatccaggggaaggggtttaagagttttggttgaagttgtccgaaggaaggagggaaaagccggaaggaaaaaatagaaggggttttttggccttttcctaacttaatttaaattttccaactgtaatggttttggtttgttaaggttgaacttaaaaaaattttggttttgtgctgaacggggcttttggtttgtaaaattaaaaaaattaattaaatataaaaaataataaatttatattaatatatataaattatatataatatataaaaaaaaaaataattaaattggggggggcctttttaagggtccaagttttctttcc

SEQ ID NO: 3883 - DNA, 335 bp, Zea mays
  Clone ID: LIB3116-025-P1-K1-D2
ggctggatctggttggggactacataaaggtttttaaaaagcaggtaagggggttgaacaacggccgggcaaattgaacttgttccggggggggaaggttgaaggacccgttaaccagttaaaaggagcagaagccggcccttagaatggcccggccatgcttggcccgccgaagggccggcctgattgacccttccgggccggccgggggttaagttggtttgaagcgttcttcttgaatgggggtaaaagtcgtcaaagattagtagtttaagggtccgtgttcggttttccatagttaactgaatgagtagtccgtagtttgtattccatgc

SEQ ID NO: 3884 - DNA, 282 bp, Zea mays
  Clone ID: LIB3116-025-P1-K1-D4
ccacacgcgtccgccaaggaagccggaaggctgttggtaatggacttaattgccgcttggggggggcaatgccgggcaatggcccaattgttggtcgaccaccccaagaagttaattaaggtcgggttcttgaagggggacgtggccaaagggaaggaagtaaccgcggcttacaaggtcgggggaatgccgaccttcaatttggtaaaaaacggaaggacggtcgggaccttcgggggtgccagaaaggacaagttctgggcccaaatcgagaagtatgct

SEQ ID NO: 3885 - DNA, 387 bp, Zea mays
  unsure at all n locations
  Clone ID: LIB3116-025-P1-K1-D8
gaaatcaaaacaagaattttaacgtaaaacgggcgttgggaacagacacacaaagcgtgggaaccaagggttaattaccagaagggggactactgttcgaaggaggtaaggtcgttggccccggccggtttcggccgcaacggggggggggtcaagaagaacgtggtaaaggaaaagttcagggaggtcaaaacggtttaacgcgcgggggcaaacaacaacaacaacaatggtaacaacgggggcaacggtttggtggggcgcaagacaaggttnaaaaaggaaataaacacttgaaccggcaaggtcaacaagcgcagggaaagtttcttggccagggttaactgagccgcccgggggccggaatcaacgcccgttcgggcttgc

SEQ ID NO: 3886 - DNA, 168 bp, Zea mays
  Clone ID: LIB3116-025-P1-K1-D9
ggacgcgccttgtaccggggctttaagcccggcggtttttggggttactcccagggggaccgtttaattggccagggccctagggcccgttcttttcgtttttttcccttcttttttggccacgttggcgggttttcccggtaaagttttaaatggggggttcccttt

SEQ ID NO: 3887 - DNA, 230 bp, Zea mays
  Clone ID: LIB3116-025-P1-K1-E7
aacctttttggaaggcccaaatttctaacctaaggcagtgtatccgtatgaataaaacatgggctgccttccctgggtctttgggaaaattattccaacaccatcttcaaaaaaaagggtgtaggatgaatatgccaccttaccattagattagttggtttttgcaatggttcctttgggggtggtcattaataaggttgactgcttagggtaaagcaatttcttttttt

SEQ ID NO: 3888 - DNA, 163 bp, Zea mays
  Clone ID: LIB3116-025-P1-K1-E8
aatgggaacgcgccttgtagcggcccattaagcccgggggggggtgtggttccccccaggtggaccgttcaattggcaagggccttagggccggttcttttggtttttttcccttcctttttggccacgttggccggttttccccgtaaggttttaaatgggg

SEQ ID NO: 3889 - DNA, 398 bp, Zea mays
  unsure at all n locations
  Clone ID: LIB3116-025-P1-K1-F5
ggggaccgtttgaatggggtcgttggactggaggtgcaggggggcctgcaatccggccggggggatcaagtccgtcccctcccaatccggcaaaggggaggatccaatctggagcgcctctttttgccaggagggggatggaataatggaaggattttttttttccagccccccccttgtttgggtgcaggcccaggccatagttgaattaaagggttcgggtggggtccacacagggggttaaaagaaggggaggcttgcttgtttgatccaggaggaaaccactggagcccaatttttaattttttttgggngggagggttcaaaattgggggatccagccatccagggctaaggtgggtgggattccatggtttttttaagccgttagggcaaaa

SEQ ID NO: 3890 - DNA, 242 bp, Zea mays
  Clone ID: LIB3116-025-P1-K1-F8
ggcccccggaaggcagttggccaccaaggcggtaaggaagtcggcgccaacaaccggcggggggaaaaagcccaacaggtccaggcccggaccaggggcgttgcccaggatccgaaggtcccaaaaaagcacggggttcttgatccgaaggttgcctttcaagggcctggtgcgcaagatcgcccaggatttaaaaacagacttccggttccagagccacgccgggctggcgttcccagagg

SEQ ID NO: 3891 - DNA, 458 bp, Zea mays
  unsure at all n locations
  Clone ID: LIB3116-025-P1-K1-F8-F2A
gcgggccccccgcaagcagctcgccaccaaggcggcgaggaagtcggcgccgacgaccggcggcgtgaagaagccccacaggtacaggcccggaacagtggcgctgcgcgagatccgcaagtaccagaagagcacggagctcctgatccgcaagctgcccttccagcgcctggtgcgcgagatcgcgcaggacttcaagacagacctccggttccagagccacgccgtgctggcctccaggaggccgccgaggcctacctcgtcggcctcttcgaggacaccaacctctgcgccatccacgccaagcgtgtcaccatcatgcccaaggacatccagctcgcccgccgcatccgtggcgagcgcgcgtagccatcatctccgaggatctgatgaatgtctagttaccaaaaaataggccgtattagcgtcgntgttctgnattcgntattttggattcg

SEQ ID NO: 3892 - DNA, 347 bp, Zea mays
  unsure at all n locations
  Clone ID: LIB3116-025-P1-K1-F8-R2A
aggaaagctgtttttcactgcaaccgaatccaaaataacgaatacagaacaaccaccctaatacggcctattttttggtaactagacattcatcaaatcctgggggatgatggctacccgcgctcgccacggatgcggcgggcgagctggatgtccttgggcatgatggtgacacgcttggcgtggatggcgcagaggttggtgtcctcgaagaggcccacgaggtaggccttggcggccttctggagcgccagcacggcgtggctctggaaccggaggtctgtcttgagatcctgcgcgatctcncgcaccaggcgctggaagggcagcttgcggatcaggagctc

SEQ ID NO: 3893 - DNA, 277 bp, Zea mays
  Clone ID: LIB3116-025-P1-K1-F9
aatcctcggtggtggggcttttgggttcccaattggacaacggttttttcggccacttcgggtcggggataacttacttgggggggggccgccttcccaaggggcggccgggtggtttaaggtggttggccgggggggaccgcccgggggggcagggggggcgcttccgccccagcccggaagggggaggtaaggtgatctttttctttcttttttattttttttttgttctttttttttattatttatatttattttatttatatttttccttatt

SEQ ID NO: 3894 - DNA, 326 bp, Zea mays
  Clone ID: LIB3116-025-P1-K1-G8
cccacgcgtccgcccacgcgtccgggtaatgcttttaaaataatccagtaaaatttttaagcgggaacgatgatttgttgggggacattaataaggtttgagcagggaagggatccaaaatttgtggttgggggagggtaaccatatttggttgggtccatatgttaggttttggttggttccataataaagatttttatggtggtttcctggcttccatccactccacaattaaggtgggcaaaggatttatgtccatgcttgccagttttttgccaggggtgtgaagtttttgtttggccatattttaaaaaagggggatggaa

SEQ ID NO: 3895 - DNA, 399 bp, Zea mays
  Clone ID: LIB3116-025-P1-K1-G9
gttaacgcaggcgcaggggcccaactggttgttttggttgcttaaaattccttgttccacggcttcttccggggttccgcaaccagtttcccttgaaaccggaaatccgggataggaggaagagaaaccggccggaaaagggaagggggtccaggaccgataaaggaatttttgcccggggtcctgccaggttgttagaatcctggcagccatggttttcctgttgggttctgggagattttgggggcgacggactcccttaatgctggtccttggttgttttgggggttcccggaccagaagcggcagcgccaaaggggaaacctttgttgactgggccagggcatggcttaagttaaagaagaaggggaggaggacctttttttttgatttttaacc

SEQ ID NO: 3896 - DNA, 225 bp, Zea mays
  Clone ID: LIB3116-025-P1-K1-H11
gggcaaattggatggatggacatgggaatatgcggttggagggggataataggtcctatggggaatggttcgaactaggggaacgcatggggtccgtaaacacaggacttaggggggaaaaaatcctaggtaacttaaaacaccggaaatttgttttaatataatgggaagatcctccaacaggggtggaaccatgttgattttgccaggaagactacccggaag

SEQ ID NO: 3897 - DNA, 413 bp, Zea mays
  Clone ID: LIB3116-025-P1-K2-A11
cgatctcgcacctagggtttcgtctcgtcgttctcgtcctccgcgaagatgccgaagaacaagggtaagggaggcaagaaccggaagcgaggaaagaacgaggctgacgacgacaagcgcgagctcgttttaaaggaagacgggcaggagtacgcgcaggtgacccgatgctcggcaacgggcggtgcgaggccatctgcgtcgatggcacgcgccgcctctgccatatccggggtaagatgcacaagaaggtctggatcgcggttggggacatcgtcctcgtcggcctccgcgactaccaggacgacaaggccgacgttatcctcaagtacatgaacgacgaggcgcgcctgctcaaggcctacggggagcttcctgacacgctcaggcttaacgagggcgtcgacgtcgtt

SEQ ID NO: 3898 - DNA, 309 bp, Zea mays
  Clone ID: LIB3116-025-P1-K2-C10
cgcgtgttctacgccttccccaatcttgtgtccggagcactcggtggagtctacaggttgcatggggagaggagtctaaaccatcactataatgtgtttagggtttcagtacctgaggcgtacttgaatgggttgaactgttattcgaaggaatgctgatccaaccctttccgtttttatttagaaaaaaagaggatccaagactgttttcctttttttttttatttttggcacaagggcttcatattaggcctaaacttgcccatctgtattattaaatgttttggtaacaaatgtgtttatggatgt

SEQ ID NO: 3899 - DNA, 409 bp, Zea mays
  Clone ID: LIB3116-025-P1-K2-D6
cggacgcgtgggcggacgcgtggaacattttcgagttttggcttccattctcaggtcgaggatacctgaatttctgaaaactaatgaatgtcaaaaggtggactgcttgctttgccaagcaaactttcagtgcctgtttgatggttcaaaaatctcatcgtcctgaaggatcaaatcatcgtttgttgttaataatctttttccttgttttttatttggaattcttgctggattctgtgtgaatcctcttctattttccctctccattgttcctttattctatttcggttttgatggccagtacttgagtcagttaatgtgtacaaagttgcgtctgatgctgcctgtcattgaattgtatggcatgtgaggaagatttaaattgtttattcaacttttgtggtcatga

SEQ ID NO: 3900 - DNA, 115 bp, Zea mays
  Clone ID: LIB3116-025-P1-K2-E9
ccttgcattgtttattatatttttttgatggttccacctaaatccaattcactgtccgatatttaacatctttttttactttgaaaaactctttatttccccaacttattctttt

SEQ ID NO: 3901 - DNA, 436 bp, Zea mays
  Clone ID: LIB3116-025-P1-K2-G10
cggggccgacccacgcgtccggcagtgtccaaaactaagttgcccttttttgttagggggaaaatgctggaagaggagagtagtcctaccacgttattaggagaaaaataaatttgagagtggttctaagagcaatccgtggtacaaatatgacatggaattattttgggttagaagaaaagatttttgttgctctcaacagtaaaaaaggtttttaaggtgttcattccatccctttgccatgatgctgatggccttatatttcagggctgggacgatccatatgtaactcgtactcatgaaggtctcctgaagtggaaataccctgagatgaattctgaggactttctgttcgagcttacgaatgataatcggcaactggttttcctttatgagagaggaaaaaagaaactcatggatggtgcccggatagcat

SEQ ID NO: 3902 - DNA, 157 bp, Zea mays
  Clone ID: LIB3116-026-P1-K2-B1
ttccccgtgaatgcaacgtaaatttttttaatagggccaccaaaataaaatccactgcccgtcgtttaaaaacgtggtaactggaaaaaccctggctaaaccaaattaaatcgctttgaagaaaatccccttttcgcaagttggaaaaaaacaaaaa

SEQ ID NO: 3903 - DNA, 298 bp, Zea mays
  Clone ID: LIB3116-026-P1-K2-C11
atggggatggtcttgggccaacgttgtgactgtaagtgaaaagcaaggtggtcgacaattcgggttggttaactgcctgcccctttcgaagaaagggggaaaattatccatgtgaggaaaaggctagggaaaatttgtggatagctgtacagtgcacacttagatttgtatttaaccaactgaaatgttttgttccagttataaacgtttaaatcatataatgttgtttatataggtggaattttcctaaaaaaaaaaattataaattgtttaaattatattatatattatataaatg

SEQ ID NO: 3904 - DNA, 377 bp, Zea mays
  Clone ID: LIB3116-026-P1-K2-D12
atggatttctttctttcctctctaaaaaaacacaaggggtacagagttacagaccataggcatacatggagccatcagaaatggaggaacgaaccacgttgcttcgtcttaatcgacactatgtacacacagttccagatctgcaggctacgagtaagtacggacagtttttgctctttattctgctaagaacgtagtacgatctagcgtcgcgtcgtcgaaccgatgcgtgcgcgcgaaatagtggcgcaccaccggcgctagatcaggaggagcagcgacgagaccgaagcaggcccgccggcgtaactggttcatgaggcgcagcctggagggccgcggctggaagtcgccgaccccgcgacggcagcggcggc

SEQ ID NO: 3905 - DNA, 373 bp, Zea mays
  Clone ID: LIB3116-026-P1-K2-D3
cggacgcgtgggggccttcagcctcttcgataaggttggcgacggctgcatcactaccaaggaggtgggaacggtgatgcgctcccttggccagaaccctaccgaggcagagctgcaggacatgatcaacgaggtcgatgcggatggcaatgggacatcgacttcccggagttcctgaacctgatggcgaggaagatgaaggacacggactcagaggaggagctcaaggaggccttccgcgttttcgacaaggaccagaacggtttcatctcggctgccgagctccgccatgtcatgaccaacctgggcgagaagctgaccgacaaggaggtcgacgagatgatccgggaggccgacgtcgacggcgacggcc

SEQ ID NO: 3906 - DNA, 342 bp, Zea mays
  unsure at all n locations
  Clone ID: LIB3116-026-P1-K2-D4
cgcccacgcttctcgcccaggaaagccgtcaagctttttggttattgaacttcactagccgcctgtgcggggccatgtccgcgcacatcgcctccagctgttcgtcanaacaccgccaatgaagttcacttcagtgtcgtgtttcctcgaagtgtggactgtggcacgaagtgaagagaagcacccgcggcctacgaggtcagaggcgatgctcgaccttccacttcttcaagaacggcaagacggtcgcgaccatcttgggtgccaggaaggacaagctcctggcccagatcgagaagcatgctgcgcctgcgccttcttttgcgtctgcctaaaggagat

SEQ ID NO: 3907 - DNA, 323 bp, Zea mays
  Clone ID: LIB3116-026-P1-K2-D9
cccacgcgtccgcccacgcttccgcctatgttttcgaaaaaaaaaaaaaaaaaaaaaaaaagaaaatataaaaaaaaaaaaaaagaaaaaaaaaaaaaaaaaaaaaaaataaaaaaaaaaaaaaataaaaaaaaaaaaaaaaaaagggtcggccttttaaagaatcaaaattaacttacccttcattgcaattaaatagtttttttattgtgccacctaaataaaattaattggccgttttttaaaaacttctgaactggaaaaaccttggcttaaccaaattaaatccctttgaagaaaatccccttttcgcaagttggctt

SEQ ID NO: 3908 - DNA, 300 bp, Zea mays
  Clone ID: LIB3116-026-P1-K2-E7
aattgtacctgtccatgcatatatgatatatatatgtggtaacgttgtgaaagcaaacaatcttgggtcccaaaaaaaaaagaaaaaaaaaaaaaaaaaaaaaaaaaaaaaaaaaaaaaaaaaaaaaaaaaaaaaaaaaaaaaaaaaaaaaaaaaaaaaaaaaaaaaaaaaaaaaaaaaaaaaaaaatttttggaaaaaccaaaaaaaaaaaaaaggggaaaaaaaaaaaaaaattttaaaaaaaaaaaaaaaagggggggggcctttaaaaggatcaaaatttactccccctgttttgg

SEQ ID NO: 3909 - DNA, 299 bp, Zea mays
  Clone ID: LIB3116-026-P1-K2-F12
ttcgtttggagctcaccaaaccaggccgagttgcggcggccccagatcagtgagagcttatgcgaagggagacgaggagggcgacaagcagtccctcttcggaagcatcaccgaggcgctggacttctcgcaggtccggtcggagaaggacgccgactgctgtacgaggccagggagtccaccagaggtggagggaggatgacgagggagcagtacggagcacttaggcggaagattggtggcacctaccaggatttcttcaagtcatatgttgaagtctacggtcaatacgtggagga

SEQ ID NO: 3910 - DNA, 302 bp, Zea mays
  Clone ID: LIB3116-026-P1-K2-G11
gaggatatcaaagaggtgcattttgttctgttttcggacgacctttacaatatatggcgcgagactgcccagcagttgctatcacagtttgagaaatgaatggtccattggcagtttgctagcagttgcccagcagtcgttgtctagtgttgagagtgagcgccataggcagtttgcctggtgtaataaaaatgggtgtatcagacaacgtttaaatcttgatgaaaccgtgtattgcacctgtggtataatgctgaatgagtaaagtttggcgataaaaaaaaaaaaatttaatataattg

SEQ ID NO: 3911 - DNA, 85 bp, Zea mays
  Clone ID: LIB3116-026-P1-K2-H10
cccacgcttccgaaaaaaaaaaaaatatttttttttaaaaaaaataaaaaaaaaaataaaagaaaaaaataaaaaaaatgggggg

SEQ ID NO: 3912 - DNA, 169 bp, Zea mays
  Clone ID: LIB3116-026-P1-K2-H5
ccggaattccctgtctccgacccacgcgaccctgtttggaaaacgaaggctgaacaaaaaggtgataaataccaagtgagtgatgtataccccttatgcacaaaatcgatggatcttcgactctaggagttgagagatgcaattagtattgtctagttctagatcgcga

SEQ ID NO: 3913 - DNA, 158 bp, Zea mays
  Clone ID: LIB3116-026-P1-K2-H6
aaaaaccgggccgacccaacgctccggggacgcgtttggtcgccaaaaaggtgttaatctccaaacgcgtgatgtataccccttatgcacaaaatcgatggatcttcgactctaggagttgagagatgcaattagtattgcctagttctagatcgcga

SEQ ID NO: 3914 - DNA, 111 bp, Zea mays
  Clone ID: LIB3116-027-P1-K1-A11
ccggcccggaattccgggcggccccacccttccttatagggttttgttattaccccatgaagcttttattggcttcgattgatattgggagcggggttgctggttcccttg

SEQ ID NO: 3915 - DNA, 150 bp, Zea mays
  Clone ID: LIB3116-027-P1-K1-A4
gaaccccccctttaccggccctttaaccccgccggttttgttgtttccccccatctttcccgttacatttgccagcgccttacccccctttcttttcgtttttttcccttcctttttccacactttccccgtttttccccttaaattttt

SEQ ID NO: 3916 - DNA, 450 bp, Zea mays
  Clone ID: LIB3116-027-P1-K1-A6
ccaacccttccgaaaaaaaaaaaaaaaaatttttatttaaaaaaaaaaaaaaaaaaaaaaaggaggaaaaaaaataaataaagaggagggaaaaaaaaaaaaaaaaaaaaaaaatttataaaaaattatattaaataataaaattattaattaattatttattaaatatatattattaaattttaaaatttaataaaaaattgttatttttttttgttttttatattaataccattatcccaatctttgatttatcattttattgttttttttttattcttctttttttatatatttttattttttttttattaatatgtttttgtttaattttttttttttttttatttttttattatttttttatgtctttttttctttttttatttttttttttatataatttatatttttttctttcttttttttttttttttttttataattatt

SEQ ID NO: 3917 - DNA, 203 bp, Zea mays
  Clone ID: LIB3116-027-P1-K1-A8
acacccttccgcccttgcttaaaaagtaatcgaacttttctttggcctctttacagtaatatagagcccaggtttctaaataaataagctgggtatatatatatttcccccccccccctaattttttttactaaaattgtaaaattaaaaaaaaaaataaaaaaaagggcctttcctttttaaagtatccaatttaactaacc

SEQ ID NO: 3918 - DNA, 234 bp, Zea mays
  Clone ID: LIB3116-027-P1-K1-A9
acacccttccgcgacacccttggccgaacccttggtcttactcttggccgaacccttggccgaacccttggggccatattaactgaagggacgaaactgataacagtaaatcccaacaccaaggtcttgcaggcaatgcagttaataacaaaaaaccgcttaaaaaacatcccggtaatcaacggaccgggaatcctgggaatggtttcaatcggcaacttcttccccccgttg

SEQ ID NO: 3919 - DNA, 354 bp, Zea mays
  Clone ID: LIB3116-027-P1-K1-B2
gaagaagccaccgccgcttaatcctggaagccgccgtcttgttttccgggctcgcggttgcaagggccagccccggaacctggtgggtgccggggtgggccatccggaaaaaccggttcccaagttgccgttggtccgtgaccagccggacctggggaatggggccgggcttcccgtggccggagctgaaaaggaaatgctgccggaggctggcggccatcccggcgtactgccggggcacggggctgagcatcctaatggacggggcgatcccgccgggcccggacgcccagttgaagggccgcctaaaggacctgccggcctgcccgcggaaggtgcaaaggggattcgccg

SEQ ID NO: 3920 - DNA, 382 bp, Zea mays
  Clone ID: LIB3116-027-P1-K1-B7
acacccttccaagccgggcaggacccccgaccactaaacagtgaaattccacttgtgccttcaaaccaattgttgttccttaaaccaattggggtaattttggggggttaaaatcggaaggcccttcaacaggccctttgttgttgaagaagagttcctcaggaaattccaggagtttccgtttcaattaaactttaagttggcgatggtgcacgcgtggttaatggttgccggccgtgcccttagcaccaaaggaaccttccacaccaaggttggccatggggggacgatgccccagggcttggttgttgtggatgcaacgcacttgtacccgggcttaagttacataaccgtaaaagactacttggacgttttccttccc

SEQ ID NO: 3921 - DNA, 391 bp, Zea mays
  Clone ID: LIB3116-027-P1-K1-C5
agccttccgggcattcttgttaaagccgtcaatggggccccccgtgccggaggccaaggccagggccacccgggaccagttggccggttccagggtaaagttcttcaaccgccggatccccccttccgggcccggaataatgttcttttccggcggccattcggaggtggaggcaacccaaaacttaaacgccttaaacaaggggccaaaccgggggaacgtgtccttttcttacgcccgggcgctgaaaaaaacctgcttaaaaacctggggcggccagccgaccagggtaaaggcggcccagaacccgctgttgttgcccgcaagggccaactccttggcgcagttcggcaggtccacttccaacggcaaggccgccagggccaaggag

SEQ ID NO: 3922 - DNA, 184 bp, Zea mays
  Clone ID: LIB3116-027-P1-K1-C8
ccacacccttccgaaaccgggaggttgttgatccttgtaaatggccagccttatggaactcggttgtaaattttagggtggataaaaggattccatgcctttaatgcaaagattaaattaaacatgaaactgttgaactgggtaaggggggaaacaacttttgaccacaggagtccggggtttc

SEQ ID NO: 3923 - DNA, 365 bp, Zea mays
  Clone ID: LIB3116-027-P1-K1-E3
aggcttccgacttagttttagccaacccttccgaaattccttgtccttggggtccaactttgtttggggcaccaagcctgcttggggtaggcctgggccattattgtttacgggacctggtgccgttgcctgtagttgggtgctaatccaatctgtggtaattcctgttggggtttttttggtaatatccgaatgggggtccatatttttttactggtcccttagggcatccaccgggttgttggcagagggaagaagaattgtacccggtggagctgaagatacctacgggttggaaaaaatccattggggatctacggcggccctttttgtaaagggcataacttttttgggtggggtttagc

SEQ ID NO: 3924 - DNA, 373 bp, Zea mays
  Clone ID: LIB3116-027-P1-K1-E9
acccttccggaaaaggccttttccaagtgaatcattttccttggcggttcttagccttttgtaacggggagggttaaacctgttgcggggaaaatttaatccattttttgttggcagggttccattttttgttgttgttgaaaaatttccagcaccaccaaaggcagttccttttttattccttagagggaccccagggacctgttatttcgtccaattgaccaggggtcttaacggaaggaacctgcccgccattttactgcaaagattgttcctgtttcaaccaaatttgaagatccttccattgaaggggggcgtggtaggtttgccatgtaaccaaccaccaggccacctgcagtggaaattgccaaac

SEQ ID NO: 3925 - DNA, 450 bp, Zea mays
  Clone ID: LIB3116-027-P1-K1-F1
ggggggccccacgcttccaaaaaaaaaaaaaaaaaaaaaaaaaggggcggccgttttaggggtcccaggtttccttccgggggcttgcaacgtaatagtttggttttagtgcaacctaaattaaattaactggccgtggtttaccaccgtcgggcctggaaaacccttggcgttcccaaacttaatcgcttggcagaacatccccttttggccggttggcgtattaccaaaagggcccgaaccgttcgcctttccaaccagttgcccagcctgattggcaattggacccccccctgtagcggcccttaaagcccggcggttgtgggggttccccccagcttacccgttccattggccagcgccttagcgcccgttcttttggtttttttcctttcttttttggccacgttggccggttttccccgtaaggttttaaatggggggttcctt

SEQ ID NO: 3926 - DNA, 436 bp, Zea mays
  Clone ID: LIB3116-027-P1-K1-F3
acacccttccgcgaccccttggccgaccccttggggttaattcctttttgagacaaattttaaattttggggaaaggtttgttgaactggggagggtccactttaactgaaatttgttaccaatcatggaaagaaatgtaactgtttcctttttgttttttttggacctccgttgaaacccaatctttttttttttttggttccctaatggcctttaaaccccgttgaacccggccttttttaaaaaaaaaaaaaaaaaaaaaaaaggggcggccaatataaaggatcaaaaatttacttacccttgaatgcgaagggggggggtattaattaatgggggcggacctttttaaaggtcccagtttttttaccccttctttgcaaggtaaaaccttttttttgccgaccccaaattcaattgcatggcccccctttt

SEQ ID NO: 3927 - DNA, 401 bp, Zea mays
  Clone ID: LIB3116-027-P1-K1-F7
acacccttccgcgacacccttggcccggggcccaccttggctaaaataaagccgaaggctttgttcgggcaaggcaagttaaaaaaggtcccgggccaaataaccttggccacaatcgtaacttacatgatcttgggcttcctggtcgggtcctccgtttaccttgcttacaggtcctgttggccaggcacaggaccaccggaggcattggccccccaggggaactgatcccccgccgactgcttggttgatctcgctgtggtggattaatccggttggggtaaaatttttggttgttgctgcttaccaattggggtttttggaccttgattaggttgtttgttgatccggttccaccgtacccgttgttttttatgtgaaattttttccttttatttaat

SEQ ID NO: 3928 - DNA, 443 bp, Zea mays
  Clone ID: LIB3116-027-P1-K1-F8
acacccttccgaaaaaaaaaaaaaaaaaaaaaaaaaaaaaaataaaaaaaaaaaaaagggccgcccgttgtaggggatcaaacttaactggcggggccttccaacttaatactttttttatagttcaaccaaaattaaattaattgccctccttttaaaaacttcttacctggaaaacccttgcctttcccaaattaaatccctttccacaaaatccccttttccccagttgccttattaccaaaaagccccgaaccaatcccctttccaaacatttccccaccctaattgccaattggaaccccccttttaccggcgcataaaccccgccttttttttttttaccccccagctttcccttttaatttgcaagtccctaatcccccgttctttttctttttttccttttcttttttcccaactttctccgtttttccctttaa

SEQ ID NO: 3929 - DNA, 314 bp, Zea mays
  Clone ID: LIB3116-027-P1-K1-F9
acacccttccggaacctaattaagaaggtaaaggtcttgatccggaggttgccacccaaaaaaaacacgcaagggtaaggttccacaagcgatcgcagccttccttcctgtgtcaactgaaaggttaagtttgtaaggttttgaggtttattgttgtttggatcccaattttgtttcttgtttccagtttttgtccactgtttaggtttagccatcctggggaactgtgcttctttttgaccaacacagggtgtggcatgtcctgaatttaatgccgtgttaatgcatccaactccatttatttttttgtgggc

SEQ ID NO: 3930 - DNA, 355 bp, Zea mays
  Clone ID: LIB3116-028-P1-K1-C3
ggcgtccgttttttcaagttccaaagggggccatcgcgttggcctggtaatcttgtccaaacttccgggaaagcgtccttttgatcagggaatgggccccccggcctagctggttggttgaaggcaccagccgaccaccaaacgatggcgcacgcggccaattaaacagcataaggttaaggcccggttgccgtcgttaagcgcccgggccaccgaaaacttgaaagcaagggaaatggtggccacgcgttccccggcttgttgggccgccgggtccttttccaagtcgtccaggcccaaggcgtccaggccgccggccacgttttacggcaggtcgttccggtggaatacggtc

SEQ ID NO: 3931 - DNA, 438 bp, Zea mays
  Clone ID: LIB3116-028-P1-K1-C6
gttgaagaaggaaggtccggggttggaagggttatttttcgccggatttcccattgattgggaaaattgggtttccctgccgcgtcctttttaacctttaactttttagggatttcttcagtttttaaattaaaaggggatttgtccaaccccaatttccatttaatttttaatttaaattaattttaatgtaataagctttaagagaggtgtccaccatttggttcctcactcgggttattacctgggcccgggttgggggaggcagaaaaaattaaagggaccattttgtttggaaaaaaaattgaggaaaaatagttccttacctcattttaaccataaatttgtcgtcgccattcgttttaaaatgcgtccgaaattatttttttttttttttaattaattaaaaaaattattaatttaaggtcccacttttta

SEQ ID NO: 3932 - DNA, 527 bp, Zea mays
  Clone ID: LIB3116-028-P1-K1-C8-F2A
gcgcctcgcgcggcgaccacccgattcgaagcgtgcggagagaccgaagaagcgggagagatggctcgtaccaagcagactgctcgcaagtccacgggagggaaggctcccaggaagcagcttgccaccaaggctgcccgtaagggtggcgccaccactggtggagtgaagaagcctcaccgctaccgccctggaactgttgccctccgtgagatccgcaagtatcagaagagcactgagctgctgatcaggaagctgcccttccagaggctcgtcagggaaattgcacaggacttcaaaactgatttgcgtttccagagccatgcggtgcttgccctccaggaggctgctgaggcataccttgttggcctgtttgaggacaccaacctgtgcgccattcatgctaagcgtgtgaccatcatgccaaaggacattcagctggcaaggaggatccgcggcgagagggcctaatcgccaccttaaacatcgtgacaaaaacatgaagtcctggggttattgttaatcta

SEQ ID NO: 3933 - DNA, 517 bp, Zea mays
  Clone ID: LIB3116-028-P1-K1-C8-R2A
acacgcactgtaacacaattcttgacattaacgaacaaatcggccacagcattgcgcgcaaggtccagcagcgcacataacactgctagtccagactgtcagcgcatagttaacttaagtattcgaccctagcaataacaccagcaaaggtagcagcaacagtagcagaagagaaacttgcgatccacaaaacaaaccctactcatatgtccttacaatggcaccagattaacaataaccccaggacttcatgtttttgtcacgatgtttgaggtggcgattaggccctctcgccgcggatcctccttgccagctgaatgtcctttggcatgatggtcacacgcttagcatggatggcgcacaggttggtgtcctcaaacaggccaacaaggtatgcctcagcagccttctggagggcaagcaccgcatggctcttgaaacgcaaatcagttttgaagtcctgtgcaatttccctgacgagcctctgggagggcagcttcctgatcagcagctcagt

SEQ ID NO: 3934 - DNA, 272 bp, Zea mays
  Clone ID: LIB3116-028-P1-K1-D1
gtccgccgccctttttttttttttttctttctttttaaatttatggagataaacctcaatcaatttatggtttttttttaggaaacacaggccgaaataagggccccatattcgagtccatttaatttgtaattaaaaaaatggcacctccaacattgggttgttcccttaccaaaccagggtttttaaaaaaaaactggttgtttggcaccaatttttgttcttttagaaaggcaccacccaatggtttagccccttttaggggataaagt

SEQ ID NO: 3935 - DNA, 413 bp, Zea mays
  Clone ID: LIB3116-028-P1-K1-D11
ccaacccttccgaaaaaaaaaaaaaagggatcgggggagccaaatgaatcaaaggattaatgtttggttcgggaggggatcttaaaaatggtaaacttaataccaggatattttattttaattaaaggattaattagatattcgaaaccagaggattttaagtcctattcgaaattcggaggaatggcttaaggggccctttgaccacctcgaaaaagctcgttttcgattccagaaggtcgacctggaaccagatgagtttcgattgaatggttcctttgaattggaccgggaaaaagaaaattggattaatgctccttttattagttgggaccatttagaaaggtttaaaaccgaaccctttatttttgaaaaccaaagggcgatgaataaggtccgccaccgggttttcc

SEQ ID NO: 3936 - DNA, 386 bp, Zea mays
  Clone ID: LIB3116-028-P1-K1-E7
gccggttggggcggggcctttactggcccttgcccccggttttgcggcggttgcggtcggagcaagccagccccggcaggaggttaactttcaattacaacccgctaagttaccccctaaacttcaacaacggccgggccgcccccgcccgggccccggccggggccgactttgtctttgcccccggcaacaacaaccccctacggtaaatcggggtccaacaatccgttgccaaaagccaaatggggttttttttccttgttccggaccccgttggcttttttcaactctcctggggtctggctttttcgataaataggagtgggtgtaatgaaaaaaaaggaagttggtaaaaaaaaaaaaaaaggccggcccttttaaaggat

SEQ ID NO: 3937 - DNA, 181 bp, Zea mays
  Clone ID: LIB3116-028-P1-K1-E8
gaatcccggggcggaccacacgcgtccgccacacccgtccgggatcgatatcaattaatttttaagcggtggtttcctgtttggaactcggccgatctgtcaatgtttacatgttttcgctttaaaacaacaacttttgttacgactccgtttttttgcatgctactagctgatggatttt

SEQ ID NO: 3938 - DNA, 321 bp, Zea mays
  Clone ID: LIB3116-028-P1-K1-F7
actgacccgcctttaagtcaagaatcacaagttggacaaccggggcttttgttggccgcccgcccggaccaaggttggggggttggggccccaagggcccgggccattggttaagcccgcccggccgacccgccggggcgggccgcctaaaacttcctttccaaacggccggtttgctgaatcctttgcggacaatttaaaacgcgtcggggcattgtaggtggcaaaggggcctttgctgcccacgtctatggtgatccagcccgtggtggtacggtttcgttttaaaaaaaaaaaaaaaaaaaaaaagggtggcctttt

SEQ ID NO: 3939 - DNA, 330 bp, Zea mays
  Clone ID: LIB3116-028-P1-K1-H3
cggggcggaccacacccttccggtcaacggtccataaggtaatgtggtccaggttgaaaggccaagactcgaaaccagttcgggggaggcgtttttaatcgactgagggctaaggaatgtaccttcctggtttttgtccattagtggaagcggaggctttaaagggggtaaagatggtttaataagggtttttaatctgccccgatgggtttggttttgggcttttaacgattaattggggaagcccatgtttttttagtccaggaactgttagtaaatttttaggcttttaattaagcccgacttttaaaacctaaacgtccgtttgtg

SEQ ID NO: 3940 - DNA, 352 bp, Zea mays
  Clone ID: LIB3116-030-P1-K1-A10
gttgacacagcctaaaggataatgggaccagaatgaaggagggccagaacgccattttttacataattgttaagagcaagaaggttgtggaaaactcccggttctttgagaagttgaaaaaaaggggttttgaggggctgttaatgggggatgccattgccaggttttttatgggccagttgaaggagtttgggggcaagaagttggtttttgccaccaaggagggcctgaagttggacaagagtgaggatgaaaagaaccccaggggggagctaagggggaagtttgggggcctttgcaaggtaataaaggaggggctggccaacaaggtggaaaagggtggtggtttcct

SEQ ID NO: 3941 - DNA, 371 bp, Zea mays
  Clone ID: LIB3116-030-P1-K1-A6
agccttccgccaacccttccggccccaagggccaatatttttaagttgccattgccggcccagcttacccaaccggttgtctttaataggttggggggccagttccacctgccctcgatcatttttgaaggtgtccggccccgaaccatatccccatttgtttaatctaatgaaaggggttttgccacagggacctccttgccccaaagccttttggccccttcaatgtttgttagcggtggcataaatgtccaagtgttccggcccccgttttttgctaatgctcctgctaagaagggaggcaggacctccatgatcgatttaatgatggccgtgttttaagcttttttttcaaaaactgttgtttttcc

SEQ ID NO: 3942 - DNA, 418 bp, Zea mays
  unsure at all n locations
  Clone ID: LIB3116-030-P1-K1-A9
ccaacccttccggccgaaccccccttaaatttttttttccaacaggtttttaccctgggcggacagccccggttattgtggggaaatttaatctnaatgggattagatcattgcaattgttgtttttaaacaagaaatgcttattaagcccaagtaataacttcgctttgactacttccttgccttttgaccaaaccgcccgtcgccaaaaaaaaaaaaaaaaaaaataaaaaaaaaaaaaaaaaaaaaaaaaaaaaaaaaaaaaaaaaaaaaaaaaaggggccgccccttttaaagattcaaagttatcttccccttccttccaacttaataatttttttttggtttaccttaaattaaattaattgcccgtcttttaaaaacttcttaattggaaaaaccttggcttacccaaatt

SEQ ID NO: 3943 - DNA, 161 bp, Zea mays
  Clone ID: LIB3116-030-P1-K1-C12
taattttcatttatatttgtttttctttatgtgagatttgcgtggtttattccttatatataatttttttaatatgtatatttttttgttttttatattttttttctttttctacccttatttttcttttttttttgttatatttatgttttttttgtttt

SEQ ID NO: 3944 - DNA, 392 bp, Zea mays
  Clone ID: LIB3116-030-P1-K1-D9
accccacaaagttccaactttgtaaattactatcggggccaaaaaacctttcccctacaaggtgtttttccaagacctaacgggggaaccgttcaataacaaataatttccctggcattccggactagagccttcatgccaggccctgggccggccccaagtatttttttttttgtggaacaactttatcaataatggacaagttttttggacatgttgcgtttttcaaaggccaaacacttgtcttccccgtggaaaacgggatttttcccaaatggttaatagtttcttaagaacgttaatctaacgaaggaattgtcaagattcttgttcattatcttccctgtttgctctgttagtgttttattgaactttttttttaaattgttttt

SEQ ID NO: 3945 - DNA, 360 bp, Zea mays
  Clone ID: LIB3116-030-P1-K1-E7
ccaacccgtccggccaggataacctgcatgacttttccccggaactgcttgcgaagggcccggaccttaatcggtttcgggctaatcgcttgaatggggccgtccagcgtcccggccataaacggaaacagcttaacggggttttttttttccagcatcggccagaacctggccaatttcccaacgcccccgcccgtaacttccaagttttggctggggttagggacgtggcacctgggcctgttaatcgggctaaccttcggccagatcggattcaagggcaggaccgaggactacttcaagaagggaagcggttaaaatcctatccataatccctggtgctgccctgcgttgcgttgc

SEQ ID NO: 3946 - DNA, 330 bp, Zea mays
  Clone ID: LIB3116-030-P1-K1-E9
acacccttccgcgacacccttgggggccggttcgcggcgaaaatccggaacccgccaaaccccccccgcgttgggttcgtaaccttgaattcgggggaggccgagaaccccccttacaactgggccgcccggcccttgaacggcccgttggcaagaacaaatttcccggggttggcaacaacttccggccgtccggggccaacatgcaattccggttcaaccgtcaagtcttcaagggaccccggacccggggacccaaaggcaagggcgggccattgtggccgtcataattcaaaaccctatattccccaacggaaggggcggcaaaca

SEQ ID NO: 3947 - DNA, 457 bp, Zea mays
  unsure at all n locations
  Clone ID: LIB3116-030-P1-K1-G12
aaaaccccgggccgaccaacccttccgaaaaaaaaaaaaaataaaaaaaaaattttttttaaaaaaaaaaaaaaaaaaaanggcggcccggtttaaaaaaccaaagttgccgtccccaaccttccaacttaatacttttttaatatttcaacctaaatcaaattaattgcccttcttttaacaccttcttacctttaaaacccctgccttacccaaactaaatccctttccacaaaatccccttttccccagtttccttataaccaaaaagcccccaaccaatcccctttccaaacatttccccaccctaattgccaaatggaccccccccttaaccgccccattaaccccgccgttttttttgtttcctcccactttacccttatcatttccaattcccttacccccccttccttttctttttttcccttcctttttacccactttcccctttttt

SEQ ID NO: 3948 - DNA, 112 bp, Zea mays
  Clone ID: LIB3116-030-P1-K1-G6
ccggggcggcgccaagccttccacttagttttaaaccgcaggcggccgttcgttttaaaggatccaagtttacttccccttccgggcgacttattagtttttttgtggggta

SEQ ID NO: 3949 - DNA, 401 bp, Zea mays
  unsure at all n locations
  Clone ID: LIB3116-031-P1-K1-B11
atctgctggtctgaatgtaaaccaagtccnttcatggtgtcttttcgctggactgggtttgcatgcataccaacaggggtcgggcatgattttggcgatggtgtctcctgtcactcattctgtgggcaactgtgttaaacgtgttgtggtcattgtaacatcagtgctgttcttcaggacacctgtttctcctatcaactctctcggtactgcgattgcacttgccggagttttcctgtactcacagctcaagcgacttatgcccaagccgaagacggcttaaatagggattgaattttccatctctttgtgttaatggagttaaacacttctatgtttcaggtgactgcattttaaaagatttgtgctttttaacaataaaatattccttattatttcat

SEQ ID NO: 3950 - DNA, 74 bp, Zea mays
  Clone ID: LIB3116-031-P1-K1-B9
tcttctcccgttcttttttctttttttacccttttttttcttatctactgtccgcctcttttcctccttaaagc

SEQ ID NO: 3951 - DNA, 276 bp, Zea mays
  Clone ID: LIB3116-031-P1-K1-C11
ttagttctagatcgcgcggtcaagttatctttttcgctaccgggatgtttaccctagtccggagggtttatcttcgttcgtgtcgtgtttgttgttgcccatctgtgtttttgattgcaaggtcgctctgtgtcagttgttagtgctgtgttcatcctcggtttcagcagacccatgcatcaaacagcatggactgcggatcgatggatgctgttacccccgtcaggctttattctaagttaatcttaaggaaaaaatggtgcttcttggtgctgc

SEQ ID NO: 3952 - DNA, 393 bp, Zea mays
  Clone ID: LIB3116-031-P1-K1-D12
atctcgctactgaggtatatctatggttgcttttgccggtcgggaactagagctgctatggcctgctagatgggaggctgggacatgtgtctcacaatagatgaatgatcagaggggggttttggtgtatgcgcctttcgcggatgatgacgcatggtgggacagggaaaacagccttttcactcgccctgaagatgatctccgcgagtgatcgacagatggcgccgcctacggagatgacgtttctttcacctcccattcttttttaatatatcatagtcatatgatagaggatgtcttctcttcttcttcttcctcctccctatctatctctactgtattgactcggtcagatactaatttctgtgaatataacttatccatcattgctat

SEQ ID NO: 3953 - DNA, 304 bp, Zea mays
  unsure at all n locations
  Clone ID: LIB3116-031-P1-K1-D8
gaaaacgggcgggccgacgcgaccgcccacgcgnccggggccaattggaattcctttatggctgnggaaggcaaatcgacggagcgcgtgattaatgactacatcggcacggcaaaacaactccaggaggaggctgccgccttttaaaagtcttttaatagtgttgccaaacagctatttgtcagatgagctttgtcccatttcctcattagaagcatatcattcgatccattggggatctgtgaaccatgtacctgtttatgtaactggttaccagggttatccatctatctatctatctgtg

SEQ ID NO: 3954 - DNA, 253 bp, Zea mays
  Clone ID: LIB3116-031-P1-K1-F11
agaagatgaattaatgaggaaagtcattgagtttataacagttacctggtgtgcgaagtgagatgcattggaccgggcgcacgggttgctgagggtgtggtttgatatggttgaacctgaaagcaaccggtatttaaacatttttgcctggagttatgaacattattatgtaggatttgattttttatttgaagttgatgggttgtattttttttattattttttttttttaaattttttttttttctacatt

SEQ ID NO: 3955 - DNA, 424 bp, Zea mays
  Clone ID: LIB3116-032-P1-K1-A2
acgcgcgttccatatggcttcctgcaggatggcactcctccttggcttgctgctgctagtagtagcttcgcccgcgatcgctgatgacgactccggtatctactaccagctggctcttatgtggccaggagcatactgcgagcagaccagcgctgggtgctgcaagccgaccaccggcgtctcgccggcgcgcgacttctacataacgggcttcaccgtccttaacgcgaccaccgacgctgcagtgacgggatgcagcaacaaagttccttacgaccctaacctgattaccggcatccaaggcctgaatcagtactggagcaacatcaggtgccccagcaacaacgggcagagcagctggaagaacgcctggaagaaggccggcgcctgctccggcctcagcgagaaagactacttcgagact

SEQ ID NO: 3956 - DNA, 320 bp, Zea mays
  Clone ID: LIB3116-032-P1-K1-B10
acccgtatcaccacttctttaaccacctcgtcgttttgctctcccttatctcttccaacgctactttttttatgtggggagggacacaacccaccacttgtaaggaccagccatctagctcttgacccccacaaaaaatgtgtgctgatcacgcataaaccgattgatcatctagagcggatcacgatctcgctcctcgttctgtagacctctttgttggtacacctccacacacattcttccgtattaccatgcatcgctttagagcctgcactcagctcaatctctataaactaaactcataaccctgttcctttact

SEQ ID NO: 3957 - DNA, 442 bp, Zea mays
  Clone ID: LIB3116-032-P1-K1-B3
ggccgccctttttttttttttttttgaacacttttattccttggcgattgaacaatagttgacatcatggtacaaaccgaaaaccagcgtgcgctcacatgcatccggacacctaaaggtcaccggcggcgcctccctcacttgccggggacgaagttggtggcgtaggcccaagcgttgttgttgacggggtcggcaatgtggtcagcgaggttctcgagcgggcccttcccggtgacgatggcctggacgaagaatccgaacatggagaacatggcgaggcggccgttcttgagctccttgaccttgagctcggcgaaggcctcggggtcgtcggcgaggccgagcgggtcgaagctgccgccggggtagagcgggtcgacaacctcgccgagcgggccggcggcgatgcggtagccctcgacggcgcccatgagcacga

SEQ ID NO: 3958 - DNA, 420 bp, Zea mays
  Clone ID: LIB3116-032-P1-K1-B6
cccacgcgtccgcggacgcgtgggggagcgttttttccaccttaacaaagttaagcttcccatggtgtctagaggagcttgagggtgagcgcaacgcgcaggggcggctgccaccttacatccatggataccgggtcatgcaacaaagcggcagcgccaccaccaccacgcaatatcgagaagaaccagcaggtcgagaaggaaccgatcgaggagaagccgaacgcggcggcgcaggtcgagaagaaaccgatcgagaagaagctcaacaccattattcgctgcggcacaagagattaatatctcctcaatcctcattcgtctcggcgattgatgcatccattgttccatcgatatataatagatcatatatgatacggtcgactttatacgcgttctgtagctataatcggtggtttg

SEQ ID NO: 3959 - DNA, 89 bp, Zea mays
  Clone ID: LIB3116-032-P1-K1-C3
cccacgcgtccgcccacgcgtccgaaaaaatttttttaaaaaaaaaaaaaaaaaaaaaaaaggaggggaaaaaaaaaaaaaaaagaagg

SEQ ID NO: 3960 - DNA, 322 bp, Zea mays
  Clone ID: LIB3116-032-P1-K1-F4
gccgtgtccacgctcatggtagactcgctcatgctctcgttccacggccggggcaaggccaagaggagcgctgctgcggtcacgcaccataatcatggaggccaataccatgacagccctccggtgcacgggcacgggcacgggcatctagacatgagtgagggtgagacggacgtcgaggccggcgtggcgcagcagctttgcaggaaccgtgtcattgttcaggtcctggagatgggcatcgtggtgcactcggtggtgatcggcctcagcatgggcgcgtcgcagaacgtgtgcaccatccggccgctcgtggcggcgc

SEQ ID NO: 3961 - DNA, 403 bp, Zea mays
  Clone ID: LIB3116-032-P1-K1-H3
cccacgcgtccgggtctgggtcgctcgctactttcttgagaggatcacggagatcgccggtgtggtggtgacgttcgacccgaagccgatcccgggcgactggaacggcgccggcgcgcacaccaactacagcacggagtcgatgaggaaggagggcgggtacgaggtgatcaaggcggccatcgagaagctgaagctgcggcacagggagcacatcgcggcctacggcgagggcaacgagcgccggctcaccggcaggcacgagaccgccgacatcaacacgttcagctggggcgtggccaaccgcggcgcgtcggtgcgcgtgggccgggagacggagcagaacggcaagggctacttcgaggaccgccgcccggcgtccaacatggacccctacgtggtc

SEQ ID NO: 3962 - DNA, 249 bp, Zea mays
  Clone ID: LIB3116-032-P1-K1-H4
cccacgcgtccgccccaaatgaggagttgaacttattattagcattttgaggagtgctaccacggatgcatcgtcaggttgatggccgatatatatgaaacttcacattttttttggtggggaaggactgctgagtagactgtcaatgatggaatgctcgtggtgcgagtgcgatgcatggtgtacttgtactatgttgtaaccagtgtaaaaaggggatactcgttagatgttatgccatgttctctg

SEQ ID NO: 3963 - DNA, 205 bp, Zea mays
  Clone ID: LIB3116-033-P1-K1-A1
tacgtcgattcccggtcgaccacgcgcgactagttctagacgcgagcggcgcctttttttttttttatggatgtgatcacaacttacgtaaagattgtacggctaagcaagggtatgactttgttttgttaaattgtagaggttagtgggcagataactccctgcatgacagtcaaaaaggggaagtttagctgtacaaattggg

SEQ ID NO: 3964 - DNA, 273 bp, Zea mays
  Clone ID: LIB3116-033-P1-K1-A3
ggaccggaacacaagttttgatttattccaactcatcatccggaacatgggacccaatacaagggtcgatcagtgggggtttttgagatgaaccaaatttgttaaatcccccccagcaatttattgttgcccttgtccgaagggattttgagctcgttaatcctttttctgaggccctcccctttcttgttgccgcccatgagcctgtcgaggggggccttgatttcccctttttccaggtggtccccgggaaccttcgggcccacctttcaa

SEQ ID NO: 3965 - DNA, 273 bp, Zea mays
  Clone ID: LIB3116-033-P1-K1-C10
tcctgcattctacttcatacctcttctatattgttacctaaattcatttatcttccttcttttacaacatctttacttttataacccttacattacccaacttaatcttctttctttacattttccttttatctgtttttataatatctaataatttcgtactgatctccctttctaacattttctcatactttaatttccatattaactctctctctttatcttttcaattaatccttatctttttttttctatattcatacatttattttc

SEQ ID NO: 3966 - DNA, 290 bp, Zea mays
  Clone ID: LIB3116-033-P1-K1-C11
aaaataaaaaggaaaaaaaaaaaaattatattttaataaaaaaaataatatatatttgaggggtataatataaaaatatgggtagtataaaaaaaaaataaaataaatttggtctctttttttaaatataccatatttattatctctttatttaaaattataattattttttataattaatactataataaatacttttttctttttttttaaataatatttaatatatataataaatataatattatttatatttatcttgaaatatttattataattataattttata

SEQ ID NO: 3967 - DNA, 379 bp, Zea mays
  Clone ID: LIB3116-033-P1-K1-F1
cggacgcgtggacggacgcgtggtcacacatttattttcaacagctaagcctttcccacaagacggcgacatggctgaggaggagggcaaaaatgtggaggtggaggtcaccaaggagcccgaggcggcggcaaaggaggacgtatccgatgacaaggtcgtcatccccgcgaccgaccctccgccccgccgtcgtcggccgacgactccaaggccctggccatcgtcgagaaagttgcagatgaacctgctcccgagaagcctgcccctgcgaagcaagggtgctccaatgacagggatctcgctcttgcgagggtggaaacagagaagaggaactctttgatcaaagcttgggaagagaatgagatgacaaaagctg

SEQ ID NO: 3968 - DNA, 452 bp, Zea mays
  Clone ID: LIB3116-033-P1-K1-H4
acgcggacgcgtgggcgatctgttccccaacctttttattcgctccaccgtcctccactccgggggccgaatcgacccgccccgggccagatcaggagctgagggatggacgcgaacaggcgccagagtgggatccagcagttgctggctgcggagcaggaggctcagcaaattgtgaatgccgctagagctccaagtcagcgaggctcaggcaagcaaaagaggaggctgagcgggaaatagccgaataccgtgcccagatggaggctgagtttcagaggaaggttgcagagagcagcggcgactccggtgcaaacgtcaagcgtctcgaggaagaaacggcggcgaagatcgagcaactcacccagcaggccgcaagcatcttcccggatgtcattcagatgcttctgcggcatgtcaccaccgtcaagaactgaggagtgctgttcccg

SEQ ID NO: 3969 - DNA, 105 bp, Zea mays
  unsure at all n locations
  Clone ID: LIB3116-034-P1-K1-A10
aggccngagcccccaatatcaaaggaaatgatagcattttaatgtctcggggatatctaacagcaatacgcgggggactacttcgcactagtggtgagatcgcga

SEQ ID NO: 3970 - DNA, 127 bp, Zea mays
  Clone ID: LIB3116-034-P1-K1-B10
acggtggatagcttcgctgaatctccagattttgtttcttggaaagctcgaatccttaccaccggaaaaatcatgtaatatggcggccaactctgaaattaacccctattgcatatatatatgtatg

SEQ ID NO: 3971 - DNA, 352 bp, Zea mays
  unsure at all n locations
  Clone ID: LIB3116-034-P1-K1-C6
cggacgcgtgggcggacgcgtgggggaaggccttttgcagctaccaagtgacaaagccctgctgggtgatccatccttccgcccacttgttgacaaatacgcagcggacgaggacgctttctttgctgactacgccgaggcccacctgaagctttcagaattgggatttgctgaggcgtaacgaaccagaagagtgtggtggctgtcgccggccggccttgtgtttttgttgtctgcttttctcttgaacgaagatgtgatgaactcagctgaagatgtagtgtgtatgttgtcatggtttatttntctattttatttatctatctataatatctatcggagaaggtttgat

SEQ ID NO: 3972 - DNA, 439 bp, Zea mays
  Clone ID: LIB3116-034-P1-K1-C9
gtcaccggcaaggggcccttcgacaacctgctgcagcacctgtccgacccatggcacaacaccatcatccagaccctgtcgggttgagtcgacggtccatcaggtcatgtggtccgagctgaaaggccgagactcgaagacagttcgtgtgatgcgttcttaatcgactgagggctaaggaatgtgacgtactggtatatgtacattagttgaagcggaggctataaagggtgtagagattgtttcatcagtgtatatcatctgtcccgatgggttttgttttgtgcttttcacgattcattgtggaagcacatgtattattagtacaagaactgctagtagatatataggcttataattaagcacgacttctaaaaccctaacgtacgtatgtgaaagccccatatgatgggtaacaaaaggaaaatacaacattaca

SEQ ID NO: 3973 - DNA, 238 bp, Zea mays
  Clone ID: LIB3116-034-P1-K1-E7
aaaaaaaaaaaaaaaaaaattaaaaaaattttttttaaaaaaaaaaaaaaaaaaaaaaaaaggggaaaaaaaaaaaaaaagggggggggaaaaaaaaaaaaaaaaaaaaaaaaaaaaaaaaaaaaaaaaaaaaaaaaaaaaaaaaaaaaaaaaaaaaaaaaaaatggggcggcccttttaaagtatcaaattatcttaccccccccatgcaattaaaaacttttattaatgggccccc

SEQ ID NO: 3974 - DNA, 217 bp, Zea mays
  Clone ID: LIB3116-034-P1-K1-F5
cccacgcgtacgcttagttctagatcgcgagtggtttccctatttttttattcaattaattgggggttctatattatttagtggggctactttccccaaccaaaagcaatcatttatttccttttcctggggggtggaaaattaattaaagcttagatttatgggcaaaagatttcaaacgatacattataataaaaaagttttaagttcttacact

SEQ ID NO: 3975 - DNA, 259 bp, Zea mays
  Clone ID: LIB3116-034-P1-K1-F6
ctaggaaacctgacctaccttagtttgctagtactttcaaataatagatttagcggcccaattcgtgccatttacaaactccaaaacctaagtgttagactactgtatttgtatttatagtatgtctaatattggtagttagtccttgattgtaggcccttgattagaggcccttgattgtaggcatgtagggctgtgctttgccatgtgtgccacgacgcacagtctattcatactgtacatttccatggtatacaat

SEQ ID NO: 3976 - DNA, 218 bp, Zea mays
  Clone ID: LIB3116-034-P1-K1-H2
gggtgatcaagtacaacatgaggtccagagtttttaatttcagcatgggcaagcctcgcatgaagttcaacagcaaccagatgccagaaaagatatagaatgtacttatccaacgcccttaaaagaatggtttctctccattcgattaccgagcaagatgtatactctgcagtcccagatacgatccagagcattccagaattcatattacgcagatg

SEQ ID NO: 3977 - DNA, 607 bp, Zea mays
  Clone ID: LIB3116-025-P1-K2-B6.F2
acttactagatgcccaaatcgattaatactactatttacagcaagtcacgaaccatgtttaaagtaaactgcaccctctcaccaaaagcgcccctagattcaagggtaactgggcagtaacaagcatacatggtagctggacaagattacacagctagcgggtttaccctttcttgcaaacataacaatagtttagcttagttgctgacgccatgaacataggctagggtttaaccaacagggagcaatgatcacttgcatgagcgtgccattgctcgcgatcgatgggggcaggcacagcaaccatatggtacgcgtacgtcatgatccatcgaccctctccttatgcattgaggtggctcagcatccatggtggcagacctgcgatgcggagctgcggttgcgcctgccccggcagtggctgctgctgcgccgccgcagccagctcttcacctctatctcccattgtcaacggcgggaagcagatgttgtgtggaggcggcaatccctgctgatccttgcctcatcatgaagaggacgatgatgagcttgtctgggcctgggcatgtgtctgctggtcccactgcacctgctgctgccggctcgc

SEQ ID NO: 3978 - DNA, 693 bp, Zea mays
  unsure at all n locations
  Clone ID: LIB3116-025-P1-K2-B6.R2
ccgagtctatttttctgagctacagnaanaagggagnaggtcactgcaggnagggagaacaagngctctgcagnaagggaannnttgcggagaaggcagaaggggccgtcgcgagccccggcagcnnagcaggtgcccagtgggacccagcagnaccacatgnncccaggcccagnaccaagctnncatcatcgtccttccttttcatgaatgagnngcaggatnncagcagggattgggccgcctccacacccaacatctnngcttcccgccgttgacaatggngagatagaggtgnaagagctggctgcggncggcgcagcagcagccactgccggggcaggcgcaaccgcagctccgcatcgcaggtctgccaccatggatgctgagccacctcaatgcataaggagagggtcgatggatcatgacgtacgcgtaccatatggttgctgtgcctgcccccatcgatcgcgagcaatggcacgctcatgcaagtgatcattgctccctgttggttaaaccctagcctatgttcatggcgtcagcaactaagctaaactattgttatgtttgcaagaaagggtaaacccgctagctgtgtaatcttgtccagctaccatgtatgcttgttactgcccagttacccttgaatctaggggcgcttttggtgagagggtgcagtttactttaaac

SEQ ID NO: 3979 - DNA, 480 bp, Zea mays
  Clone ID: LIB3116-025-P1-K2-F8.F2
agtaaagctgtttttcactgcaaccgaatccaaaataacgaatacagaacaacgacgctaatacggcctattttttggtaactagacattcatcagatcctcggagatgatggctacgcgcgctcgccacggatgcggcgggcgagctggatgtccttgggcatgatggtgacacgcttggcgtggatggcgcaaaggttggtgtcctcgaaaaggccgacgaggtaggcctcggcggcctcctggagcgccagcacggcgtggctttggaaccggaggtctgtcttgaagtcctgcgcgatctcgcgcacaaggcgctggaagggcagcttgcggatcaggagctccgtgctcttctggtacttgcggatctcgcgcagcgccactgttccgggcctgtacctgtggggctttttcacgccgccggtcgttggcgccgacttcctcgccgccttggtggcgagctgcttgcggggggcc

SEQ ID NO: 3980 - DNA, 529 bp, Zea mays
  unsure at all n locations
  Clone ID: LIB3116-025-P1-K2-F8.R2
ccgggtcgaccccgcgttcgggccccccgcagcagctcgccaccaggcggcgaggaagtcggcgccgacgaccggcggcgtgaagaagccccacaggtacaggcccggaacagtggcgctgcgcgagatccgcaagtaccagaagagcacggagctcctgatccgcaagctgcccttccagcgcctggtgcgcgagatcgcgcaggacttcaagacagacctccggttccagagccacgccgtgctggcgctccaggaggccgccgaggcctacctcgtcggcctcttcgaggacaccaacctctgcgccatccacgccaagcgtgtcaccatcatgcccaaggacatccagctcgcccgccgcatccgtggcgagcgcgcgtagccatcatctccgaggatctgatgaatgtctagttaccaaaaaataggccgtattagcgtcgttgttctgtattcgttattttggattcggttgcagtgaaaaacagcttttctaagaaggatnnnactgaagatgaggatgaat

SEQ ID NO: 3981 - DNA, 53 bp, Zea mays
  unsure at all n locations
  Clone ID: LIB3116-018-P1-K1-F4.F1
agnatctagaactaggccacgcgtccgcccacggatccggctacaacaccagg

SEQ ID NO: 3982 - DNA, 485 bp, Zea mays
  Clone ID: LIB3116-017-P1-K1-G11-F1A
acatgcagtataaaaattgcatttatttttaatacagggaacaagtagacaccatggacactcattttttctacatgaaaatggaaaatctcctttattttgatctccggcctgcagtagggcataccacgtacgtccggcctacactcataggagcgacacgtacgtaattctctcagacgacgtaatatcagaaaagatcccgtgaaacccatttcctaaacatcgtttggcactccgtgggcttgtactccggtgcagtatcccagcgccctgcaaaatgacatccacacagataaacgacacacacatgtgatcgttgcgatgtttttgatatcctaaatttgataaactcattgcgcttaattgctgggaatcgaaaacatattgctatagaacttattagctataccttcacagttgcatatattaggttgcctgagttccttgtgaatctaggaagcaaattgattggtcaacgggaa

SEQ ID NO: 3983 - DNA, 494 bp, Zea mays
  unsure at all n locations
  Clone ID: LIB3116-017-P1-K1-G11-R1A
cagaanacggttcaggagagcctcggtgtccgcaagtatagcagtcctacgtgctcgatcgtgatggcacagttttttttttttttttctctctctctttttcttgaggaaacaaaagccaagattttcagtaaatttggtatcgaacacacactgaacatccctgcaacttttgttgttaagaggttgtttgtttaggactataatctgtctagattatataatccaacaaataatgtgttatttgctggattatataatctggacagattatattctcaaacaaacacccgctaattcttccaggggacaatcggagcgtggaaacgatgcaaccaggacatactttacaaccagaacgtccaaagtgtagtgccgtaccattcgaggctagccgcgaaagggtacagggcgctgatatacaggtaacttaactagtagcgatcgagcccaggaaagcaggtcgcaaaatttaccgcgtagtcgcttcgaat

SEQ ID NO: 3984 - DNA, 425 bp, Zea mays
  unsure at all n locations
  Clone ID: LIB3116-004-Q1-K1-G11-T7A
cggacgcgtgggcggacgcgtgggtgctggcgctggccctgctctactcggccgtgggagccgccgcggagttcggcatcctgggcgagcgcggcaactcgcacgtccgctggcctaaggtctgcaacgtctatggccgcttctgcgagcgcgccatggcggccgtcatcgtctccctcatcgccgcattcgccaacctcgtcctcctcatgctcaacatcctcaccatccacaagagctcttcctactactaagctagctactatactgtagagaagagaaaccatatacaatgcgagctagctactcatatatagctgttgctgcatgcatgcatggggattaactaaagtgatcgaccccaacttgttgnanaaaaaaaaccgataacacttgccagagccctaacgcccgatccttaaaat

SEQ ID NO: 3985 - DNA, 457 bp, Zea mays
  Clone ID: LIB3116-004-Q1-K2-E3-T7A
gcttgactacctcggcaacccgagcctgatccacgcgcagagtattctggccatctgggcgtgccaggtggtgctcatgggcgccgtcgaggggtaccgcatcgccggtggcccgctcggggaggtggtcgacccgctgtaccccggcggcagcttcgacccgctcgggctcgccgacgacccggaggcgttcgcggagctcaaggtcaaggagatcaagaacggccgcctcgccatgttctccatgttcggcttcttcgtgcaggccatcgtcaccggcaagggtcccgttgagaacctcgccgaccacctcgctgaccctgtcaacaacaacgcctgggcctacgctaccaacttcgtccccggcaagtgagcgagggcatatacatacttgtatgcgtgtaccgtagacatacgtattcgtatatgtactgcaggagatgtaccagtatttgtg

SEQ ID NO: 3986 - DNA, 576 bp, Zea mays
  unsure at all n locations
  Clone ID: LIB3116-006-Q1-K1-A12-T7A
cccacgcgtccgcggacgcgtgggatcctcccctgcgccgtttcttggtgacggcggaggcgctgcggcggagcaaggaggtgaactaccagctggtctccaagctcaaccagctgctctccaacgtgtcgaacggcaacgtgcctccgcaggccgggcccccgctctactacaaccagtcggggcctcccgtgccgctcctctgcagcccctacagcgccgacctctccgaccggccctgcgccgtcggcgaggtcaccgccgccgacgcgcagcaggtacgtacggtacggtacggcacgaacaaagaacctgtgcgtgcgttgttggcgagatgtctgacgtcgcgtgttcgtttcggtcgcaactcgcatcgcatcgcatctgcaggtctggcagcgctacgtgtgccgcgcggcggcggngtcgggccgggaagaggtgtgctcgacggcggggcgcctgacgccggcgatgtactcgcagatggtcgccgtggccggcctcagcgacgggctgaggcggcagtcccccgccctggccgacgtggcgagctgcgtgaccgtgcggcgcgcg

SEQ ID NO: 3987 - DNA, 600 bp, Zea mays
  Clone ID: LIB3116-017-P1-K1-G11-SP6A
gctggagcaggatcagcaactctttcaatggcctatgcagctgccttatttgcagatgcttgcctgagaggattgcgtggtgatgctgggataatagagtgctcttatgtggcttctcaggtcacagagttgcctttctttgcatccaaagtgcggctagggcgatgtggcattgaggagatcctaccacttggaccattaaatgagttcgagaggtctgtattccatactcgaacttacaactactcaggttcttgttgtgaattgaaagtcgcatgctctgcattattcaacggccatttcacacatgctttccgtcgagttatatatctcagcaaattagtttgttcagctacttttcgtctacaacaacaggttcatcttgcccactcatctgacccaccatgatttggatccgccaggttgtagtagttattaggctatggtcaacataccttgcatatggctgtgcaaaataatattctgcactgtagactgtactgttcacgtggtgaagtttgaaataagagatcggatgagtaaacgtgctagagatagccttactgacgataagtcattcttatgtctggttttcttctg

SEQ ID NO: 3988 - DNA, 175 bp, Zea mays
  Clone ID: LIB3116-017-P1-K1-G11-T7A
gaatcgccgacgcgaactttctattgttgtttcagtatattgaaaaaatttccgggaggtttcattacatatgttccacaacgggcgggcgaggggaggcggtatggaccgatcacggacggacagacctgctccaccattctgtggcggaggacttggttgcgggcgagcacct

SEQ ID NO: 3989 - DNA, 515 bp, Zea mays
  unsure at all n locations
  Clone ID: LIB3116-021-P1-K1-D8-T7A
cgcgaggaccgcatcggcgtctgcaagggcatcttccgcaccgacggcgtcgacgaggagcacgtcgtccagctggtcgacaccttccctggccagtccatcgacttcttcggcgcgctgcgtgcccgggtctacgacgacgaggtccgacggtgggtgagcgagaccggcgtcgagaacatcgccaggaagctcgtcaactccaaggagggcccgcccacgttcgagcagcccaagataacgatcgagaagctcttggagtacggacacatgctggtggcggagcaggagaacgtcaagcgtgtgcagcttgctgacaagtacctcaacgaggctgctcttggtgaagccaacgaggacgccatgaagactggctccttcttcaagtagaaagcaactctttgctattgctagctaggcgcgaggccggcataggatcgaggaggtgaatatatatattacttggatagttntgtaatatatatatatatattactgaaccaggacatgcatac

SEQ ID NO: 3990 - DNA, 663 bp, Zea mays
  Clone ID: LIB3116-025-P1-K1-C6-T7A
ggccgccggtgagggcgtacaggaagaacaccttccaggcggtagttgcggagacggccaagaaggccgagcagaagcagcagcagggaggcctgtacgtgaaggtgagcatggacggcgcgccctacctcaggaaggtggacctccggatgtacaagggctacagggagctcagggaggctctggacgcgctcttcaccaactccttctccgcggcggcagagggcggcggcgaccaccaccagcacgccatcgcttacgaggacaaggacggcgacctcatgctcgccggagacgtgccctgggatatgttcatctcttcgtgcaagaagctcaggataatgaagggctctgcctctgaggccaggtgatcgctgatccatacataaacagaggctacagacacgccacctggccacctgggaacgcggatccaagagcacacacggatcgtacgtgacgaggaaggagggaggagctgtgtggcttgagctctcaagtgttgtacaaaggcatgtttctttctgaacccaaaagggagaaagatgtatgaagcgtgtatataaaatcttagctagcagtttgttttcaaactgtgttttgtatgagcgatcgaaggcttgtaaaaaagaagaaaaaaagaaaagggaatgagaaaatgac

SEQ ID NO: 3991 - DNA, 378 bp, Zea mays
  Clone ID: LIB3116-004-Q1-K1-G11-F2A
aaaacaggggggggccaaccatttaagtaaatcccccaggcgggctggcaccaccagttataaaggagaacctgccccccatggaaaagggtttcttttctcaccggaaaaaaccctacctaaaaagaagaaaaaccttttggggggggggaggatgttgaccatgaggagaacaaggttgccaaagccggaaaaaaggaaaacaaaaacggcccccatggccccctccaaaaaccgccaaaaaacgttgaaaacctaagcccagggaacgggcaagttgcccccccccccaaaaaggccaaactccgggggggcccccacggccaagaaaagaagggcaagggccaacaccaaggcttccccccacccgtccgggac

SEQ ID NO: 3992 - DNA, 511 bp, Zea mays
  unsure at all n locations
  Clone ID: LIB3116-004-Q1-K1-G11-TAA
cccccccccccccccccccgggggggggggggggcgccccccccgncccgcccggggcccgccgcgcgccccccccccggccccccggggggggggcccgccccccggcccgggggggggccgccccgccgcgcgggggggggngcccgccccccgcccccccccccggggggggggggggccccccccccccccgcccccccgcccccccccgcgcggggcccccccccccccccccccccccccgggggccccccccccccccccccgcccccccggcccgcccccccccgcccccccccccccccccccccccccccgggcgcgcccccggcgcccccccccgccccccgccgccccccccccccccgccccgcgcgcgccgggggcgccccgcccccgccccccccccccccccccccgcgccccccgcgggccggccggcggcgcgcccccgccgcggcccccccccccccccccccccccccccccccccccccgccccccgccc

SEQ ID NO: 3993 - DNA, 352 bp, Zea mays
  Clone ID: LIB3116-004-Q1-K1-G11-TCA
cctttagttaatcccctgcatgcatgcagcaacagctatatatgagtagctagctcgcattgtatatggtttctcttctctacagtatagtagctagcttagtagtaggaagagctcttgtggatggtgaggatgttgagcatgaggaggacgaggttggcgaatgcggcgatgagggagacgatgacggccgccatggcgcgctcgcagaagcggccatagacgttgcagaccttaggccagcggacgtgcgagttgccgcgctcgcccaggatgccgaactccgcggcggctcccacggccgagtagagcagggccagcgccagcacccacgcgtccgcccacgcgtccg

SEQ ID NO: 3994 - DNA, 458 bp, Zea mays
  Clone ID: LIB3116-004-Q1-K2-E3-F2A
aaaaaaaaacgggaacatttcctgcagaacaaaaacaaaaacgtatgtttacggaccacccatacaagtatgtatatgccctccctaacttgccggggacaaagttggaagcgaaggcccaggctttgttgttaacagggtcagcgagggggtcggggaggttttaaaggggacccttgccggggacaagggcctgcacaaaaaacccaaacatggaaaacatggggagggggccgtttttgatctccttgaccttgagctccggaaacccctccgggtcgtcgggaaccccaagcgggtcaaagctgccgccggggaacagggggtcaaccacctccccgagggggccaccggggatggggaacccctggagggggccaataagcaccacctggcacccccaaagggccagaatgctttgcgcgtggaaaaggctcgggttgccaaggaattaaacc

SEQ ID NO: 3995 - DNA, 537 bp, Zea mays
  Clone ID: LIB3116-004-Q1-K2-E3-R2A
ctcaaggcggcgcgccccgagtggagccccgccgcgatgcgctccgcgatcatgaccacggcgcgcacccaggacaacacgggagcgcccatgcgcgaccacgatggcaaggaggccaacgccttcgcctacggcgccggcaacgtgcaccccaaccgcgccgtcgacccgggcctcgtgtacgacgccggccccgacgactacttcacattcctctgcgccatgggcatctccgcggcagacatgaagcggctcagcgccggcaagttcgcgtgcccagctaatagcgctaaggaggcgcccgccatggaggacctcaactacccgtccatcgtggtgccgtcgctgcgcggcacgcagacggtgacgcgacggctgaagaacgtcggccgtccggccaagtacctcgcgtcctggcgcgcgccggttgggatcaccatggaggtgaagccgagggtgcttgagttcagcaaggtcggtgaggaaaaggagttcaaggtgacggtgacgtcgcagcaggacaagctcgggatgggc

SEQ ID NO: 3996 - DNA, 350 bp, Zea mays
  Clone ID: LIB3116-004-Q1-K2-E3-TAA
ccctcggggggggggggggggctaaaaatttattgttggggcgggcgttttttttttttcgggctttcttgtgggttgtgtggggtttttttggaaccctttccgtgttgatttgcccttcccttaaatctctcttttggaaaatttcgagggggggggggggggggttttttatctttttctccccgaaccccccccggtttttggggggcccccccccggggaaaatggcctcgcggtttacccgggggtgcccctcctcccacggggccccccccttgatgttccccccctatgggccccttttctcctccttgggggcgcccttcgcgccggagttttttttttcg

SEQ ID NO: 3997 - DNA, 590 bp, Zea mays
  Clone ID: LIB3116-006-Q1-K1-A12-F2A
ggcgagcatcccggccgccgacgccgcgagcagcgcctggtacacccggcggctgtcccgccgcagcggggggcagccgcgctggcccaccgtccggaacgcgcgccgcacggtcacgcagctcgccacgtcggccagggcgggggactgccgcctcagcccgtcgctgaggccggccacggcgaccatctgcgagtacatcgccggcgtcaggcgccccgccgtcgagcacacctcttcccggcccgaccccgccgccgcgcggcacacgtagcgctgccagacctgcagatgcgatgcgatgcgagttgcgaccgaaacgaacacgcgacgtcagacatctcgccaacaacgcacgcacaggttctttgttcgtgccgtaccgtaccgtacgtacctgctgcgcgtcggcggcggtgacctcgccgacggcgcagggccggtcggagaggtcggcgctgtaggggctgcagaggagcggcacgggaggccccgactggttgtagtagagcgggggcccggcctgcggaggcacgttgccgttcgacacgttggagagcagctggttgagcttggagaccagctggtag

SEQ ID NO: 3998 - DNA, 485 bp, Zea mays
  Clone ID: LIB3116-006-Q1-K1-A12-R2A
cccacgcgtgcgcggacgcgtgggagcctgccctgcgccctacgtctactcgaccggggaggccgctgcggaggaccaaggacgtgaactaccacctggactccaacctcaaccagctgatcgccaacgaggcgaatggccacttgcctgcgcacgccgtgcccgcggtctactactaccatgatggggccttccgtgccgctcctctgcatcctgtacagcgtccacctctccgaccggagcctgcgccattagtgaggtcaccgccgtccacgcgcaacaagaacccacggaccgggacagctcgaacaaaaaacctgtgcgtgcgtggatgcctacatgggggacaactagtgtgatcgaccgccgcttctcgcatcgcatcgcatctgcaggtctggcagcgctacgtgtgccgcgcggcggcggggtcgggccggtaagagtgtgctcgacagcggggcgcctgacgccggcgatgtact

SEQ ID NO: 3999 - DNA, 546 bp, Zea mays
  Clone ID: LIB3116-017-P1-K1-G11-R2A
cgacgaaacggttcaggagagcctcggtgtccgcaaggtatagcagtcctacgtgctcgatcgtgcatgcacgcacagttttttttttttttttctctctctctttttcttgaggaaacaaaagccaagattttcagtaaatttggtatcgaacacacactgaacatccctgcaacttttgttgttaagaggttgtttgtttaggactataatctgtctagattatataatccaacaaataatgtgttatttgctggattatataatctggacagattatattctcaaacaaacacccgctaattcttccaggggacaatcggagcgtggaaacgatgcaaccaggacatactttacaaccagaacgtccaaagtgtagtgccgtaccattcgaggctagccgcgaaagggtacagggcgctgatatacaggtaacttaactagtagcgatcgagcccaggaaagcaggtcgcaaaatttaccgcgtagtcgttcgaataatacgttgatatgatggtagcaatacagtatctgcaaactggttgg

SEQ ID NO: 4000 - DNA, 644 bp, Zea mays
  unsure at all n locations
  Clone ID: LIB3116-017-P1-K1-G11-TAA
tgcatttatttttaatacagggnaacaagtagacaccatggacactcattttttctacatgaaaatggaaaatctcctttattttgatctccggcctgcagtagggcataccacgtacgtccggcctacactcataggagcgacacgtacgtaattctctcagacgacgtaatatcagagaggatcccgtgaaacccatttcctaaacatcgtttggcactccgtgggcttgtactccggtgcagtatgcccagcgccctgcaaaatgacatccacacagataaacgacacacacatgtgatcgttgcgatgtttttgatatcctaaatttgataaactcattgcgcttaattgctgggaatcgaaaacatattgctatagaacttattagctataccttcacagttgcatatattaggttgcctgagttccttgtgaatctaggaagcaaattgattggtcagcgggatattataatatataacagtagagaagcaaattgatgtgcaatttttcttaagatattcacacacacatatacacacatacatagtgagatttgtttgtggtgacactttagaacttagaaataatcaacattttagaagtaataatcacgtagaacgaacggtagagaagcatgt

SEQ ID NO: 4001 - DNA, 508 bp, Zea mays
  Clone ID: LIB3116-017-P1-K1-G11-TGA
caggggaacaagtaggacaccatgggacactccactttttttctacatggaaaatgggaaaaactcctttattttgatctccggcctgcagtagggcataccacgtacgtccggcctacactcataggagcgacacgtacgtaattctctcagacgacgtaatatcagagaggatcccgtgaaacccatttcctaaacatcgtttggcactccgtgggcttgtactccggggcagtatgcccagcgccctgcaaaatgacatccacacagataaacgacacacacatgtgatcgttgcgatgtttttgatatcctaaatttgataaactcattgcgcttaattgctgggaatcgaaaacatattggtatagaacttattagctataccttcacaggtgcatatattaaggtgcccgaattccttgggaaactaggaaacaaaatgattggtcaacgggattttattatatataacaagagaagaaaccaattgatgtgccatttttct

SEQ ID NO: 4002 - DNA, 380 bp, Zea mays
  Clone ID: LIB3116-021-P1-K1-D8-F2A
gtatgcatgtcctggttcagtaatatatatatatatattacaaaactatccaagtaatatatatattcacctcctcgatcctatgccggcctcgcgcctagctagcaatagcaaagagttgctttctacttgaagaaggagccagtcttcatggcgtcctcgttggcttcaccaagagcagcctcgttgaggtacttgtcagcaagctgcacacgcttgacgttctcctgctccgccaccagcatgtgtccgtactccaagagcttctcgatcgttatcttgggctgctcgaacgtgggcgggccctccttggagttgacgagcttcctggcgatgttctcgacgccggtctcgctcacccaccgtcggacctcgtcgtc

SEQ ID NO: 4003 - DNA, 602 bp, Zea mays
  unsure at all n locations
  Clone ID: LIB3116-021-P1-K1-D8-TCA
ccgccccccccccccccccccccccccccccccccccccccccccccccccccccccccccccccccccccccgccccccgcccccccccccccgggggggccccggcgcccccccccggcccccccccccccgcccgccccgccccccccgcggcgggggggngccccccccccgcgccccccgcgccggcgncccccccggcccccggcccccccccccccgcccgccccggcgaccccccccccccccccgcgcccccccccgccccccccccccggcgcngcgcnccccgaccgccggncccgccgccccgccgggcgcgcgcccccccgccccgccccccccccccccccccccccccccggggcccccccgccgcgcgcgcccccgccgccgnngcccccgcccggccccccccccccccgccgccccccgcgcccccccccaccacccccccccccgccccccccccccgccccnacccgcccggccccccccgccccccccccccgccgaacccccacgccaccgcccccccgcggcgcccggcngcccgcccgccccccccccccccacccccgcacccccccgccccccccc

SEQ ID NO: 4004 - DNA, 273 bp, Zea mays
  Clone ID: LIB3116-022-P1-K1-E6-F2A
gggcatttattgccagctgtgctcgagaggtatactaccctaccctgctgctgcctccgccaacctcggtgacccgtttccgcacgcccctttcctcggtggagagcgcgtcagcgctgcaacctgatctcgggggagatatagcccctgtagaaacacctggatcgcttcaccggcaccaaagagacatgccctctgggcgaccctggcagagcttaatgataacgaactcttcccggaaccactgcacgcccatgcgggtcttgtatgggc

SEQ ID NO: 4005 - DNA, 326 bp, Zea mays
  unsure at all n locations
  Clone ID: LIB3116-022-P1-K1-E6-TCA
aaaaaaaaaaatttggagggcggccccctctccccccccccccggggggggggggggcggggccccaaaacaaaacanaaggggggggggcccgncccggccccccctcccccgcccccgccccccccccccccccccccccccccccccgcccccccccccccacgcaacaacacaaaacaacaaaaaaaaaactttttttttataattctccgccccccccccccccccccccggggggggccgtcggggggccgcccccccccttccccgccctccccccccccccccgcctccccccgcgggggggggggcgcccccccccc

SEQ ID NO: 4006 - DNA, 533 bp, Zea mays
  Clone ID: LIB3116-022-P1-K1-E6-TGA
ttatatatattttttcgtattttatattcttatttacgtttttgtatttattttgattttatgatgatatattatcttgactttttttgctctccattcatccatcaataatatatattttttttttttttttttttttttttttttttttttttttttttttttttttttttttttttttttttttttttttttttttttttttttttttttttttttttttttttttttttttttttttttttttttttttttttttttttttttttttttttttttttttttttttttttttttttttttttttttttttttttttttttttttttttttttttttttttttttttttttttttttttttttttttttttttttttttttttttttttttttttttttttttttttttttttttttttttttttttttttttttttttttttttttttttttttttttttttttttttttttttttttatttttttatttttttttatttttttttttttatttatttttttattttttt

SEQ ID NO: 4007 - DNA, 418 bp, Zea mays
  Clone ID: LIB3116-025-P1-K1-B8-F2A
atttttaatttttccaacgggttcaatgaacattaaccaaacaggaccgtcccgaaggaaggcaagcacaggtgcatataggcaaagcatgtccaaccacctaactatggtggatggcaatgatggtaggccgactacatacatacactacaatacaatacgatgatcctagatggatcagggatacatacgaccaacaacaaatccaagggaacaatggcgcccagacgagcaggaaagcgttcgacagcccatcgagaacttctgcgatccagctgcgggccgtcgactcgcacttgggccggtccgtcttgtacatgtgggcaatctccgggacaagagggtcaaacggaatggggccggtcaacagggagcaaatggagagcaggaccttagaaattggaaaagcagggctcca

SEQ ID NO: 4008 - DNA, 562 bp, Zea mays
  Clone ID: LIB3116-025-P1-K1-C6-F2A
gagaggaaaatgaccagctttagtcaatttctcattcccttttctttttttcttctttttttacagccttcgatcgctcatacaaaacacagtttgaaaacaaactgctagctaagattttatatacacgcttcatacatctttctcccttttgggttcagaaagaaacatgcctttgtacaacacttgagagctcaagccacacagctcctccctccttcctcgtcacgtacgatccgtgtgtgctcttggatccgcgttcccaggtggccaggtggcgtgtctgtagcctctgtttatgtatggatcagcgatcacctggcctcagaggcagagcccttcattatcctgagcttcttgcacgaagagatgaacatatcccagggcacgtctccggcgagcatgaggtcgccgtccttgtcctcgtaagcgatggcgtgctggtggtggtcgccgccgccctctgccgccgcggagaaggagttggtgaagagcgcgtccagagcctccctgagctccctgtagcccttgtacatccggaggtccaccttcctgaggtagg

SEQ ID NO: 4009 - DNA, 536 bp, Zea mays
  Clone ID: LIB3116-025-P1-K1-C6-R2A
ggccgacggtgagggcgtacaggaagaacaccttccaggcggcagcggcggagacggacaagaaggccgagcagaagcagcagcagggaggcctgtacgtgaaggtgagcatggacggcgcgccctacctcaggaaggtggacctccggatgtacaagggctacagggagctcagggaggctctggacgcgctcttcaccaactccttctccgcggcggcagagggcggcggcgaccaccaccagcacgccatcgcttacgaggacaaggacggcgacctcatgctcgccggagacgtgccctgggatatgttcatctcttcgtgcaagaagctcaggataatgaagggctctgcctctgaggccaggtgatcgctgatccatacataaacagaggctacagacacgccacctggccacctgggaacgcggatccaagagcacacacggatcgtacgtgacgaggaaggagggaggagctgtgtggcttgagctctcaagtgttgtacaaaggcatgtttctttctgaacccaaaa

SEQ ID NO: 4010 - DNA, 577 bp, Zea mays
  Clone ID: LIB3116-025-P1-K1-C6-TGA
atgttcctcattccctttagcttattgcttggttttttacagccttcgacgctcgtacagaaccagtgtgaaaacaaactgctagctagagattttatataacacgcttaatacatctttctcccttttgggttcagaaagaaacatgcctttgtacaacacttgagagctcaagccacacagctcctccctccttcctcgtcacgtacgatccgtgtgtgctcttggatccgcgttcccaggtggccaggtggcgtgtctgtagcctctgtttatgtatggatcagcgatcacctggcctcagaggcagagcccttcattatcctgagcttcttgcacgaagagatgaacatatcccagggcacgtctccggcgagcatgaggtcgccgtccttgtcctcgtaagcgatggcgtgctggtggtggtcgccggcgccctctgccgccgtggagaaagagttggtgaagagcgcgtccaaagcctacctgagctccctgtaccccttgtacatccgggaggttcaccttcctgaggtagggcggcgccgggcaatgctcaccttttactacaggcctc

SEQ ID NO: 4011 - DNA, 209 bp, Zea mays
  unsure at all n locations
  Clone ID: LIB3116-025-P1-K1-D9-TCA
ggggggggggggggggggggggggggggggggggaaaaaaaannggggggggggggggggggggggggggggggggggggggggggggggggggggggggggggggggggggggggggggggggggggggggggggggggggaaggaagnttttttttttttttttgggggggggggggggggtnnngttgggtggggggggggggggg

SEQ ID NO: 4012 - DNA, 274 bp, Zea mays
  Clone ID: LIB3116-025-P1-K1-D9-TGA
gttggggggttttttttttttttaattttttttttttttttttttttttttttttttttttttttttttttttttttttttttttttttttttttttttttttttttttttcttttttttttcttttttcttttttctttttttttttttttttggggtttgtttctttttttttctttttcttttttttctctctattttcctccatatctcttcaatccctttctttttttttttttttcccctctcccccccgctccatacccccccactt

SEQ ID NO: 4013 - DNA, 423 bp, Zea mays
  Clone ID: 5LIB3116-014-Q1-K1-D1-R1
cccacgcgtccggatcgagagcttcgtcatcgagcacactgctgatagttcagctagcgacgcgcaagctgagtcgcagatccagaggatacagaccttgtagaaccttaatccctttgtttgccacatagagcatcgttgagttatttgtaaaggaatggaagaagggagctaataatccgaagtgtgccgttggctgaaacatcgcctgtcttcactcctggctctgcttctgttcgcttctcatcgtggtttgataccttggtggacatctatgctgacacctcatctcaccaaacatacttgcataccgtcgtcgcccgctcgaacgaagaaacaaagtgccgtttggttcatatatgtggaatgtaatggggaactgataatgttaaatcatatttggtttagtccaaccgtaatcag

SEQ ID NO: 4014 - DNA, 221 bp, Zea mays
  Clone ID: LIB3117-015-Q1-K1-H7
cccacgcgtccgcccacgcgtccgtgggaacaaaggacagctaccccgatcaattgtgatgttgtgtgtttgtgggtatgttctctctggagtttgagctgtggttattttatcgtgttggttgatcgtgtttgaaatgcttaattcaggactgtgacatctcgagttgttttaactaaatcttataagaactaccctgatcgagcgctgggtaattggat

SEQ ID NO: 4015 - DNA, 443 bp, Zea mays
  Clone ID: LIB3117-011-Q1-K1-H7
gtgcaattcaattcttcatgaaagaatatgacaaggccatggaaacctatcaggctggcctgaagcatgacccgaaaaaccaggaactgcttgatggtgttaggaggtgcattgaacaaattaacaaggctaacagaggtgaaataagtcaggatgaattgcaagaaagacagaacaaagctatgcaagacccagagatccagaacattcttaccgaccctatcatgagacaggtgctaaatgatttccaggagaacccaagggcggcccaggagcacctgaagaaccctggagttatgcaaaagattcagaagcttgtaagtgctgggatagtccaaatgagatgatcaggcacacgatgcgattgtacctgcttgttcgtcccttgtgcttggctttgttagttaacgtgccctttaacaagcagcgacggcaaaagaatg

SEQ ID NO: 4016 - DNA, 438 bp, Zea mays
  Clone ID: LIB3117-012-Q1-K1-F4
gcagaacccacaaccactcgtctcccggtacctgttccccgcgcgcaccgcggctacacagaccctggccccatgccatttacattttcccagatcccaccaacgcagctgcagggatcgagtagcccaccaccccaccccgcgacgctaaccgacgcaatggcgacgctcaccgttccttcctccgtcccggatcgtcgccgaggactgctagcagctccacaaggctttcgaaggttggggcaccaacgagaagctgatcatcttcatcctgggccaccgcaacgcctcgcagcgccgctcgatccgccgcggctacgccgaggcgtacaggaaggagctgctacgcgctctcggcgacgagatccactgcaagttcgagagggctgtgatcctgtggacgctggacccctctgagagggacgctgtgctggcgaa

SEQ ID NO: 4017 - DNA, 394 bp, Zea mays
  Clone ID: LIB3117-009-Q1-K1-A7
attaccgggccgggccactcgtccggcgagctccgccttttggacctctccacctttctcaccacccgcctgttcgtcttccacgagaaggacgtcatctccgtcgccgtcttcgtcgacaaccgccagatcgtctccgcgtcccgcgacaagaccatcaagctctggaacactctcggcgagtgcaagtacaccatcggcggcgacctcggcggcggcgagggccacaacgggtgggtctcctgcgttaggttctccccaaacaccttccagcccaccattgtctccggatcctgggaccgcaccgtcaaggtctggaaccttaccaactgcaagctgcgctgcactctggatgggcacggtggctatgttaacgccgtcgctgtgagccccg

SEQ ID NO: 4018 - DNA, 476 bp, Zea mays
  unsure at all n locations
  Clone ID: LIB3117-009-Q1-K1-B10
cggacgcgtgggcggacgcgtgggtgcacagcaacgcatcagccttctggaaccatctcgccgccgccacaccacaatccacaacccgtcgaagcgaagcaagcaatggccggagtcggatcgaaggccctcgccgttgccgccgttctggcggccgtctccttctcggtggccgccgcggccgaggcgcccgcgcccagccccgtctccgccgccgtcgcggcgtcgtcgcccttcgccgcggctctcgtcgcctccgccgccgccttcctcttcgccgccgtccgccactgagccgatggggcctcgtgcctgcaggctacctagcagtacttcccccgacgncgccgtcgtcggctagatctatttattggagtgctatccagtagtactagtagtagtgagatttggtcggtgctggtcgtgtcgtcgtcgcattttggtcggatcttggttccttggtgcagggaggggtt

SEQ ID NO: 4019 - DNA, 430 bp, Zea mays
  Clone ID: LIB3117-009-Q1-K1-B12
atcgggtggtgggagcggtgggggtgggagtggaggcggaggatctggtggaggcggcagcagcggtggaggcggcggatctggtggtggtggaagcggtggcggcggcggatctggcggcgggccgacgagcggtcgttgccccgtggacgcgctgaagctgggcgtgtgcgccaacttgctgaacgggctgatcaacgcgaccctggggacgcctgccaggacgccgtgctgcacgctgatccaggggctggcggacctggaagcggcggtgtgcctctgcaccgtcctcaaggccaacgtcctgggcatcaacctcaacctgcccatcaacctcagtctcctcgtcaactactgcggcaggcgctgtctctcgggcttccagtgcttgtgatcacgcccatcgatccatctgcaggcttaataattt

SEQ ID NO: 4020 - DNA, 385 bp, Zea mays
  Clone ID: LIB3117-009-Q1-K1-B2
tgccgcctccgttctatctgccgccgcagcagcagccgcagccatggcaataccccactcaagcaccgcagctaagcccgtgccagcagttcggatcctgcggcgtcggcagcgtcggcagcccgttcctgggccagtgcgtcgagttcctgaggcaccagtgcagcccggcggcgacgccctacggctcgccacagtgccaggcgctgcagcagcagtgctgccaccagatcaggcaggtggagccgctgcaccggtaccaggcgacatacggtgtggtcctgcagtccttcctgcagcagcagccgcagggcgagctcgcggcgctgatggcggcccaggtagcgcagcagctgacggcgatgtgcgggctgcagctgcagca

SEQ ID NO: 4021 - DNA, 401 bp, Zea mays
  Clone ID: LIB3117-009-Q1-K1-B3
cgcgtctccggtcccgtccgtaataacctgatccgatccacgccggccggcgatggagctcatcaagtccagggcgaccgtgtgcgcgctcctcctggcgctgctcctgctctcacactacgacggcgggacgacgacgacgatggtggcggaggcccgggtgtgcatgggcaagagccagcaccactcgttcccctgcatcttcgaccggctctgcagcaacgagtgcgtcaaggaggacggcgggtggaccgccggctactgccaccttcgctactgcaggtgccagaaggcgtgctaagcaaagctcttcaaacacccttggcttgccagaactgaactctagtagtactaagtaacacccttggctagctgtgcacaacctacgtaccgtgcatgca

SEQ ID NO: 4022 - DNA, 321 bp, Zea mays
  unsure at all n locations
  Clone ID: LIB3117-009-Q1-K1-B5
tcccgtccggaataacctgatccgatccacgccgttcggcgatggagctcgtcaagtccattgcggccgtttgcgcactcctnctggcgctgctcctgctctcacactacgacggcgggacgacgacgacgatggtggctgangccccgggtgtgcatgggcaagagccagcaccactcgttcccctgcatctccgaccgcctttgcagcaaccagtgcgtaaaggaggacggcggttgaaccgccggttactgccaccttcgttactgcaggtcccaaaaggcgtcctaagcaaagtttttaaaaaacccttggcttgcc

SEQ ID NO: 4023 - DNA, 273 bp, Zea mays
  Clone ID: LIB3117-009-Q1-K1-B6
cccacgcgttcgccccaacgctactaccgccgctagctggttcaagtgcggcgagcggagccggagaccggtagaggaaattaagaggcgtcgatcgggcatggggtgcgacgacaagtgcgggtgcgccgtgccgtgccccggcggcaaagactgcaggtgcacgtcggggagcggcgggcagcgggagcacacgacttgcggctgcggggagcactgcgagtgcagcccgtgcacgtgtggccgggccacgatgccgttcggccgcgagaa

SEQ ID NO: 4024 - DNA, 369 bp, Zea mays
  unsure at all n locations
  Clone ID: LIB3117-009-Q1-K1-B7
ataaagaccaagcaaatggagagggtgctaaaacagcagctgaaagttcaaaggaaatgacaaaagagaatgataccggaggcaaggatgctccatattctgtatcttcctcgagtagtttaaaaagacaaagatcagatgattcatttaactctatatggtgtgataagttcgacatgcttacatctgcattgaaagatgacggtccaaagctaccctcttccgtcgaagttcttgccgcattacaagaggttgaaggacttgatgaagacacagaacttgagctttaggatatcctnacctctaatgcacgcaagtttgagtcgatgatagcacttccaatggaaaggaagaagaagtggcttatga

SEQ ID NO: 4025 - DNA, 431 bp, Zea mays
  Clone ID: LIB3117-009-Q1-K1-B8
caacaacaactgcaacagtttctgccagcgcttagtcaactagccatggtgaaccctgccgcctacctacaacagcaacaactgctttcatctagcccgctcgctgtggccaatgcacctacatacctgcaacaagaattgttgcaacagattgtaccagctctaactcagctagctgtggcaaaccctgttgcctacttgcaacagctgcttccattcaaccaactaactatgtcgaactctgttgcgtacctacaacagcgacaacagttacttaatccattggcagtggctaacccattggtcgctgccttcctacagcagcaacaattgctgccatacaaccggttctctttgatgaatcctgtcttgtcgaggcagcaacccatcgttggaggtgccatcttttagattacatatgagatgtactc

SEQ ID NO: 4026 - DNA, 443 bp, Zea mays
  Clone ID: LIB3117-009-Q1-K1-B9
gtctcatctcaagagcgactagagagaggaagagaacaagcgataagctcatctcgcacgcaagatgcgggctccaaggggcggaggcggctgccgcggcggccaggagcatgtggagctgatccctggcatccccgacgacgtggccgtggactgcctggcgcgcgtcccccacgcctcccaccgcgcgatgcgccgggtctgccgcggctggcggagcgccgccgcggcgccggccttcgcgtcggcgcgcgccgcggcgggcgccaacgaggacctcgtgtacctgatgcagttcgggaacccgtccggcgacgacgggcccaaggacggcgacgacgggcccggcagcaccccggcgtacggcgtggcggtgtacaacgtgacgacgggcgagtggcggctggagcgcggcgcgctccccgtggtgccggtgttcgcgc

SEQ ID NO: 4027 - DNA, 249 bp, Zea mays
  Clone ID: LIB3117-009-Q1-K1-C1
attcccggtcgacccacctcataagaccaactatgaagtctatacacactaaaggcaattaatcgaagaaatatccgagcaagatctcattttgatcttctcatacttaaaaagacaaatcaatatattaactctatatgggataagtcaatcttactctcattaaagatacgccaaactaccctttctcaagtttgccatacaaaagtaaggactgatgaaaccaaacttgacttagatatctacctt

SEQ ID NO: 4028 - DNA, 476 bp, Zea mays
  unsure at all n locations
  Clone ID: LIB3117-009-Q1-K1-C10
cccacgcgtccgattttgagcattcagaaacacaccaagcgaagcgcactagcaacgacctaacaacaatggctaccaagatattagccctccttgcgcttcttgccctttttgtgagcgcaacaaatgcgttcattattccacaatgctcacttgctcctagtgccattattccacagttcctcccaccagttacttcaatgggcttcgaacacctagctgtgcaagccaacatgcaacaacaagcgcttgcggcgagcgtcttacaacaaccaattgcccaattgcaacaacaatccttgccacatctaacaatacaagccatcacaacgcaacagcaacaacagttcctaccagcactgagccacctagccatggtgaaccctgccgnctacttgcaagagcagctgcttgcatccaacccacttgctctggcgaacgtagttgcaaaccagcaacaacaacagctacaacag

SEQ ID NO: 4029 - DNA, 461 bp, Zea mays
  unsure at all n locations
  Clone ID: LIB3117-009-Q1-K1-C12
cactctcctccgaagccatcgtccccgtcccagccttcccggaatctaggggcagaagctgcagcgtcgagatggtgaaggggcgcacggggcagcgcgtgaggctctacgtccggggcaccgtccttggatacaagcggtccaagtcgaaccagtacgagactacgtcgctggtgcagatcgagggggtgaacaccaaggaggacgtcgcgtggtactgcgggaagcggatggcctacatctacaaggccaagaccaagagcagcggcacccactaccgctgcatctggggcaaggtcgcccgcccgcatggcaactccggcgtcgtccgcgccaagttcaggtccaacctgccgncggaatccatgggccgtaaggtcagggtgttcatgtaccccagcagcatctaaagataatctgaaagtgtggaggacccttttcttctagattttatcttcagc

SEQ ID NO: 4030 - DNA, 434 bp, Zea mays
  Clone ID: LIB3117-009-Q1-K1-C2
ggagccatgtctgaggagaagcaccaccaccacctgtttcaccaccgcaagccagaggaggagggcgcctccggcgaggtcgactacgagaagaaggagaagcaccacaagcacatggagaagctcggcgagctcggcgccatcgccgccggcgcgtacgccctgcacgagaagcacaaggccaagaaggacccagagaacgagcacgggcaccgggtcaaggaggaggtggccgccgtcgccgccgtgggctccgccggcttcgctttccacgagcaccacgagaagaaggacgccaagaagcacgcccacaactgatccgtcgcggttgctgttccatctgttcttccagcctcgtcttcgtctactgtgtgccggccaggccttgatttgggctaccgatatttgcatggacgtaggaactgtgttggtcg

SEQ ID NO: 4031 - DNA, 416 bp, Zea mays
  Clone ID: LIB3117-009-Q1-K1-C4
ctccagagcgcagaagaacccgatcgacaccatgagggtgttgctcgttgccctcgctctcctggctctcgctgcgagcgccacctccacgcatacaagcggcagctgcggctgccagccaccgtcgccggttcatctaccgccgccggtgcatctgccacctccggttcacctgccacctcctgtgcatctcccaccgccggtccacctgccgccgccggtccacctgccaccgtcggtccatgtgccgccgccggttcatctgccgccgccaccatgccactaccctactcaaccgtcccggcctcagcctcatccccagccacacccatgcccgtgccaacagccgcatccaagcccgtgccagctgcagggaacctgcggcgttggcagcaccccgatcctgggccagtgcg

SEQ ID NO: 4032 - DNA, 312 bp, Zea mays
  Clone ID: LIB3117-009-Q1-K1-C5
cccacgcgtccgctgcaacagcagttaccattcatgttcaacccaatggccatgacgattcgacccatgttcttacagcaaccctttgttggtgctgcattctagatagaaatatttgtgttgtaccgaataatgagttgacatgccatcgcgtgtgactcattattaacaataaaacaagtttcctcttattatcttttaaaaaaaaaaaaaaaaaaaaataaaaaaaaaaaaaaaaaaaaaaaaaaaaaaaaaaaaaaaaaacaaaaaaaaaacaaaaaacaaaaaaaaaaaaaaaaaaaacacacaaaa

SEQ ID NO: 4033 - DNA, 401 bp, Zea mays
  Clone ID: LIB3117-009-Q1-K1-C7
caagggatgcaccttgatgcccaacattggttacggctctgacaaatcaaccaggcactacctccccaacaagttcaagaagtttgtggtgcacaatgtctctgagctggagttgctcatgatgcacaacagaacctactgtgccgagatcgcccacaacgtttcaaccaagaagcgcaaggagattgttgaacgtgccgcgcagctcgacattgtggtcaccaacaagctcgccaggctccgcagccaggaggatgagtagtctggtttcttgtcacaacggccaaatagatcctgccattcccggctgtaggaaactactctgctttgtgccttggtagtacttagaataccagacatttctacatttttgggaccaagtgccaacttctatgtggctt

SEQ ID NO: 4034 - DNA, 327 bp, Zea mays
  Clone ID: LIB3117-009-Q1-K1-C8
gaacggcaaggagctggacggccgcaacatcaccgtcaacgaggcccagtcccgcggcggccgtggaggcggcggcggtgggtacggtggtggccgtggaggcggcggctactgcggtggcgggcgccgtgatggcggcggcggctactgcggtggcggcggctacggtggcggcggcggctactgtggtggtggcggcggctactgcggtggcaaccgtggcggcggctacggcaactccgacgggaactggaggaactgagcggtggggcccgcgcggtcaagttatcctgttcgctgccgtgatgtttaccctagtccagaggg

SEQ ID NO: 4035 - DNA, 202 bp, Zea mays
  Clone ID: LIB3117-009-Q1-K1-C9
ctagcaacatagaaagcacaataatgtacctacaatagctgccaaaatatttgggttcctgatactacttgatctttctgcagagatatctaccacaaccattttcccacaatgctcacaagctcctatatcttcccttcttccccacatacctatcaccatcggtatctctcaatgtgtgaaaacccaattgttcaaccct

SEQ ID NO: 4036 - DNA, 394 bp, Zea mays
  unsure at all n locations
  Clone ID: LIB3117-009-Q1-K1-D2
cggacgcgtggggtaaagttaatgcaggaaggacggatgcgtggtcaagcctttgtcacattgcccacggttgaacttgctcagcgtgccctgaatctagcgcatggctatgtgttcaaaggaaaaccaatgatcatacaattcggaagaaatcctgctgctaacaaagcttcctaaagcaggatacaattttctttccagattttgatagatttcagaagttggtaggaactggaaagtgacaaaccagaggttgtgggtatctgttggctgttgttactgcaacctgtttggcatacacactangctgattggttcctcccatggtgtaatgtttgtcgaaaaataacattgtacattccagtttgtggattattaaaagaatttactcgat

SEQ ID NO: 4037 - DNA, 467 bp, Zea mays
  Clone ID: LIB3117-009-Q1-K1-D5
gagattgcttccttgtctcctggatgcatcaactcaaaatggagtccactttgacctggccgtatttgtgccgaaccaatcacaacacacgaagcttggttctaacacttcagcaccagcggagcctgagcaaatcgatttgtcatggcagctgtcacttcaaacagtgtgggagaagttacttcaggataaaggtataaatactacaaaatccagtgatactagtaaagtttttgattcgcttccaatcgcaatcgagtggctaaggagaaatgcccgagaaaaccaatctacttctttccagagcagagaggcctcttctgccacggccgacgggttccggaatccgacgccgaggggacgtcgtctttcaggcagcacggccggcagaaacttgggtggaggcgagtcgtgcaggtgcaggatctgtccgaggctaagagaagggtgccgcatgggtcaaaccc

SEQ ID NO: 4038 - DNA, 470 bp, Zea mays
  unsure at all n locations
  Clone ID: LIB3117-009-Q1-K1-D6
ggcggatcttctctctgattctcaaaggattaaatataccattgagaccttcaccaagggcatccctgatgcacggacttacttgaatactcttcaacagctcagaataaagagtggtcttatagatcatcttggaattgagcctttgatgatggaagctcttgagaagattgagaaggacattaagaaaccacttttgaggagcgacaagaagaacatggccaccctcttggcagagtttgacaagattaacaaaaagcttggctttcggaaggaggatcttccaaagatcgaggaagagctnngaatgggaaatgccaaaagtgagctgactgaacttaagaaggaatgcgttggaagcaatggagactcaactcaagaggggaggagtttcaagatgaaggagatgcctgatgtcaggaaattggacatcagaaacttcctgtaggcctgatcgacgataatctttg

SEQ ID NO: 4039 - DNA, 465 bp, Zea mays
  Clone ID: LIB3117-009-Q1-K1-D7
aagggcgcattcgtgcagcctgcgttctacgaagcgttcggcctgactgtgatcgagtccatgacgtgcggtctgccaacgatcgcgacctgccatggtggccctgctgagatcatcgtggacggggtatctggcctgcacattgacccttaccacagcgacaaggccgcggatatcctggtcaacttctttgacaaatgcaaggcagatccgagctactgggacaagatctcacagggcggcctgcagagaatctatgagaagtacacctggaagctctactccgagaggctgatgaccctgaccggcgtgtacgggttcctgaagtacgtgagcaacctgtagaggcgcgagacccgccgtacatcgagatgttctacgccctgaagtaccgtagcctggcaagccaggttccgctgtccttcgattagtacggggaaagaagaagaagaagaagcccatgcc

SEQ ID NO: 4040 - DNA, 213 bp, Zea mays
  unsure at all n locations
  Clone ID: LIB3117-009-Q1-K1-D9
ggcaaacaatgtcgccttcttacaacaacttctatngttgccattataccaactggctttgacgaatcctaccaccttattgcagcatcccactcattggtggtgccatcttctgtatttttttatgctatatactgtaataataaagttctcatactgatatgtgcaacttctcagtaataaaagattagagatctatattttaagttcaaa

SEQ ID NO: 4041 - DNA, 386 bp, Zea mays
  Clone ID: LIB3117-009-Q1-K1-E1
aaaaaaaaaaaaaaaaaaaaaaaaaaaaaaaataaaaaaaaaaaaaaaaaaaaaaaaaaaaagagaaaaaaaaaaaaagagaaaaaaaaaataaaaaaaaaaaaaaaaaaaaaaaaaaaaaaaaaaaaaaaaaagggcggactttttaaaggacccaaacttacaccccctaccattgcaacttaaaagtttttttatagggccacctaatttaaattaactggccatattttaaaaaactgtgaaactggaaaaaccctgggtttcccaaattaaattgccttgtacaaaatccccttttactcagttgggctaataacaaaaagccccgaacaaatggcctttaaaaaaaattgccaaccctaaaaggcaaatgaaacccccct

SEQ ID NO: 4042 - DNA, 446 bp, Zea mays
  Clone ID: LIB3117-009-Q1-K1-E11
gcttgttgaggtatacaaacaagtccgaattggggatccgttggagaaaggcaccttactgggaccactgcacactcctgcttcaaaagagaactttttgaaaggcattcagactatcaaatctcagggagggaaaatcctttttggaggatctgccattgaatcagaaggaaactttgtgcaaccaacaattgtggaaattacaccttctgcaccagttgtgaaagaagaactctttggtcctgtcctttatgctgtgaaatttcagaccttgaaggaagcaattgaaatcaataactctgttcctcaaggattgagcagttctatatttacaaagaggccagatattatttttaagtggctcgggccccatggtagtgattgtggcatagtgaatgtgaacatacctactaatggtgctgaaattggtggagcatttggtggag

SEQ ID NO: 4043 - DNA, 439 bp, Zea mays
  Clone ID: LIB3117-009-Q1-K1-E4
cccacgcgtccgcagtgttctaatgaggacctgaagaaaggctttgctttgaaggtggagccgttgaatgcatttattcctttcgagcagcagatgatggacctatctcacaggaagcaagagaatgctgcctgtgacgattcatgctctctctcaaaactaatgttgaaggaggatattgaggctgcacccagcctgccgacgggcattcaagtacagaatggctccaagaaccgcaggaggaggcagcccaacgtacagaagaccacggcgactccaacaaggtcgcctgcaaggggtcagcgtcgaaagaacaacgatgccatggtcaaatcggagatgggcttgattgagcagagtaaacttgtgctgacggaacatgagccagagctgggagacgttccggtgaagagacccgtgggaggcccaagaaggcgag

SEQ ID NO: 4044 - DNA, 465 bp, Zea mays
  unsure at all n locations
  Clone ID: LIB3117-009-Q1-K1-E5
cccacgcgtccgtattgtagctcatatcatctgtcacccatggcgagggtgcagcagcttccggggattattctggttgctttccatgattcttctagcatcctttgttgctcatgcacgcacaacaagtgggcaaaccaaagaggacagcaatgctaggaacatgacgatgaccaagacgagggcatcgggcaacatacttgttagccgtaatgacgacgggccatgctatctagattccggtcttaatgagtacgtctgcagaaagactaataagtgctataagagcttggtgctctgcgtggcgagttgtcaaccatcatcatgaattcatgatactgcggagacatcatgatactgcggagacagacggcgagagatgaggctagctagatgctgtttcaccaaaatattatgtaacacccaaatctcccattntaagaaattaataagattttcgaaaaa

SEQ ID NO: 4045 - DNA, 388 bp, Zea mays
  Clone ID: LIB3117-009-Q1-K1-E7
ggcgacctggccaaggtgcagcgtgccgtgtgcatgatctccaactgcaccagtgttgtgggggtgttctcccgcatcgaccacaagttcgacctcatgtacgccaagcgtgccttcgtgcactggtacgtcggtgagggtatggaggaaggtgagttctctgaggcccgtgaggacctggcggcgctcgagaaggactacgaggaggtcggtgctgagttcgatgagggcgaggatggcgacgagggtgacgagtactagagaagtttgctgatgacgcagcatcaggccagtgtgctgcccttatcccgtgatctgccgagagttgctcctgctatcgtgttatgtgtgtctgttctgaagtattgtgtggtttacaacaactgat

SEQ ID NO: 4046 - DNA, 298 bp, Zea mays
  Clone ID: LIB3117-009-Q1-K1-E8
cccacgcgtccgcggacgcgtgggtggcaacgacgtcgagttagtcgctcgctccgccgccgtcatcaaccagaaatgccatgtcaagaagaaggatatcaggaagtttttggatggtatctatgtgagcgacaagggtgtgatcgaagaggagcagtgagggacaattagttgttatcgtttgagttggaattattgtttggtttgcaattttctcaaggtgaactttgtaatcggttaggatgtgttgtggaccattatcttatcctacaatattatcgtatctggttaagaatat

SEQ ID NO: 4047 - DNA, 361 bp, Zea mays
  Clone ID: LIB3117-009-Q1-K1-E9
gagaaacggggagagcagcgcgagacggcacggtggttcgttcaacaccctagcaagcgcggccctagtccggagccacggcgcggctagggagccgtgcccggcggccgtcggagccgccgcgcggaccaggcggcggggcgcccagggtcgccgggacgcgcgccatggcgtggtggcgcgcgcgggtcgtcgcgccggctcgccgcgcctggctcgccgtcgtcgccgcgcgcgtgcgccgccgcaccgagcgcgcagggatcgtggacctccacagggacgtgcagacctgcgggtaccacgacgtcgaggtgatgtggggcatgctgggcctggacgccgggccggccagcgcgcc

SEQ ID NO: 4048 - DNA, 453 bp, Zea mays
  Clone ID: LIB3117-009-Q1-K1-F1
agtaaattctgcaccaagaatgacacctgattgccagaagttcctttcgctgggtattgcgcgacgaatcccatcagtgcgtgatttagtaaaatgccaggccagttcgacactcgttgccatgcctccagcgggcctgggaaaatcacggtccatgaagatcgagggccatgattctctggcaccgagtgtgaaggagccaaaaggcaatggtggtctagcaccaagtaaaacgccaaagctgcatgaacctgtgatagctgatatgagcatcaagagctgtgattctctagcactgggtatcgcaccaaatggccatacccatgatggtccagcatcaggaagtggggaggccaagaaagagcaggcagcactagtaactggctcgcagagtaaatcatctgtaccaagtcttgacgctagcagccatgttaccggggcaacgagcgccct

SEQ ID NO: 4049 - DNA, 388 bp, Zea mays
  Clone ID: LIB3117-009-Q1-K1-F3
cccacgcgttcgccacgcgtccgcaagagctcgcaggagaggtctaaaccctagcttttggggcggctgagagaggatgatctacgacgtgaactcccccctcttccgttccttcctcagccagaagggcggcgccgacaagaggaaaatggaggagcataaaccaaaggagcagaggcccaaggctaacgagaacaagcctgtgatgaacgaatgaatatctccagaagctttgttcaatgtgcaaccaagtccgatgtccgtctgctctggtcagcttaaaaccaacgcttccaataatcctattggtgtcttagtttccccttacagtgttatttgctctgcttgaacatggcaacagtgcaatggaaatgaaacttgaactgcc

SEQ ID NO: 4050 - DNA, 434 bp, Zea mays
  Clone ID: LIB3117-009-Q1-K1-F4
cacgaggattggccccaagttcctgaacgccagtgttgggttcggtgggtcttgcttccagggggacatcctgaacgtggtgtacatctgcgagtgcaatggcctgcccgaggtggccaactactggaagcaggtgatcaagatcaacgactaccagaagagccggttcgtgaaccgcgtcgtgtcgtccatgttcaacaccgttgccggcaagaagatcgccgtcctcggcttcgccttcaagaaggacaccggcgacaccagggagaccccggccatcgatgtctgcaagggcctgctgggtgacaaggcccagatcagcatctacgacccccaggtgacggaggaccagatccagcgggacctagccatgaacaagttcgactgggaccacccgatgcacctgcagccgacgagcccgacggccgtgaagc

SEQ ID NO: 4051 - DNA, 416 bp, Zea mays
  Clone ID: LIB3117-009-Q1-K1-F5
cccacgcgtccgcccacgcgtccgcggacgcttgggctgactcgtggtagacctactcattgcaagaccagtactaccctgccgtccacctcaacggcgccggcgccggcgccctcttccacgacaaggaccggaagcacctcccattcctgaccaaccacaacaatggatgccagccattcaccgtcaccacgacggcttcctcagagagcagcagcaagcacagcaacggcaactgtgctctctctcttctgtcagacaacccgacaccagcacaggcacagacggccacgatccctaccgcgcagcccctcgtcgccacggcatcgcagtacggcaggctccctggcggcgacgacgacgacgtctcccttgccgggatgtcgtacatgacggtgggagacagccggcaggct

SEQ ID NO: 4052 - DNA, 98 bp, Zea mays
  Clone ID: LIB3117-009-Q1-K1-G10
tctaacacaacaattttccctcaaggctcacaatctcctatagcttcccttcatcccccataccttccatcaatgatagcttcattatttgaaaaccc

SEQ ID NO: 4053 - DNA, 224 bp, Zea mays
  Clone ID: LIB3117-009-Q1-K1-G2
cggcgggactaatcccacttatagcgtgctgaccgttgccaaagactgctgtggtaatgcggactcacatgtgttaatggaacatgtgaagcaagccttgaatatgctcatggattgatgatctgatggtgatgcaaggaagacgaaagctaatgaactgtaggccaaatcaaatactgctctggagcattgatgatcgtcatatattaacctgtataagctga

SEQ ID NO: 4054 - DNA, 193 bp, Zea mays
  Clone ID: LIB3117-009-Q1-K1-G5
gggctctgcgccgccggccacgctggccgagttcacgctcgacggcagtggcgggctggacttctacgacgtcagcctcgtggatggctacaacctccccgtgctggtggagacctcctgttgctcatgctccagcgggccggcgttgttcgcggcagccgggtgcgcatcggacctgaacgcgatgtgcccc

SEQ ID NO: 4055 - DNA, 330 bp, Zea mays
  Clone ID: LIB3117-009-Q1-K1-G6
tcgacaagattgttgagatctacctgctttctctgcctgtcaaggagcaccatatcttggtgactttcttacctttgctcagggactacgtgatgaatatcactcccgtccataatcataccctctcctgtcagctcactctcttcaaggccttcgtcgtcgtctgctaccgtgactgccacgtcggtctcgacgtcaagtgctccaaggaggtcgccaccgccatccttgtcgccatcatcctgtccaagctctcggtcgtgcccgtcatgaagtgctactgctgaaacaatatctgccagccttacactgtgccctgcaaggtcacct

SEQ ID NO: 4056 - DNA, 308 bp, Zea mays
  Clone ID: LIB3117-009-Q1-K1-G7
caggtcaaaatcatttctgatgatgggacttcttctgaggcattggcgagtttttttcaggcatctttgtacaaatttgggctctcttgatcctgagtaatttgtctgagcgattcaccggtccacagttttttatgggtttcacagtttgccccaactctgctgtcttggcctgtccattacttgtgatcatattattggagaatcaaagtataatgtgcaaaaaggtactggaattttgcggaactaaaaatcttatttgtactatttgggttaactgtgcatttgtacattactacatggcaccc

SEQ ID NO: 4057 - DNA, 328 bp, Zea mays
  Clone ID: LIB3117-010-Q1-K1-A4
cggacgcgtgttcaactagcaacatagaaagcacaatagtggaccagcaatggcagccaaaagattttgcttccttatgctccttggtctttctgcaagtgttgctaccgcaaccattttcccacaatgctcacaagctcctatagcttcccttcttcccccatacctctcaccagcggtgtcttcaatgtgtgaaaacccaattgttcaaccctacaggatccaacaggcaatcgcaacaggcatcttaccattatcacccttgatcctccaacaaccgtcagccctattacagcagttaccttttgtccattctgtgtcacataac

SEQ ID NO: 4058 - DNA, 148 bp, Zea mays
  Clone ID: LIB3117-010-Q1-K1-B10
tacccatacaattcactctcacactacaatccaactctctataattcacctaaataaattactccctttttttacaacttctaactaaaaaacccttccttacccaattaacttcttaaaacatcccccttcccaacttcttaatacc

SEQ ID NO: 4059 - DNA, 142 bp, Zea mays
  Clone ID: LIB3117-010-Q1-K1-B12
aaaaacattatttttggtgaaaaaaaaaaaattaaaaaaaaaaaaaaaaaaaaaaaaatactaaaaaaataaattttttaatatttaatatacaaacaatctactccataacttttctatactcttatctaaattttaattt

SEQ ID NO: 4060 - DNA, 392 bp, Zea mays
  unsure at all n locations
  Clone ID: LIB3117-010-Q1-K1-B5
aaaaaatataaaaataaaaaataaaaattttaaatttattaaaaaaaaaaaaaaaaaaaaaggaaaaggtaaaaatttaaattgtttaagaaaaaaaaaaattatttattttttaattttaaaaaaaatatattttaataaattatttataatataatataaattttttatatttttaattaaattaaatttaataagtttggttttataaaatttttatttttaaaataatatttatatttaatttaatatatttaaaaaaaataatttttttttaattttttttaataaataaaattattttatatattttatttttaaaaaatttgttatttttaattataaattggaangttttttttatattataaattaaaaatgtatatattttt

SEQ ID NO: 4061 - DNA, 318 bp, Zea mays
  Clone ID: LIB3117-010-Q1-K1-C10
cgtccggaactctcctgcctatgtacagcagcaacaactactaccattcagccagctagctgcggtgagggctgctgccttcttgagacaggaacaattgttgtcgttctacctgcacgctgcgcctaacgttggcaccctcttacaactgcaacaattgctgccattcaaccaacttgctttgacaaacccagcagcgttctaccaacaacccatcattggtggtgccctcttttagattgcttatgagttatagttcaataataaagtttttttgatgatgtttgtggcttcccagaaataagaaagtacatttct

SEQ ID NO: 4062 - DNA, 344 bp, Zea mays
  Clone ID: LIB3117-010-Q1-K1-C11
atggggaagtcgttctaaaaaaaaaatttaaaatttaaaaaaaaaaaaaaaaaaaaaaagaaaattgttaaatataaaaaattccaaacactaaaaaaaaatccaaatattaaatacacatacatacaaaattataaataataaaataattttactaaaaaaaaaatcgccccccccttttaaaacaccaatttttttttccccttcttttcaaataaatattttttttttattgccccaaaattcaatttccccccccctttttttaaccctttatttcttaaaaaccctttttttccccaattttataccctttaaaaaaaatcccttttttccctttttct

SEQ ID NO: 4063 - DNA, 389 bp, Zea mays
  unsure at all n locations
  Clone ID: LIB3117-010-Q1-K1-C12
gacccagcgtccgcctcgctgagagggagccagagaagtaccagtcttacttcagtgagtacattaaaaagggggatntggtctgacgacatggaagctctgtacaagaaggtccatgctgccatccgtgctgatccttctgtggtcaagtcaaccaagcagccaccaaaggagcacaagaggtacaaccccaagaaactgacatacgagcagaggaaggccagtctcattgaaaggctcaaccaactcaactcctcgggcggcgcagatgacgacgacgaggatgacgagtaaagtttcgtcccatcgaagtaatgctatcttatgcggcgatcagtatttgtgctatggcatttatcgctacctgtagtcgtgcaacatgcattttt

SEQ ID NO: 4064 - DNA, 342 bp, Zea mays
  unsure at all n locations
  Clone ID: LIB3117-010-Q1-K1-D2
acccacgcgtacgtgactgtntcgaactctnctgcntacctacaacatttacaacanttacttaatccactggcnnttgctaacttataaatcgttgccgtcctacaacancaacaattnctttccatacaaccatttctctttgatgaaccctgccttgttgtgtcatcaacccatctttttattttccatcttttatattacatattataattactctataatggtaccctcatatcctcatctttttcctataaataatcaatttttttcatttatattttattaaatcttatctattattcttatcatctcttatactcacatctcatactatcttta

SEQ ID NO: 4065 - DNA, 220 bp, Zea mays
  unsure at all n locations
  Clone ID: LIB3117-010-Q1-K1-D3
gaccacgcgtgcgcccacgcgtccggngctcttcgccttgatactggttactactcatggngnaatnaagctgttaccgctcaatatccaatcctcgacgtcctctacaatgcatcaaacaatgagcttgtgaggacacaaacccttgtgaagagtgccattgtgcaagttgatgctgccccattcaagcagtggtacctcactcactattgagttgaca

SEQ ID NO: 4066 - DNA, 140 bp, Zea mays
  Clone ID: LIB3117-010-Q1-K1-D4
atccaattctactctccctctactctctcattaatctcggctggtgttgtttttactcttcatgttacctcttacacttccatctccctatctccctcttcctttctttttctttcttttcttatctcaatcccttcttc

SEQ ID NO: 4067 - DNA, 433 bp, Zea mays
  Clone ID: LIB3117-010-Q1-K1-D7
cggacgcgtgggcggacgcgtgggcaacaagcaacatagaaagtggaatccagtagcagcaatagagcaacaatggcgaccaagatattttccctccttatgctccttgctctttctacatgtgttgctaacgcgacaattttccctcaatgctcacaagctcctatagcttcccttcttcccccataccttccatcaattatagcttcaatatgtgaaaacccagctcttcaaccatataggcttcaacaagcaatcgcagcaagcaacatacctttatcgcccttgttgtttcaacaatcgccagccctatctttggtgcagtcattggtacaaaccatcagggcacaacagctgcagcaactcgtgctacctctgatcaaccaagtagctctggcaaacctttctccctactctcagcaacaacaatttc

SEQ ID NO: 4068 - DNA, 388 bp, Zea mays
  Clone ID: LIB3117-010-Q1-K1-D9
cccacgcgtccgctcgtgccggggctcaaggacgaggtgatgaagatcacgcccgttcagaagcagacccgcgccggacagcgcacccgcttcaaggcctttgtcgtcgtgggcgactgcgacggccacgtcggcctgggagtcaagtgcgccaaggaggtggccaccgccatccgcggcgccatcatcctcgccaagctctccgttgttcccgtcaggagaggctactggggaaacaagattgggcagccacacaccgtgccctgcaaggtcaccggcaagtgcgggtccgtcaccgtgcgtatggtgcctgcgcccaggggttctggcatcgtcgccgcgcgcgtgcccaagaaggtgctgcagttcgctggcattgaggatgtct

SEQ ID NO: 4069 - DNA, 398 bp, Zea mays
  unsure at all n locations
  Clone ID: LIB3117-010-Q1-K1-E11
ggcctcccggcgggggcctgtattatccgaccaccaggctcatctgcttggagaacacgcatgggaattccggagggaagtgtttatccccanaatacactgaaaaggttggcgaaattgccaagagtcatggcctgaagcttcatatcgatggagctcgcattttcaacgcctctgtggcacttggagttcctgtggacagacttgtgagagctgcagattcagtttcggtatgcatatctaaaggtttaggcgcccccgttggatcagttattgttggctcgaaggccttcatcgacaaggccaaaattctccggaagaccctaggtggtggaatgagacaagttggagttctctgtgctgctgctcatgttgcccgtcatgacaatgtgggaaag

SEQ ID NO: 4070 - DNA, 287 bp, Zea mays
  Clone ID: LIB3117-010-Q1-K1-E2
ggagggcgactctgccatagtagatgtggactctgaggggaaggttgttgtgctcaatggtcaggtcggcataccggagctctcaactccggcgatcaccgtttagctcgtacataacaaatgacaaaattaatagcatagtttttgttcaaacacattatcatttatggttagaatatctgtgtatatgtagtggtatagtcaatggggaaatcgttcctgcctctaaattcctttttttcaagttaaggtgtttcttttgtcgcaagttaatctgcctggttatt

SEQ ID NO: 4071 - DNA, 298 bp, Zea mays
  Clone ID: LIB3117-010-Q1-K1-E5
agatacatacacaatcactatatgaacttcaatctactgaacagcatgagggcaccacacctttattatgaggcaatcataaggaaaaaccctgacgacagtaacagcatccatcaaaccagcatgaatactgtttgatgcatggatctgtatccagcccacgatgaacacaggactaacaactagacacagagccaccttgcaatgcaacacacagaaggacaccaacacacacgacaccaacgaagataaaccctgtggactaggctaaacatcacgagaccaaacacgataactt

SEQ ID NO: 4072 - DNA, 217 bp, Zea mays
  Clone ID: LIB3117-010-Q1-K1-E7
aaacgatgcgcttggattccgtgaaggaacgatttctttgtcagcacctcagaatttggccacttgaaagaatctgatgcttgaagtttcctggttctgtgtacacaagtcggctcaatgtcagaattgagccgcttgaaatatatttagttatattctatgcggagagtaggtcttggaaacagccttttccacaataatgtacagttattatgcc

SEQ ID NO: 4073 - DNA, 440 bp, Zea mays
  Clone ID: LIB3117-010-Q1-K1-E9
cccacgcgtccgcccacgcgttcgcccacgcgtccgcccacgcgtccgggggactcctggtccagttttaaatgcaattacaactggtgttgcttttgcagtatttcaaggtggctttttcatgattgggcagaaattctcaaagccatcaagtgaagatacatactactctctgacaagaagcatgctgcacaaactgggtcttgaaaaatatgaaaagaatttcaggaagggtctcctcaacgatcaaacattaccactccttacggacagtgctctgagagatgtgaagatccctcctggacccagacttctcattctcgaccaaattaaaagggaccctggcctggttcgagcaaagtgaagtcacaattgtcaacaattggtcctttctgagctgcatagggtttgaaagcaatgccacctcttttttttaaaat

SEQ ID NO: 4074 - DNA, 331 bp, Zea mays
  Clone ID: LIB3117-010-Q1-K1-F1
ctcgacgaggaagaggccaacgagatctacagctcccgcgcgcggcgcaccaaggcgggctacgggatggccatcgcctcaggcggcgccagctcgctcatcctgtccaacatacgcgcagctcctgtacgagatcgacaaggacatcgagagggcggagatgtacttcaagcatgcggtggccgccgagccggcggacggcgaatcgatgcggaggtacggcatgttcctgtggcacacccgactggacacatccggcgcggaggacatgttcaccggcgccattgacgcggagcccgagagcagccaccaccggagcagctacgcgtgg

SEQ ID NO: 4075 - DNA, 407 bp, Zea mays
  Clone ID: LIB3117-010-Q1-K1-F12
ggaattttgccagcaattgatcttattagcgtgaatgctttggttgggatattctactttgttggatttggactgttctgtctggaatcattgctcagcatctgggtcatccagcaagtgtacatgtacttccgtggaagtggaaaggctgcagagatgaagcgtgatgcgacgaggggtgcaatgagagccgcattttaagtgtggtgtggtattttttttgtgatgacagtcctaggcccaagcgcatacttccggtggataggttgtgcaccgaacaaaaagcagatgtttcttccttggttgctgactatgataccaaactgccagtaggttatcatgatgttacaagtgacattatatcactccccgtcctgatctaacaagaatggggatgtgcagctttt

SEQ ID NO: 4076 - DNA, 377 bp, Zea mays
  unsure at all n locations
  Clone ID: LIB3117-010-Q1-K1-F2
ccttctntttcctcaacccggctcggttctaattaaaaatggaacaggcacctcacaaccctatcgatctantctctcctcatgcatcaactaatacaatcatgtctgcactatacaaaaaagatctcaactattttagccggaacatgacatgcataacacatctctacagtttaacaatcttttgaagcatcaaaattttaactgtctatttggagtgctgagtaatatccaggagcctacatatcaaatagtttcaattgtttttaaatcttcacttttctgtaaatttgtttgccttggttttgattgacatatgactagcgcggaagtcaaatactccgttccaaattataaaatgttttatcttttcctcc

SEQ ID NO: 4077 - DNA, 368 bp, Zea mays
  Clone ID: LIB3117-010-Q1-K1-F5
cgtttatccacggaacttccggtgccggcggcgaccacttgtggcgatccagccctcgccatgtcgtcggagaaggaggcggcgctcgccgccgtgctcgatgacagcccaaccatatttgacaagatcatcaaaaaggaaataccttctactgtggtttatgaggacgagaaggtactggctttcagggacataaaccctcaagctccaacacacattctcatcatccccaaagtcaaggatggactaactggcctggcaaaggctgaagagaggcacatagaaatacttggctatctcctctatgttgccaaggttgttgcgaagcaggaaagacttgaagatggctatcgcgtcgtcatcaatga

SEQ ID NO: 4078 - DNA, 409 bp, Zea mays
  Clone ID: LIB3117-010-Q1-K1-F8
caggatttcgagaatgctatgcgggaggtaagaccttctgtttcctcaagcgagctggggacttatgaagaatggaacaggcagtttgggagcctatcgatctagtctgtcggcaggcatcaacgaatacaatcatgtcggcactatagaaaaaggagctcaacgattttagccggaacatgacatgcataacacagctctacagtttaacaatcttttgaagcatcaaaatttgaactgtctatttggagtgctgagtaatatccaggagcctacatatcaaatagtttcaattgtttttaaatcttcacttttctgtaaatttgtttgccttggttttgattgacatatgactagcgcggaagtcaaatactccgttccaaattataaaatgttttagcttttccgc

SEQ ID NO: 4079 - DNA, 438 bp, Zea mays
  Clone ID: LIB3117-010-Q1-K1-F9
caacaccagtcaccttccggtggttgttgggcttccagagcgctctgggttccgatgggagccggtggtggacaccggcaaggaggcaccatatgacttcctcaccgatggcctgccagatcgtgctgtcaccgtctaccagttctctcatttcctcaactccaatctctatcctatgctcagctactcctccatcatccttgtattgcgccctgatgtctgaaagaagcagatacaatagagtatactatagcggttgttctctaggctgtagcatgcagtggaaactggaaaatgttggggttgctctgttgtcggtagtttacatgcgcatgtcggtatgtgtagctaaagctggtggatctcagttctcagatcggactcgagacggggaaaaccattgcccagttggcttgttctctgaagttttgttggtgt

SEQ ID NO: 4080 - DNA, 375 bp, Zea mays
  Clone ID: LIB3117-010-Q1-K1-G1
cccacgcgtccgaattaaaaaaaaaaatataattttaaaaaaatataaaaaaaaaaagaaagaaaggaaaaaaaaaaaaaaaaaaaaaaaaaaatataaattaataaaaaataaaaataacaaaaaaaaataaaacccaaaaaaaaaaagtctccttttttaaaataaaaaatttttactatccttagtttcaaaataaatattttttttattgcgccctaaaatttaaaaaaatcgcccccaatttaaaatactataacttgaaaaacctttgctttaccaaatttaataaacttgtaaaaaaatcccttttttcaaatttgggtaaaacaaaaaaaccccccaccatatctcttttaaaaaaatttcccacac

SEQ ID NO: 4081 - DNA, 355 bp, Zea mays
  Clone ID: LIB3117-010-Q1-K1-G10
gtaccagctctgactcaactagctgtggcaaaccctgttgcctacttgcaacagctgcgtccatgcaaccaactgactctgtcgaactctgctgcgtacctacaacagcgacaacagttacttaatccattggtagtggctaacccattggtcgccgccttcctacagcagcaacaattgctgccatacaaccagttctctttgatgaatcctgtcttgtcgaggcagcaacccatcgttggaggtgccatcttttagattacatatgagatgtactcgataatggtgccctcataccgacgtgtgtttcctagaaataatcaatatattgattgagatttatctcgatatattt

SEQ ID NO: 4082 - DNA, 316 bp, Zea mays
  unsure at all n locations
  Clone ID: LIB3117-010-Q1-K1-G11
aaaaaaaaaaaaaaaaaaaaaaaaaaattaaaaatttaaaaaaaaaaaaaaaaaaaaaaggaaaaagtaaaaatttaaaaaaaaaaaaaaaaaaaaaaataaaaaaaaaaaaaaaaaaaaaaaaaaaaaaaaaaaaanggggcccccctttttaaaaattcaaattttatttcccctttattccaacttaaaaatttttttttagttcacccaaaataaaattaattgccccccttttaaaaacttttaaattgaaaaaaccttgccttaaccaaattaaatccctttaaacaaaatccctttttcccaagttgtg

SEQ ID NO: 4083 - DNA, 365 bp, Zea mays
  Clone ID: LIB3117-010-Q1-K1-G12
cgtcgcttccagccgccgccgcgtccgcctcgccaagcgcagcagccgccgcagcacagctctggctcgatctcagccatggcggaggtggagcatcaacaggacacgccgaagctgttcaaccgctggaccttcgatgatgtccaggtgaacgacatctcgctgaacgactacctcgctgtgaacgcgacgaagcacgcgatgtacctgccgcacaccgcggggcgttactccaagaagcggttccgcaaggcgcagtgcccgatcgtcgagcgcctcacaaactccctcatgatgcacgggcgcaacaacggcaagaaggtcatggctgtccgcatcatcaagcataccctggagatcattca

SEQ ID NO: 4084 - DNA, 394 bp, Zea mays
  Clone ID: LIB3117-010-Q1-K1-G2
cccacgcgtccggaaaccacccaagacgcgtgcttccattcctagcccaacagaagcggagcacgccaccgaccaccggcctcgaagggatcatcttctctacaactcgtcctcgtggccttgttcctcctcttgtataggggactgcggcggagtggagatccgtgccgacatagtccgacttcttcgctcgctgcctacgattgatggcctcaccttcaccaaccgaagagttcagcagggaagcagctcgtcagtctctgatcgcgatctccgagtccactccggagacaccttcaccgcagacggtgaggacaccgccgatctccagcgcagagaacgggaagccgggcgatggggcggacaagttcagatcgaagctgatgtccatcac

SEQ ID NO: 4085 - DNA, 350 bp, Zea mays
  Clone ID: LIB3117-010-Q1-K1-G4
cggacgcgtgggttcgtgcccgccgcctctcctccgtctctgcctctctccgtctcccctcccgtctgacgcacatggcctccatcgccggatcttcggccctctccttcgccaggcccgtcaaggcaatcaacacaaattctctagctttctcaccgttgaggaagggcaacatattcctccgcctgcaaccaatgcctatgagatctgtttcctgcgctgccaagaaggatacaacagacaaggtttgtgagattgtgaagaagcagcttgctcttcctgaccatactgaagtttgcggtgaatcgaaattctctgaactcggtgcagattcactggacacggttgag

SEQ ID NO: 4086 - DNA, 418 bp, Zea mays
  Clone ID: LIB3117-010-Q1-K1-G5
cggacgcgtgggcggacgcgtgggccgtgccagctgcagggaacctgcggcgttggcagcaccccgatcctgggccagtgcgtcgagtttctgaggcatcagtgcagcccgacggcgacgccctactgctcgcctcagtgccagtcgttgcggcagcagtgttgccagcagctcaggcaggtggagccgcagcaccggtaccaggcgatcttcggcttggtcctccagtccatcctgcagcagcagccgcaaagcggccaggtcgcggggctgttggcggcgcagatagcgcagcaactgacggcgatgtgcggcctgcagcagccgactccatgcccctacgctgctgccggcggtgtcccccactgaagaaactatgtgctgtagtatagccgctggctagctagctaagtgagtc

SEQ ID NO: 4087 - DNA, 235 bp, Zea mays
  Clone ID: LIB3117-010-Q1-K1-G6
cgtggcttcgagccgccgccgcatccgtcttgcctaacccaacaacccccccaacacatgtttctgtcgatctcaaccatggcggaggtttttcattaacaagacaccccgaagctgttcaaccgctggaccttcgatgatgtccaagtgaacgacatctcgctgaacgactacctcgctgtgaacgccaccaaacacgccatgtacctgccccacaccgcggggcgttacttca

SEQ ID NO: 4088 - DNA, 451 bp, Zea mays
  Clone ID: LIB3117-010-Q1-K1-G7
ctgagttatggaagaagagagttgggcactacaagtccgtgattgcgcaactgggtcagaaaggccggtaccgcaacctactcgatatgaatgcaaagtttggcggcttcgctgcggcattggtgaatgatcccttgtgggtcatgaacatggtccctactgtggggaactcaacaacccttggggcaatatacgagcggggcctcattggaagctaccaggactggtgtgagggcatgtccacttatccccggacctacgacctcattcatgcggattcactgtttacactgtacaatggcagatgtgaggcggacaacattctgctcgaaatggacagaattctgaggccagagggcacggtcatcatcagagatgacgtggacatgttagtgaagataaagagcatcacggacgggatgagatggaatagccagatcgtggatcacga

SEQ ID NO: 4089 - DNA, 392 bp, Zea mays
  Clone ID: LIB3117-010-Q1-K1-G8
cacccaaacttttactttcataccaagccaaacatactcctgcctctgtctcaattatacgtctctatgcactcaacctacctatattatctcaaataacgactgactttgctcttattcacaaatttgttctgcctgtaaagatctattcccatattgtcactaacatataacttttctacttataatcacttcacctttaattgacaccaaaccttctgtgaatctttttttaaacttccattttaatacatcaatacaccatatacttttattttaatacaccatatacatgacacctaaaaaaaacaataacaaacaactataatcctaccattccctctaacaaatccaaacttacctacactttcataacaaacctatatttctta

SEQ ID NO: 4090 - DNA, 333 bp, Zea mays
  unsure at all n locations
  Clone ID: LIB3117-010-Q1-K1-H1
tgatgtatactatcctttaccttnctcaaataaaaccattnatcaaccccatcctcatcctatantgatctctcctcttcattaaaaataattaaatctanatctgctntaccattattcaatctntnaacttcctattcatttttccccaccttattaaataaataaactgccatgagtttttttttttttgctactccttcactgcaaacatttataatgttcgctgtgattattgtattcaattttattatatacgcaataataatattatctaaatatcttttgtcctctcattggaatttcttggttcgtatacccaacttttttctt

SEQ ID NO: 4091 - DNA, 247 bp, Zea mays
  Clone ID: LIB3117-010-Q1-K1-H10
acactaccttatatctctccacaaaaacttatataatcttattcatcaatcaccacttatcttttctctttttcaatcatcatcattcatatcattactctcaatacaacttcacctttccttcattcacctcaattacctccactttattacattattacatcatctaaagcactattatatcctactctatctaactattctcatctcattaacattaataatatcataaaaactcttacttaat

SEQ ID NO: 4092 - DNA, 398 bp, Zea mays
  Clone ID: LIB3117-010-Q1-K1-H4
ctctatatggatttgaatccagccaacatcctcgtccgttcagatatgaatgctgtggtcatcaattttggatcatcaatagtgctggatcgtgatgatgataaggtcaccggggatgccgtagcaggcacactgggttatgtcgctccagaaaaacttatggaagcttatgcatcaatgatgtctgatgtgttctcttttggaatcatcatcattgagatcattaccggcaggagagcttcacctttcgttgatttaccggaatggggttcagttgatgagatgattacatcagcgaaagggttatttgatccggcgctagctaacgagtctcagctgatgaagattaataggtgcagagaggtcggactgaagtgcattgagcgggatccgaaacg

SEQ ID NO: 4093 - DNA, 322 bp, Zea mays
  Clone ID: LIB3117-010-Q1-K1-H5
cattgttgtcgcttctcacttctcactcaccaaccaacccaaccgagcaactgggctcgtaccgtacgtagtacctgctgcgacacgccgaggagctagacctgttggagctaggacagtcagacacgagacgacagagaccatgtcgacgacgacgatgaaggcgagcgacccggggtccgcgtggttcggcagcggcgcacgcacccggtcggcggcggggataagccacaacgcgcggctcgtcaccaccgcggtcgccgcgttcgtgtccgtgctcggcctcgccctcttcctccacctctacgtctgccacgtgcgc

SEQ ID NO: 4094 - DNA, 447 bp, Zea mays
  unsure at all n locations
  Clone ID: LIB3117-010-Q1-K1-H7
ctgctgcaaccgcgggccctccacaaacctattccatttgaccttggtgactacagctgtaatttgttgttggatgatgtatgctatcgtttaccttgctcagatgaagccattgatcaaccccatcctgagcggggagtgatctctcctctgcattaaaaagaatgaaagctagatctgctgtaccattattcaatctgtgaacttcctattcatttggccccacctgatgaaataaataaactgccatgagtttttttttttttgctactccttcactgcagacattgagaaggttcgctgtgattagtgtatgcaattgtatgatatacgcaataataatagtatctaaatatctgtgtgccgctcattggaatgtctgggtgcgtgtacccaactttgttcgtcacgactcangtgtttgtctgcttgtaatggaattatgaa

SEQ ID NO: 4095 - DNA, 403 bp, Zea mays
  Clone ID: LIB3117-010-Q1-K1-H9
cggacgcgtgggcggacgcgtgggcaactagcaacatagaaagcacaatagtgtaccagcaatggcagccaaaatattttgcttccttatgctccttggtctttctgcaagtgttgctaccgcaaccattttcccacaatgctcacaagctcctatagcttcccttcttcccccatacctctcaccagcggtgtcttcaatgtgtgaaaacccaattgttcaaccctacaggatccaacaggcaatcgcaacaggcatcttaccattatcacccttgttcctccaacaaccgtcagccctattacagcagttacctttggtccatttggtggcacaaaacatcagggcacaacaactacaacaacttgtgctaacaaaccttgctgcatactctcagcaacat

SEQ ID NO: 4096 - DNA, 426 bp, Zea mays
  Clone ID: LIB3117-011-Q1-K1-A1
ctctgacgatgaatagttgacaagcagcttccgaacaggaaacgtaagcggaggatctgctgcagttttgaggcagcttgtctgttgccagttgccgggtgcttcctcaaggtcttgctcatggttgatctcgaaaatatgtctcccgaaataatcttgtttatcttcttcggtggtggcacctggtagaaaattttcctgggcagtcttagacattaattcaacagtaaaagcataacatcatgcaagtataccaaatactgagcgtatcgcattggattattagcagcgctttgtttttgtcgtctggtacctattttttggctggcggttattacaagaacggtctcatattataaattattatataaggcggtcattggttgggacgcttggaattgaggaaatataccttgcttataccgg

SEQ ID NO: 4097 - DNA, 139 bp, Zea mays
  Clone ID: LIB3117-011-Q1-K1-A10
cctggagcccctcatcgttatcatgtttgtgtatgagcgaaagatcattattgtgttgttgtgtgaaacaagagtgtaaggatatgtctactacttaacaaagttatgctgagcaatgcatatcctagttgaatgtgac

SEQ ID NO: 4098 - DNA, 315 bp, Zea mays
  Clone ID: LIB3117-011-Q1-K1-A3
cccacgcgtccgcccacgcgtccggaaaaatatccccaaaccctagctcccgatctcgatggcgaaccgtcgcgtcttcttcgacatgaccgtcggcggcgccccggcgggccggatcgtgatggagctgtacgccaacgaggtgcccaagaccgcggagaacttccgcgcgctgtgcacgggcgagaagggcgtgggcaagtccgggaagccgctccactacaagggctccaccttccaccgcgtcatccccgagttcatgtgccagggcggcgacttcacccgcggcaacggcaccgggggcgagtccatcta

SEQ ID NO: 4099 - DNA, 171 bp, Zea mays
  Clone ID: LIB3117-011-Q1-K1-A5
ttatatctgatgtgcgaacacattatcttactaaacctcattctaatgctacatcactaaaacctatcttccgaaatcacataccatatctatctctacatctacaacatatataacatttaatatgtacacacttaaactttaattcaacagtctaatcataccatcatt

SEQ ID NO: 4100 - DNA, 392 bp, Zea mays
  Clone ID: LIB3117-011-Q1-K1-A7
cactcactcacatacattccaatatgaataatatgagtgatagagccttgttggtacttatgttgcttctatctgtattattcgttgcgcaatgcggtcgtcctcatgatgatgaagttgttggaaccgcaaggggccgccgagctgcttttagcctcaccgagaatggatattgtgacacggagcaccaaaactgtaaagtggtctactgctgctcgcatccacagccaaagcattgctatgccacttttatgcagtgtcgggccaattgctacgttcataaacgcaagtgatccatatctgatgcttggggtctaaaaacatcatcattggtagcttaaacaatggactttaccatgggtggtaatataataatatggggaagtcggtct

SEQ ID NO: 4101 - DNA, 351 bp, Zea mays
  Clone ID: LIB3117-011-Q1-K1-A8
gtcataaccagcctggagtttccgcatttcgattgggaaatggctatgctggattgaagggtgctcttggttccgatgatgccagactccaaaggaaagctctcaatctcatacaatacttgctgcacaactacaaggcagacaggagtgttgccacagagcttggtcttccgaagctgatgatgcaccttgtgtccagcgatgattccttagtgcgtgaagctgctctaggcggcctccttgagttggcgcgggacaagacatctggtaacgcgctacctgaccaagaaaagctgaaagacatgctcaagagccgaatagaagggatcagcgcaatggacactgacgatc

SEQ ID NO: 4102 - DNA, 439 bp, Zea mays
  unsure at all n locations
  Clone ID: LIB3117-011-Q1-K1-B12
cccacgcgtccgcccacgcgtccgctcaaagactggtaagcatggccatgccaaatgccactgggttgccatagacatatggaacgggaaaaagcttgaagatattgttccttcatcacacaactgtgatattccgcatgtgaaccgtactgagtaccagctgattgatatatcagaggatggatttgtgagccttcttacttcagatggcaacactaaggatgatcttagactcccaactgatgagactcttgtggcccagatcaaggaagggtttgaaagcggcaaggatcttgttgtgactgtccagtctgctatgggggaggagcagatctgcgcgctgaaggatgttggccccaagtaacttacctgccttggaatactgtatctcaaaacctanatcgaaaaaagaagtgtatcaaggattgctacagagaca

SEQ ID NO: 4103 - DNA, 368 bp, Zea mays
  Clone ID: LIB3117-011-Q1-K1-B2
ggcttctcctccccctcttaccaagtcctcctcgggttagggttccttagggttttgtggaggggcgagggcggcggctgatgtggagtaccgctgcttcgtcagcgggcttgcctgggccaccagcaacgagtcgctgcagaatgccttcgcctcctacggcgagatcctcgactccaaagtcatcaccgaccgttagacgcagaggtcccgcggcttcggcttcagtaccttctgctgcgagaactccatgctcgacgctatcgacaacatgaacagcactgagctcgaaagacgtgacatcacccttgaccaggaccagtcccgtagcgataaccgtagcggacactgctaaggttgacgctgct

SEQ ID NO: 4104 - DNA, 267 bp, Zea mays
  Clone ID: LIB3117-011-Q1-K1-B5
cggggctcgcaatcaagcactccctcggccagtcccacccggtcaagctcgcgcctttcaggccggaccaggaggacgcgtcggtgctgtggacggagagcaaggacgtgggcaagggcttccgctgcatccgcatggtcaacaacacccgcctcaacttcgacgccttccacggcgacaaggaccacggcggcgtgcacgacggcaccgccgtcgtgctctgggagtggtgcaagggcgagaaccagagctggaagatcctgccgt

SEQ ID NO: 4105 - DNA, 442 bp, Zea mays
  Clone ID: LIB3117-011-Q1-K1-B6
cggtgaggaagggtaacacattcctccgcctgcaaccagtgcctatgagatctgtttcctgcgctgccaagaaggatacggtggacaaggtttgtgaaattgtgaagaagcagcttgctcttcctgaccacactgaagtttgtggtgaatcgaaattctctgaacttggtgcggattcgctggacacggttgagattgtgatgggccttgaggaacacttcgacattagcgtggaggagtccagcgcgcagacaattgccaccgttgaagacgccgctgacctcattgacaagcttgttgctgtgaaggcataggccgcatctcttctatcattgtcttaccactctaggtttctatggtctgaagacttgtgattttctccgcactgctgttgctattcccgtgtcgtaataatacgagatgttttaagcggctgaacaca

SEQ ID NO: 4106 - DNA, 437 bp, Zea mays
  unsure at all n locations
  Clone ID: LIB3117-011-Q1-K1-B7
cggacgcgtgggcagaccattagctttatctactccagagcgcagaagaacccgatcgacaccatgagggtgttgctcgttgccctcgctctcctggctctcgctgcgagcgccacctccacgcatacaagcggcagctgcggctgccagccaccgccgccggttcatctaccgccgccggtgcatctgccacctccggttcacctgccacctcctgtgcatctcccaccgccggtccacctgccgccgccggtccacctgccaccgccggtccatgtgccgccgccggttcatctgccgccgccaccatgccactaccctactncaaccgcccggcctcagcctcatccccagccacacccatgcccgtgccaacagccgcatccaagcccgtgccagctgcaaggaacctgccgcgttggcagcaccccgatcct

SEQ ID NO: 4107 - DNA, 327 bp, Zea mays
  unsure at all n locations
  Clone ID: LIB3117-011-Q1-K1-B9
cccgcaacggctccacctccaaggtggtcaaggtcgctgactgcggacagctctcctagatgtctctgatctggtctggggggccgccctccctccgtcatcgtcgactccccctgcgtccgttcctttggatctgaataagatggtggtgatctgagtggtggtcttagtttatcatgtatcgctcgcagtttaatttagcggtttaggtgtggatctgtgaaccccatggcgcctctgcttgattcgtgtttcacctgttatgttctgagattcatgataatgctatgagaactgaaattcccgtttaaaaaaaaaaaannnnna

SEQ ID NO: 4108 - DNA, 382 bp, Zea mays
  Clone ID: LIB3117-011-Q1-K1-C1
cccacgcgtccgcgatactccaacgtccattcgcttgtctacatcgtccaagggagagggatcattgggttctcgtttccgggatgccaagaggagacccagcagcagcagtatggatacggatatggatatggacaccatcaccatcagcatgaccaccacaagatccaccgattcgagcagggcgacgtggtggccatgccggccggcgcccagcactggctgtacaacgacggcgacgcgccgcttgtggcggtctacgtcttcgacgagaacaacaacatcaaccagctcgagccttccatgaagaaattcttgctggctgggggcttcagcaaggggcagccccacttcgccgagaacatcttcaaagggatcgacg

SEQ ID NO: 4109 - DNA, 323 bp, Zea mays
  Clone ID: LIB3117-011-Q1-K1-C11
aagaaatccatcgagaggccgtcgacaggggaattaatggcgtcgtcgtctagcagcagccaccgccgcctcatcctcgcagccgccgtcctgctctccgtgctcgcggctgccagcgccagcgccgggacctcctgcgtgccggggtgggccatcccgcacaacccgctcccgagctgccgctggtacgtgaccagccggacctgcggcatcgggccgcgcctcccgtggccggagctgaagaggagatgctgccgggagctggcggacatcccggcgtactgcccgtgcacggcgctgagcatcctcatggacggcgcgat

SEQ ID NO: 4110 - DNA, 440 bp, Zea mays
  Clone ID: LIB3117-011-Q1-K1-C12
gcaacgagcacccgcccaccaggatccaggtttgtgctgcgacagcgcctatccattcaccatgattaatttcgtgctcgtgatcagccgccagggcaaggtgaggctcaccaagtggtattctccttacacccagaaagagaggaccaaggtcattcgcgaactcagtggactcattcttacacgagggcccaaactctgcaattttgttgagtggagaggttacaaggtcgtataccggaggtatgctagcctgtatttctgcatgtgcattgatgccgaggacaatgagcttgaagtccttgagatcatccatcatttcgtcgagatactggaccgctattttggcagtgtgtgtgagttggatttgatattcaattttcataaggcctactacatactggatgagattctcattgctggtgaacttcaagaatcta

SEQ ID NO: 4111 - DNA, 398 bp, Zea mays
  Clone ID: LIB3117-011-Q1-K1-C2
cttggcgtccgcctcagcccgccgccaggagagttcaggagagtttcgagaagctgaaatggctcctagagctgctcctgccaagaagggtgatgccaagacccaggccttgaaggttgccaaggctgtgaagtctgggtcagtaaagaagaccaagaagatccgcacgtccgtgacatttcaccgtcccaagaccctgaagaaggctagggaccccaagtacccaagaatcagcactaccggaaggaacaagcttgatcagtaccaaattctcaagtatcccctcaccacagaatcggcgatgaagaagattgaagataacaacactctggtcttcattggccacctcaaggcagacaagaagaagatcaaagcttgtgtcaagaagatgtatgaca

SEQ ID NO: 4112 - DNA, 376 bp, Zea mays
  Clone ID: LIB3117-011-Q1-K1-C3
gcattgtctatgacccatctagatctagtcaaggcgtgctagctctcaaagccttaaagcttacagactcgtttatggatctttaccgtaacaatggtttaactggggagaagttaagggagaagaaattgtcctgggttgatatttttgaggagataccaataaaagtttccaactcagcgcttgtcagtgcctttatgaaggagctggaacctgagtcacctgttacccagtgtgacctggaccgacttaaattgtcaaccgccccctttatggaaaggaacttggaatttctgattgggtgcatggatgatctttcatcagagcagaacaagttccaatattataaccgcaatctcttaagacaacagtcaca

SEQ ID NO: 4113 - DNA, 102 bp, Zea mays
  Clone ID: LIB3117-011-Q1-K1-C4
catgtccacgcctgcacacagacaaccaacattcaacatcatcttgactagcatcctaggtgtcaatccgagattaatatgataattttattctttttatat

SEQ ID NO: 4114 - DNA, 300 bp, Zea mays
  Clone ID: LIB3117-009-Q1-K1-A6
gcgagctccgcctttgggacctctccaccggcctcaccacccgccgcttcgtcggccacgagaaggacgtcatctccgtcgccttctccgtcgacaaccgccagatcgtctccgcgtcccgcgacaagaccatcaagctctggaacactctcggcgagtgcaagtacaccatcggcggcgacctcggcggcggcgagggccacaacgggtgggtctcctgcgttaggttctccccaaacaccttccagcccaccattgtctccggatcctgggaccgtaccgtcaaggtctggaacctta

SEQ ID NO: 4115 - DNA, 431 bp, Zea mays
  Clone ID: LIB3117-006-Q1-K1-B11
cccacgcgtccgggagcattgaggggtcatttggaactttcaatgtgaacaacgtccaagtgtttgctggctatgttctacatattggctcatttacaaaaggttcgaaggttttgtctcttggagatagtgtgatatgcaaggttgattacaaccggcgcacactgattgctccaaatcatacgtgtacccacatgttgaactttgctctaagggaagtacttggtgatcatgttgaccagaagggttcaattgttctaccagagaagctaagatttgatttctctcatggaaaacctgtccagcctgaagatctgaggaaaatcgagttcatagtgaaccagcaaataaaggacgagctgggtgtgtatgcactcgaaataaaactagaggatgcgaaacgcataaatggtcttcgtgctgtgtttggt

SEQ ID NO: 4116 - DNA, 392 bp, Zea mays
  Clone ID: LIB3117-006-Q1-K1-B2
ttcgctttatccttcttgtcttcctctgacttccctgaatcctcaccaacatactgcgtctggttatatttcttggtttgtctgcaagtgcttgtaccgctaccattctgcagcaatgctcacaagctttctatagcttcatttcatcccccgtacctctcaccatctagctctatccttattgttaaaaacccaaatctttaacacctataaggatccaacaatccaatcggaaattggatcttacctttatcaccctttgaccctccaaaaaattatcaaaacctattacagtaattacactttggtgcatttattggcacaaaaacattaaggctcaaacaactacaacaacttgtgctttcaaaaccttggtgctaactttaacaaca

SEQ ID NO: 4117 - DNA, 342 bp, Zea mays
  unsure at all n locations
  Clone ID: LIB3117-006-Q1-K1-B6
gcaacatagaaagcacaatagtgtaccaacaatggcagccaaaatatggtgcctgcttatgctccttggtctttctgcaagtgctgctaccgcgaccattttcccgcaatgctcacaagctcctatagcttcccttcttcccccgtacctctcaccagcggtgtcttcggtatgtgaaaacccaattcttcaaccctataggatccaacaggcaatcgcagctggcatcttacctttatcacccttgntcctncaacaatcatcagccctattacagcagttacctttggtgcatttattggcacaaaacatcagggcacaacaactacaacaacttgtgct

SEQ ID NO: 4118 - DNA, 349 bp, Zea mays
  Clone ID: LIB3117-006-Q1-K1-B7
gtttcttggtcaggaggaccaagagcaatttcaacgctgtcattctcaagaggcgtttcatgagtaaaaccaaccgaccaccaatctccatgcgccgccttgtcaagtttatggaaggaaaggagaagaacattgctgtcattgttggcacagtcacagatgacaaaaggatccaggaggttccagcaatgaaggttactgccctgaggttcacggagacagcaagggccaggattgtcaatgctggtggcgagtgcctcacatttgaccagcttgctcttcgtgctccacttggcgagaacacggtcctcttgaggggccccaagaatgcccgtgaggcagtgaggca

SEQ ID NO: 4119 - DNA, 435 bp, Zea mays
  Clone ID: LIB3117-006-Q1-K1-B8
cccgaatcgaccgcacgcgtccggcctgcgcaacagtggtttgctcatgctctccttgaaggcgaagcgtatgaaccggcttggacatacaaccttctgaaaagggagtggcaaaaggttcctgattgcgtgctaccatacagccgcaaaaagcaatggatagcgtgtggcacagcatttgatccggtcccctgcgccttggcctgacatggaatttaccttctttgcccgagtaccataatactatagtgaattcgtatcattggcctatatttttagatctttctaatgttatgatgagctctgcaaaaccgcgttcactgaagcttgttttctatcacgctgacgcatttgaaccgtttcctttgatcacctgctggtacttgggtcactgctacatcaattgggcaagttgacctgaatatgtttcattga

SEQ ID NO: 4120 - DNA, 147 bp, Zea mays
  unsure at all n locations
  Clone ID: LIB3117-006-Q1-K1-C11
gngaaatctcctctatccatctctctctatctatatatgtaataatgcagtaagacgacacacattatcatgtgtggtatgaccaataatatatgcatggtcataataaagttttggttttaatgaatctatcggccgcttgatgtc

SEQ ID NO: 4121 - DNA, 293 bp, Zea mays
  Clone ID: LIB3117-006-Q1-K1-C12
gcgagctagagctagagctatagagatcactctccttctccgcgtgaggtagtgacgcccaggcatggcgacaatggcactgcgcgccgtggcaacggcgctgctggtggtggcggcgtccgtgtgcggcgcgtcagcgtcgacgctggtgctgtacaaccggtgcggggagacggtgtggccgggcatacagccgagcgccgggaatgaggtgctggcgcgcggcgggctgcagctggcgccggagcagtcggcgtcggtgcggatccaccgggtgtggtactagcgcgtgt

SEQ ID NO: 4122 - DNA, 181 bp, Zea mays
  Clone ID: LIB3117-006-Q1-K1-C2
aggcctgcggacagtggtctgctcatgctcttcttgaacgcgaaccgcataaaccggcttggggcatacaaccgttctgaaaagggagactcataaacgttcctgattgcatgctaccatacatgcgcaaaaagcaatggatcactggcggcacaacattcaatcccttccaatgcacctt

SEQ ID NO: 4123 - DNA, 417 bp, Zea mays
  Clone ID: LIB3117-006-Q1-K1-C3
cccacgcgtccgctacgacgcgctgaaggctgtgcagtctggattgggtaccgcggctgtcatcgtgatggacaaatctacggacgttgtcgacgcgattgccaggctgtcctacttctacaaacacgagagctgtgggcagtgcacgccctgccgagagggcacgccctggctctggatgatcatggagaggctcaaggttggtgacgcgaagctagaggaaatcgacatgcttcaggaggtcacgaagcaaatcgaaaggcatactatctgtgccctcggggacgctgcggcgtggcctgtgcagggacttatcaggcacttcaggccggagttggagaggaggatccgcgagcgagctgaaagggagctgttggcggcttctgcatgatgtgccagccgcatgtactagttttt

SEQ ID NO: 4124 - DNA, 407 bp, Zea mays
  unsure at all n locations
  Clone ID: LIB3117-006-Q1-K1-C6
gccacgcgtgcgcccacgcgtccgcgcatgcatggtctgcagaggcgagccttggcggagccaaggcggcagccggggcgactatcgactgcgcgatccccaccctggccagcgtgcggatgctgccatgggccaaggccaacatgaaccccaccggccaggcgctcatcgtctccacggcggctgggatggcctacttcatcgccgccgataagaagatactgtcactggcgaggcgccactcgttcgaccaagcccctgagcacctgangaacacctccttacagggcacctgacgtgcacagccggctatcttcaggccgtgagacgagacctacgtcgagctagctagctacctgcctgtttcagttcgtcagtgcagattaagcaccaaatgtcgaccgatg

SEQ ID NO: 4125 - DNA, 222 bp, Zea mays
  Clone ID: LIB3117-006-Q1-K1-D1
cccacgcgtccgatgagaagcagaggttctttggcaagctcaaggcgtaaggtgcgtgcggtgcagcgaagtcccatttctcaaaatcatcaaactgtgatacttttgtttgtaaccttgctgtaccaagttttgtagccatggtccggtcgtctatggattgttccatgcttcagaactgcactgtctatgttttgtgctattttggttgtttaatgcccc

SEQ ID NO: 4126 - DNA, 212 bp, Zea mays
  Clone ID: LIB3117-006-Q1-K1-D11
gacccacacgttcgcccacgcgtacgtccacgcctccgtttgcttctagtgccattcttccacacatcccgcctccggttactttaatgggctgccaacacccatactgtgcacagcctattggctacaacaagcacttgctgccagcgtcttataacaaccaattgcccaattacaacaacaatccttggcacatctaaccatacaaacca

SEQ ID NO: 4127 - DNA, 357 bp, Zea mays
  Clone ID: LIB3117-006-Q1-K1-D2
cccacgcgtccgcggacgcgtgggcggaagttggtcatttgaaacgctttgctggtgactgggatggttatggccgcccaaatggcactgcagatgtggtgttgacaccgaggagcgatgcaattggtgcactgtagcggtataataatgttctacttgatggcaaagctatgaagatggaagtcatcggaaatgacttatgattgtctatgacagctcgtataaatgatggtggggcttctaatggcagagctacaagaacagatgttatgacgcctgagtttagtcaacgtggcagaagttcaagcagtagacctatgagtaatgccagcatcaggtttaataaccgtggtggtt

SEQ ID NO: 4128 - DNA, 254 bp, Zea mays
  Clone ID: LIB3117-006-Q1-K1-D5
gccacgcgtccgatgagaagcagaggttctttggcaagctcaaggcgtgaagttgtgcggtgcagcgaagtgccatttctcaaaatcatcaaactgtgatacttttgtttgtaaccttgctgtaccaagttttgtagccatggtccggtcgtctatggattgttccatgcttcagaactgcactgtctatgttttgtgctattttggttgtttaatgccccaaaaaaaaaataatacatttatttattaataat

SEQ ID NO: 4129 - DNA, 375 bp, Zea mays
  unsure at all n locations
  Clone ID: LIB3117-006-Q1-K1-D7
gtgacaagcctcatctcagccgtgcaggaccaagtagttttgcttcactccggcgttccatgcatatccatccatcagaattctcagtctccacagcagcaaggcgcacgaccagcaccagcagccggcaacaaaagacacagcagcgatggcgttcgtgccggtgtgcgtgcagtgcgggacgcggagcaacccgtgccggtgcaaggtggtcgggccgacgctggggttcgtcgcgttcgtggtggccggggtcatcgagtggccgctgggggccgccgtgtacctgttccgncaccgcaagggacgacgcatcatggcgcacccggccaccgtcgtgtacccgcgcgttaccagggccatcccgatctaatc

SEQ ID NO: 4130 - DNA, 240 bp, Zea mays
  Clone ID: LIB3117-006-Q1-K1-D9
taatcaaataaatgccttattttaaaacttgaggagaccagcaaccaatttcgtgaccgggtgttttaacacggggccaacttattactcggctactaacggcactcttcaccacagcaagccccatcacatgtttgcaatggattattctttcattccctggaaacttcagcataaccaacccttcaaatcgggatctctccccagcatattaataatttcatgcccgcatggctaccc

SEQ ID NO: 4131 - DNA, 346 bp, Zea mays
  Clone ID: LIB3117-006-Q1-K1-E2
atgaagcgattgcggccagcgacttacaacaaccaatttcccagttgccacaggaatcgttggaacatttaacaatccaaaccatggcaacacgactgcgacaactattcgtaccaggactgagccagctagccatggtgaacgctgccggctacttgctacagcagctgcttgcatcagacccacttgctctggcaaacttagatgcaaaccaggcacaacatcagctgcaacagctgctgacaacgctcaatgaactagccatggcgaaccatgccatctacctacaacagcaacaactgctttcatctaacccgctcgctgtggccaatgcacctacatacct

SEQ ID NO: 4132 - DNA, 415 bp, Zea mays
  Clone ID: LIB3117-006-Q1-K1-E3
ccagtcgccatcgagagacccaaggaacaaggacgccgccgcgcggaaaactcgtggtcgccgccaatcctcgctcccatcgccaatggggcctgggggtcaacccagggggcttcgtcccatcgtcggggttgtgcccgtggccaagttgggggggaaacgaccattatggcgagcccaattgcacaccgaagattgtaatccacatcgaatccgcccttgacgcggtcagagatctctgcgcccctattctccgcgcgaggttacgagccacctgaggagcaagttggtacctggaatctcaagtcccaggtcaagaacagataccgcaggatgaggcgcatggaggatgctgtgacgagtacgtgagaggtctaggccgtcgtcttccagtcaaacttgggttgctggatcc

SEQ ID NO: 4133 - DNA, 404 bp, Zea mays
  Clone ID: LIB3117-006-Q1-K1-E4
cccacgcgtccgcaagaagccatgggtcctgtacttctccttccgccgtgccctgcacacgagcacccttaagggctgggctggccaggtggaaaacgtggacaaggctagagcggccttcctggccaggtgcaaggccaactgcgacgctaccctcagcacctacaacggtgatgctgccggacacaccgagagtattgacgtcatggactacaagtactgagttgcttctgtttgcaatcccgttggcttggaactcctgcctgccagtacgatgctgagtgttgtttgcttgttagagctattatattccgacatgagaaaaacatgcttcctatgtggatgatggttatccatatattcgtatatcaactagccatgtgcagactacgggcggccgctct

SEQ ID NO: 4134 - DNA, 347 bp, Zea mays
  Clone ID: LIB3117-006-Q1-K1-E9
gtgatggcatcctcaagctgcttgagacccatcttgtgccgtcttccactgcccccgagtccaaggtcttctatctcaagatgaagggtgattactacagatacctcgctgagttcaagactggagctgagagaaaggacgctgctgagaacacgatggtggcatacaaggctgcccaggacattgctctggctgagcttgctccaactcaccctattaggcttggactggcacttaacttctcagtgttctactatgagattctgaactcacctgatcgcgcctgcagtcttgcaaagcaggcttttgacgaggccatctcggaactggacaccctgagcgaggag

SEQ ID NO: 4135 - DNA, 407 bp, Zea mays
  Clone ID: LIB3117-006-Q1-K1-F1
ccgtcgcatcggcggcggcaagggcaataatgccccgcgactgcgacactgctggcgccttcgcggcgggcgacggcagtgccggcgccgtggacgaggacgacgagcaggccaagaccgccgacgtgttcggcgggcggaccggcggcggcggcctcttcggcggcgtccacggcccgctgggcggcggcgtcgctgggttcggcccgttcggcggggccgtcgccggcgcgggcccgttcggcgggttcggaggcggcggcggcctcggtggcggaggaggagcaggtggcgccggcgtcccgtgaggcgtgagcaacgctgtgcttgtgcatggccatggatgcatgcgtgcgtgcgcgtgtaataatgtgtctgtgcggtacgactgtacgtacgtgccgtgt

SEQ ID NO: 4136 - DNA, 359 bp, Zea mays
  unsure at all n locations
  Clone ID: LIB3117-006-Q1-K1-F11
ggctgctgcaggaggcggaggacgaggcggccaaggagtacccgcggtcgctgcgccaccggggacaccgncacgagctcagcatcgtgtcggagaagtccgggggaaggccctacatctgctgcgagtgcgaggagcanggactcggctgggcgtaccagtgcatcgcctgcggctacgagatacacctcaggtgcggccagaatgcggagggcggcagcgcaggaactgcttagctagctaggcgacgtacgggaagtcggcagcatgccagcataacagcatcactggagtggtgtctacctattagactgctgcatgcgtattggacttggacatggtctgtgtttgatcccaac

SEQ ID NO: 4137 - DNA, 389 bp, Zea mays
  Clone ID: LIB3117-006-Q1-K1-F12
cggacgcgtgggttgacaaattcaaccgtggttcagttctgcaaggcttctgtggaacctatgggtgaggaaagtgaccatgtgcacataattgccctatcagatgcactaggcgtaccaatccgtgttatgtacctagaccgaagctcgtgtgacactggcaacctgagcgtgaatcaccacgatttcatcccgtcggccaatgattcggagggtgatgcggccacgacacctgctcctgccacagagaaaccgtacatcactttgctctaccgtcctggccactacgatattctctacccaaagtgaattttgcgcatggttagtttcacgacttcggttgagaaagcacactgcccagaaaactcgtcatgtttcgcctgtgtgct

SEQ ID NO: 4138 - DNA, 281 bp, Zea mays
  Clone ID: LIB3117-006-Q1-K1-F3
tgaagagaagaatgacggcggctagaagaatgaggagaagaaggactgctgcgactgagacggctacaagaaggacgaggccagcgacaaggacaaggacccggccgccaacctgtacatgcactacccgcggttcccgttcgctggagggtactaccagccgccggcctacccgtcgactccggtgtacccgtacgcctaccagccggactacccaccgccgttctactcgccgtcgcaccatcaactgcaccatcagcagcccatggcaccttaaatct

SEQ ID NO: 4139 - DNA, 397 bp, Zea mays
  Clone ID: LIB3117-006-Q1-K1-F5
gcgtcgcatcggcggcggcaagggcaataatgccccgcgactgcgacagggcttgcgccttcgcggcgggcgacggcagtgccggcgccgtggacgaggacgacgagcaggccaagaccgccgacgtgttcggcgggcggaccggcggcggcggcctcttcggcggcgtccacggcccgctgggcggcggcgtcgctgggttcggcccgttcggcggggccgtcgccggcgcgggcccgttcggcgggttcggaagcggcggcggcctcggtggcggaagaggagcaggtggcgccggcgtcccgtgaggcgtgagcaacgctgtgcttgtgcatggccatggatgcatgcgtgcgtgcgcgtgtaataatgtgtctgtgcggtacgactgtacgta

SEQ ID NO: 4140 - DNA, 349 bp, Zea mays
  Clone ID: LIB3117-006-Q1-K1-F9
gtccaggttcttcgacggcaagtcgcagtccttcgcctcgctcgccgccgtggggtcgctagaggacctgcccaagccggcccggaagcgcctcaagccgtcgcggagctgcggcggcgccctcgacgcgcaccgcggacgcctcctctcgccgcgcaggcattattgcaccaagcccaccgctaggactaggaaggcagccgcgaggagcggcacgttgtcggttctcgcggccggcgcgccgaggatgccgccggcggtggcgagggccgagggcgtggccgccaaggttctgatcgtcagttgagccgcggatcggcctgcctgagctcaacatcgacgcacacac

SEQ ID NO: 4141 - DNA, 155 bp, Zea mays
  Clone ID: LIB3117-006-Q1-K1-G1
cctgtacatgcactacccgccattccccttcgctagacggtactaccagcctcccgcctaatcctcgtcttcagggttcccgtactcctaccaacctggctacccttcgtcgttctacactccgtcgcaccatcacctgcaccatcatcagacca

SEQ ID NO: 4142 - DNA, 409 bp, Zea mays
  unsure at all n locations
  Clone ID: LIB3117-006-Q1-K1-G10
cggacgcgtgggtacagatagcttaccttcttggttcatcaggagtgcaaagttgcaggatctcangcggcgctgacgatgacgcagcagccctggagccttccacggccgagcaaggacgagtaggaaggagggccacatgcgtcgtggccccgtgacacctgcttcacgttctctcagattttaattttatgacgcacagcgaaaagcccaaaaggaggggggggaagatgctgtcgatacagatcgttcgatccacacgggaagatctgaagcatgagagcatgtctgaaacagtcgagatgtcagacatgtcctgccgccattttattttttacccgctcatgtacgggggttatttttttttcgtatttctttcctcagcggcgctgcagaatagaaccgatcg

SEQ ID NO: 4143 - DNA, 175 bp, Zea mays
  Clone ID: LIB3117-006-Q1-K1-G11
cttaccttcactccagcagactatgaagagcccatctttgccccttacactctcacttttcaatttattttacccacgaaaccaaagacttcgtaaatcttcatcaatcttcacccacttaaacttacatatactgtttaaacatttaattatacattctgcccatttattttac

SEQ ID NO: 4144 - DNA, 236 bp, Zea mays
  Clone ID: LIB3117-006-Q1-K1-G12
aagaaggaagcacggcttgctaccagcagtttgcggctaaccccgcaaccctcttacaactacgacaattgttgccctttgtccaacttgctttgacaaacccagcagcctcctaccaacaacacatcattggtggtgccctcttttagattgcttattagttgtaattcaataataaagttttttggatgatgtatgtggccaaccagaaataagaagttacatttccagattct

SEQ ID NO: 4145 - DNA, 309 bp, Zea mays
  Clone ID: LIB3117-006-Q1-K1-G3
gatcagcaaagcggcagtgcgtagagaggatcgtcgaacagaacagcatgaagatggtcatcgttctcgtcgtgtgcctggctctgtcagctgccagcgcctctgcaatgcagatgccctgcccctgcgcggggctgcaaggcttgtacggcgctggcgccggcctgacgacgatgatgggcgccggcgggctgtacccctacgcggagtacctgaggcagccgcagtgcagcccgctggcggcggcgccctactacgccgggtgtgggcagccgagcgccatgtttcaggcggtcccgcaacaatgct

SEQ ID NO: 4146 - DNA, 386 bp, Zea mays
  Clone ID: LIB3117-006-Q1-K1-G4
cggacgcgtggggcaacaggcatcttaccattatcacccttgttcctgcaacagcgcgtcaggcctattacagcagttacctttggtccatttggtggcacaaaacatcagggcacaacaactacaacaacttgtgctagcaaaccttgctgcatactctcagcaacatcagtatcttccattcaaccaactggctgcattgaactctgctgcttatttgcaacaacaattaccattcagccagctagatgctgcctacccccagcaatgtcttgcattcaaccaactagcagcattgaactctgctgcttatttacagcatcaacaactactaccattcaaacagctagctgatgtgagccctgctggcttcttgacacaacaac

SEQ ID NO: 4147 - DNA, 365 bp, Zea mays
  Clone ID: LIB3117-006-Q1-K1-G5
aaccaaggtgttcttacgtgatactagcgtcgtttccccctactcacttcttttgtttggtggttccatggtaatccaacatcagacaggagtggttgttatagatggatggttgaagctgtctgctgctgcacagactgctgttttattcaagcaacttcggatgactcttgatgctgttctaaaagaactgacaagaaaaccagagatggcaacttttgttgacaacgaagtggtcaggtccatcattcatttattgttagaagaagacaaggctcgataagcatgaattcatggcaatcctatcgatactaattttttagtaaaaacactatcggtgcctaaaattttttagtaaaaacact

SEQ ID NO: 4148 - DNA, 425 bp, Zea mays
  unsure at all n locations
  Clone ID: LIB3117-006-Q1-K1-G6
ccgactaccaacatctcagaagggagtccacgccttcacgcttgattcttcgcacttcgccgtgtggcatcattgaacgcttccactccaggcagctcgccacgcaacgtaccaaccacggacatagatgggatctgccgcaaggtgctcatngtcacgcctgcatccccaggggctgttaacctgccgcaagggaagaagtgtggccacagcaaccagctgagggccaaagaagaagatcaagaactgaagcttgccaaatcggttccttgcatggtttgcgtcaacaagacgtagaagtttcaaagcttttgtagctgccataggctgctgcaacgtttttaagtcggaactcttgtgttcctgttcagggtcttcaacatgacataaatccgttcagaagtctaggcatactatgattatat

SEQ ID NO: 4149 - DNA, 420 bp, Zea mays
  Clone ID: LIB3117-006-Q1-K1-G7
ttttcgtctcctccccacagcagcccggcgaaaaccctagtaagcaaaccaccggagcagcggcgcttgcgcgggcggagccatggcggacgacgattacaacgaaattgacatggggtatgaggatgagcccccagaaccggagattgaggaaggagctgaagaagagcctgagaacaacgaagatgcccctgatgacgtcataggtggtgagggtgaagataaggaacaggaaaagaccaagcgtgaacgcaaaacaacaaaatacatgacgaagtacgaacgtgcgcgcatcctgggtacacgagccttgcagataagcatgaatgctccagtcatggttgagcttgagggtgaaactgaccctcttgagattgcaatgaatgagctgagagcgcgcaagatacccttcacgatcag

SEQ ID NO: 4150 - DNA, 427 bp, Zea mays
  Clone ID: LIB3117-006-Q1-K1-G8
cggacgcgtggggcaacaggcatcttaccattatcacccttgttcctccaacaggcgtcaggcctattacagcagttacctttggtccatttggtggcacaaaacattagggcacaacaactacaacaacttgtgctagcaaaccttgctgcatactctcagcaacatcagtttcttccattcaaccaactggctgcattgaactctgctgcttatttgcaacaacaattaccattcagccagctagttgctgcctacccccagcaatttcttccattcaaccaactagcagcattgaactctgctgcttatttacagcagcaacaactactaccattcagccagctagctgatgtgagccctgctgccttcttgacacaacaacagttgttgccgttctacctgcacgctatgcctaacgctggca

SEQ ID NO: 4151 - DNA, 412 bp, Zea mays
  Clone ID: LIB3117-006-Q1-K1-H1
gcagatgatggagctctgcgccttcctcgggcacgtcggcgccaagacttcatgtgggtacggcgtggcgaccggcgggccgacggcgtgggggctgtgctacaaccacgagatgagccccgaccagacctactgcgacaagacctacacccagtacccctgcgtcgagggcgccgagtactacggccgaggcgcgattcctgtctactggaactacaactacggcgctgccggtgacgggatcaaggcggatctgctccaccacccagagtacctggagcacaacgcgacgctggcattcatggcggcgatgtggcggtggatgacgccgatcaagaagagccagccgtcagcgcacgacgccttcgtgggcaactggaagcccaccaagaacgacacgcttagcaaacgc

SEQ ID NO: 4152 - DNA, 377 bp, Zea mays
  unsure at all n locations
  Clone ID: LIB3117-006-Q1-K1-H11
cccacgcgtccgcggacgcgtgggcggcggtgacggcatcctggccgccctctcccgttcgcaggtggcggcgcacgggcgagaggcggcggccgtggcgaagaagctgctgcggagcacggggaaggcggcgtggatcgcggggacaaccttcctggtgctggtggtgccgctgatcatcgagatggaccgggagcagcagctcaacgacctcgagctgcagcagcagacgcttctgggcggngcccctccgncgccgncgncgaccaagtagatagatccgtgcatcgaccctttcgtccnccctctccctctctagaggtatctggtactgtcaagttcatcattcgaggtactatcaagttcatcattcgagt

SEQ ID NO: 4153 - DNA, 179 bp, Zea mays
  Clone ID: LIB3117-006-Q1-K1-H12
cacctacacctcgatcacgaattcctgatccaccctgtcgcttcggggggcgggtgccaccgcccaaaggcctccgcctgaatataactagccccataagatctcaccttaaaagccttgcaactcgatcacaaccttcctggaactgaaggcgacgctgatcatcacgatacacccct

SEQ ID NO: 4154 - DNA, 370 bp, Zea mays
  Clone ID: LIB3117-006-Q1-K1-H3
cggacgcgtgggcggacgcgtgggcggacgcgtgggcgctgtcaatgcactgggagctgccattgccatccttggcacattcctgtactctcaggcaaaggcgtgaggcgggccatgatgacgaacgtctgcagaatcagtagcaagcactaaatccaattttgcttgttccagtggcatgtagatatcgggttagttttccgtatgagagtttgtaataatggatgaatggctctgctgtttcgttcttgtttgttggccagactcaaatccataggccatgaactgcggtcgagtgtacctgaataatactgtaacggagaattcgccgatgctgtttctttatgggtatatatatagtccaagccgg

SEQ ID NO: 4155 - DNA, 383 bp, Zea mays
  Clone ID: LIB3117-006-Q1-K1-H4
ccggaagcagccatcaggacgcgcgccttgtcatccaagaccaactcaacggcggcagcaggagcaacaccgagcatggtaacgggatggcgtccatcggaagccacttcggcggaggcttcgtcccttccctgcacaactcatctccgtcggccgggctctcagcgacggcgctcctgatgaaggcggctcagatgggctcgacgacgtcgagcaccacccacaaccccaacggccccagcgcgctgctccgcgcagccggcttcgcaggcactgccagcgtccgggagactagtagcagggcagcggaagaagagaagtctcacgaggcatatttccatgatctcatcatgaactcactgccattaacgggaagaggcacc

SEQ ID NO: 4156 - DNA, 347 bp, Zea mays
  Clone ID: LIB3117-006-Q1-K1-H7
cccacgcgtccgcccacgcgtccgcccacgcgttcgcggacgcgtggggccggacctgcgggatcgggccgcgcctcccgtggccggagctgaagaggagatgctgccgggagctggcggacatcccggcgtactgccggtgcacggcgctgagcatcctcatggacggcgcgatcccgccgggcccggacgcgcagctggagggccgcctagaggacctgccgggctggccgcgggaggtgcaaaggggattcgccgtcaccctcgtcacggaagccgagtgcaacctggccaccatcagcggcgtcgccgaatgcccctggattctcggtggcggaacgatgccc

SEQ ID NO: 4157 - DNA, 423 bp, Zea mays
  unsure at all n locations
  Clone ID: LIB3117-006-Q1-K1-H8
cggacgcgtgggctcctctcgcatccgcagcttccccagccagctagggtttgcagatgacgaccgcggcgcgccccacctgggcgccggccaagggcggcaacgagcaggggggcacccgcatcttcggcccctcccagaagttctcctcccgcgacctcgccgcgcacacctacctcaagccaagaaaagacggtcaacagacccaagaggagttacagaagaggaatctcagggaggaacttgaggaacgtgagcgcaagcactactcttccaaggataagtcctatgccgaagaaagagaccggcggaaaagctctagccatctactcttagaaggttcanagagagagacagaagataagatagttccacgagaaatcgatgctgatgactccgatgtggagccctaaagcgatgacg

SEQ ID NO: 4158 - DNA, 376 bp, Zea mays
  Clone ID: LIB3117-007-Q1-K1-A1
caacaatagagcaacaatggagaccaagatattttccctccttatgctccttgctctttctacatgtgttgctaacgcgacaattttccctcaatgctcacaagctcctatagcttccctttttcccccataccttccatcaattatagcttcagtatgtgaaaacccagctcttcaaccatataggcttcaacaagcaatcgcagcaagcaacatacctttatcgcccttgttgtgtcaacaatcgccagccctatctttggtgcagtcattggtacaaaccatcagggcacaacagctgcagcaactcgtgctacctgtgatcaaccaagtagctctggcaaacctttcttcctactcttcgcaacaaacattt

SEQ ID NO: 4159 - DNA, 409 bp, Zea mays
  Clone ID: LIB3117-007-Q1-K1-A11
cccacgcgtccgcccacgcgtccgtccacgcgtccgcccacgcgtccgcaacgaggaaaaatgtggagctattcccggagaaacgaacatggcctcaatcctcttcaatccatttgctcccaaacaagccaacgggtgtttggtgcaggagctatgtgctcgaacaatttaatcaacaggttcttctgctgcagttacggcattttctgtgctcatttatctatgctgtctgttctaaattataagacgctttgttatgtctatatttgtggcttgtattatgtatcaaacacaatatatatataccggtgttataaaagatacagatgtagaaaagctaaactatacggatgaaggtataggttgcaaaggatgatgcttagcagatacaagttagtctgtgtgcatc

SEQ ID NO: 4160 - DNA, 200 bp, Zea mays
  unsure at all n locations
  Clone ID: LIB3117-007-Q1-K1-A12
cccacgcgtccgcccacgcgtccgctcttttagattgcttatgagttatagttcaataatgaagtttttgtgatgatangaaccgcggggagaactgcaaaaaccccttcaaagagggcgcgctctatgccacgacaaactacaacctgtcgaagcacccccagatcgacgtgcccaacctccacgtgatcaaactcata

SEQ ID NO: 4161 - DNA, 366 bp, Zea mays
  unsure at all n locations
  Clone ID: LIB3117-007-Q1-K1-A8
ggaaaggcgcggagcaagatgncgnggcaggcgtacgtcgacgagcacctgatgtgcgagatcgaaggacagcatctcagcgccgccgccatcgtcggtcacgacggcagcgtttgggcgcagtccgagagcttccccgagttaaagcctgaggaggttgctggtatcataaaggactttgatgaacctggtactcttgcaccaactggtcttttcgttggaggtacaaagtacatggtgatccaaggtgaacctggagttgtcatccgaggaaagaagggcactgggggcattactatcaagaaaaccggcatgtacttgattattggtgtctacaacgagccaatgactccagggcaatgcaac

SEQ ID NO: 4162 - DNA, 125 bp, Zea mays
  Clone ID: LIB3117-007-Q1-K1-B11
tcaaattgtaatatttttgaatcaaattctcttgtaatcactccgatgatatattgtaatatggttataacttataaatgttgtaacttgtaatcattttgtaataaagaatttatttccgctgc

SEQ ID NO: 4163 - DNA, 385 bp, Zea mays
  Clone ID: LIB3117-007-Q1-K1-B4
atgtctgccatggacagctctagcagaaatgctggcgatatgcttgatcgtctgacgcttacttacaacaggacacgccaagcatccatcaccacagagcttactgagattatatctggtgcatcagcccttgaaggataggtgaagagactatgtggacttttccctttttccccatttgcgttcctctcacatgaaggcttcttttcttccggaggctcagtttcaacccttctcgtttcacttttcctggataaacgtattcttatgctttattgcaataattaggccaacgacagtgatgatgccgtgcgcctttgcatattgcaaaaagaatgttctacatctatggtgaatgggctggtttcataaaaggtgatgatca

SEQ ID NO: 4164 - DNA, 372 bp, Zea mays
  Clone ID: LIB3117-007-Q1-K1-B7
ggggccccagaaaagaaggcaccaatacgagtgaaatttgagataccatattggaccgtatcaggtattcaggtccgttatctgaagataattgaaaagagtggttaccaggcactcccctgggttagatatatcacgatggctggcgaatatgagctgagacttatatgagttttctcttttctggctgatggaagacatttatgaagctgcaagatacatatttgctcgagacagcaaccgtatgacatttgaatgttagcctggacgtcttctgccgaccacacaaggttttccccctgagggcttgttcatcttgctaggctcaccttaccttggttattgtacgttacccatcaagtatagtttttg

SEQ ID NO: 4165 - DNA, 316 bp, Zea mays
  Clone ID: LIB3117-007-Q1-K1-B9
atttatgggtcatttttaactttcaatgttaacaacgtccaactgtgtactggctatattctacatattggctcatttacaaaaagttctaatgttttgtctcttgtagatagtgtgatatgcaaagtttattacaaccggcgcacactgattgctccaaatcatacctgtacccacatgttgaactttgctctaaagtaaatactttgtgatcatgtataccataatggttcaattgttctaccatataagctaacatttgatttctctcatggtaaacctgtccatccctaaaatcttatgaaaatctaattca

SEQ ID NO: 4166 - DNA, 361 bp, Zea mays
  unsure at all n locations
  Clone ID: LIB3117-007-Q1-K1-C1
ccagagaacaggtatggcggcggcgcggcacctcagatccggcctccccctcctgcgcgcccacctcgcatcctccgaatccgcggccgtcgctcaggtttcgaggggcttcgcgtcgcaggccgccaagcccaccgggaaggagatcaaggttccaaaggctctgtttggcggcacaggcaactatgccagtgcactgttcctcacagcagctaaatctaatgcattggacaaagttgaatctgagattaaagctattgtagaggcttccaagaagagcccgttgntttctcaattcataaaggacttgtcagttccaaaaagcgaccaaggtgaaggctatagccgaaatatttgctga

SEQ ID NO: 4167 - DNA, 393 bp, Zea mays
  unsure at all n locations
  Clone ID: LIB3117-007-Q1-K1-C2
ntgaggaactcagtgctactggaaagtttgaatttatggaccttaatgtggatgaagctgagcatagcatggaaatgcatttgccctaccttgctaaagtatttcaaggacataatgtgaaagtcgtccctatccttgttggtgcacttagctcccaaaacgaagccttgtatgggcagctgctctccaaatatgtggatgacccaaaaaacttcttttccgtgtcgtcagacttctgccattggggatccaggtttagctacacatactacgaaaagaagcacggtgccatccataaatctatcgaggccttggaccgtatgggcatggagatcatagagactggcgaacccgtagcgttcaaagaatacctgcangagtacgagaacacca

SEQ ID NO: 4168 - DNA, 251 bp, Zea mays
  Clone ID: LIB3117-007-Q1-K1-C3
agaagcgggagagatggctcgtaccaagcagactgctcgcaagtccacgggagggaaggctcccaggaagcagcttgccaccaaggctgcccgtaagtctgcccccaccactggtggagtgaagaagcctcaccgctaccgccctggaactgttgccctccgtgagatccgcaagtatcagaagagcactgagctgctgatcaggaagctgccctttcagaagctcgtcagggaaattgcacaggaactta

SEQ ID NO: 4169 - DNA, 338 bp, Zea mays
  unsure at all n locations
  Clone ID: LIB3117-007-Q1-K1-C4
cccacacggccggacaagnnagcnacccgcgcagcgccgcgcgccatggccacgangaggaaccaccgcatngngcccctcctgctggncgcggccacactgctcgcgcaggccgcggcctgcccgtactgcccgacgccgaagccggcgccgcctccgccgccgtcgtcgtccacgccgtgccctgccccgccctactcgctgtcgccgtacacgccgacgggcaagtgccccgtgaacacgctcaagctgctcgcgtgcgtggacgcgctcaacggcctcgtgcacgccgtcatcgggaccaaggccagcgacacctgctgcccggtgctctacgg

SEQ ID NO: 4170 - DNA, 282 bp, Zea mays
  unsure at all n locations
  Clone ID: LIB3117-007-Q1-K1-C6
ctcctcgcggnagtaccgtttggctgatgaactgtagaacatctactcatttggtgtggattaccagttcaacagatcggcatacttgtcggatgtctggaaactgaaattacatgctgtccaattcatggaaggcaagtgcaattaacttaaccttcaaggaggcaaatgcagtttaaggaaaacttacacgttgaaagcacccatattatgtcttcggatgagttcctatgtaactacgttgaaagagtacttttctacacaaaaaaaagaaacaccatg

SEQ ID NO: 4171 - DNA, 311 bp, Zea mays
  Clone ID: LIB3117-007-Q1-K1-C9
aaagaatgctatgaggcactggtgattgctaagtttatggcattgatgtacagctgcttgaatatatctatcagcaagaacatagtccctgatgaaatcaaagggagggtgcttcatcattccttccctgtttctcttttcctgccccgcaatgtccgattggagcacaagacattgaagcttctgaagtattggacctggcaatttgttattgttaggccagtatgttccattctgattattgcactccagcttcttgggctgtaccccagctgggtcagctggacgtttagtattatactgaaactttc

SEQ ID NO: 4172 - DNA, 316 bp, Zea mays
  Clone ID: LIB3117-007-Q1-K1-D10
cggacgcgtgggcggacgcgtgggcggacgcgtgggggcacacttatgattgaaccaactgaaagtgagagcaaggccgaactggacaggttctgcgacgctcttatctccatcagggaagagattgcagagatagaaagcggcaaagcagatgtgcttaacaatgtcctgaagggcgctcctcacccaccgcaactcttgatgggtgacacatggagcaagccgtattccagggagtacgctgcgttccccgcggcatggctccggggcgccaagttctggccaacaactggtcgtgtggacaacgtctacgggg

SEQ ID NO: 4173 - DNA, 279 bp, Zea mays
  unsure at all n locations
  Clone ID: LIB3117-007-Q1-K1-D11
agcacctgacgccacactatgcccgtggtgaaacgcctatcgcactactatgcatacaaccagactgctatgcattccatacgccacttgcctttggcaagacgtagcatgcataccatcatacaacaaccagttgcaacaagtttactgccagcgctcagtcaactagccatggtgaaccctatcgnctacctacaacagcaacaacttctttcatctagcccgctcgctatgggcaatgcacctacatacctgcaacaacagttgttgcaacaacag

SEQ ID NO: 4174 - DNA, 363 bp, Zea mays
  Clone ID: LIB3117-007-Q1-K1-D4
cttccctgctgtgagcgcttcaactacttggtgcccctcataaggggcaaggcgagcctctgcatcaatagccatccatagcaatgggcagcagcacaggagatggagcccccagctaggggctggtagctggctagccagtgggcccttatggctgatgcccttgcctttactgaccacctcattctggtcaggaagtttggccaacggacacctgtccggctcttctcaaggaatggagagggcgacgcaagaattcagttccgcaatataattgaattgctagcacaattggagtacatgcggtaactgaactcgtgacctgggattctcagtacaaatggcatgaattaatgatggatc

SEQ ID NO: 4175 - DNA, 259 bp, Zea mays
  Clone ID: LIB3117-007-Q1-K1-D5
cccacgcgtccgagcgcctttccagcatcaatgtcgagaacgttgaggagaaccgccgtgccctccgtgagctcctattctgctgccctggtgctctccagtacatcagcggtgtgatcctcttcgaggagaccctgtaccagaagaccaaggatggcaagccttttgttgatgtcctcaaggagggaggcgtcctccctggcatcaaggttgacaagggcaccattgaggttgttggcactgataaggagaccaccac

SEQ ID NO: 4176 - DNA, 388 bp, Zea mays
  Clone ID: LIB3117-007-Q1-K1-D8
accacgcgtccgcgttgcccttgctctcctggcgctcgctgcgagcgccgactgcagtacaggcggcggctgtggctgccagacaccaccgtttcatctaccgcctgcgatctatatgccgactccggtctatctgccggcgcagcagcagccgcagccatggcaataccccactcaaccaccgcagctaagcccgtgccagcagttcggatcctgcggagtcggcagcgtcggcagcccgttcctgggccagtgcgtcgagttcctgaggcaccagtgcagcccggcggcgacgccctacggctcgccacagtgccaggcgctgcagcagcagtgctgtcaccagatcaggcatgtggagccgctgaaccggtaccaggcgacatac

SEQ ID NO: 4177 - DNA, 374 bp, Zea mays
  Clone ID: LIB3117-007-Q1-K1-E11
caagatgttgcacagcgttgcaaggagctcggtatcaccgcgctgcacattaagcttcgtgcaactggaggcaacaagaccaagacccctggacctggtgctcagtctgctctcagggctcttgctcgttctgggatgaaaattggacgcattgaggatgttaccccggttcccactgacagcactcgcagaaagggtggtaggaggggaaggaggctgtatgcgtgtatccttgctatttgccatcactttgcactggcctctgggtagcgttgctcgttattagcttgccaaaaggagttctaattatgctcattgtgctctatgtcgaggatcatttactgttagccgaatctatgatgtgcattgataat

SEQ ID NO: 4178 - DNA, 341 bp, Zea mays
  unsure at all n locations
  Clone ID: LIB3117-007-Q1-K1-E3
gacgagctcggcttcggcgtgagccagcgtcgtacggctcatccgccccgtccgcggtcggtatttctctccatttcccttgcccctaccgtggcggaggaagacaagacgcgcgcgcagaagcacacctgctcgggctggattaggaggacagcttcttcggccggcgacatggcggaagagaagggcgcgttgcagtcggcgagggagtgggtggtcgaccacaagctccgggccgtcgggacgctgtggctcagcggcatcgtcggctccatcgcctacaactggtccaagcncggcatgaagaccagcgtcaagatcatccacgccaggctgcatgc

SEQ ID NO: 4179 - DNA, 402 bp, Zea mays
  unsure at all n locations
  Clone ID: LIB3117-007-Q1-K1-E4
cccacgcgtccgcccacgcgnccgggagggngggctgctcctccccctccggggcgggttcgggttcgtgaggttctccggggttcgggttcgtgggtgagcggatcgagatggcggcgtcggatgttgagtaccgctgcttcgtcggcggcctcgcctgggccacggacgaccactccctccacaacgccttcagcacctacggcgaggtcctcgagtccaagatcatcctcgatcgggagacgcagaggtcccgcggcttcggcttcgtcaccttctccacggaggaagcgatgcggaacgccatcgagggcatgaacggcaaggagctggacgggcgcaacatcaaccgcaacgaggccccaatcccgcggcggacgtggaggcggcggcggtgggtac

SEQ ID NO: 4180 - DNA, 399 bp, Zea mays
  Clone ID: LIB3117-007-Q1-K1-E7
gctgctgatccttagctacaccaaggagaaggatgccatcctattcacgcaccgtcctatgggttctttcagcagcactggcctcactatttcttctaaattaccaagattctcggacatgtacactctcacaatagcaagtgcggatccacagtctatctctgcaaacaagccagttcatttcactaagagcgtaacaaagtggtttacaaaggaaggagttcttgtggagggcctgttctggaaggatgtcgagaagctgattgatgactacaacagtgagcgcaagagtaaatgaattggtagctcgtgtctctggccatctggggagacatcgctgtctagagaaatccgtcaaagtttagcttaatctgaacaggcatttttgctatactgtac

SEQ ID NO: 4181 - DNA, 338 bp, Zea mays
  Clone ID: LIB3117-007-Q1-K1-E9
cagaaacacaccaagcgaagcgcactagcaacgacctaacaacaatggctaccaagatattaggcctccttgcgcttcttgccctttttgtgagcgcaacaaatgcgttcattattccacaatgctcacttgctcctagtgccattattccacagttcctaccaccagttacttcaatgggctttgaacacctatctgtgcaagccaacatgcaacaacaagctcttgctgcgagcgtcttacaacaaccaattgaccaattgcaacaacaatccttgccacatctaacaatacaagccatcacaacgcaacagcatcaacagttgctaccatcactg

SEQ ID NO: 4182 - DNA, 410 bp, Zea mays
  Clone ID: LIB3117-007-Q1-K1-F10
cccacgcgtccgcccacgcgtccgcggacgcgtgggatgggcgcccagcagggcggggacgcgccccaccaagccgcacccggacccgaggtccaccgcgcgcgcgccgtggaggagcagccgctgggagtcgacggagtgctcgaggaacttggcgagcacgacgccgctgtcccagacgaccgtccccgtgacccccggggtggccatggaggagggggactgcagcagggacaggcgccgcccgcaggcgtcgagctcgaaggcgtgcgccgtctggcggaccagcgcgttgttgcagtgcgactcgggctgccccaggccccacagcagcatcgtctccccggccgcgctctgcaccggtcgcagcgcgccgtcgggtccgatcatcaaccgggcttgctcactat

SEQ ID NO: 4183 - DNA, 335 bp, Zea mays
  Clone ID: LIB3117-007-Q1-K1-F11
cccacgcgtccgcaaagaagtattgtatgagatggctgttggtggtaaagacaacgttctggatggcctcaccgataggagccacatgttgcacgatgcaatagcgtctgatgcggtccaaccgaagactgaagatacggaacatgcatttgaaaacttcttttccagccgtgtaatcagaagaatggtaatcgactgcccagcttttgcagtcactctctggagaaaggctcttcagggcaagtgcaagatatgggctgaaggacacagttcgaaggtagttgcgggtttcctggagtcgacaagtacggatgtcaaggatcttgcaaaacctg

SEQ ID NO: 4184 - DNA, 393 bp, Zea mays
  Clone ID: LIB3117-007-Q1-K1-F12
cggacgcgtgggtccgcgccggcgccggagcgctggcggcgccgctcgccgtggggcttctggcgggggccaacgtgctggcctgcggcgcgctggagggcgccgtgatgaatccggcgcgcgcgttcgggcccgccgtcgtgggctcccgtcgctggagacaccaatgggtgtactgggtggggcccatggtcggcgccggcctctccggcgtcgtctacgagcacctcgtcgccggcccggccgacgaggaggaggagcccgcgccgatgctgcggctgaccgccgtcgtgcgtagaggactacatgcatgcacgagcagcatgacgtcgtcgtcgatcccgctcctcggaatcttctgaataaaaaaaacagcttgcatgcgtgctcaat

SEQ ID NO: 4185 - DNA, 374 bp, Zea mays
  Clone ID: LIB3117-007-Q1-K1-F3
cggacgcgtgggctcgcaagctcctatagcttcccttcttcccccgtacctctcaccagcggtgtcttcggtatgtgaaaacccaattcttcaaccctacaggatccaacaggcaatcacagctggcatcttacctttatcacccttgttcctccaacaatcatcagccctattacatcagttacctttggtgcatttattggcacaaaacatcagggcacaacaactacaacaacttgtgctagcaaaccttgctgcctactctcagcaacagcagtttcttccattcaaccaactagctgcattgaactctgcttcttatttgcaacaacaacaactaccattcagccagctacctgctgcctacccccagc

SEQ ID NO: 4186 - DNA, 316 bp, Zea mays
  Clone ID: LIB3117-007-Q1-K1-F7
gccaccacggagaaactatgagcgccacagcgggactggccatggctatgagaggaagcgtgatggcgcagggcgtgggaactggggcactgccactgatgaacttattgcccaggatgcagaggactctccgaagatggaggaggctgctcctgttgctgagaaacaaggtgagcagaatgatgccccagcagcagatgagaacaaagataacaaggatgctactgcaaatgaggaggaagaaaaggaagaggacatggagatgactctggaagaatttgagaaaataagagaggagaagaggaaagcactactt

SEQ ID NO: 4187 - DNA, 385 bp, Zea mays
  Clone ID: LIB3117-007-Q1-K1-G1
actatcctccctgggcacaagtgggaagtcatggttgatctgttcttctacagagacccagaggaagcgaaggagcaggaggaggaagctgctgcggcccctgagtttgctgcagtcactgattaccaaggagctgatcagtggggtggtgaccagtggacctctgatgtggctgcaccacctgttgctcctactggtgctgattggggtgctgcaccagcttcggttcctaccggtgatggctgggatcaaactgtggcccctgttcctgtggatggcactgttcctccagtggtcgctcctactggttgggaatcaacagcccagcccactggccaaggctgggagtaagcgttgaggcatcactctgagacgtcttgtgcgg

SEQ ID NO: 4188 - DNA, 326 bp, Zea mays
  Clone ID: LIB3117-007-Q1-K1-G11
gttggcttctcctccccctccggttcgggttcgggttcgtgaggttctccggggttcgggttcgtgggtgagcggatcgagatggcggcgtcggatgttgagtaccgctgcttcgtcggcggcctcgcctgggccacggacgaccactccctccacaacgccttcagcacctacggcgaggtcctcgagtccaagatcatcctcgatcgggagacgcagaggtcccgcggcttcggcttcgtcaccttctccacggaagaagcgatgcggaacgccatcgagggcatgaacggcaaggagctggacggccgcaacatcaccgtcaa

SEQ ID NO: 4189 - DNA, 308 bp, Zea mays
  Clone ID: LIB3117-007-Q1-K1-G12
gttttggctcaagaacaagatatggtgattgtacagtacgaaggatactgggccgtgttacaacaccggagaagaacagatggagataaaaaccaggtctattctggaacaagatgctttggtgacttgtatcccgtatctgcccattcaagcgattacttaaactgcccttttgctcctccctataagctagtatcaaagtgaattcgttggagtgcagacctgataagagcatctccggaagtctttcaaaattcactctaaattgtcattttgagagtcatttgcttaataactgtcattctgtt

SEQ ID NO: 4190 - DNA, 399 bp, Zea mays
  Clone ID: LIB3117-007-Q1-K1-G9
ctggcttctcctccccctcttaccaagtcctcctcgggttagggttccttagggttgggtggaggggcgatggcggcggctgatgtggagtaccgttgcttcgtcggcgggcttgcctgggccaccagcaacgagtcgctggagaatgccttcgcctcctacggcgagatcctcgactccaaggtcatcaccgaccgggagacggggaggtcccgcggcttcggcttcgttaccttctcctccgagaactccatgctcgacgctatcgagaacatgaacggcaaggagctcgactgccgtaacatcaccgttaaccaggcccagtcccgtggcggtggcggtggcggcggtggctacggcggctgtcgctgcggcagcggcggttatggtggcgggcgc

SEQ ID NO: 4191 - DNA, 312 bp, Zea mays
  Clone ID: LIB3117-007-Q1-K1-H10
gtcaatacaccgttcaacagtcttgaactggtccttgctcgagcttcacagcacagtagcctcaacaggttcacttcactcacgttcgaacaccgcacccttgaacctactaaccaacttctcccggagcagctgcctgtccaatgaggacgcggagaggaggccactgttctacgttgctcgcctgatgaggtacgggacgatctgctgcaccggacactacggcaggtacttgatgacctgaaacacggcgttgctgacgtccagcgactgtccgtgcgtcatgccaatcaggtgcgccaactgcacgat

SEQ ID NO: 4192 - DNA, 249 bp, Zea mays
  Clone ID: LIB3117-007-Q1-K1-H11
tgatgctgagcacggacaatgcggcgtggatctcggtgacaacctttctggtgctggtggtgccgctgatcatctatgatgacctggagcagcagcttaacagacctctagctggggcagcagacgcttctgggcgtggcccctacgacgtcgtcgctgaccatatagatatatccgtgcatcgaaccttttatgccccctaattgtctgtagaggtatttgctgctgtcaaggtcatcattcgagtta

SEQ ID NO: 4193 - DNA, 416 bp, Zea mays
  Clone ID: LIB3117-007-Q1-K1-H12
ctttctcggaggcgacagctcgaactcgaatccctcatccagcctgtcgctggcgtcgccggtcgccgccgctcgattgcctccgcctgaatatcccttgccccataaggcctgaccttgaaagcctcgccacttgatcccggcggcggcggaggggagggcgatgccgaagcggacgacacacacctactcgagcgaggacgcactgccggagggccccgagtcccgaccttttcgtatactactgcaagcactgcgcctcacatgtcctcatcaccgatacccaattgcagaaaatgcccaagcgaaagactgacagagcacatgttttagacaaggctaagcatctttcaaggctaaatgttaacgaggcaggaaaagtaatgttgatacgtggtgaaggaaaagcttgaaaa

SEQ ID NO: 4194 - DNA, 353 bp, Zea mays
  Clone ID: LIB3117-007-Q1-K1-H2
cccacgcgtccggtcacgcgtcagttcgttccctcctctgtgtaccggccagtgaaatccgaacccacagcgagaaatggcggcggcagcgctccgtccggcgatcctccgccgcatccgcctctccccctccccttcgctcgccctcgccgccgctgggacaggtgcatcccacccgcacgcgctggggcggtggctcgcgcggcccatgtcctcccacgacgcgcacctcacccgcgacgaagtcatcgaccggatcctcgacgtcatcaagagccaccccaagatcgacccctccaaggtgaccccggaggcgcacttcgagaaggatctcgggctcgacaggctggaca

SEQ ID NO: 4195 - DNA, 305 bp, Zea mays
  Clone ID: LIB3117-007-Q1-K1-H6
caaaggtaactgctgcaatagggctgatgattgttggaggaacaagggcacaacaactacaacaacttgtgctagcaaaccttgctgcctactctcagcaacaacagtttcttccattcaaccaactagctgcattgaactctgcttcttatttgcaacaacaacaactaccattcagccagctatctgctgcctacccccagcaatatcttgcattcaaccaactgacagcttagaactctcctgcttatttacagcagcaacaactactaccattcagccagctagctggtgtgagccctgct

SEQ ID NO: 4196 - DNA, 287 bp, Zea mays
  Clone ID: LIB3117-007-Q1-K1-H9
cccacgcgtccgcttgctgagcaagctgaactccaagcttgtacgaatgattccagtaactacgagtcggattcattcgagtccttgacactgaagctggaagagaccaagatcgacgatctctggagcaggccactggaacctgaaaccgcaaccgatgaacagacagtttcagctgctcaccttctcaccaagcccagaaggggccagcaaaggagacggcggcagaagcgagatttccagagagatgtcttgcctggcctttcgtcgctttcccgggctgagat

SEQ ID NO: 4197 - DNA, 470 bp, Zea mays
  Clone ID: LIB3117-008-Q1-K1-B11
ggaggaggagttctccaagctccgcgccgcgcacgacgccgtcgtcctccacaactgccacgtcgagaccgagctgctgaagatgaaggacaggctggcggaggtggaggaggagaagacgaagctcgtcgcggcggcggcggcggcggccggcggcgcagcgggcgcagggagcagcagcccgagctcgtcgtcgttctcgacggtgacgcaccacccggccgcggcgctgcaggtggggcagttcggggtggagccggaggaggccgccgacctcgcctacatgaccgagtacgcctacaacagctacatgaacatgatggacctcgcgcccggctacttcggcggagtcgtctacgactacgaccacttcaactgatccacgagcatgcaggaggaggaggagggaagctacaagacgaaggaaggattgactggcctatcagctaggtactattttcgtgttaatg

SEQ ID NO: 4198 - DNA, 395 bp, Zea mays
  Clone ID: LIB3117-008-Q1-K1-B12
cccacgcgtccgcggacgcgtgggtttcaataggcgtgccccaagaactagtaaacatggccgaactgtggagcctgttcttagccctctcctttgtagcagctatgtttgccataggctctcatgctgatggagactgtgagaatgacctccaaagcctgataagtgactgcaagacatacgtgatgttcccagctaatccaaaggtccctccttcggatgcttgctgtggtgtcatcaagaaggcaaacgtttcttgcttgtgctccaaggtcaccaaagaaactgagaaggttgtgtgcatggagaaggttgtgtatgttgctgagcagtgtaagaggccatttgagcatggcttccagtgcggaagctacaaggttccagcaaactgatga

SEQ ID NO: 4199 - DNA, 313 bp, Zea mays
  unsure at all n locations
  Clone ID: LIB3117-008-Q1-K1-B7
tcgacccacgcctgcggagaggagcnnnggganggaacatgggcatgctctaagcacatatctcagagcttaaatgggaaacattggcaaatctatcaacacaatacaatctaacaaattcacctaatagggatcacaatgtatgcaagtacatacaatccacttattcatgtcatatcatcattttcgtgaattgatataataacacataagattataatgtcaacctttttttgtataagacaagctgtaatgatttatttacttagatcccttaaccatgcctggttattccttgtattttttcatacac

SEQ ID NO: 4200 - DNA, 278 bp, Zea mays
  Clone ID: LIB3117-008-Q1-K1-C1
cgcactctgtgcccttgtatatgacaggcgtccaagtttctccgctctcctactacgccgggcagaacctggaagccatgtgccgtgggcgaacgttccatgcgccgagcgagatctcgttttaggaggtagacctgttcatgggactggagtagcagatgtgtcatctgtaaaacgagcgtaaaggatgggcatgctgttgtgtactgcgtgttgtagatgtaacatcttggacggacacaaaattcatctaatacaaaaatcccgtaaccatgcct

SEQ ID NO: 4201 - DNA, 347 bp, Zea mays
  unsure at all n locations
  Clone ID: LIB3117-008-Q1-K1-C10
gggttggcttctcctccccctccggttcgggttcgggttcgtgaggttctccggcgttcggcgtcgtgggggagcggatcgagatggcggcgtccgatgttgagtaccgctgcttcgtcggcggcctcgcctgggccacggacgaccactccctccacaacgccttcagcacctacggcgaggtcctcgagtccaagatcatcctcgatcgggagacgcagaggtcccgcggcttcggcttcgtcaccttctccacggaggaggcgatgcggaacgccatcgagggcatgaacggcaaggagctggacggncgcaacatcaccgtcaacgaggcccagtcccgcggc

SEQ ID NO: 4202 - DNA, 459 bp, Zea mays
  unsure at all n locations
  Clone ID: LIB3117-008-Q1-K1-C12
accatgtcgactcgtggggaagattcgctctcgccggcgtcgacggcctagggttcgagggaggtccgtgcgtccgtccggtgaaggagcggtagggaggcggagatgatcgaggtggtgctcaacgaccgcctggggaagaaggtgcgggtcaagtgcaacgaggacgacaccatcggcgacctcaagaagctggtggcggcgcagacggggacgcgccccgagaagatccgcatccagaagtggtacaacatctacaaggaccacatcaccctcaaggactacgaggtccacgacggcatgggcctcgagctctactacaactgagccgnncgccctctctccctctcgtcaggttggtctgaattctgaagtcatgggtgcaattcgcttcgcggggatctcttaagctcatcacatatattaaagcaacctcagttggctatgtaagacatggcg

SEQ ID NO: 4203 - DNA, 388 bp, Zea mays
  Clone ID: LIB3117-008-Q1-K1-C3
tccgctcctcgattcacgcgtcgaccgatacttacggagaggatcattaccatggcacattgccatgctatccgcacataactcagaggtagcaggggaaacattgccatagctatcaacacactacaagcttacacattcaccgaacagagagcacaaaggatgcaaatcttagccacccactgattcagggcagatcagcactatcgccaatccagattatagcctagcacattagaacggcaacctttttttgcataagacaagctgtaatggctaattcacttaaatcccctaaccatccctctttattcatcatattcacttagacaaccctggcattacacatcccaagcttttacactccacgttgtctgtcctgataaat

SEQ ID NO: 4204 - DNA, 483 bp, Zea mays
  Clone ID: LIB3117-008-Q1-K1-C6
gcctggaatgccttccttgcttcttcaaaggcttgaatgctcagatccttaaaacagttctgggctccgccttgctgctgatgattaaggagaagatctcgaagttcacttgggtctcactgcttgccctgcggcggtatcttttcgtttctcagaagaggatcaagagtgcaactgtataaatacgttagctccaaaacacaaactagcacacatagcgacatggtgcttctggagatgttatgccaaggaataaatctgaggaataatcagcagaaatacttaaccaagagagagagaataaggtgtgtatctggggtcgatagcatcagaaggctcttcaataagtttgtccatttcttttttttctctctctctctgaatctcttgtagctagtgacgtagatgttgcgcggatctgaaactggactgtacttttagcgtttgttgcctggaattaggggtgataatgggctctgaatt

SEQ ID NO: 4205 - DNA, 397 bp, Zea mays
  Clone ID: LIB3117-008-Q1-K1-C7
cgaacgctaaccctagcttctgttagccactctaccgtctgggcccactgataccgaagagagccttatcagcacaacgccgctcaccctcagaccactccataactgcctccacggaccgcagtccactgactccgtcagacctacttcgctgcctgctacctactacggctgactggccataccttctgcgacactcttcattagctctatctaccgcgcgcacccgtctgtacctgccagccgcgcgcctgccgctagtgccccgccgccaccccacgcgcgccccgccgtccccgcgcgctggctcgagtactccgctgtctgctcccattccactctggcccagctgcgtgctgctcttgcatcggccggcggataaacccagcatgcaaac

SEQ ID NO: 4206 - DNA, 365 bp, Zea mays
  Clone ID: LIB3117-008-Q1-K1-C9
gcagctcaggcaggtggagccgcagcaccggtaccaggcgatcttcggcttggtcctccaggccatcctgcgagcagcagccgcaaagcggccaggtcgcggggctgttggcggcgcagatagcgcagcaactgacggcgatgtgcggcctgcagcagccgactccatgcccctacgctgctgccggcggtgtcccccactgaagaaactatgtgctgtagtatagccgctggctagctagctagttgagtcatttagcggcgatgattgagtaataatgtgtcacgcatcaccatgggtggcagtgtcagtgtgagcaatgacctgaatgaacaattgaaatgaaaagaaaaaagtattgttcc

SEQ ID NO: 4207 - DNA, 350 bp, Zea mays
  Clone ID: LIB3117-008-Q1-K1-D1
gctcgaccgcacgcgtccgcgctgcttatttgcagcagcttatactactaccatttacccagctagctgcggcaagccgggcttccttgttgacacagcaacagttgctgcctttctaccagcagtttgcggctaaccccgcaaccctcttacaactacaacaattgttgccctttgtccaacttgctttgacaaacccagcagccttctaccaacaacacatcattggtggtgccctcttttagattgcttattagttgtaattcaataataaagttttttagatgatgtatgtggccaaccagaaataagaagttacatttccagattctaatgtgatattggtctcc

SEQ ID NO: 4208 - DNA, 281 bp, Zea mays
  Clone ID: LIB3117-008-Q1-K1-D10
atgccatctcatacgaatcattgattatcaataaaacaagctaataatgactaaacgatcattgtaaaaaataaaaagaaaaaacaaaaaaaaaaaaaaaaaaaaaaaaaaaaataataaaaaaaaaaaaaaaaaaaaaaaaaaaaaaaaaaaaaaaaaaaaaaaataaaaaaaaaaaaaaaaaaaaaaaaaaaaaaaaaaaaaaaaaaaaaaacacacaaaaaaaaaaaaaaaaaaacaaaattaatacaacaatatacaaaaaacaaatcacccttaat

SEQ ID NO: 4209 - DNA, 434 bp, Zea mays
  Clone ID: LIB3117-008-Q1-K1-D12
gcaccggagcaggtagaacgctgcacaatccccttcgccgccgccaagatggtgaacgttccgaagaccgagaagacgtactgcaagaacaaagagtgcaagaagcacacactccacaaggtgactcagtataagaagggcaaggatagcctgtctgcccagggaaagcgccgttatgaccgcaagcagtcaggatatggtggtcagaccaagcctgtcttccacaagaaggccaagaccaccaagaagattgttctgaagctgcagtgccagagctgcaagcactactcacagcacgccatcaagagatgcaagcattttgagattggtggagacaagaagggcaagggcacatctcttttctaagcttctcgtccacctgtctggttgttgagttgaaacttgtggtctactactactggtataaaaacatg

SEQ ID NO: 4210 - DNA, 455 bp, Zea mays
  Clone ID: LIB3117-008-Q1-K1-D2
ggcgagaaaggaaatgatgtcgccccacatgacctgaaaacagaaactgagaagttggcgggtctaaatggctgttaatattgttcgttagctcaagccgttgacagtggtgtcggggtggaacctaaggctgtggtgggttgtttgaggaaattctgatgtcccattgagcttgtttcctatagttcataggagctagaggcttagctagttgcttgtgtttggtggtagtcatggtctgtgttctggcgtgtcaggtattttaggaatagaaggatgattaactgggttttgcaatgatggatcatgggttttgaggctgtatttttcgtttatttgcctttcctctctggattctaattcctctctctctctctctctagattctggacaagtggagtgcttattttaaagtggttggtttaagaacctgaaatggacatgggaattctatc

SEQ ID NO: 4211 - DNA, 490 bp, Zea mays
  Clone ID: LIB3117-008-Q1-K1-D5
cccacgcgtccgcccacgcgtccgcccacgcgtccgcggacgcgtgggcggcaccgtagttcggtacgatggcagcggcggccccgacgagggcagaggtgctgtcgcttttccggtccttactccgcacggcgaagcagttctcggactacaacatccgcgagtacacacgccgacgcgccgcggacgccttccgcgaaaacagcgccctctccgacgcgccgtccgccgccgccttgtttgcggtggggaagcagcagctagaggttgcgaagcgacaagcggtgatttactcaatctacgcccccaaggccaagatcgtgatggagttgaaggtgcagtgatggacgaggtgctgcgcccttttcttcctcatcgttttcctttccgaattcgtttcttttctgtgacgatgaaactataaactgttgcattatcacgtttgctggatgattgtcatgatatagctgcttactgtgcaataaattac

SEQ ID NO: 4212 - DNA, 409 bp, Zea mays
  Clone ID: LIB3117-008-Q1-K1-D7
tgttttttttctggaaatgtaacttcttatttctggttggccacatacatcatccaaaaaaggttattattgaattacaggtaataagcaatctaaaagagggcaccaccaatgatgtgttgttggtaggaagccgctgggtctgtcaaagcaagttggacaaagggcaacaattgttgtagttgtaagagggttgcggagttagccgcaaactgctggtagaaaggcagcaactgttgctgtgtcaagaaggaagcacggtttgctgcagctagctggctaaatggtagtagtatttgctgctgcaaataagcagcggggttcagtgcggccaattggttaaatggaagaagttgttgttgctgagagtaggcagtagctaagctgctgaatggtaatagttgttgct

SEQ ID NO: 4213 - DNA, 398 bp, Zea mays
  Clone ID: LIB3117-008-Q1-K1-D8
gggaatcgcaccggcagggccgcggccggcttgcgtcgcactgctgcgactaggacggctgggacttaccttcgtcagcctacgatgcgacgccgcgccaaaacgaggaatcctctgaagacaacgacgacaccagcgacgcaacagcgggagacgaaccaaaaaaggaatccggaagcaggcaaccaggaccaatggcaaggatcaatgccttccaagtttaacctataccagctttccgtgcagcaccaagtggatccgtactgatgcaagaaggacagcaattggcttagacttggatcttgattcacttgaatggggccttgaaaacaacctaagcaagattggaactgaagggtattcaaaaatgtagcttttccatggaaatgttttacaac

SEQ ID NO: 4214 - DNA, 377 bp, Zea mays
  Clone ID: LIB3117-008-Q1-K1-D9
gtcggcatgccatcgcatacgactcattgtttatgaataaaacaagctaataatgacttttgtctcattataaaaaaaaaaaagaaaaaaaaaaaaaaaaaaaaaaaaaaaaaaaaaaaaaaaaaaaaaaaaaaaaaaaaaaaaaaaaaaaaaaaaaaaaaaaaaaaaaaaaaaaaaaaaaaaaaaaaaaaaaaaaaaaaaaaaaaaaaaaaaaaaaaaaaaaaaaaaaaaaaaaaaaaaaaaaaaaaaaaaaaaaataaaaaaaaaaaaaaaaaaggccccccttcattaacggcaaaaacaacaaaagagctctaaacccacaacatcatcctttaaggagacccaaaaatacaacaaacgaagaggcttttaaa

SEQ ID NO: 4215 - DNA, 374 bp, Zea mays
  Clone ID: LIB3117-008-Q1-K1-E1
attcacgcgtccacagcactcgttcatccacgcctatcgaactcaccaatcatacagaatgacatgcagtcagcaagtgcgaccgccagagcgatcatcgatcggctccttcttctctaccttagtgacaccccctccagccgtcgacgacccgaactgcgccatcgtggccacgcactccaaggccacctacgactagcagtgctcaacccacaagagcatcatcaatctgatggtgatcgacttctcgacatcctattgcgtgccctgccgcttcatcgagcctgccttcaatgagctggcctcccgcttcaccgatgccatcttcgtcaaggttgacgtctacgaactcgcggaggtcgcaaggacatgga

SEQ ID NO: 4216 - DNA, 370 bp, Zea mays
  Clone ID: LIB3117-008-Q1-K1-E12
ctgagcctgctgctcgcttttcgattttccctgactgacatatactttggacaattggaattatgggtaatgcctaatggctacgaactggttcttaatcctgaaacccgtactgctttttttcttgccaactttctcatcgtcttcttgtggctgttaatcttcatccaccttattcatgtatgtcttcacatgatacaattcataatctaattatatatatataaatagtactattacctttttgtttgtatatactatttatctttaactgatgtaacataatgtgtatacatctaaaatttatcttaaaataaatttaatataatgcttcccctcttaattatccaatcttacctactctttcctt

SEQ ID NO: 4217 - DNA, 276 bp, Zea mays
  Clone ID: LIB3117-008-Q1-K1-E7
aattcccggtcgccgactctacggctttactactgccagtaatcctgttattataatactctcctactgtaggggaatttatggtttctttcaatattctgaatggactgaatctgctgtatgttttcagaaagtcagatttgctaaacccaaaccttgatatgggatttcaactagggagcttcacatgcaattatcgttataaacactactatattcaatttgtatacacttccatatattctccttacatctattcttgtcattttatttttc

SEQ ID NO: 4218 - DNA, 224 bp, Zea mays
  unsure at all n locations
  Clone ID: LIB3117-008-Q1-K1-F11
cctaagangacctgatgagtacctgnagcttttaatgacttgcagccttgttcttatctcccgaacatttgtgatgtatcactggcgaacctggatcccccgacgggccagtatccgggcaatatctatactgacggcaatcgcctgttagtgtcattggcacgaggaccctacctgtcgttgtaaaccagatgtgcagatgtcaaagatcaggattttctcct

SEQ ID NO: 4219 - DNA, 422 bp, Zea mays
  Clone ID: LIB3117-008-Q1-K1-F12
gacccacgcggacgcggaggcgtgtgcgcgtacctttttggctgtttgtgcgtgtcgagcatggagcgactcttgtaaactttcaggcggtgtcgtggaaggtcctgagcgacgacgacacgccgcactgcctcgccttcatgttcgtcaactggtccttcgtgtgagtgaggaccttccccctagcagagccagccagtcgcgctcgcccgcccgcctagcatttgcagctgttatttgttgaactctgtatccaagtactggtcgctcttgcctttgtccaggcaatcctgtgaaacgcacctgccccccagttcatccgtggaacaaacgccttttgtagttgcttgcttgctatgttatgatggatcctggtctgcttcatctccttaaaaattgtcttgtaacataaaatattttta

SEQ ID NO: 4220 - DNA, 416 bp, Zea mays
  Clone ID: LIB3117-009-Q1-K1-A1
gaataccctaaacagggcaaggtttaccgtctcagtggattccttcattaaaactggtcacgttccctccttgaaggaaggaaactcacaggagacgatatttaatccaccttggcggcatgagccagtcgcaataggttcaaggtttggagaagcatttcaagagccagcttcatttcttgccatacgacctctgtttgaggactagagatacatggtaacatataacccaacaaaggataaagtatatgctttgctcaaggaccaggcaaaatcagacgacattattaaagctgctttccatgctcatgtgctattgcattttattaatgcatcacatgctcggagactgaagcagaagcagaagcaggcaaaccctgaccgatcagagtatctgtactctagaaacatggatt

SEQ ID NO: 4221 - DNA, 67 bp, Zea mays
  Clone ID: LIB3117-009-Q1-K1-A10
cccacgcgtccggtcgccgtgaaacttttaatcaaatcagttcactcttttgcgaggcaaggagaat

SEQ ID NO: 4222 - DNA, 182 bp, Zea mays
  Clone ID: LIB3117-009-Q1-K1-A11
cccacgcgtccgcccacgcgttcggccaggagcagcaacccatcgttggaggtgccatcgtgtagattacatatgagatgtactcgacaatggtgccctcataccgacatgtgtttcctagaaataatcaatatattgattgagatttatctcgatatatttctgaactatgttcatcatat

SEQ ID NO: 4223 - DNA, 461 bp, Zea mays
  Clone ID: LIB3117-009-Q1-K1-A12
cttctccgaggtgagagagcccaggcgatccaattccaccctcgttctcaggcactgtcacacagacacagctgacctgccactgccaggaaagtaggtcgaggatgccccgcagcggcttctcggggtccttcaggtcgcccaagatcgacgtcgtcatcgacatgggaaaccccttcctcaaccgcaccgtcgacggcttcctcaagatcggcgccgtcggcgcctgcaaggtggctgccgaggagaccttcgagtgcctccacaggggggatgtttcgaagcacaaggttgagcatgccctgaggaagatgtgcaaggagggcgcatattggggcactgttgctggagtttatgtgggcatggtgtacggcgtggaaagggtccgtggccgcagtgactggaagaacgcgatgatcgggggcgccttgtccggcgccctgatcttcggcgccagcaac

SEQ ID NO: 4224 - DNA, 348 bp, Zea mays
  Clone ID: LIB3117-009-Q1-K1-A2
cccacgcgtccgcggacgcgtgggctcgacggccgtaacatcaccgttaaccaggcccagtggcgtggcggtggcggtggcggcggtggctacggcggcggtcgcggcggcggcggctatggtggcgggcgccgtgacggcggttatggcggcggtggcggctacggcggtcggcgcgagggtggtggcggcggctacggaggcggtggcggctacggcggtcggcgcgagggtggtggtggcggctacggcggcggcggcggcggctggagggactgatgtgtgggcccatcctggcttcggccgagttatcttatctatctatagtatcgtgttaccgttcgcttc

SEQ ID NO: 4225 - DNA, 306 bp, Zea mays
  Clone ID: LIB3117-009-Q1-K1-A4
cgagctctcaattttttacctatccaccgttctcaccacccatcagttctatttcacgagagggacttcaacttcgtagtgttcttcgtcgacaaccgacaaatcgtctccttctccctagacaagaccatcaagctctggaacactctcggcgagtgcaagtacaccatctgcggcgacctctgctgcagcaacggccacaacgggtgggtctactgcattaggttctccccaaacacctttcatcccaccattgtcttcggatcctgtgacacacaccgtcaaagtctggaaccttaccaactg

SEQ ID NO: 4226 - DNA, 361 bp, Zea mays
  Clone ID: LIB3117-009-Q1-K1-A5
gacccactcttacgtccacgcgttctcccactcatcctctcaatttatcattccactcttctcttatcgtctctcggttctatttaaaaagtggtattaccatataacaaaaacacaataatcaacaaaaaataaacctaattactacaataataaaaaaaaaaaaaaaaaaaaaaaaaaaaaaaaaaaaaaaaaaccccccctttaaaaaaacccactttataaaacattcaaacttacctacatattccttccaaattaaacccaaatttaaattaccccccaatttaattaaaattcccaactttttaaaacctcttaacttccaaaactcattcttttcccaacaaaatcccctttc

SEQ ID NO: 4227 - DNA, 388 bp, Zea mays
  unsure at all n locations
  Clone ID: LIB3117-006-Q1-K1-B1
ggctggctcgaccgcctgcatggggcgcaatgcccttcggcttcaatcccatacgccgacgcgatctataatcaatcaaaccgccggcctccggcctggcggctgccgcagtcggcctgcggtgtactgttagtctgctgctgatttccgttgttatactgctggtacatgtgtcgtgtgatagatgtgtcaactatatatcaatctcgtcgccggcagctctggcatgtttgagtatgtgttgcttctctgtggtgccggcgactatggctgctagtactgttaatgtgatcgggtctccttgaacaatggcataaatatgttgcttggttactcttttctctaatggcaagtaaagttcatgatttgcgaaaaaaaanagnncaat

SEQ ID NO: 4228 - DNA, 354 bp, Zea mays
  Clone ID: LIB3117-003-Q1-K1-D6
cccacgcgtccgggcttgcgagctgggcctaagcggcaccgaaaggaagcttcagattctgtcgggaattaaagtcatggggctgcgagtgcaaagtgctggggcaggaaccccaggtgctggcgtgcctcgccgcggactcgccgctctcgccgcagccctcggcggcgggcaccccgcgccttctcgcgggtcccggcatcaaggtctgggacccctgccacgttctcctgcccccgccgccgtcgtctccgcacgcagggaggcaggttgacgccgcggtcatcgaggtccttgtggtcagccacggcgagtgcgcagccgcgatgcgctcggaccttgtcggcggccggt

SEQ ID NO: 4229 - DNA, 426 bp, Zea mays
  Clone ID: LIB3117-003-Q1-K1-D7
gttggcttctcctccccctccggttcgggttcgggttcgtgaggttctccggggttcggtgtcgtgggtgagcggatcgagatggcggcgtcggatgttgagtaccgctgcttcgtcggcggcctcgcctgggccacggacgaccactccctgcacaacgccttcagcacctacggcgaggtcctcgagtccaagatcatcctcgatcgggagacgcagaggtcccgcggcttcggcttcgtcaccttctccacggaggaggcgatgcggaacgccatcgagggcatgaacggcaaggagctggacggccgcaacatcaccgtcaacgaggcccagtcccgcggcggccgtggaggcggcggcggtgggtacggtggtggccgtggaggcagcggctacagcggtggcgggcgccgtgatggcggc

SEQ ID NO: 4230 - DNA, 217 bp, Zea mays
  Clone ID: LIB3117-003-Q1-K1-D8
acctctgcttcctcagcagcctctcctgtgccacttactaccactccctccacaactccttcatcacctactgctaggtcctcgagtccaatatcatcctcgatcttcatactcatatttcccacttcttcttcttcttcaccttctccacttatgatgctatacttaactccatctattgcatgaacttcaatgatctttacttcctcaacatcac

SEQ ID NO: 4231 - DNA, 402 bp, Zea mays
  Clone ID: LIB3117-003-Q1-K1-D9
gctgtgtgatccaaacccaaacttttctgcaaactcagaagcagcaagactatgcagctattacaaacgggagtgcgaccgcaaagtccgtgagatcgtgtagcagagctggacagccgactagtgtgcataaggatgctcgtcgtgcccgataggggcacaataagaaagcgtgaaaaaaaaacacccccactccttgtgtttctggttcgtcaggcttgtctaaacatttaagaaccccactgattggtttgtagtctgtcgtcgtcgttctgccccgatcaagagccccggttgctcatggtggtggctgtcgtaatgtagcggttgttgacctatcttctcattaattgaaaggatcctgccctatgtacaaaaattatatctttcgaatggttgttt

SEQ ID NO: 4232 - DNA, 453 bp, Zea mays
  Clone ID: LIB3117-003-Q1-K1-E1
cccacgcgtccgcccgatttccccgcgtgcgctctctctctccgtcggcgacgagcctgggcgaccagcgccgccgcccctagcccaggtctccatcggacgcttcgccaggtcttgtttagacccaccgccggcaacgagcaactcttgttatcggatcccgcatcgtggaatgcttgccaaagggaggaaggtagctggaaggcgtgaagaaatgtctgcaaattatgcgtttggaccacaggatgatgatgcgattattaaacacaggcttctgactaggacaacgaccaccaggggtgaaccgccactaaagaagcttcagaagaagttcatgtcctttgcaactgagatcgagaaggatgcagataacataagtgactgtgaaagactgtacaaggcctttctacatgaaattaacacctttgagctacctcttctgaaaagcaaggc

SEQ ID NO: 4233 - DNA, 461 bp, Zea mays
  Clone ID: LIB3117-003-Q1-K1-E10
ccttaattccctggtctacccactcttcctatgattggaaaaaaaaaaaaaaaaaaaaatttaaaaaaaaaaaaaaaaaaaaaaaaaaaaaaagaaaaaaaaaaaaaaaaaaaaaacaactaataaaaataacaaacccactttctttaaacatccaaaattacacaccattattcttcaacaactttaacaaattatctaatcaacactcatacaactattcttaatcttaccctaccaccttctctacaacatcttcatctcctttcatctacccctctctttctcttctccttactcctacataccttttcctcctctttttttccatttaatctaccacttcttactcctctaactatttttaacccttctttctactttcttcaccttctttcatttttctccctttccctttttatctctttttcttacctccttcttcttcaattctttctttt

SEQ ID NO: 4234 - DNA, 415 bp, Zea mays
  unsure at all n locations
  Clone ID: LIB3117-003-Q1-K1-E12
cccacgcgtccgcgcagcccttcaaacaaacaagttcagcctcaacaggactccaaccagggggccggggctaatgctggatattatggctacggtcaaggctatgaggcctatgggtacccccagtctcaggaccctaatatgtataattatggagctggagcttatgctggctatccaaattaccaacaacaaccagtagcacagcaaccgccgcagcaacagtgagaggtccagtgacgctactgtcatttgggtgattgacgtggaaatatttatgagttgtaagatgagcttcggatgcaagctggattaggtatacagacatgattatcgtagtactcagattctgagttgccctcgtatcagagctngtggtcccaatagcctgcagctgcagctaanacgatctatt

SEQ ID NO: 4235 - DNA, 447 bp, Zea mays
  Clone ID: LIB3117-003-Q1-K1-E2
acccactcgtacgcccactcgtcctccctatttccccttttttctctctctctccatcttctacaaaccgttggcttttataaaaacctcccctatcccaatactccatcatactcttctccaaatcttctttacacccacctcctacaactatcaactcttattatccaatccctcatcttataatactttccaaaattactatattatctataatactttaataaatgtcttcaaattattcctttttaccacattattatcattctattattaaacacatacttttcactattacaactaccaccatttttaaaccatcactaattaaacttcataataattttatctacttatcaacttatatctataaatatatcatataacataatttactttaaaacaacttacaattcctttcttcatttaaatttatcaccttttaac

SEQ ID NO: 4236 - DNA, 366 bp, Zea mays
  Clone ID: LIB3117-003-Q1-K1-E5
ctctaagggttattttcaacaagttccattctgtcatatcgtttaagcccacaatggtaacgatgctgtcccctgaggttgcagaaaaagaagcagaagctggtgggaagacgggtgacctagattcttatgagattgaaggcggtgagacaaaagcagagatattgcaaaacctagctgagttccagttttcttgtgtcatgtacaatggtgccctagagaatgcatgcagtgagcttggagcccgtatgtctgccatggacagctctagcagaaatgctggcgatatgcttgatcgtctcacgcttacttacaacaggacacgccaagcatccatcaccacagagcttactgagattatatctg

SEQ ID NO: 4237 - DNA, 435 bp, Zea mays
  unsure at all n locations
  Clone ID: LIB3117-003-Q1-K1-E7
cccacgcgtccgcgcgtttagttcattaggtcttctttctcatcgggggctagtgttattttacgtttcttcttttctgtctattggttaattggttccccctgaatgtttttttgtttgtatagagagagaaagagagaggagggtgagaggagaggcaggagaaatagatgaatcagagtggttgctgcattgcagttgcagttgcttgcaggttaggtactaggtgagaaggagagctaaaccagcagcagagggagacagatctagagaggaaactttgcagctagtcagtcagtcagtcaatcaattagaagaaagcatggagagtgcttttaagcaaatgaaaggggaatttgttggtttgctaattagaagggaggttatgcanggcangtcagtagtagctatcatcgtccatgatgattttaaaac

SEQ ID NO: 4238 - DNA, 335 bp, Zea mays
  Clone ID: LIB3117-003-Q1-K1-E8
ggcacgcgtacgtccacgccatcgttatcattctctatcgggagactcatacgtccggcggcttcttcttcgtcacctgctgcacagatgaggcgatgctgaacgccatcgagggcatgaacagcaaggagctgaacggacgcaacatcaccgtgaacgaagcccaatcccactgcgagtcgttagtccactgcagtgggtactgcggtcagccgtggaggctgcggctacagcagaggcgagcgccgtgatagctgtgacagatactgcggtgagcacgctgctactgttgaggcagccgctacagtagttgtagcagcggctactgaggtggc

SEQ ID NO: 4239 - DNA, 145 bp, Zea mays
  Clone ID: LIB3117-003-Q1-K1-F1
tcgaccgacgcgtgcgtccacgcatacgatcacccactccatcatgtcttttatctcatagggggctagcgttattggacgttctttctttactgcctgttggctaatcctatccccctgaatgtcattttgtgcgtacatagag

SEQ ID NO: 4240 - DNA, 339 bp, Zea mays
  Clone ID: LIB3117-003-Q1-K1-F10
cgtcctataatgtgaacaacatccatgaagatatacttttttgcacgctcatgctgctcatgacgcatgcttattttacaactagatggcgggcctatcccaatgatttcaatacgctcaacagtacgcatactaccaaaatgtgattcaacgcactttgtctgctcttcaattatgctagtgcacctcttgactgtatggttctataattttgctgtccctaagctacaaagtatttaatcttatactcccctggctatgcaagctgtggaatgtattcttttttactgcaactgaaaaatgctacccatactatagctggtctccttattactaaaa

SEQ ID NO: 4241 - DNA, 377 bp, Zea mays
  Clone ID: LIB3117-003-Q1-K1-F12
acaattgttgcaacagattgtaccagctctgactcagctagttgtggcaaaccctgctgccgacttgcaacagctgcttgcattcaaccaactgactatgtcgaactctgctgcgtacctacaacagcgacaacagttacttaatccactagcagtggctaacccattggtcgctgccttcctacagcagcaacaattgctgccatacaaccagttctctttgataaaccctgtcttgtcgaggcagcaacccatcgttggaggtgccatcttttagattacatatgagatgtactcgataatggtgccctcattccggcatgtgtttcctagaaataatcaatatattgattgagatttatctcaatatatttctg

SEQ ID NO: 4242 - DNA, 440 bp, Zea mays
  unsure at all n locations
  Clone ID: LIB3117-003-Q1-K1-F2
aacctgacaagttagctacccgcgcagcgccgcgcgccatggccacgatgacgaacgaccgcattgtgcccctcctgctggtcgcggccacactgctcgcgcaggccgcggcctgcccgtactgcccgacgccgaagccgccgccgcctccgccgccgtcgtcgtccacgccgtgccctcccccgccctactcgctgtcgccgtccacgccgacgggcaagtgccccgtgaacacgctcaagctgctcgcgtgcgtggacgcgctcaacggcctcgtgcacgccgtcatcgggaccaaggccagcgacacctgctgcccgctgctctccggcgtggccgacctcgacgccgcgctctgcctctgcaccaccatcaaggccaaggcgctcagcgtcagnctcgtgctccccgtcgccatctcggtgctcgttaacgagtgc

SEQ ID NO: 4243 - DNA, 229 bp, Zea mays
  Clone ID: LIB3117-003-Q1-K1-F4
cggacgcgtgggtacggccttaaccatgtgacttacctcatcgagcagagcaaggcgcaggtggttgtcatagctcatgatgttgatccgatcgagctggtcgtgtggctcccggccctttgcaggaaaatggaggttccatactgcattgtcaagggaaaagccccccttggatcgatcgttcccagaagaactgcttcggtccttggctggacaaccgtcaaaacca

SEQ ID NO: 4244 - DNA, 434 bp, Zea mays
  Clone ID: LIB3117-003-Q1-K1-F5
gcatccttcagcatgaccccttcgaggttctcgaccagagaggagtgggcgagctggttaagctggctacagagaggggccgcaaagctaggcctaacttgaaggtgggcatttgtggagaacatggtggagagccttcatcggttgctttcttcgccaagactgggctggattacgtttcttgctcccctttcagggtcccgatcgctaggctagctgcagctcaggtgcttgtctgagggtgcctctgctcgttggcagccggatcgcctgctgttggtgcatctggtgattaataatactactatgacagagccatgctctgtgaagagtattagtagcagcgctcataaaagctacagttccgtctcttttctcagctatgtaaaaacttcaaactgttcatgcttaaaactgagggttttcttggtgtg

SEQ ID NO: 4245 - DNA, 357 bp, Zea mays
  Clone ID: LIB3117-003-Q1-K1-F6
gaccgacgcgtgcgaccatcgcaacgcagcagcatcaacaatttttaccagcactaaaccaactaactgcggtcgacggtgtcgactacttgctacagcagttgctcgcattcaacccacttgctctggcaaacatagttgcataccaacaacaacaacaattgcatcagtttctaccagcgctcactcaactagctatggtgaaccatgacgtctacctacatcagctacaactgatttcatctagccctctcgctgtggttaatgcacctacatacctgtaacaacagttgctgcaacagattgtaccatctctgactcagctagctgtggcaaactctgctgcctacttgcaac

SEQ ID NO: 4246 - DNA, 301 bp, Zea mays
  Clone ID: LIB3117-003-Q1-K1-F7
taacttctatggtctatagaattttattgaatgagactgtgaagcggcgtttaggccggtttcttactgacggagggaagtttagcctgctgctaccatatacatggacacagactcatatgtatacactcaaattttgaaagctgtgatcctgtatcatttaatcaaaaacaattttgtttttttttcatcttgtcatggcaaatgttacaccagctgcaaaataattacaataattgatctttatccaacgttacagttacttcgaaaaaaaaacataacagttacaaatactactatt

SEQ ID NO: 4247 - DNA, 301 bp, Zea mays
  Clone ID: LIB3117-003-Q1-K1-F8
gggacgcgtgggtacagccttaactttgtgacttacctcatcgagcagaccaaggcgcaggtctttagcatagctcatgaggttgatccgatcgagctggtcgtgtgcttcccggccctttgcaggacaatggaggttccatactgcattgacaagggaaaagcactccttggatcgatcgttcacaagaagactgcatctgttctttgcttgaccaccgtcaagaacgaggacaagcttgtgttcagcaaaatcttggaggctatcaacgctaacttcaacgacaagtttgatgaggtca

SEQ ID NO: 4248 - DNA, 438 bp, Zea mays
  Clone ID: LIB3117-003-Q1-K1-F9
cgtcctgaagatgaaaaggataagataagcaactatgtcgctatagccaacaccgacaaggtcaaagaatgtaggctctaacatggtttgcgcctccactggtatagctgctcatgctttggacgatctgtttgaagctgttgaactggacgatacacgtgacacatcaatagaaaatgatgctgatgacgaaactaggtcgcctgttatgcccccacaaccaccaccggtggttaatacttactagcagtactaggctgatgacgaggaagtctacgtggaatgattacaatgccaacatggtactgtaatgagctatatagctctcgcgcctgtgtaaagcattatttaatatgcatttgatgctgcagttcaccttgcataataagaatcgtcattaatgatccttcgtggatgctgttttatcacttaactttt

SEQ ID NO: 4249 - DNA, 62 bp, Zea mays
  Clone ID: LIB3117-003-Q1-K1-G1
cggacgcgtgggttgagttgcaccttttggtgcttatggctatgggttggcttccagaggag

SEQ ID NO: 4250 - DNA, 404 bp, Zea mays
  Clone ID: LIB3117-003-Q1-K1-G10
atacaaaccatcgcaacacaacagcaacaacagttcctaccagcactgagccaactagatgtggtgaaccctgtcgcctacttgcaacagcaggtgcttgcatccaacccacttgctctggcaaacgtagctgcataccaacaacaacaacaattgcaacagtttctgccagcgctcagtcaactagccatggtgaaccctgccgcctacctacaacagcaacaactgctttcatctagccctctcgttgtgggtaatgcacctacatacctgcaacaacaattgctgcaacagattgtaccagctctgactcagctagctgtggcaaaccctgctgcctacttgcaacagctgcttccattcaaccaactgactgtgtcgaactctgctgcgtacctacaaca

SEQ ID NO: 4251 - DNA, 451 bp, Zea mays
  Clone ID: LIB3117-003-Q1-K1-G11
ctcgcctcacgaaaaggcgcaggccaaggccaaggccaagccgccccctccctcctctccggtgctctcctctcctttcctctccactctctggcagccaaaggcgaggccgagatcctgcgcgcggaggatgccttccaggtccatgagccggctgtccgtcgagtccgcctcgggcagcggcggcggcggctgccgggaggccgagccggtgctctgcgcgcctcggccgcgcagggcccagcagcagctggtccacgtccacccccgcggcgccgacctcatcctcggcccgacgcccttccttctcaacgagagcagcgaggagggtcggtgcagctgggcggcgtttcggcgcggtcgacgccggcgcgcgcgggcaacccgctggtgcacgaccccagcttgctgctgagccagcgccaccccgcggcggacccaacgctggagc

SEQ ID NO: 4252 - DNA, 450 bp, Zea mays
  Clone ID: LIB3117-003-Q1-K1-G2
cggacgcgtgggcggacgcgtgggtttgagcattcagaaacacaccaagcgaagcgcgctggcaacaacctaacaacaatggctaccaagatattatccctccttgcgcttcttgcgctttttgcgagcgcaacaaatgcgtccattattccacaatgctcacttgctcctagttccattattccacagttcctcccaccagttacttcaatggccttcgaacacccagctgtgcaagcctataggctacaacaagcgattgcggcgagcgtcttacaacaaccaattgcccaattgcaacaacaatccttggcacatctaacaatacaaaccatcgcaacgcaacagcaacaacagttcctaccagcactgagccacctagccatggtgaaccctgtcgcctacttgcaacagcagttgcttgcatccaaccaacttgctctagcaaac

SEQ ID NO: 4253 - DNA, 452 bp, Zea mays
  unsure at all n locations
  Clone ID: LIB3117-003-Q1-K1-G3
ctccagcgacggcagcgggcgagggttacgcgaaggcgaagcggagtagtggaagcagaggcggcagccatggccgtgatggagaagctcaagatctttgtcgttaaggagcccgtagtcgcggcctcctgcctcatcgctggattcggtctctttcttccagcagttgtccggccaatcctggattcatggcagaccgcggaacaagttcctccacctcttctaaatgatgtggttgcaggtgtcaccggcaagaaaaagtagtgaacttgcattgttttctcatgccaatgttgccccacattttcttccccgtgttttttctggcgaccagattggaaggcttttcccaagagtcacggtcttgaactctagatggtatccgcggaaatatcatngtacctgaatcatatactgcaatgtggcagttntgaaaatgtttcccctcctac

SEQ ID NO: 4254 - DNA, 346 bp, Zea mays
  Clone ID: LIB3117-003-Q1-K1-G4
gcagaacggctggcgcagttaggagccgacgacgaacaaagtctctcttccaacgactccgtgccgttgccctttgagagaaaaaggtacaatggcgagtctcctccaaatcagttcactgggacacgcctgttgcactactagtagtgggattgaaacgcactgttttatcgtgcaatctcctctcgaatgtcggtaacgagtgatgatcatgatcaggggtggaaaaataggtcagggcctttgaacgcatactcttccgtgggttgcgctttgtgttgctggcgatggtggcaggatctgcctgattgttgcaactgcagttgtaattaaagggatgctttct

SEQ ID NO: 4255 - DNA, 450 bp, Zea mays
  unsure at all n locations
  Clone ID: LIB3117-003-Q1-K1-G6
cccacgcgtccgcccacgcgtccgatcacggaaagcctgagggagtacttgaagaacatgcgacgtctaataatgcagcaccagaagccagaatcatcagagtcagattcaagtgatccaaattttggtccggaaagctctagttcagggtccagttctgagtctgagtcagaatcaagccctgatgagcgtgacagaaggcgaagtaataagaggaggaagaggacttgagagcacttccaactatgctttttggaattcatgtatttggttttgtttaaatgtgcttcttcagtatacatgtgcagtatgtgatctagctcttgatgtgttagtggtaatcagaaagccgtaacagtaagatactatccgaacttgtacgtggcaggttggtagtccagcaacaaagggccaacagagatcttgnttatttttcataacttccaatgc

SEQ ID NO: 4256 - DNA, 442 bp, Zea mays
  Clone ID: LIB3117-003-Q1-K1-G7
tccacgcgtaccgaccacacgtgccgaggcttactcgaaggcgaatcggagtaatggaagcggaggcggcatccatggccgtgatggagaagctcaagatctttgtcgttaaggagcccgtagtcgcggcctcctgcctcatcgctggattcggtctctttcttccagcagttgtccggccaatcctggattcatggcagaccgcggaacaagttcctccacctcttctaaatgatgtggttgcaggtgtcaccggctagaaaaagtactgaacttgcattgttgtctcatgccaatgttgccccacattttcttacccgtgttgtttctggcgaccagattggaaggctttttccaagagtcacggtcttgaactctagatggtatccgcggaataatcattgtacctgaatcatatactgcaatgtggcaattttgaaaa

SEQ ID NO: 4257 - DNA, 395 bp, Zea mays
  Clone ID: LIB3117-003-Q1-K1-G8
cgtccacgcgtaacggctagcgcactacgattctctactaacaaagtctctcttccacgagtcggtgccattgccctttgagagaaaaaggtacaatggcgagtctcctccaaatcagttcactgcgacacgcctgttgcactactagtagtgggattgaaacgcactgctttatcgtgcactcttctttccaatgttggtcaccactgatgatcatgatcatgggtggtaaaatcagtcacggcctttgaactcctactcttcgtgttcacctttgtgctccaatagtgcacgatctccctgattgttgcaactgctcatgcaactaaccggatgctatcttgacacctacgtacaacaacaacaactgctttcatctagcccgctcgctaaaa

SEQ ID NO: 4258 - DNA, 348 bp, Zea mays
  Clone ID: LIB3117-003-Q1-K1-H10
ttccacttcaactacctgagatatttttaaaacttcgcaaacccctacctaacctaaattttcactatcttcttatacaatttcctacaccacctcttcttctacaccatttacttctaatacttcctctcctttccttatatcctacttctacatatcctcatctcatcattaaaacattcatacatacatcactcaatattttacaataccatcaatttaattaatcaaataatatttaacttaacacacaataatataaattcctttcattctacattatccaaacttacttactctttcttactacatcataactctattatacactcacctaaattcaattta

SEQ ID NO: 4259 - DNA, 441 bp, Zea mays
  Clone ID: LIB3117-003-Q1-K1-H2
cattattccacagttcctcccaccagttacttcaatgggcttcgaacacctagctgtgcaagccaacatgcaacaacaagcgcttgcggcgagcgtcttacaacaaccaattgcccaattgcaacaacaatccttgccacatctaacaatacaagccatcacaacgcaacagcaacaacagttcctaccagcactgagccacctagccatggtgaaccctgccgcctacttgcaagagcagctgcttgcatccaacccacttgctctggcgaacgtagttgcaaaccagcaacaacaacagctacaacagtttctgccaacgctcagtcaactagccatggtgaaccctgccgcctacgtacaacaacaacaactgctttcatctagcccgctcgctgtgggcaatgcacctacatacctgcaacaacaattgttgcaaca

SEQ ID NO: 4260 - DNA, 430 bp, Zea mays
  Clone ID: LIB3117-003-Q1-K1-H3
gcacgctagcgcaatggtcacagagttgattgtccgcatcagtggtaagccgtctccgcagagccaagaacaacccaggtagggggcctggttctcatgccgggggtcctggaagcaacttcaaaaccaaattgtgcgagaacttcaacaaaggctcctgcacctttggagacaggtgccacttcgcccatggcgaaggtgagctgcgcaaacctgctgctgcttgacaggcatgcttattgtggcctgtggtgattaatctgcctgtatggctgaataacaccatgaccaaagacagtggcgccagcgccatggtgaagtgtgctgagccacatgctgcctgaaagagagcatttcccttgggctcgtatttgatcttaatgctgtaacaaactctcctcgatggagattaagcaatggccgtttattt

SEQ ID NO: 4261 - DNA, 338 bp, Zea mays
  Clone ID: LIB3117-003-Q1-K1-H4
gctcggcgatctatcaaggaggccaggagggtgagggggagatggcggagaacccgcgggtgtttgggaacgggatgccggtgccgttctacggcgagatgttcgtcctcgtccgggacggcgtcgagttccacgtcgacaagatcccgtcagctcctggaggtcatgtgaaaacaaaaggcacaatttacctgtccaatataaggatggtgtttgttgtcagcaagcctgttggcaacttctttgcttttgatatgccactgttgtttgtgcatggtgagaagttcaatcagcccatatttcactgcaacaacatctctggattcgttgaaccagtc

SEQ ID NO: 4262 - DNA, 407 bp, Zea mays
  Clone ID: LIB3117-003-Q1-K1-H5
cgtgctagcaaaccttgctgcctacgctcagcaacagcagttacctttggtgcaattgttggcagaaaacatcagggcacaacaactacaacaactcgtgctagcaaaccttgctgcctactctcagcaacagcagtttctgccattcaaccaactagctgcattgaactctgctgcttatttgcaacaacaacaactactaccattcagccagctagctgctgcctaccaccagcaatttcttccattcaaccaactggcagcattgaactctcctgcttatgtacaacaacaactactaccattcagccagctagctgctgtgagccctgctgccttcttgacacagcaacagttgttgccgttctacctgcacgctgcgcctaacgttggcaccctcttacaac

SEQ ID NO: 4263 - DNA, 375 bp, Zea mays
  Clone ID: LIB3117-003-Q1-K1-H6
gattattcaacaattactgacaccatttacttcaatgggcttcgaacacctagctgggcaggccaacatgcaacgaacaggcgcttgctgcgagcgtcttacaacaaccaattgcccaattgcaacaacaatccttgccacatctaacaatacaagccatcacaacgcaacatcaacaacagttcctaccagcactgagccacctagccatggtgaaccctgccgcctacttgcaagagcagctgcttgcatccaacccacttgctctggcgaacgtagttgcaaaccagcaacaacaacagctacaacagtttctgccaacgctcagtcaactagccatggtgaaccctgccgtctacgtacaacaacaacaac

SEQ ID NO: 4264 - DNA, 308 bp, Zea mays
  Clone ID: LIB3117-003-Q1-K1-H7
cccacgcgtccgcgcaacgcaacagcaacaacagttcctaccagcactgagccacctagcgatggtgaaccctgtcgcctacttgcaacagcagctgcttgcatccaacccacttgctctagcaaacgtagttgcaaaccagcaacaacaacaactgcaacagtttctgccagcgcttagtcaactagccatggtgaaccctgccgcctacctacaacagcaacaactgctttcatctagcccgctcgctgtggccaatgcacctacatacctgcaacaagaattgttgcaacagattgtaccagctc

SEQ ID NO: 4265 - DNA, 415 bp, Zea mays
  unsure at all n locations
  Clone ID: LIB3117-003-Q1-K1-H8
cggacgcgtgggcaagggtggatactattgctcctaagttgctctttattgccctcaatgtggctgccatgggattgggtatatggaagcttaatacattgggccttcttccaacaaatccatcagattgggtgtcttctctggctcctgctcgggaggttgaatatgccggaggagggctccccttaatttaatgtccatttccatttgaacttattttactagttgtaatattaataccgagtgacatttttaccatacacccctgaatacacgaagttccgggttttttcccctgtctggatttgtactactattttctagatgcgtttgtttgtatcgaatttgcgaccctgaagtatagtcgtgtctggatggaaaaagattaaattatcttctattcaattntgactaa

SEQ ID NO: 4266 - DNA, 115 bp, Zea mays
  Clone ID: LIB3117-004-Q1-K1-A12
attgtgtgatagtgacgaccgtatcctgtcaattgtcatatagcaggacagcttcttgtaatggtgtatataaattttcaggcgattcataatttctattttttggcctttgctt

SEQ ID NO: 4267 - DNA, 418 bp, Zea mays
  Clone ID: LIB3117-004-Q1-K1-A4
gccagcccattaaccctcgttcctgtcgcgcagccacgacctccacttccacatcggccccggcgtcggcgcggtcagttgaaccatggcggactccaaggccacctcggcggtcaccctccgcacccgcaagttcatgaccaaccgcctcctggcccgcaagcaattcgtgcttgaggtgatccaccccggccgcgccaacgtctccaaggcggagttgaaggagaggcttgccaaggcgtacgaggtgaaggaccccaacaccatctttgtcttcaagttccgcacccacttcggaggaggaaagtccactggtttcggcctcatctacgacaacctcgaggctgccaagaagttcgagccgaaataccgcctcatcaggaatggtcttgctactaaggttgagaagtcccgcaag

SEQ ID NO: 4268 - DNA, 416 bp, Zea mays
  Clone ID: LIB3117-004-Q1-K1-A6
gtctgatttccctcatgtcgagaggtatttctggaccatggttaaccagcctaacgtcaagaaggtcattggtgaggtcaagcaggcagagtctgcacctcctattccgaaaaaggctgctccttctaaggagccaaaggcaaaggatgtcaagaaggaggctccaaaggaggcccccaagccaaaggtggttgaggcaccagcagaagaggaagcaccaaagccaaagccaaagaatcctcttgacttgctgccaccaagcaagatggtccttgatgactggaagaggctatactcaaacacaaagactaacttccgggaggttgccatcaaaggtttctgggacatgtacgacccagagggctactctttgtggttctgtgactacaagtacaatgatgagaacaccgtctcct

SEQ ID NO: 4269 - DNA, 86 bp, Zea mays
  Clone ID: LIB3117-004-Q1-K1-A7
cccacgcgtccgcccacgcgtccgcggacgcgtgggttttggtgtaagaatatgggatttattcaataaaatggtcggtatctgcg

SEQ ID NO: 4270 - DNA, 391 bp, Zea mays
  Clone ID: LIB3117-004-Q1-K1-A8
aacgcaaattgcaccaagaaatccatcgagaggccgtcgacaggggaattaatggcgtcgtcgtctagcagcagccaccgccgcctcatcctcgcagccgccgtcctgctctccgtgctcgcggctgccagcgccagcgccgggacctcctgcgtgccggggtgggccatcccgcacaacccgctcccgagctgccgctggtacgtgaccagccggacctgcggcatcgggccgcgcctcccgtggccggagctgaagaggagatgctgccgggagctggcggacatcccggcgtactgccggtgcacggcgctgagcatcctcatggacggcgcgatcccgccgggcccggacgcgcagctggagggccggctagaggacctgccgggct

SEQ ID NO: 4271 - DNA, 406 bp, Zea mays
  unsure at all n locations
  Clone ID: LIB3117-004-Q1-K1-B1
cttggtgaaagctgggcaccactcaaaggtcgtgccgctgatcgacgagaacctgctggtgacaacaagcaggggcaccgagttatcttccactctagagcactggctcgaagaaaggaacctttcttccgaagaagcccaggttatccgtctagaggaagggtatatcagagaagggatgcggttgagcgtggttggagtgctgagcaagaataagaacggggatgccgtgatacttcctccgctggagcctcaatcgacgggctttgtgttgctgtcgtgtctcctcccgtcatatttcgacgggatagtgctgagactggccgncgtgccgaactcgggcgtctcatgaagagctgctgtgtgggtaagggagctcggtgagatgtaacagctaacaacaact

SEQ ID NO: 4272 - DNA, 352 bp, Zea mays
  Clone ID: LIB3117-004-Q1-K1-B10
cggacgcgtgggattaagaccaactagcaccatagaaagcacaatagtgtaccaacaatggcgggcaaaatattttgcttccttatgctccttggtctttctgcaagtgctgctaccgcaaccattttcccacaatgctcacaagctcctatagcttcctttcttcccccatacctctcaccagcggtgtcttcagtatgtgaaaacccaattcttcaaccctacaggatccaacatgcaatcgcagcaggcatcttacctttatcacccttgttcctacaacaaccgtcagccctattacagcaggtacctttggagcatttgttggcacaaaacattaaagcacaaccac

SEQ ID NO: 4273 - DNA, 245 bp, Zea mays
  Clone ID: LIB3117-004-Q1-K1-B11
tttcaaccaactacctacacttaactcttagactgattttcaacaacaactagtcccacccatccacctataaccttcctacccccatcatactatcccactcaacctactctcatttctccaactcctctactcattcacatctacaactactactaccactaatacacctcccttttctaatccctacttaccttataaccacaacctcaataataacatccctaccactacactaaccctaa

SEQ ID NO: 4274 - DNA, 465 bp, Zea mays
  unsure at all n locations
  Clone ID: LIB3117-004-Q1-K1-B12
cccacgcgtccgggagagcacgagacgcccctctgcttccttttctctgtcgctcaaaagttacgggagccctcttctctctgtgctgtccgagccccaaccatggatgaggcgcaagttatggagtcaaaggatggaaccatctcagttgcttctgcatttgctgctcatcaggaagctgtgcaagacagggatcacaaattcttgacaaaagcagtggaagaagcataccgaggagtcgattgcggtgacggaggtccatttggagcagttgtcgtccgcaatgatgaagtggtagttagctgccataacatggttctgaagcacactgaccctactgcgcatgctgaagtaactgcaattagagaggcttgcaaaaagctcgggaaaatcgagctcgctgactgcgaatattacgcgtactgcgagccatgcccgatgtgctntggtgcagttcatctctcc

SEQ ID NO: 4275 - DNA, 324 bp, Zea mays
  Clone ID: LIB3117-004-Q1-K1-B2
cggacgcgtgggtctttatgggcaatcacgaatcattgactgaactgtataaaggggattggtcactgtgacgctaggttctcagatgcgcacaacatgaccgttatgaagagctacacggcattcttcaagccacatgggatatcttattctgtagagagctccaaaaaaggttactgggcaccacctaccagggaagaaaatccgccacaacatcttgaattcatactttttttgcgttgtcggattacacatgtccaacgaaggtgccgttttcacgtttctcgctcacaccatcaaaccattgacctgtgcacatggacc

SEQ ID NO: 4276 - DNA, 411 bp, Zea mays
  Clone ID: LIB3117-004-Q1-K1-B3
gccacgcgtccggacaaaccgaactcgcacctcgcacctcgcatcgtcttgcgacacacctccagctccgaaaccctactccgccggcgatgtcgcatccggcgccccggccccggcggcggcaatggccgtgacgacgcggaggacgaccagctcgcctccatgtccacggaggatatcatccgggcctcccgccttcttgacaacgagatccgtgtcctcaaggacgagttgcagcggacgaacctggagttggagtcgttcaaggagaagattaaggaaaaccaagagaaaattaagctcaacaagcagctgccctacctcgttggcaacatcgttgagaacttggaaatgaaccctggagatgaagctgaggaggatggtgctaacaatggtttagactcacaagga

SEQ ID NO: 4277 - DNA, 378 bp, Zea mays
  Clone ID: LIB3117-004-Q1-K1-B6
ccagaggctaagaagcctgaggactgggatgacaaggagtacattcctgaccctggggacaagaagccagagggctatgatgatattcccaaggaaattcctgaccctgatgctaagaagcctgaggactgggacgatgaggaagatggtgaatggactgcccctaccattcccaacccagaatacaagggaccatggaaacaaaagaaaatcaagaacccgaactaccagggtaaatggaaggcacctatgattgacaacccagattttaaggatgatccatacatttacgccttcgacagcttgaagtacattggcattgagctgtggcaggttaaaacgggcactctgtttgacaacatcatcatcactgatgac

SEQ ID NO: 4278 - DNA, 452 bp, Zea mays
  Clone ID: LIB3117-004-Q1-K1-C12
atattctatatccgtcgtgtccatactttattactataaccaatcaattcattgaatatgatacttttcaaatatttgggagcctttcgaaaacctccaagcatggtttataatgcaatgatcaagagttggcccttgagaaactctttcatacaagatcacgtagagaaaaattgcatgccaaaaacgttgaagtatcaggaccatggaacatatgccccaagcctgttctgtacactaccgatattctaacattgatatagtatcactttaacataacattcacaggatatatagtgtttatttacattcgagaccattccttgcttgttccttttacttcaacttttgagtggctaaagaaactaaactacaacgaaatctataaatggcaccctttctacttgtaaaaataaattgctgtgtactcaactatgttccagaacaatata

SEQ ID NO: 4279 - DNA, 423 bp, Zea mays
  Clone ID: LIB3117-004-Q1-K1-C3
ccaactagcaacatagaaagcacaatagtgtaccaacaatggcagccaaaatattgggcttccttatgctccttggtctttctgcaagtgttgctaccgcaaccattttcccacaatgctcacaagctcctatagcttcccttcttcccccatacctctcaccagcggtgtcttcaatgtgtgaaaacccaattgttcaaccctacaggatccaacaggcaatcgcaacaggcatcttaccattatcacccttgttcctccaacaaccgtcagccctattacagcagttacctttggtccatttggtggcacaaaacatcagggcacaacaactacaacaacttgtgctagcaaaccttgctgcatactctcagcaacatcagtttctttcattcaaccaactggctgcattgaactctgctg

SEQ ID NO: 4280 - DNA, 349 bp, Zea mays
  Clone ID: LIB3117-004-Q1-K1-C5
cccacgcgtccggtccttacaaggcctatgccagagaggctaccacatatctacagaactgtgggagagaacttcaatgagagagttttgccttcaatcatccatgaaacactgaaagctgttgttgctcaatataatgctagtcagctgatcacacagagagagactgtgagtagggagattaggaagatactgactgagagggctagattcttcaacattgctcttgatgacgtctgcatcacaagcctgagctttgggaaggagtttactcatgccattgaagcgaagcaggttgctgcacatgaagctgagcgtgctaaggtcattgtcgagaaagctgaacaag

SEQ ID NO: 4281 - DNA, 363 bp, Zea mays
  Clone ID: LIB3117-004-Q1-K1-C8
gaggctacagcctggacacaagtactgcctcctcggcgagctctctaaggaggtggggtggaactaccatgacacgatcagggaacttgaggagaagaggaatgagaaggccaaggttgcctacgagaggaagaagcaattggccaagctgcgtgtcaaggccgagaaggcagcctaggagaagttgggttctcagttggagattcttgcccctatcaagtactgaggagctgtgcttggtcatcaggtttggggaacatctagtctatgatttaagtgttcggtaacagtttgtgacagtataatccggtaaaccgtgttatttttctagcactgctatattaacacaatttttagctggtg

SEQ ID NO: 4282 - DNA, 421 bp, Zea mays
  unsure at all n locations
  Clone ID: LIB3117-004-Q1-K1-D10
gcgtccgatccagtccctgctgtgtgatccaaacccacactatcctgcaaactcataagcagcaagactatgtnagctttaacaaacgggagtacaaccgccaagtccgtgagatcgtgcaacagatctggacagccgactaatgtgcataaggatgctcgtcgtgcccgataggggcacaataagaaagcgtgaaaaaaaaacaccctcactccttgtgtttctggttcgtcaggcttgtcgaaacattgaagaaccccagttattggtttgtagtctgtcgtcgacgttctgccccgatcaatagccccggttgctcatggtggtggctgtcgcaatgtagcggttgttgacctatcttctcatgaattgaaaggatcctgccctatgtacaaaaattatagcgtgggaatggtcgttt

SEQ ID NO: 4283 - DNA, 292 bp, Zea mays
  Clone ID: LIB3117-004-Q1-K1-D11
cccacgcgtccgaaaaaaaaaaaaaaaaaaaattaaaaaaaaaaaaaaaaaaaaaaaaaaaaaaaaaaaaaaaaaaaaaaaaaaaaaaaaaaaaaaaaaaaaaaaaaaaaaaaaaaaaaaaaaaaataaaaaaaaaaaaataaaaataaaataaatacaaattatatatatatttaaaatattaactttatttttactttaaaatataattgatttaaatttttattactaaaaaaaaccttcttttccctaactaaaatctccttttttaaaatgctctttaatatcaatt

SEQ ID NO: 4284 - DNA, 412 bp, Zea mays
  Clone ID: LIB3117-004-Q1-K1-D12
cctaattacctctccaccacgcttcctcccacgcctcctaaaaaaactcataaacaactctatccaaaaccaacaaacaataaaaacaaaaagaaactttttaataaatataatatactccaacaatcataaaacctactacttctcacacatttatttcatcacattttacaaaacatcatttctcaacaactactacaacttattctatcataaccttcctaactactctcattaacaacacaatcttccattcatctaactaactccattcaactactcctcttatttttttcaactacaactaccattcattcaactaccttcttcctacctacatcaattaatttctttcaaccaaccaacattcattcaactatctttcttatttatatcaactacaactactacc

SEQ ID NO: 4285 - DNA, 426 bp, Zea mays
  Clone ID: LIB3117-004-Q1-K1-D2
ttgctttgtttttatcagctgaaccctccaaccaactgaaggctacaaatactcgggtgtttggacgagggtgaacatgagcttagacttgtcctcattcgatttgcaacgtctcgacaacccttgcacgatctgactctactgttagatcgtccgtacccatagtttatccaaaagaattattttacacggtatgtactgttatgtgttgtagattatattgttagaaaagtgaagtttgaatatataggtatagagatggataaactgtcatagatttagtcttagaggtacaacaccattccgttgcaagcctctgcctcaacaacttgtgccatttaaaatcacttgtcgtctctaccagtctgcctcgtgccatgtaaaaatcacttgccaagctgtaaattagacaggtgtactatcatc

SEQ ID NO: 4286 - DNA, 243 bp, Zea mays
  Clone ID: LIB3117-004-Q1-K1-D3
aggaggaggtagacgagatgatccgtgaggctgatgtcgatggtgatggccggattaactacgattagtttggtgaggtcatgatggacaagtgatccacagatgcataagctcaaggcagagagtattgtgcatggcatattagtcaagatgcaatgcaactcttatttcatcgacttccagtgagacattctgctagtcgtagtttttgaaaagcaatgcaattgctgctttgttctttcc

SEQ ID NO: 4287 - DNA, 428 bp, Zea mays
  unsure at all n locations
  Clone ID: LIB3117-004-Q1-K1-D7
cgagaagagcggcggcgcgggcggacaaggagcaggcggaggaggagctgtgccaagccacaatgggtatctcgcgtgactcgatgcacaagcgccgggccaccggtggaaagcagaaggcctggaggaagaagcgaaagtatgagcttggtcgccagccagccaacaccaagttgtcaagcaataagacagtgaggagggtccgtgttcgtggaggtaatgtgaaatggagggctcttcgccttgatactggtaactactcatggggaagtgaagctgttacccgcaagacccgtatcctcgacgtggtctacaatgcatcaaacaatgagcttgtgaggacacaaacccttgtgaagagtgccattgtgcaagttgatgctgncccattcaagcagtggtacctcactcactatggagttgacatt

SEQ ID NO: 4288 - DNA, 413 bp, Zea mays
  Clone ID: LIB3117-004-Q1-K1-D9
atccagtccctgctgtgtgatccaaacccaaactcccctgcaaactcagaagcagcaagactggtcagcgagaacaagcgggagtacaaccgcaaagtccgtgagatcgtggagcagagctggacagccgactagtgtgcataaggatgctcgtcgtgcccgataggggcacaataagaaagcgtgaaaaaaaaacacccccactccttgtgtttctggttcgtcaggcttgtcgaaacattgaagaaccccagtgattggtttgtagtctgtcgtcgtcgttctgccccgatcaagagccccggttgctcatggtggtggctgtcgtaatggtacggttggtgacctatcttctcatgaattgaaaggatccttgcctatgtacaaaaattatagcgtgggaatgggtggtt

SEQ ID NO: 4289 - DNA, 364 bp, Zea mays
  Clone ID: LIB3117-004-Q1-K1-E1
gtcgtcgccgacccagacgccgcataaaggaaagctttctccgcacaagagggccagaccgtgacgcagcacagccatggggaagcagctctgcgacatgcaccgctcgcgccgccgcgcccggatcgtcgccgacgccctcctctgcggcttcgccgccgacgccgacgcgctcacagtgtacctcgtcttccgtccgctgaagccgcaggccttcgtggtgcgcgtcgctcggtaccgcatggccactgacgacgggaactcctcggaggggcgggccccgccgacgtacacgctcgcggcgagcgcgcggttcacggcgctgctgcacaacccgagcgaccgcgccgggatgggctacgac

SEQ ID NO: 4290 - DNA, 405 bp, Zea mays
  Clone ID: LIB3117-004-Q1-K1-E10
cccacgcgtccgcccacgcgtccgcggacgcgtgggcagcactgagccacctagccatggtgagaccctgccgcctacttgcaacagcaactgcttgcatccaacccacttgctctggcaaacgtagttgcacaccagcaacaacaacagctgcaacagtttctgccagcgctcagtcaactagccatggtgaaccctgccgcctacctacaacagcaacaactgctttcatctaccccgctcgttctggccaatgcacctacatacctgcaacaacaattgttgcaatagaatctaccagctctgactcagctagctatggcaaaccctgctgcctacttgcaacaagctgttccattcaaccaactgaatgtgtcgaactctggtgcgtacctacaacaacga

SEQ ID NO: 4291 - DNA, 410 bp, Zea mays
  Clone ID: LIB3117-004-Q1-K1-E11
tttttatcaaaatattatttgagattgtaggctttaggggaactagcacccccgatcacattatgatacgatgccattataggcttcatgcgctaatagcagagccctgatagttacgggtccaacaaataaaatacaaaagcgcgacagcgatgaccaggaaagaacgcaaaagaaaacacgagaagccaacacaatctcacatctaatctcgcctctctagtttccttcgtgcagcctcctgcatatctagctgcaggccacgccatttcgctcacttgtactccaggatcatgttgttctctggggccaggccaacacaggccctcatgatgttctccagcatcgccctctgctttgccagagcgttcaccaccggtgtgccagggggaaccagtggtgccttggtg

SEQ ID NO: 4292 - DNA, 408 bp, Zea mays
  unsure at all n locations
  Clone ID: LIB3117-004-Q1-K1-E12
agaaaaggaggggcacgttgaattgaagaggaagagaggatcaaggagatgttcttccccaacgtcctcttgaagatttcttggggaaaccctaggtggctacactccagatcatgtctagtacatttcttcttcttcgatgaaggtgcttgttgctcatcaaggggagtgtgaagtagcagcacatccaccttcattctcataataatgctgcccagacgcagccatgatttaattagaaacttcttgtcaaaggatgtttgtttttaactagtcgtgcgcactgattaattcagttcatgttgttatggttgtcttcccattgctagcagattattaatgtcttatatgttttcttatcatgatatctatttatactntgntgcttcccccgtttatgcaatttac

SEQ ID NO: 4293 - DNA, 77 bp, Zea mays
  Clone ID: LIB3117-004-Q1-K1-E3
caaataagttaattcgccaggcatcattactattggaaaaaaaaaaaatggggtaggaaaaaaataaaagagagaag

SEQ ID NO: 4294 - DNA, 431 bp, Zea mays
  unsure at all n locations
  Clone ID: LIB3117-004-Q1-K1-E7
ctgaattcttcacatttatatataccacgtcaagctgcagttggacccatcccacggactactgcggtgagctagtgagtcagttccacgacacagttcccacattacgactagattagcaacgcactagtaaacgtttattcaccattattactagtttatagtaatttctatgcttcagcatccactcgcaaccgcgctattcctgaacaccttcagcaaagctcccatccatcgccgtccttggaatccacacgcttcaaaacgcctttaccagtgtcgttgccatctgacacctgcacagtgcactcgtcgccattcagatctttgcgcgctgggcttgcangttcagcaagggtgtgcttatctagagacccattggcttcagtggtcctatcagaggaagtccagctcttgtgatgagaagaatg

SEQ ID NO: 4295 - DNA, 427 bp, Zea mays
  unsure at all n locations
  Clone ID: LIB3117-004-Q1-K1-E8
cagaaacacaccaagcgaagctacctagcaacgacttaacaacaatggctaccaagatattagccctccttgcgcttcttgccctttttgtgagcgcaacaaatgcgttcattattccacaatgctcacttgctcctagtgccattataccacagttcctccgaccagttacttcaatgggcttcgaacacctagctgtgcaagcctacaggctacaacaagcgcttgcggcgagcgtcttacaacaaccaattaaccaattgcaacaacaatccttggcacatctaaccatacaaaccatcgcaacacaacagcaacaacagttcctaccagcactgagccaactagatgtggtgaaccctgtcgcctacttgcaacagcangtgcttgcatccaacccacttgctctggcaaacgtagctgcata

SEQ ID NO: 4296 - DNA, 418 bp, Zea mays
  Clone ID: LIB3117-004-Q1-K1-F1
tggagttcttgaacggcgtcgggaagggggtggaagcgcacgccgcgaagctggaggaggctgtgggcggcgacatgcagaggctcctcgaggcccgcacgctgcggctcaagaagcttggcatcccctgcaagcataggaagttgattttgagttttgctcacaagtaccgtcttggtctctggaagcctcaagcagaacccaggaaagttgaataaaattggtttgttcttgaaagctagtctactgttggactgaagcttgtttgggacattttgaatatttccttttgtaatttaggagccacaaatctttgttctctggctctggccatacttatttgcattcattgggcaattttttctagaaaattttcaacttcgcgtggaaatacaaaccggaacagggtgcagccccc

SEQ ID NO: 4297 - DNA, 440 bp, Zea mays
  Clone ID: LIB3117-004-Q1-K1-F11
gcggcgccctttttttttttttttgacacttcagtatctgctgtaaatcagaaagcataatggggggcatagatgaactataaactctttaagaccatgaatgacgcaccagagcagtatatcaaccacaataagacagttctcaaaagatgcagtacgatgcatcctagttacccatgttgtcgaaacattacatcttctgcatgataaccgagtttgccagtccagcttgcaccacggtctgcgttgggtcagccagctgcttgggtgggaaacctgtctgcagctgatacggccttgcggttccaggccgagatgcgtcgatgaaggacctgatgtctcccacggtgtggtgcatgttgaaccgggcgaccatgcgagtgccgtcagccagactcagctgtatggatgtaaatggctgggaatcattcacgactatg

SEQ ID NO: 4298 - DNA, 170 bp, Zea mays
  Clone ID: LIB3117-004-Q1-K1-F2
cccacgcgtccgtgccattcaaccaacttgctttgacaaacccagcagcgttctacgcaacaacccatcattggtggtgccctcttttagatttcttatgagttatagttcaataataaagttttttgtctgatgtttgtggcttcccagaaataataaagtccatttct

SEQ ID NO: 4299 - DNA, 336 bp, Zea mays
  Clone ID: LIB3117-004-Q1-K1-F3
cagaaacacaccaagcgaagctacctagcaacgacttaacaacaatggctaccaagatattagccctccttgcgcttcttgccctttttgtgagcgcaacaaatgcgttcattattccacaatgctcacttgctcctagtgccattataccacagttcctccgaccagttacttcaatgggcttcgaacacctagctgtgcaagcctacaagctacaacaagcgcttgcggcgagcgtcttacaacaaccaattaaccaattgcaacaacaatccttggcacatttaaccattcaaaccattggaacacaacagcaacaacagtttctaccagcac

SEQ ID NO: 4300 - DNA, 384 bp, Zea mays
  Clone ID: LIB3117-004-Q1-K1-F6
cccacgcgtccggatcaaccaggcttctacatgtgaccttaaagaacttggttctaagttcattccggaagttattggcaaagagattgagaagtctacctccagcatcttcccacttcaaaacgtcttcatccgcaaggtgaagatactcaaggcccccaagtttgatctcgggaagttgatggaggttcatggcgactacaaagaggacgttggtgttaagcttgagaggcctgtcgagggtgatgaggctatgcaagaggttgctgctgccgagtagtctatttgctacttctttatctagacgaatctggacaggacgtcccttatgacgcgaacttcataaaattgtctggcgacatgttttcttctgtccctgcccta

SEQ ID NO: 4301 - DNA, 376 bp, Zea mays
  Clone ID: LIB3117-004-Q1-K1-F7
cggacgcgtgggctagcaacatagaaagcacaatagtgtaccaacaatggcagccaaaatattttgcttccttatgctccttggtctttctgcaagtgttgctaccgcaaccattttcccacaatgctcacaagctcctatagcttcccttcttcccccatacctctcaccagcggtgtcttcagtgtgtgaaaacccaattgttcaaccctacaggatccaacaggcaatcgcaacaggcatcttaccattatcacccttgttcctccaacaaccgtcagccctattacaagagttacctttggtccatttggtggcacaaaacatcagggcacaacaactacaacaacttgtgctagcaaaacttgctgcatac

SEQ ID NO: 4302 - DNA, 321 bp, Zea mays
  Clone ID: LIB3117-004-Q1-K1-F8
cccacgcgtccgacgctttgctggcagacttcacccaggaggactatgaggacattgtgaatggctggaacgcgaagctgaaacggagctctgccggcgagctgaggtgggggttgttcattgccaccaagtgatttggagctggcatcaggagggctcttctgtataagaatggatgtggctctaactctagttctagaccggtgatggttcaacttataagcaggggatcttcatcatcagaataaaaacgtgtgttgttgtgttgctaagtgtacgccactagtatttctgttggtacttatgttctacgtaaactgc

SEQ ID NO: 4303 - DNA, 468 bp, Zea mays
  Clone ID: LIB3117-004-Q1-K1-F9
gaagatgaaaaggataagataggcaactttgtctcctcagccaacaccgacaaggtcaaagaatctccggtcaaacatgttttgccctccactggtatggctgctcatgctttggacgatctgtttgaagctgttgaactggaggatagacgtgacacatcaatagaaaatgatgctgatgacgaaactaggtcgcctgttatgcccccacaaccaccaccggtggttaatacttacgagcagtacgaggctgatgacgaggaagtcgacgtggaatgattagaatgccgagatggtactggaatgagctatatagctctcgcgcctgtgtaaagcattatgtaatatgtatttgatgctggagtttaccttgcataaaaagaatcgtcattaatgatccttggtggatgcggtttaagcactcaacttttttggtaatttgatgaaagcaacatgcccttgtaaaaa

SEQ ID NO: 4304 - DNA, 325 bp, Zea mays
  Clone ID: LIB3117-004-Q1-K1-G4
cggacgcgtgcggtcacgcgtccgttcactgcgtcagggccttgaggactggaagaggctgtgctgacacacaggagaccaccttaccggtaggccacacatgccaggcgctgtgagacatgtgtcagccaccaggtctacgcatgtggagctctgtgactacaaccacgctgacctacaacagccgtcctgcatgcgatcctgaacaaggatgctgaatgccagctcccgatggtcatgtgccgccaggtcgcgtatgacctgacgctcatgtgcggtcttgagctgcactagacactgaactgcccttggaacttacctggcc

SEQ ID NO: 4305 - DNA, 377 bp, Zea mays
  Clone ID: LIB3117-004-Q1-K1-G6
agaacgtgctcatcttcgaccttggtggtggcacgtttgatgtgtcgctgctcagcatcgaggagggcatcttcgaggtgaaggccactgcgggcgacactcaccttggcggcgaggacttcgacaatcgcatggtgaaccacttcgtccaagagttcaagcgcgagaataagaaggacataagcggcaacccccgtgcactgcgccggctgcgcacggcgtgcgagcgcgccaagcgcacgctgtcatcgactgcccagacgaccattgagatcgactccctgttcgagggcatcgatttctactccacgatcaccagggctcgcttcgatgagctcaatatggacttgttccggaagtgcatggaacctgtggag

SEQ ID NO: 4306 - DNA, 379 bp, Zea mays
  Clone ID: LIB3117-004-Q1-K1-G8
cccacgcgtccgctcgcgcacacggttccgcgtgcctttccccacctacgggtcgcggctctcgccagccagtctagggtttcagtcccggcgtgcttatccgcccccgccggccatgtcgaaacagggagggaaggccaaaccgctgaaggcgcccaaggccgacaagaaggagtacgacgagacggatcttgcatatctgcagaagaagaaagatgatgaaaaagcactgaaggagcttaaggccaaggcacagaagggcgcgattgggggctcgggtctgaagaaaagtggaaagaaatgagactggtcacccgtcttcaatacctagaggatgataaagcagctgactatctgtgttgcgcttcacttaatgtga

SEQ ID NO: 4307 - DNA, 158 bp, Zea mays
  Clone ID: LIB3117-004-Q1-K1-G9
ctgccattcaaccaacttgctttgacaaacccagcagcattctaccaacaacccatcattggtggtgccctcttttagatttcttatgagttatagttcaataataaagttttttgtctgatgtttgtggcttcccagaaataagaaagtacatttct

SEQ ID NO: 4308 - DNA, 125 bp, Zea mays
  Clone ID: LIB3117-004-Q1-K1-H1
caaaaaaaaaaaaaaaaaaaataaaaataaaaattaaaaaaaaaaaaaaaaaaaaagggaaagataaaattataaaataaaaaattaatataaaattaaatataaaaaataataattttatatat

SEQ ID NO: 4309 - DNA, 399 bp, Zea mays
  Clone ID: LIB3117-004-Q1-K1-H10
cggtcctgattcccggtcgacccctcgtccatgtcattgagtcgttgctggcgaaggtctatatcctcatccttggtggtggtatgatctagacattttacaaagcacagggatattctgttagaaaatctctcctctaatatgataaactaaagctcacaaacactcttattactaatcagatttctatttattcatttcttttgcttcctaatgatattctattctatgtcaaatgttcaaatccttttcaccataaaactctcaacttcataaataatattgtttacataatagtacttcatgtataccttatatcctactactcaaatataaatgtttaatcaacatcctatatcatcaactagatataattattccatacttttttttaatata

SEQ ID NO: 4310 - DNA, 369 bp, Zea mays
  Clone ID: LIB3117-004-Q1-K1-H12
catatcctcatcctaggccgtggtatgatctacgggttttacaatgcacaggggtagtctgttggaaaatctctcgtggaataggataaactcgagctcgcaacttctcttattgagaaggcgaaggcaaagggggtttctcttttgctttccactgatattgtagtagcggacaagtttgcagccgatgctgagagcaagattgtccctgccactgctatccctgatgactggatgggtcttgatgttggccctgatgccaccaaaacattcgactatacattggacaccacccagactgttatttggaacggtcccatgccactgtttgagttccaaaactttgcagctggcacctatgccattgcc

SEQ ID NO: 4311 - DNA, 335 bp, Zea mays
  Clone ID: LIB3117-004-Q1-K1-H2
cggacgcgtgggggagacgataacgagacagcaagagccaagaggtgagagaaggagtgaaggaccgaggagggaaacagagaagatggcgacgaagcgcgacaccgagtcggacggcgaaggctccaaccccgtcggtggtggcgcgactccgccgcccctagccgccgtccctgtcgtatgcctcctccgctccgtcggggacttcggtggcggcgccttcgttggatccatcttcggatatggacaaggcttgatcaccaagaagggttttaagggctcattcagcaatgcagggtcctctggcaagacttttgcaattctctctggcgttc

SEQ ID NO: 4312 - DNA, 265 bp, Zea mays
  Clone ID: LIB3117-004-Q1-K1-H5
ggcggttgtgtttcccatggccattctttgcacgttatgaagctcatctgcaggatgctcttatatagagagaaatgttagtcacatcacatcgcgtgtacatactgtatagcgaaacttaacatgttgtaatatcggtcggacaatgtgtgcgtgttgtatgttatctttcttagatagatgcgcaggcttagcgttgtcatatatgtataatgtattgcaagaatatgcaggctgtatattaatcaaatgattttttttgtgt

SEQ ID NO: 4313 - DNA, 417 bp, Zea mays
  Clone ID: LIB3117-004-Q1-K1-H7
atttattggcacaaaacatcagggcacaacaactacaacaacttgtgctagcaaagcttgctgcctactctgagcaacagcagtttcttccattcaaccaactaggttcattgaactctgcttcttatttgcaacaacaacaactaccattcagccagctacctgctgcctacccccagcaatttcttccattcaaccaactagcagcattgaactctcctgcttatttacagcagcaacaactactaccattcagccagctagctggtgtgagccctgctaccttcttgacacaaccacaggtgttgccgttctaccagcacgttgcgcctaacgctggcaccctcttacaactgcaacaattgctggcattcaaccaacttgctttgacaacccatcagtgttctaccaacaacc

SEQ ID NO: 4314 - DNA, 188 bp, Zea mays
  Clone ID: LIB3117-004-Q1-K1-H8
cggacgcgtgggttcgatgtgctgagcactttcgtcaagaattaataaagggtgcgatactaccacgcggcttgattgaagtgataggcttgtgctgaggaaatacatttcttttgttctgttttttctctttcacgggattaagttttgagtctgtaacgttagttggttgtagcaagtttctattt

SEQ ID NO: 4315 - DNA, 320 bp, Zea mays
  Clone ID: LIB3117-005-Q1-K1-A11
ggcaagccggacgtattggttgcctgcgtcggcggtggatcgaacgccatgggcttattccatgagtttggtgaggaccaagatgtgaggctggttggagtggaagcagctggccatggcgtagacaccgacaagcatgcggcgactttgacaaagggccaagtcggagttctccatggatccatgagctatttgctgcaggatgatgacggacaagttatcgaaccccactccatcaatgcttggctggattaccctggcgttggacccgagcacagtttcttgaaggacattggacgtgccgaatacgatagtgtgac

SEQ ID NO: 4316 - DNA, 186 bp, Zea mays
  Clone ID: LIB3117-005-Q1-K1-A2
cactcgttcgccgacgcgtgggtgggacctccctaaatttgcaaagatgggcgacaaggactggtacggagtgtaccataaagaccggaagtgcccgacagtgctgatggctaaccgggccactgacgcgggttattggaaggcgaccgctaaggacaatgatgtctacaacccctttgcagcgga

SEQ ID NO: 4317 - DNA, 116 bp, Zea mays
  unsure at all n locations
  Clone ID: LIB3117-005-Q1-K1-A6
gcgtccgtaactcatagaaatctaaaagagggcaccaccaatgttggtttatagttcaataataaagttttttgtcgggtgtttgtggcttcccagaaataataaantccatttct

SEQ ID NO: 4318 - DNA, 225 bp, Zea mays
  Clone ID: LIB3117-005-Q1-K1-A7
ggatcaagctgctgcaggaagagaggcggcagcatcatgaggaggcgccaggcatgctcatcgtcttccgggagctcaaccccaacgagatggtggccaggaacacccccaagttcgacgtggagcggaaggagggcggcgacacccgggtggagatctactgcgccgccaagccggggctgctgctgtccacggtgagcacgctggacacgctagggctcgaca

SEQ ID NO: 4319 - DNA, 286 bp, Zea mays
  unsure at all n locations
  Clone ID: LIB3117-005-Q1-K1-A8
cgtgtctctccctcgtcggtcggtctatgtctcgggtcggtcgtggtagcggatcaatgctggtctgtgtgataccgctcttttctgcggctcgctgtgcacggaaaccactccctcacaacgccttcagacctacggcgaggtactcgagtccaagatcatnctcgatcgggagacgcagaggtcccgcggcttctgcttcgtcaccttcttcacggaggaggcgatgcggaacgccatctatggcatgaacagcaatgagctggacgggcgcaacatcaccgtc

SEQ ID NO: 4320 - DNA, 235 bp, Zea mays
  Clone ID: LIB3117-005-Q1-K1-B12
gaacactctccccagctcgagtaaccacagcgagaaccaatcgccaagcaaaaagcccgagaaagaaagaacgaacaggatacacagatggcggctgcagcgaatgcgtcgtggatggtggcgatgagcgtcggggccgtggaggcgctcaaggaccatgcgggcctgtgccgctggaactacgcgctgcgctccgtccaccgcgccgtcaaagccaacgctcccagcttcgcgc

SEQ ID NO: 4321 - DNA, 442 bp, Zea mays
  Clone ID: LIB3117-005-Q1-K1-C2
gcagtttcttccattcaaccaactggctgcattgaactctgctgcttatttgcaacaacaactaccatgggggcagctagctgctgcctacccccagcaatttcttccattcaaccaactggcagcattgaactctgctgcttatttacaacagcaacaactaccaccattcagccagctagctgatgtgagccctattgccttcttgacacagcaacagttgttgccgttctacctgcacgctgcgcctaacgctggcaccctcttacaactgcaacaattgctgccattcaaccaacttgctttgacaaacccaacagcgttctaccaacaacccatcattggtggtgccctcttttagattgcttatgagttatagttcaataatgaaagtttttggatgatgtttgtggcttccagaaataagaaaagtacattctag

SEQ ID NO: 4322 - DNA, 97 bp, Zea mays
  Clone ID: LIB3117-005-Q1-K1-C8
gtggccggagctgaagaggagatgctgccgggagctggcggacatcccggcgtactgccggtgcacggcgctgagcatcctcatggacgggcgcgat

SEQ ID NO: 4323 - DNA, 179 bp, Zea mays
  Clone ID: LIB3117-005-Q1-K1-D10
tacgcatcataacaaggccttaaatttttgttgcaacacaggagacttaaaatgacgaatgactggcatacatacttcaaaggacaagaagtaaaaaacagcgataagttctgttacttggtacaccaatctcttcaaacacaactaacttaccccatcttgaaacatgagcaaacttt

SEQ ID NO: 4324 - DNA, 229 bp, Zea mays
  unsure at all n locations
  Clone ID: LIB3117-005-Q1-K1-D11
ccaactagcaacatataaagcacaatattgtaccaacatatggcagccaaaatattttgcttccttatgctcgttggtctttctgcaagtgctgctaccgcaaccattttcccacaatgctcacaagctcctatagcttcctttcttccnccatacctctcaccagcggtgtcttcagtatgtgaaaacccaattcttcaaccctacatgatccaacatgcaatcgcag

SEQ ID NO: 4325 - DNA, 141 bp, Zea mays
  Clone ID: LIB3117-005-Q1-K1-D5
tccatttatttactctcaatataaaattaccgatcggtacttatctacacacgcaagcatttaattcatgcgcttattaggttgtgccactggccaccacttcactacatttcactagcacaagcaagcatttacacatac

SEQ ID NO: 4326 - DNA, 359 bp, Zea mays
  Clone ID: LIB3117-005-Q1-K1-E9
attttgagcattcaaaaacacaacaaggcgaaccgcacttccaccgacctaccaccattggctaccaagatatgagccctccttgcgcttcttgccctttttgtgagcgcaacaaatgcgttcattattccacaatgctcacttgctcctagtgccattattccacagttcctcccaccagttacttcaatgggcttcgaacacctagctgtgcaagccaacatgcaacaacaagcgcttgcggcgagcgtcttacaacaaccaattgcccaattgcaacaacaatccttgccacatctaacaatacaagccatcacaacgcaacagcaacaacagttcctaccagcactgagccacct

SEQ ID NO: 4327 - DNA, 192 bp, Zea mays
  unsure at all n locations
  Clone ID: LIB3117-005-Q1-K1-F10
ccttccataattatagcttcactatgtgaaaacccagctcttcaaccatataagcttcaacaagcagtcgcatcaagcaacataccttgatcgaccttgttgtgtcaacaatcgacagccctatctttggtgcagtcattggtacaaaccatcanggcacaacagctgcagcaactcgtgctacctgtgatc

SEQ ID NO: 4328 - DNA, 332 bp, Zea mays
  Clone ID: LIB3117-005-Q1-K1-F2
gaagaatgttgctgtgaaggatctgaagcgtgggtatgtggcctccaactccaaggatgaccctgccaaggaggctgctagcttcacctcccaggtcatcatcatgaaccaccctggccagattggcaatggctatgccccagttctggactgccacacctcacacattgctgtcaagtttgctgagctcgttaccaagattgataggcgatccggcaaggagcttgaaaaagagcccaaatttctcaagaacggtgatgctggtatggtgaaaatggttcccactaaacccatggtggtggagaccctttctcaatatccctctcttggtc

SEQ ID NO: 4329 - DNA, 202 bp, Zea mays
  unsure at all n locations
  Clone ID: LIB3117-005-Q1-K1-F4
ggagaatccaaggtggtggacttctggatcgtacttatggatttgcccgaacttccggtaaaggtccttgagacatgttgngaatgaggggagtagcagcacgttcactttcactctcacataacctgtcagcgcaccatgataatagaactatgtaaagagttgttattttaatgtggccatgtatcatagtcattatttc

SEQ ID NO: 4330 - DNA, 217 bp, Zea mays
  unsure at all n locations
  Clone ID: LIB3117-005-Q1-K1-F9
acacagttcttcattcatcaacagctgggtgaaccctgctntctacttgcaggcacaacagctactaccatttaaccaacttgtcgggagcccttatgccttcttactgcaacaacagcttctgccattccatctgcaagctgtggcaaacattgctgctttcttgagacaacaacatttgttgccattttacccacaggttgtgggaaacattaat

SEQ ID NO: 4331 - DNA, 271 bp, Zea mays
  Clone ID: LIB3117-005-Q1-K1-G1
ctgactcgtgtgtctcttctaacccattatccatcatatctgtgctgaggaagagcgtcgagggctctgagaacaaatactgattttggtgtgtgcgctcgaaagtactccctccgttttttttattactcgcgttttaattcaaacatgaactagcggacgactgatattcgagaatggatggagtacttcgaccctgcacgtcagatgagctgatcctcacattgcaccggaactgttcagcgagaataaaatttgatgttagaccttg

SEQ ID NO: 4332 - DNA, 249 bp, Zea mays
  Clone ID: LIB3117-005-Q1-K1-G3
gcgtccggttgaagatgttgttggaacctcggctctcatgccatttatatatccttatgaaccgtggagatttaagcagaaccgtcatcatgccaagacaaagatgttgatagaagatactgcatggcaacctgtttggcaaaaggaaattgaatcatcaccttttctaaggaaggcaattatttttggctattgccctatcaggccatggatgtctattgctcactggttgatctggcactttgatct

SEQ ID NO: 4333 - DNA, 205 bp, Zea mays
  Clone ID: LIB3117-005-Q1-K1-G9
ctccactcatcttttcgcgtttaaaacccttaaatttcccccactcgcaatcgcagcaacacctgtagcgatggacgccagcggagccggtagcaaggggaagaaaggtgcggccgggcgcaaagcatgcggccccaagaagaagtcggtgacgcggtccgtcaagccgggctgcagttccccgtcggccgatcggcgctacctg

SEQ ID NO: 4334 - DNA, 305 bp, Zea mays
  Clone ID: LIB3117-005-Q1-K1-H3
caacaagcaatctcatcaagcaacatacctttatcacccttgctacaacaatcgccagccctatctttgaagcagtcatttctacaaacggatgaaggcacatcagctgcatcaactcgtgctacctgttatcaaccaagtagctctggcaaacctttctccctactctcagcaacaacattttcttacattcaaccaactgtctacattgaaccccgctgcttatttgcagcaacaactatatccatacaaccaactagctactgactactctctgctgcaacaacttcttccatttaaccaat

SEQ ID NO: 4335 - DNA, 255 bp, Zea mays
  unsure at all n locations
  Clone ID: LIB3117-005-Q1-K1-H5
cggtcaccacgcgtgcgaactggaggaccactttctcaaattctgatgatgatgattatgaggacctcatagcacttgacgaggacaaccatcacagaggtgcttgtgatgaccaaataaacagcctgccactatcactgatcgagggtgaaaattgttcagatgaaccctgtaatatatgcttggattgcccttctgctggcgattcactccggcatttgccttgcttgcacaagtttcacanagagtgcattg

SEQ ID NO: 4336 - DNA, 387 bp, Zea mays
  Clone ID: LIB3117-005-Q1-K1-H7
cccacgcgtccggatgctgtggccgtgggagggcggcacgggcccgcgccagccgggctgcttccagttcaggctgtacgcgctcgacgacgaggtgcacctcggcaacaaggtgaccagggataagctcatggaggcgatcgacgggcacgtgctggaagaagccgagctgatcgccgtgttccagggagtcgtcgccaacaactaacacacactctcagagatatctttgttggcgtgctttgtatttgcttgtgtggctaccatgtaattttgatcgaataaaagggaacttcacatgtgcttagcttattgtgtgacgaagagtacgtcatgtgggcagctttacgtgctttacgtacgttaagagtaacaaaatggtctttc

SEQ ID NO: 4337 - DNA, 290 bp, Zea mays
  Clone ID: LIB3117-005-Q1-K1-H8
gtccgattccgtcaccagcgcgtcgggacctgggctacctggcgcatcaaccctgcatctgcaggacctgggcgttgcggagccgatcctgggccagtgcgtggagttcctgaggcatcagtgcagcccgacggcgacgccctactgctcgcctcattgccagtcgttgcggcagcagtgttgccagcagctcaagcaggtggagccgcagcaccggtaccaggcgatcttcggcttggtcctccagtccatcctgcagcagcagccgcaaagcggccaggtcgcggggc

SEQ ID NO: 4338 - DNA, 184 bp, Zea mays
  Clone ID: LIB3117-006-Q1-K1-A11
aacgaggggaaatgtgtaactattcccggagaaacgaacatcgtctcaatcctcttcaatccatttgctcccaaacaatccaactggtgtttggtgcaagagctatgtgctcgaacaatttaatcaacaagttcttctgctgcatataccgcattttctgtgctcattcatctatgctgtctgt

SEQ ID NO: 4339 - DNA, 344 bp, Zea mays
  unsure at all n locations
  Clone ID: LIB3117-006-Q1-K1-A12
cgaccgccgccgtcgccgcctcctctccccagcacccggagctcgaccgaacgccgctcaccgtgatcatgcccaagaagaaccgcaatgagatctgcaagtacctcttcaaggagggcgtgctgtatgccaagaaggactacaacctggcgaagcacccgcagatcgatgtgcccaacctccaggtgatcaagctcatgcagagctttaagtccaaggagtatgttagggagaccttctcctggcagtactactactggtatctcaccaacgatggcattgagcacctacgcaactacctgaacctnccgtctgagatcgtgcctgccacgctcaagaaagtc

SEQ ID NO: 4340 - DNA, 318 bp, Zea mays
  Clone ID: LIB3117-006-Q1-K1-A2
acgcgtccggccacgcgtgcgcccacgcgttcacggacgcgtggggcccggggggcggggtcaagccgcgcctaccgtggccagagctgaagaggaaatgctgacgggagctggcggacatcccggcgtactgccggtgcacggcgcttagcatcctcatggacggcgcgatcccgccgggcccggacgcgcagctggagggccggctagaagacctggcgggctgcccgagggaggtgcacaggggattcgccgacaccctcgtcaaggatgtcgagtgcaacctggccaccatcagcggggtcttcgaatgcccct

SEQ ID NO: 4341 - DNA, 424 bp, Zea mays
  Clone ID: LIB3117-006-Q1-K1-A3
taccggtcccggattgaccgatgggtccgcggacgcgtgggcggacgcttgggatgaccttgaccttactggcgatgaaactgaggacgacgagaacgcagctgatgagcgtgccgccgttgtcaagggcttttctaaaaagaaagaaagtggtacaacctgcttccttattgatgtcaaaccatctgacaatcagactgatatgaagaaactggaggacgctgtccgcagtgtccagatggaaggtctgacttggggagcatcaaagcttgtgcctgttggatacggcatcaagaagatgactatcatgttgacaattgtcgacgatcttgtgtccatcgacactctaattgacgaccaccttactcaagagcccatcaatgagtacgtccaaagttgcgacattgtggctttcaacaagatc

SEQ ID NO: 4342 - DNA, 389 bp, Zea mays
  Clone ID: LIB3117-006-Q1-K1-A4
cggacgcgtgggtagcaacatagaaagcacaatagtgtaccaacaatggcagccgaaatatgttgcttccttatgctccttggtctttctgcaagtgctgctaccgcaaccattttcccacaatgctcacaagctcctatagcttcctttcttcccccatacctctcaccagcggtgtcttcagtatgtgaaaacccaattcttcaaccctacaggatccaacaggcaatcgcagcaggcatcttacctttatcacccttgttcctccaacaaccgtcagccctattacagcagttacctttggtgcatttgttggcacaaaacatcaaggcacaacaactacaacaacttgtgctaggaaaccttgctgcctactctcagcaacagca

SEQ ID NO: 4343 - DNA, 186 bp, Zea mays
  Clone ID: LIB3117-006-Q1-K1-A5
tccacgcactcgtcgcccgaccctttggatgaccttgaccttacccacgatgaaacttgggacgagaacaacgccgctgataaccagtgccgccgcttactacgccttttctcaaacgaaataaagtggtacaacctccttccttattgatctcaaaccatcttacaattatactgatatcaagaa

SEQ ID NO: 4344 - DNA, 225 bp, Zea mays
  Clone ID: LIB3117-006-Q1-K1-A6
actaggtgcaagtgcaaaggaaataggaaatgcagttaaggaggcagttgacagggtgaagaagggcagtaggctggtaatgggcaagttccaagccccagcagagggtactcacaacctcacctacttttgattatgcgacgcttggataggctgtgacatcaagaccagcttcaagctcaaggtcctaaagcgcagccgtgctggaacaagaagccatgtgcc

SEQ ID NO: 4345 - DNA, 353 bp, Zea mays
  Clone ID: LIB3117-006-Q1-K1-A7
gcgcgcgttccttccccacggcgcggaccgcacccacgaggcgtcatcccccgaggtcgccaccgcgggcatcgacggcgcccctgatttcccgcctgccacggtcgtcatcggcgggtacgacccgctgcaggactggcagcgccggtactgcgacgcgttgcgcggtaaggggaaggaggtgcgggtgctggagtaccccgacgccatccacgccttctacgtcttcccggagttcgcggagtccaaggacctcatgctacggatcaaggagatcgtcgccagcagcgagtgatgggggacggacggcgtgggcgcgcgcaactgttgctcagatgcgtggtggatgtatc

SEQ ID NO: 4346 - DNA, 373 bp, Zea mays
  Clone ID: LIB3117-003-Q1-K1-D12
cggacgcgtgggcggacgcgtgggcaaccctacaggatccaacaggcaatcgcagctggcatgttacctttatcacccttgttcctccaacaatcatcagccctattacaacagttacctttggtgcatttattggcacaaaacatcagggcacaacaactacaacaacttgtgctagcaaaccttgctgcctactctcagcaacagcagtttcttccattcaaccaactaggttcattgaactctgcttcttatttgcaacaacaacaactaccattcagccagctacctgctgcctacccccagcaatttcttccattcaacccactagcagcattggactcttctggttatttacaggaacaaccacttc

SEQ ID NO: 4347 - DNA, 435 bp, Zea mays
  Clone ID: LIB3117-001-Q1-K1-C1
acgaggcccagtcccgcggcggccgtggaggcggcggcggtgggtacggtggtggccgtggaggcggcggctacggcggtggcgggcgccgtgatggcggcggcggctacggcggtggcggcggctacggtggcggcggcggctacggtggtggtggcggcggctacggcggtggcaaccgtggcggcggctacggcaactccgacgggaactggaggaactgagcggtggggcccgcgcggccaagttatcctgttcgctgccgtgatgtttaccctagtccagagggtttatcttcgttcgtctcgtgtttgttgatgcccatctgtgtttttgattgcaaggtcgctctgtgtcagttgttaatgctgtgttcatcctcggcttcagcagacccatgcatcaaacagcatggactgcggatcgatggatgct

SEQ ID NO: 4348 - DNA, 481 bp, Zea mays
  Clone ID: LIB3117-001-Q1-K1-C11
cccacgcgtccgagcaagggaatcacatcgccatggcagccaagatgtttgcattgtgtgcgctcctagctctttgtgcaaccgccactagtgctacccatatcccagggcacttgtcaccactactgatgccattggctaccatgaacccatggatgcagtactgcatgaagcaacagggggttgccaacttgttagcgtggccgaccctgatgctgcagcaactgttggcctcaccgcttcagcagtgccagatgccaatgatgatgccgggtatgatgccaccgatgacgatgatgccgatgccgagtatgatgccatcgatgatggtgccgactatgatgtcaccaatgacgatggctagtatgatgccgtcgatgatgatgccaagcatgatttcaccaatgacgatgccgagtatgatgccttcgatgataatgccgaccatgatgtcaccaatgattatgccgagtatgatgcc

SEQ ID NO: 4349 - DNA, 404 bp, Zea mays
  Clone ID: LIB3117-001-Q1-K1-C12
ccgatagcgaaccaagggcgacgtattcgccgccggagaagattcctacgcgtcgttgtttttggctgcaggcgtcaacatacacagcggcgaggaggtggctatcaagttgttattagataatctgatactgttcgtgcaccatttttctctgtcgtggagttatatgcctggcattcggcatgagtttgttccatatgcaaacatatcatggtcaaccattgctagcaacggtttcgtgaagaatttgtgtgtagattatgggatgacagaaaatggatgatgttctgcatgtaattgctttaaaaaagactggcatggtcccgagctatatttttacatgagtaataacaagattttcaaaccaaataaaatcaataataatatcaagcatggatttacca

SEQ ID NO: 4350 - DNA, 405 bp, Zea mays
  Clone ID: LIB3117-001-Q1-K1-C2
acgaggcccagtcccgcagcggccgtggatgcttcggcggtgggtacggtggtggccgtgagtggggctgctacggctgtggcgggcgccgtgatggcagcggcggctacggcggtggcggcagctaccgtggcggctgcggctaccgtggtggtggcagcggctactgcggtggcaaccgtggcggcagctacggcaactcccacgggaactggaggaactgagcggtggggcccgcgcggccaagttatcctgttcgctgccgcgatgtttaccctagtgcatagggtttatcttcgatcgtctcgtgtttgttgttcccatctggggttttgacttgcaagtcgctctgtgacagatgctaatgctgtgttcattcttcgcttcagcagacccatgcattaa

SEQ ID NO: 4351 - DNA, 414 bp, Zea mays
  unsure at all n locations
  Clone ID: LIB3117-001-Q1-K1-C4
ctgcaagctgccggagaaccggcgccgcgcggtgcgcgagggcgcggcgcccgcgctcgccgacttcgccgccgccggctccgcgcgcgccgtcgaggtgctcggcctcctcgcccggtgccgggaggggcggcaggagctgtgcagggtccccggcgtcgtgtccgtgctcacgggcgccgccgggagcggcaacgcgcgcgcaatcgagcaggccctgctcgtcctcaactggatttgctccgagagcaacgagttggcgctggaagcaatcaagctgcaggctntcgacctctgcgagggctttgtgaaacaacaccaactgcagaacggcaagaacgcgggcgacttggcccggacgctcgagaaagcgtagaattggattgggcttggctccccaaaacatgagatgag

SEQ ID NO: 4352 - DNA, 440 bp, Zea mays
  Clone ID: LIB3117-001-Q1-K1-C7
gtggtggcatgccagagttagatgagatcgagtacatggagagtatgtacatgaagagcacgcgtcgcggcccttaggtcactgaaggagatccggggcaagagctctactgtcagtatgttctcgttgccacctcttcagggcaacaatgcacaggacagctaccagatccgggcagagcaactagatgaggagccggagaggtggagcaaagtaacagtgatagagcaggcggccaaatgacagaccgaatgggcaaaacatctgatggctgaacttaaaaattttagacttggacatttgctggagatgggactgggatcccaatctcccattcagaaatttgtatgaattcaggattcctaacagctgcgaaatggtggacatgttaaatcatagaattcccagcacaaccatcggacagaattgggctgatttta

SEQ ID NO: 4353 - DNA, 435 bp, Zea mays
  Clone ID: LIB3117-001-Q1-K1-C8
cccacgcgtccgcccacgcgtccggcaagtgggtgctctcaatactattttggagaaacagaagctctacagccaagtacacctttggtttgtcgactacgttccttggcctcctgctgcttcttgacagatccgcattgttgagttcctggcgacgtctgccatggccacaaagatgaatgcaaccttctccataccaacagccaaatgcccttaaattcagagatttgaacagttaagctttattgtgcatgtgtattgattctttggtgtttctttttccttttgccacgtacagtattggagctgtacgttttttttcctgaagctttgagctgccgtatagtgtgtaatttagaccactaggcttgaatagtttgtaatttggggcgacatgctctgtatagagtgtacatcatagtaagttgtggaact

SEQ ID NO: 4354 - DNA, 480 bp, Zea mays
  Clone ID: LIB3117-001-Q1-K1-C9
cccacgcgtccgatcagcaaagcggcagtgcgtagagaggatcgtcgaacagaacagcatgaagatggtcatcgttctcgtcgtgtgcctggctctgtcagctgccagcgcctctgcaatgcagatgccctgcccctgcgcggggctgcagggcttgtacggcgctggcgccggcctgacgacgatgatgggcgccggcgggctgtacccctacgcggagtacctgaggcagccgcagtgcagcccgctggcggcggcgccctactacgccgggtgtgggcagccgagcgccatgttccagccgctccggcaacagtgctgccagcagcagatgaggatgatggacgtgcagtccgtcgcgcagcagctgcagatgatgatgcagcttgagcgtgccgctgccgtcagcagcagcctgtacgagccagctctgatgcagcagcagcagcagctgctggcagcccaaggtctcaaccccat

SEQ ID NO: 4355 - DNA, 424 bp, Zea mays
  Clone ID: LIB3117-001-Q1-K1-D1
cttcgtgttcaggtcgatcgcgaagccaaatagcctcactgagatccacagcttcggtggcgactgcgtctttgttggttcaggcggctgcaagtcctttcctgctggtcagtaccgtggagttgaaggtgaccttatctactttgttcctgaccattacaaccctcacgacgcgttcgtgtacaacatgatggatggcaagacaaggttcatcgccgagccattgccttgcagcatttctgcaccagagcagagctccggtttcccggtgtggttgtttccgcccgagtgatctccgtcagtcacaaatctgatctgaccagctggtggatgctgcagtttgctgtcaaagataatgtgtgttgtcatgcattctgtatcgcaacccaatttgtatgagaaagttgcattctcgttcccagtt

SEQ ID NO: 4356 - DNA, 457 bp, Zea mays
  Clone ID: LIB3117-001-Q1-K1-D10
caccggttgacctgatggagactgtccgctagaagctgaagataaagacgaaacagttcctgcggtgctgggaaattctggtcttcctaagcctcgactctcaggatcataagagcatggacaacttcagggcctgcatatatgacctcatgaagggggagatccttggcagtgcctctggaactaacaggaagcgtctattgcagatgccaaccagtttcaataaggaggcatcttttgctgcgtattggacacatgagattggggatgtggatgaacaaactgtttagcagcagccagaggatctcaggacgcaggagcaacagctcaatgagctcgtggacatccaaatcgaggagactgatggggtcgccaagaacgtcacttcacgtggcaaggataagatggccgagctggcggctcaatgaatctgggtgaggttcctactgcaaacgat

SEQ ID NO: 4357 - DNA, 469 bp, Zea mays
  unsure at all n locations
  Clone ID: LIB3117-001-Q1-K1-D11
ctggggcgctcgttttcgatgccccagcaccgctacgcgccgcacttcgcccccttctctcgctctcatgccgctggttgatctctcgtcatctcctcctccaagcacggatcttctcgtcgtctcctccaagcacggatcaggagcactgaaattctatctcaaccggttctgccgactggataacttgaattctaaaggttgatccaagcaggaggtgaatgtgtgatggttggttattttgcatttcttctaggttgatgcatgacggttcatggagaacgctggtggttgtgatagctatcacacactctcttggttaataattagatactctntttgtcgagcaatgtgaacctttaatggtgtttatgggtctcgtggagttgtgatggggctattatgaagatgctatggccctgtatggatgatgggacattgtatgggctctatatataaatctgtaagt

SEQ ID NO: 4358 - DNA, 442 bp, Zea mays
  Clone ID: LIB3117-001-Q1-K1-D12
atttttcatatcctcactcgccgccgccgccgctcgtccctcgccccatcgcgatggcccggatcaaggtgcacgagctgcgggggaagagcaaggcggatctgcaagcgcagcttaaggagtttaagtcggagctctccctgctacgcgtagccaaggtcaccggcggggctcccaacaagctctccaagatcaaggttgtgcgcacctccatcgcgcgcgtgctgaccgtcatctcgcagaagcagaagtcggcgctgcatgaggcgtacaagaagaagaagctgctcccgctcgacctccgtcccaagaagacccgcgccatccgcaggcgcctcaccaagcaccagctctccttgaagaccgagagggaaaagaagcgtgagaagtatttccccatgaagaagtacgctatcaaggcctagatcagtgaaagaacatt

SEQ ID NO: 4359 - DNA, 250 bp, Zea mays
  Clone ID: LIB3117-001-Q1-K1-D2
gggcaatctatggagatgggaaccattcatgctggagattgtctgaggcgtttctgttcaagtctgggaatgaccaatcaagctgttaacgcagccaaggaggcagttcagcgctcagaggagcttgatataaggaggagcccaatctcaattgcagccgacgtcatttacatgataacccaactctcagaggacaagaagccacttaaagatatatccttggctactggtgtggcatgaagggcaccat

SEQ ID NO: 4360 - DNA, 433 bp, Zea mays
  unsure at all n locations
  Clone ID: LIB3117-001-Q1-K1-D3
cccacgcgtccggatcaaacaagtagcgactgctcgacaaagatttgtgagagtgatccggggctgataagagatggctaagatcgccgcagccgccgcggcggcggcggcgctgtgcttcgcggccctggtggccgtggccgtctgccaaggcgaggtcgagcggcagaggctcagggacctgcagtgctggcaggaggtccaggagagcccgctcgacgcgtgccgccaggtcctcgaccggcagctaaccggcggcggcgtcggcggcccgttccggtggggcaccgggctccggatgcggtgctgccagcagctccaggacgtgagccgcgagtgccgctgcgccgccatccggagcatggtcaggggctacgaggaagccatgccgnctctggagaaaggctggtggccatgggggcngcagcagcag

SEQ ID NO: 4361 - DNA, 184 bp, Zea mays
  Clone ID: LIB3117-001-Q1-K1-D4
gaaagttttgcaagaaatcaggagattagttctaataagcaaaagaagagaataaggaatgtgaaagggctcaagggagaatgtcacaccaaatcaacttatgtatgtgcaacaacttgttaattctctttttgatgcttctggtatattaatttccttacaagggcttagacatcttaactct

SEQ ID NO: 4362 - DNA, 438 bp, Zea mays
  unsure at all n locations
  Clone ID: LIB3117-001-Q1-K1-D5
cccacgcgtccggatcaaacaagtagcgacagctcgacaaagatttgtgagagtgatgcggcgctgagaagagatggctaagatcgccgcagccgccgcggcggcggcggcgctgtgcttcgcggccctggtggccgtggccgtctgccaaggcgaggtcgagcggcagaggctcagggacctgcagtgctggcaggaggtccaggagagcccgctcgacgcgtgccgccaggtcctcgaccggcagctaaccggcggcggcgtcggcggcccgttccggtggggcaccgggctccggatgcggtgctgccagcagctccaggacgtgagccgcgagtgccgctgcgccgccatccggagcatggtcaggggctacgaggaggccatgccgnctctggagaaaggctggtggccattgggggcggagcagcagccggc

SEQ ID NO: 4363 - DNA, 430 bp, Zea mays
  Clone ID: LIB3117-001-Q1-K1-D6
actggtatgttttgtttatctactacagctcaagactgtgactaaatttcaacggattaaggtggatagcgtcagatttgaagatgagaagcttcagaataccttgtattgggctaacattaccattcccatggcactgttaccattccatgtttctaatgcactgatggtatgaggccacgcttctgtatgtgcctaccgccaagacaccttgagctacacatgtggtttgttattatcttgaaagcgtaattgtgtcaatacaatgaccttaatatgcttgcttgatctatatttttctgccatcaagaatgaggcaattagattaagatatatgttagctttgtcagtattggctgagtctttaagcctaacaagtaaagttttagcacaccattaatttaggtattatgatccggaccacctggtt

SEQ ID NO: 4364 - DNA, 436 bp, Zea mays
  Clone ID: LIB3117-001-Q1-K1-D7
actggtatgtcttgtttatctactacagcttaagactgtgactaaatttcaacggattaaggtggatagcgtcagattgggagatgagaagcttcacaataccttgtattgggctaacattaccattcccatggcactgttaccattccatgtttctaatgcactgatggtatgaggccacgcttctgtatgtgcctaccgccaagacaccttgagctacacatgtggtttgttattatcttgaaagcgtaattgtgtcaatacaatgaccttaatatgcttgcttgatctatatttgtctgccatcaagaatgaggcacttagataaggatatatgttagctttgtcagtaatgtctgagtctttaagcgtatcagctaaagctttaacaccacattattttagttattatgatcctgaacaaccctgtttatat

SEQ ID NO: 4365 - DNA, 335 bp, Zea mays
  Clone ID: LIB3117-001-Q1-K1-D8
aatagagcaacaatggagaccaagatattttccctccttatgctccttgctctttctacatgtgttgctaacgcgacaattttccctcaatgctcacaagctcctatagcttccctttttcccccataccttccatcaattatagcttcagtatgtgaaaacccagctcttcaaccatataggcttcaacaagcaatcgcagcaagcaacatacctttatcgcccttgttgtgtcaacaatcgccagccctatctttggtgcagtcattggtacaaaccatcagggcacaacagctgcagcaactcgtgctacctgtgatcaaccaagtagctct

SEQ ID NO: 4366 - DNA, 481 bp, Zea mays
  Clone ID: LIB3117-001-Q1-K1-D9
cttgcttttcaaaagtcgtgggacctaacttatggtatggcgatcgcacaagacttacaccgaagcaagaagaagctgcgcttggtttgtcacgtgcctgtggctctggcattccagcatacatttgcaccatgaagaagtctaatgttgtcaagagacagatggtattttcaagacagttcagtaagcgacacatattcggtcgtctgggcacttatgggtgtgaaaccagagtttttgcaggcagggacctgttcggcagtaagctcaacttctcaatgatccatggagaactaaggcttcttggtggatggcccctctttgtgaagagtcaccgtatcgaagcaggacacgtgtgtgctttcatgttccaggaagaggaagagggcgaactgtcacttagggtgcacgtgctgggtactatgccagtgccaacaatctaagccttgcttgtttcgttgatgaagcacgggatgaacgt

SEQ ID NO: 4367 - DNA, 315 bp, Zea mays
  Clone ID: LIB3117-001-Q1-K1-E1
cccacgcgtccgcccacgcgtccggccagcaagcctgttggcaacttctttgcttttgatatgccactgttgtttgtgcatggtgagaagttcaatcagcccatatttcactgcaacaacatctctggattcgttgaaccagtcgttccagacaatcagaacagggccctgtactcaactcacaccttcaagatcttgttcaaggaaggcggctgtggtactttcgttcctctcttccttaacctgactgcatctgtgcggcgctacaatgagtttgaagcccagtctgctgctaacatggcaccgcgtgtggat

SEQ ID NO: 4368 - DNA, 305 bp, Zea mays
  Clone ID: LIB3117-001-Q1-K1-E2
cagaaagttgcaacatgaggataattcacctgatggtgccagacctcttatgtcggaagcgtgggatgggcgatcctcaagttcacatgcatatgaaccgtctttttctggtcaaggattcaaatctccagaaacacccgattcgacagtgcctgtcaagcatccttctgcgatggaacctgtgacttcctctcaaagacctggcagctcaacatcggcaacatcagagcgcattggtgcaaactcagtcgctggtgctcctggctcgtcaccaagctcttcaataggatctcttaccgctgaaa

SEQ ID NO: 4369 - DNA, 263 bp, Zea mays
  Clone ID: LIB3117-001-Q1-K1-E3
cacacacgtgcaacaacacgatcatccaccttatctggccacaccttttattctttaaacatgccactgtcgatcctgcatggcgcgaacatctaacccgccatattttactgaaacatcataatttgattaaacacaccattcgacacagactatcaaaccaccttcctctactcaacttacaacttcatcatctagaccaagcaactcaacttcggcactatcatacctcacttcctcaaactgactccatctttctcctg

SEQ ID NO: 4370 - DNA, 356 bp, Zea mays
  Clone ID: LIB3117-001-Q1-K1-E4
actgaatttggtcagttaagcacccaggagcaaatgacagttgatgctattgtacaagcaagccgattcccattgtctataattcttgttggagttggagatggtccatgggatatgatgaaggaatttgatgacaatataccagctaggtcttttgacaatttccagtttgtcaacttcactgcgatcatgtcaaaaaagataagtcaaagcaaaaaggagacagagttcgccctttcagcactaatggaaattccattgcaatacaaggcaacattagaacttggaaatttaaggacgtcaattggaaaagtaacttaaccgatttcaatttcttcttcttttggcaggtattg

SEQ ID NO: 4371 - DNA, 212 bp, Zea mays
  Clone ID: LIB3117-001-Q1-K1-E6
aaaaaagaaaccaaaaacccccccctttattgcaataaccccataacaccaaactatttattacaaaaacttttccaaacggggaaaaaaaccccccatcaaatcggcccggagaaaacaacacccccaaaatattaaaaattcccaccctgttataactggaaactcctagggctacaacccgttatttaaaaacacggaggcccccccgg

SEQ ID NO: 4372 - DNA, 266 bp, Zea mays
  Clone ID: LIB3117-001-Q1-K1-E7
tttttatatctttattctttttccttttttttttttttttttaattttttttttttttgtgttttatttaaaatttttattggtcttacaaaaaaaaccataaacccccctctataatcaaataaccccaaaacccctaattatctattaccaaaactcttccacaactcacaacaaaactcccatcaaaaccaacaccataaaacaaaacccacataatataaacaaatcccaccctaaactaactcaaaacaccatactctaca

SEQ ID NO: 4373 - DNA, 326 bp, Zea mays
  Clone ID: LIB3117-001-Q1-K1-E8
cccacgcgtccgcccacgcgtccgcatagaaagcacaatagtgtaccaacaatggcagctagagatattttgcctccttatgctccttggtctttctgcaagtgctgctacggcgaccattttcccacaatgctcacaagctcctatagcttcccttcttcccccgtacctctcaccaacggtgtcttcggtatgtgaaaacccaattcttcaaccctacaggatccaacaggcaatcgcagctggcatcttacctttatcacccttgttcctccaacaatcatcagccctattacagcagttacctttggtgcatttattggcac

SEQ ID NO: 4374 - DNA, 469 bp, Zea mays
  Clone ID: LIB3117-001-Q1-K1-E9
gaaccggaggttcgggctaggcgtacgcacgggtgcaagcaagacgacagtacgggtagaggtccgtggtcacggtgttgtgtggatcaatgatgacggcttcaaacgcaatgtcagctgagaatactatcactagtattacttcatttataataatgcgacgagtgcttggcattctattgtggctcatgtaactcatgcacgcatttctcgtttattcatcattctcctcttgccttgaattgaggatgggcaatgagaacgtgactactgaagaacaagaagtttctgactgtgcaagggctaccgatgagaacgccatgcctcactatgctgccacctctgctactgctatgcatgtccccctcatattcgctgctcaggttgaggtggttccggtacatagacctgatgagatgcatgttccaagttgatactggacggaaacaacttaaggtatgaagatgtg

SEQ ID NO: 4375 - DNA, 415 bp, Zea mays
  Clone ID: LIB3117-001-Q1-K1-F11
cgcaaattgcaccaagaaatccatcgagaggccgtcgacaggggaattaatggcgtcgtcgggtagcagcagccaccgccgcctcatcctcgcagccgccgtcctgctctccgtgctcgcggctgccagcgccagcgccgggacctcctgcgtgccggggtgggccatcccgcacaacccgctcccgagctgccgctggtacgtgaccagccggacctgcggcatcgggccgcgcctcccgtggccggagctgaagaggagatgctgccgggagctggcggacatcccggcgtactgccggtgcacggcgctgagcatcctcatggacggcgcgatcccgccgggcccggacgcgcagctggagggccgcctagaggacctgccgggctgcccgcgggaggtgcagaggggattc

SEQ ID NO: 4376 - DNA, 344 bp, Zea mays
  Clone ID: LIB3117-001-Q1-K1-F4
gtgggttagcttctcctccccctccggttcgggttcgggttcgtgaggttctccggggttcgggttcgtgggtgagcggatcgagatggcggcgtcggatgttgagtaccgctgcttcgtcggcggcctcgcctgggccacggacgaccactccctccacaacgccttcagcacctacggcgaggtcctcgagtccaagatcatcctcgatcgggagacgcagaggtcccgcggcttcggcttcgtcaccttctccacggaggaggcgatgcggaacgccatcgagggcatgaacggcaaggagctggactggcgcaacatcaccgtcaacgaggcccagtccc

SEQ ID NO: 4377 - DNA, 394 bp, Zea mays
  Clone ID: LIB3117-001-Q1-K1-F7
cggacgcgtgggttcagaaacacaccaagcgaagcgcactagcaacaacctaacaacaatgggctaccaaaatataatccctccttgccctccttgccctttttccaaccccaccaaagccttcaattattccacaatgctaacttgctcctagttccataattccacagttcttccaaccagtaacttaaatggctcttaaccacccagctgtgcaagcctataggctacaacaagcgattgcggcagagcgtcttacaacaaccaattgcccaattgcaacaacattccttggcacatctaacaatacaaaccatcgcaacgcaacagcaacaacagtttctaccagcactgagccacctagccatggagaaccctgtcgactacttgcaac

SEQ ID NO: 4378 - DNA, 433 bp, Zea mays
  Clone ID: LIB3117-001-Q1-K1-F8
agcccctctccgcctccctccccgccgcacagcctccacagcccgaaaccctcgccgccgagcggtttcggagaagagaagcaaatcaagatgtttctcggctcgctcccgcggcgcccgagcaaggaggctgcttacaagcagctgcggtcgcacatcatcatcatggcctcctgcgccgccgtcatccgcgccaccccttacatcctccatttcctcgcccgcgacggcgacatccaggaactcaagctagatctgtaggcccgtccgttgcttccccacctccagaggtgctacaaaggcaaccgttagttcgagcccactgcaaggtactatggagttagtggctatagtgcctgcttaaagttttttggtgttccaagtttagtgacaaactgacaatggtgtagcaactggcttgtgctgcgacaag

SEQ ID NO: 4379 - DNA, 388 bp, Zea mays
  Clone ID: LIB3117-001-Q1-K1-F9
cccacgcgtccggctagttgctgcctacccccagcaatttcttccattcaaccaactagcaggattgaactctgctgcttatttacagcagcaacaactactaccattcagccagctagctgatgtgagccctgctgccttcttgacacaacaacagttgttgccgttctacctgcacgctatgcctaacgctggcaccctcttacaactgcaacaattgctgccattcaaccaacttgctttgacaaactcaacagtgttctaccaacaacccatcattggtggtgccctcttttagattgcttatgagttatagttcaataatgaagttttttggatgatgtttgtggcgtcccagaaataagaaagtacatttctagattctaaa

SEQ ID NO: 4380 - DNA, 411 bp, Zea mays
  Clone ID: LIB3117-001-Q1-K1-G1
cccacgcgtccgaggaatttgtccgcagtggtgtctttgggacttacagctatgatgaattgatgggttctttggaaggaaatgaaggttacggacgtgcagattatttccttgttggcaaggacttccccagctatattgaatgccaagaaaaagttgatgaggcgtaccgagatcagaagttatggacaaggatgtctatcctcaacacggctggctcatccaagttcagcagcgattggacgattcatgagtacgccaaggatatctgggatatcagccttgccatccttccttaaaccagtggatattaaggtcttttggctatatttctgggaacccttaggatccagggaccatttgtgaccacatttatttgccttagacccttagcaggaagcgcttgtcacc

SEQ ID NO: 4381 - DNA, 334 bp, Zea mays
  Clone ID: LIB3117-001-Q1-K1-G11
cccacgcgtccggggagagagagaagtgggagacccgcgagaggctgccgtgtagggactagggaccgtagagtaagcgacagcgaaggagggagagggggatggccgggatcgggccgatcaggcaggactgggagccggtggttgtgcggaagaaggcacccaccgccgctgccaagaaggatgagaaggccgtcaacgccgcgcgccgctccggcgcggagatcgagaccatgaagaagttcaacgctggtatgaacaaggcggcgtccagcggcacatcccttaacaccaagcgcctcgacgacgacacagagaaccttcgccatgaacg

SEQ ID NO: 4382 - DNA, 436 bp, Zea mays
  Clone ID: LIB3117-001-Q1-K1-G12
cccacgcgttcggggagagagagaagtgggatacccgcgagaggctgccgtgtagggactagggaccgtatagtaagcgacagcgaaggagggagagggggatggccgggatcgggccgatcaggcaggactgggagccggtggttgtgcggaagaaggcacccaccgccgctgccaagaaggatgagaaggccgtcaacgccgcgcgccgctccggcgcggagatcgagaccatgaagaagttcaacgctggtatgaacaaggcggcgtccagcggcacatgcctcaacaccaagcgcctcgacgacgacacagagaacctcgcccatgagcgagttccaagtgacctgaagaaaaatctcatgcaagcaaggctcgataagaagttgacccaggcacaggttgctcagatgatcaatgagaagccacaagtgat

SEQ ID NO: 4383 - DNA, 335 bp, Zea mays
  Clone ID: LIB3117-001-Q1-K1-G2
cccacgcgtccgaggaatttgtccgcagtggtgtctttgggacttacagctatgatgaatggaggggttctttggaaggaaatgaaggttacggacgtgcagattatttccttgttggcaaggacttccccagctatattgaatgccaagaaaaagttgatgaggcgtaccgagatcagaagttatggacaaggatgtctatcctcaacacggctggctcatccaagttcagcagcgataggacgattcatgagtacgccaaggatatctgggatatcagccctgccatccttgcctagaccaggtggatatcaggttctttcgcctatatttct

SEQ ID NO: 4384 - DNA, 302 bp, Zea mays
  Clone ID: LIB3117-001-Q1-K1-G3
cgctcgtcgccgcgcagcattagtcgccgagagcgccgtccgcgccgaatggtactcgccgtcgaactccgtcatggtggtgatcgcaatctgtcttcaagcttcgagggatcaaagatcaagcgttggcgaccaagtgatccagttcttcgagttccgcgagattgaagatcctgagcatctgtttggtgaaggttgtccacattgcaaccactgctcaggagaagacgaacccgtggaaggagacttccaggagttccaagactacgacgagttctaggtatgggttggcggcaaccccc

SEQ ID NO: 4385 - DNA, 417 bp, Zea mays
  Clone ID: LIB3117-001-Q1-K1-G4
cccacgcgtccggctcaatttgtcccatctaatcaagaatcaagccagagagaaggtggcagtgggagaaagcgtaagcaaagccatgttggattagctcctgaaagctatgtggggtttaaaaagatccaaaatacagaaacacttgaaactcttaaagaacataagaggcaagaggatcaattttctattagcaagtgtcaagctgaattgaaaggaatggatggattaacagccttggacaaatcatatgctttggagcttttcatatctgcgacaaaccgagagattttcttaacaacaacagagcatgatgttaaagaaaattggctcaagcgcaaaattaggttgcttcgtggcagtgatgcatggcctcaaccaatgatttgagccaaattggaccttttttcatcttct

SEQ ID NO: 4386 - DNA, 439 bp, Zea mays
  Clone ID: LIB3117-001-Q1-K1-G5
cccacgcgtccgactaaatttaccccattttatcaacaatcactcccaattataatcggctggcttctacatcataagcatagccatgttacattacctccttatcatctctcttatttataaacactatcccaaactctcaatcacttcaagctcttcaagatcatacattccaagatcatcaattatctactaacatttctctccttcacactactgaatataataccttcacctcctataacactacatatacttactacaatactatgtctaataccaacccttacattcttttcaccacaacatagctttcttattatctcatttatcttattcgcaactatcagtatcattcaaccattgatgactacactattttgactatttcaacaaccatgtacctctatccaactcctttttttgactataccatatc

SEQ ID NO: 4387 - DNA, 414 bp, Zea mays
  unsure at all n locations
  Clone ID: LIB3117-001-Q1-K1-G6
cggacgcgtgggcggacgcgtgggttactatctgcaaaaactataggttttggctggagatgcctattctgtgaaccacgagtgcccagcatacatgccttatggaatctggatatctgttgctcaactaaataaacagttttcctacagcaaatgtattaattgcctgggattgggtgattgagtcgttgtaatcagcaaacgtgacgtccaatactgatgaatctgtcacctgcatctattgctgttggcatagtagtattttagacatgcagtagctaccttgctgcaagcggacgttggacttggacagacactgcagaatgcagatgtgcctgactgtactctctagtctgagattgttaagcctgaagttcatatttctggtntatattatggtcgtttggatttgtt

SEQ ID NO: 4388 - DNA, 192 bp, Zea mays
  Clone ID: LIB3117-001-Q1-K1-G8
cagagatacgcgtttgaatttggcataaagttaactgttgtcttctttttcccttcccctgtctctctatctccctgcctgatggctatcttcaggtttcaatttgatgatggaataaggaaaggtacttgtcctattaccgatgactggatgacttttttgaagttttgaaaacttgttcaccttgtggct

SEQ ID NO: 4389 - DNA, 182 bp, Zea mays
  Clone ID: LIB3117-001-Q1-K1-G9
atgcgacagccaaaattcatcatgcaagcctctacatatacacgctcagccttattaaatttctcaagatatactaccacttttctctcctactatatcagattcaattctacctcaaaaaaactcatgagacaccctaacctctatcctcctatatatatccgcttctctactcaacactc

SEQ ID NO: 4390 - DNA, 405 bp, Zea mays
  Clone ID: LIB3117-001-Q1-K1-H11
cccacgcgtccgcggacgcgtggggcttgctcaaggaagaggttgagagatacaagaagtttgctgatcgcttggagcccttcattgctgataccgtgcatgtgctaaatgaatctatcaagcagaagaagaaaatcctggtcgaaggcggccaagcaactatgctggatattgattttggcacttatccatttgtgacttcttctagcccttcagctggcgggatatgcacaggcctagggattgctccaagggcaattggcgacctgattggagtggtcaaagcttacacatctagagtcggctctggccctttcccaactgaactatttggagaggaaggtgatcgccttaagaaagctggaatggaatttggcacaacaacaggtcgcccaaggcgttgcg

SEQ ID NO: 4391 - DNA, 330 bp, Zea mays
  Clone ID: LIB3117-001-Q1-K1-H4
gccaaagctagctagctcctctcggtgcacgatcgagttacgagtacgagcacacgtcggggttgctaccgttgccaacaagcaacagagccaagaaatcagtcgcgctagagcgagcaaggacgatgctgggatgcttctcgcggctgcggcggccgacgacagcggcgccggagcccatgccggcggcgtccgacgacgcgtccacgtcgacggcctcggcggcgggctccacctcgccgtgctcgtggtcgtcctcggcgcgctgcaaggacgacgaggaccacggcggcggcgcggtgggcaaggacccgtcggcgctgtccgagc

SEQ ID NO: 4392 - DNA, 140 bp, Zea mays
  Clone ID: LIB3117-001-Q1-K1-H5
tcgacgggttcagaaacctgagatgcgcaaggaagctgacgagcgggaggccctcacgggccgcaccgctggccgaccctgatcttctgtgaagggttcgagttggagcacgcctgtcgggacccgaaagatggtgaact

SEQ ID NO: 4393 - DNA, 119 bp, Zea mays
  Clone ID: LIB3117-001-Q1-K1-H6
tccacagcttcataaaccttatatgctcatttaatcttaccaactacaagcactcagggagcttactactgacccccactggagctcatatccaagattccagtcgcactacacctatc

SEQ ID NO: 4394 - DNA, 388 bp, Zea mays
  Clone ID: LIB3117-001-Q1-K1-H7
atcgaccaaagcgtcgacgcctcctcgatggccatctcggcctccatggagaatgctgcgggcgcggtggcgggggcaagtggcgccggcggtggcagcgggagaggcaagaagaaagggatgccggccaagaacctcatggcggagcgccggcgtcgcaagaagctcaatgaccgcctctacatgctgcgctcggtggtgccgaagatcagcaaggtgatcaaccagcctcgtccattcatctcctattcgtcgtgtttcccatctgtgcttattagtgtatagttacatatagagtattatgctttgcctatatatgctgagttttttttatttatctataatggtggtgagtaggattctatcctacgaatatatttttcacttc

SEQ ID NO: 4395 - DNA, 439 bp, Zea mays
  Clone ID: LIB3117-002-Q1-K1-A11
gggaggcgcggcaattccaggagatgatgcagcagaagcagatgtatgaccggcaggtgagggagtcacttcagtgggtgatcatgaagtctggaatgcaaggctgggagccagaggccataactgatcgagccttgtcggagacaagcgaggatgacagagataagaagtagctagctcttggttattggagttgaatggaaccactgaggaaggccctgttgtttgctttgagttcatcgtcctctgatcagctcttagtaaccaaacagagaatgccaagttacgaaaactcggatgttccttgaccatgcaaagctcttcaggggaaatatctgaaatccacctgtaaatataccatcttcttttaaactacctgtgtacttatctaataagaacaacatctgtacttgatcgctctaccttgcaaatgttcatt

SEQ ID NO: 4396 - DNA, 291 bp, Zea mays
  Clone ID: LIB3117-002-Q1-K1-A12
actagttctagatctcaagcgacctttcttttttacatgttgctgcacacacaactgggggtgtttttaaaattatgggtggatgttcacacaacacagcacggcacatggctagcctgctaacatgcggcacccacacaacacaacacactgctcgccagaagcgcaaaagaaggccaagggaggacactatacagacatcagccatcatcatcctctcatactcagagcatgccattgtacgcagctgactgactgactagaaacacacacagttacaccactatacta

SEQ ID NO: 4397 - DNA, 345 bp, Zea mays
  Clone ID: LIB3117-002-Q1-K1-A7
ctggggaggtggtgatcaagcttctgacggatatgagatcaggggtcgccgctgggctgtggaaagctaacgatttacgatagggagatggtaaattcgaaccatatctcgtggggggaaaaggacttttatgtttgcaactgtttctgcgatactggccatttaggagccttcgcaagttcagattgtctttgtataggtacttaggtagctgataatgatatgtaacctttttgcgtagattgattaattctcttttctttttcttggtcgagtcgtactgacatttggtattgcaaaatttgaaagtacaataatttttttccctttcaaaaaattcccctt

SEQ ID NO: 4398 - DNA, 144 bp, Zea mays
  unsure at all n locations
  Clone ID: LIB3117-002-Q1-K1-A8
gaaaaacgggccgacccacacaaacggcatggttttcgtcaacaaaacccaatttcaaatcttttgtagcttcatacgctgctgccgcgtttttctaaaaggaacgtgggcctacctaaacacantcttcaacattacataaat

SEQ ID NO: 4399 - DNA, 308 bp, Zea mays
  Clone ID: LIB3117-002-Q1-K1-B10
gcagtgcaacaagcaagatttacctgcccatcgatcatatcgtcaactggtccggcaggtggcgacaccatgagctgcacggagtgcggcggcggcggcggcggcgccaagacgtcgtggcctgaggtggtcgggctgagcgtggaggacgccaagaaggtgatcctcaaggacaagccggacgccgacatcgtggtgctgcccgtcggctccgtggtgaccgcggattatcgccctaaccgtgtccgcatcttcgtcgacatcgtcgcccagacgccccacatcggctgataatatataagctagcc

SEQ ID NO: 4400 - DNA, 276 bp, Zea mays
  unsure at all n locations
  Clone ID: LIB3117-002-Q1-K1-B2
ggcgacccagcatacgaccaccctncgagcatacaangagctccactgctcttacattttttttattaaaccccgctagatttaaaaactagctatcgagtatngattactccaaatcccatccatgccacaagtgaagcatcattctctttcactataaggatttatttctgttgattattttgatattacacaaatcaaatacaaggataaaactcgagaaaaacaacgcaagaaagcgctcaaaaagaaagcaaaagatgaggctcaaaatcc

SEQ ID NO: 4401 - DNA, 401 bp, Zea mays
  Clone ID: LIB3117-002-Q1-K1-B3
gtccgatgacaaattaaatgaaaacgatagagttcaaatagcaaactttctgtgccctgggaattgtgcagtttctggtggtgtaaaaggtattgaagtagtcgaagccaaagcaaagtccttcaaggccagaatgacggttcgcctagctgttgctggcgctttccatactagcttcatgcaaccagctgtttcaagattggaatctgcgttggctgccactgagattagaacacctagaattccggtcatctccaatgttgatgcgcagccccactcagatcctaacaccatcaagcagattttagctcagcaggtaacctctccggtgcaatgggaaaccactgttaagaatcttatgggcaaagggcttgagaaaaagtatgaactcggacctggaa

SEQ ID NO: 4402 - DNA, 357 bp, Zea mays
  Clone ID: LIB3117-002-Q1-K1-B5
ccttccgccaacccttccaaccatacaaggaccaccatttttcttacatttttaggtggaaagatctgggggatgtataactagctatggagtatggtttactccagatcccatccatgccagaagtgaagcatcattctctttcactagagggatttatttctgttgatgatgttgatattacacaaatcaagtacaaggataaagctcgagaaaaacaacgcaagaaggcgctgaaaaggaaagcagaagaggaggctcaaaatccaaagccggaaatgaagagacctccagagaagccggaaaagccaaagcggaagaagactggcaagcagcgtcagtcaatccaaactaaag

SEQ ID NO: 4403 - DNA, 248 bp, Zea mays
  unsure at all n locations
  Clone ID: LIB3117-002-Q1-K1-B6
atacaagaaccacctttgctctaacatttttaggtcgaaaaatctggaaattttaaaactagctgtggagtatncattactccaaatcccatccatgccacaagtgaagcatcattctctttcactagacggatttatttctgttgatgatgttcatattacacaaatcaagtacaaggataaagctcgagaaaaacaacgcaagaatgcgctcaaaaagaaagcagaagatgaggctcataatccaa

SEQ ID NO: 4404 - DNA, 247 bp, Zea mays
  Clone ID: LIB3117-002-Q1-K1-B8
atattatccctccttgcgcttcttgcgctttttgcgagcgcaacaaatgcgttcattattccacaatgctcacttgctccaagttccattattacacaggtcctcccaccagttacttcaatgggcttcgaacacccagctgtgcaagcctataggctacaacaagcaattgcggcgagcgtcttacaacaaccaatttcccagttgcaacaacaattcttggcacatctaacaatacaaaccattg

SEQ ID NO: 4405 - DNA, 355 bp, Zea mays
  Clone ID: LIB3117-002-Q1-K1-C10
agaccaactagcaacatataaagcacaatagtgtaccaacaatggtagccaaaatatggaggctccttatgctccttggtctttctgcaagtgctgctacgacgaccattttcccgcaatgctcacaagctcctatagcttctcttcttcccccatacctctcaccagcgttgtcttcagtatgtgaaaacccaattcttcaaccctacaggatccaacaggcaatcacagcaagcatcttacctttatcacccttgttcctccaacaatcatcagccctattacatcaattacctttggtgcatttattggcacaaaacatcagggcacaaacactacaacaactcgtgctaac

SEQ ID NO: 4406 - DNA, 286 bp, Zea mays
  Clone ID: LIB3117-002-Q1-K1-C11
cggacgcctgggcggacacatgggcggacgcgtggggtcgccgcgaagcgctccaggggagctttcgtcaacatggggaagacacatggtatgggagccgggcgcaagctcaagacccaccgcaggaaccagcggtgggctgacaaggcatacaagaagagccatttgggcaatgagtggaagaaacccttcgctgggtcatcccatgccaagggcattgtcctggagaagattggtattgaggccaagcagcccaacttcgttatccgtaagtgtgctcgtgttc

SEQ ID NO: 4407 - DNA, 431 bp, Zea mays
  Clone ID: LIB3117-002-Q1-K1-C5
acaagggctcccatgttccacgtacctctctggttgattgaagcgtatgggtggatttcaggttttgtttctcgcatcactggaaaactcccacttatcagttaccctactgtgcgtgttctgagacatcagtgggcatactcgtgtgacaaagcaaagatggagctgggctataccccaagaaacttgaccgaaggtttgtcggagatgctcctgtggctcaaggaagaaaaactaatcaagttttagcgttctctactacacaccacatcacatatttaatgtacaccgatacattggggatgtgctggggattttgaagtgtatatgcttcggcattgcatcacgtcgtattatgctagaagaaatctaagatgttgacgtgtgatactgatgttggcaacaaagagagaaattatgcattattttta

SEQ ID NO: 4408 - DNA, 387 bp, Zea mays
  unsure at all n locations
  Clone ID: LIB3117-002-Q1-K1-C6
ccggccggaaataccggggcgggccaccactcgtccgggccccttggcccgaattcttcccaggctcttatagcttccttttttcccccgtacctgggaccancggtgtcttcggtatgtgaaaacccaattcttcaaccctacaggatccaacaggcaatcacagctggcatcttacctttatcacccttgttcctccaacaatcatcagccctattacatcagttacctttggtgcatttattggcacaaaacatcaaggcacaacaactacaacaacttgtgctagcaaaccttgctgcctactctcagcaacagcagtttcttccattcaaccaactagctgcattgaactctgcttcttatttgcaacaacaacaactacca

SEQ ID NO: 4409 - DNA, 429 bp, Zea mays
  Clone ID: LIB3117-002-Q1-K1-C9
cctagggtcaaggaactcttctgttgtaagtcgagttccttattcaagaactgcggaggagttgttaaaatcgaacccttcaagaaaatcttacccctcatggacagacgatggtttgaggcacagatcacctgaaaggattttaagtgttcgtagtgatgtgtctccaccagtaggttatgatcagattaggtccatgccaccacttagatctgccggttcctcaagacctcaaagttttattacaagaggtgctcctgatacgccaaggagtcaaccatatgctggcaaagccaccatttctgttgatacagtacagagaactaatgggatcactccatctagtgcacctttgcctaaggctgaagccccgcttacagttactggattgttgaattcgttgggtcttgagaagtatattgttctctt

SEQ ID NO: 4410 - DNA, 122 bp, Zea mays
  unsure at all n locations
  Clone ID: LIB3117-002-Q1-K1-D1
acccacccgtccggccgataattgagtaataatgtgtcacgcatcaccatgggtggcagtgtcagtgtgagcagtgacctgaatgaacaattgaaatgaaaagaaaaaagtattgttcccna

SEQ ID NO: 4411 - DNA, 327 bp, Zea mays
  Clone ID: LIB3117-002-Q1-K1-D10
caactagcaacatacatagtgaagtacactagcaacatcttagcaccaatgggagccaagagttttgccctccttgccctccttgctctttcagcaagcgctgctacctcgacttttattccacaatgctcacaacaatacctctctccggtgacagccgcgggatttcaatacccaactatacaatcctacatggtacaagaggccatccaagcaagcatcttacggtcattagcattaaccctccaacaaccatatgctctattgcaacagccatccttagtgcatctgtatctccaaagaatcgcggcacaacaactaccacca

SEQ ID NO: 4412 - DNA, 398 bp, Zea mays
  Clone ID: LIB3117-002-Q1-K1-D11
cgccgtctcgcagattatgctgcaacagctgttaccattcatgttcaacccaatggccagaacgattccacccatgggcttacagcaaccctttgttggtgctgcattctagatagaaatatttgtgttgtaccgaataatgagttgacatgccatcgcgtgtgactcattattaacaataaaacaagtttcctcttattatctttttaaaaaaaaatcatcttacagacattaacaataacccttcaacaatcttatacttgatagaaacaatcaatacttagtgcatctgtatcttccaaaaagtgggggttttatcatctacaacaaccattgcatcccaacaatcattttattttttaaatttaaaaaaaaaaaaaaaaaaaagggggccccct

SEQ ID NO: 4413 - DNA, 396 bp, Zea mays
  Clone ID: LIB3117-002-Q1-K1-D12
gaagaaggccaagaagagcgtggagacgtacaagatctacatcttcaaggtgctgaagcgggtgcacccggacatcggcatctcctccaaggccatgtccatcatgaactccttcatcaacgacatcttcgagaagctcgccggcgaggcggccaagctcgcccgttacaacaagaagcccaccatcacctcccgggagatccagacctccgtccgcctcgttctacccggcgagctcgccaagcacgccgtctcggagggcaccaaggccgtcaccaagttcacctcgtcctaagctcctttcgagtaggtccttaagcgccgtggcgccttttgactgtattgaattgttgtcatcttgaaagtgatctgagcaatgcaatataatattctggc

SEQ ID NO: 4414 - DNA, 92 bp, Zea mays
  Clone ID: LIB3117-002-Q1-K1-D2
aataatgtctcacgcattaccatgggtggcaatgtcagtgtgagcaagtaccttaataaacaatggagatgaaaacaaaaaagtattgttcc

SEQ ID NO: 4415 - DNA, 326 bp, Zea mays
  Clone ID: LIB3117-002-Q1-K1-D3
cgaaaaacctcaaaaggtattgctgattttgttgatggaaatcgacaaggcttttcagttgcaagtgctgttctcctcagcctagttccatggattcaagcttcttcatcttgctctgctggctttcaatgctgcaatgttggcgatcttgtcacgtcttgaacagaaaggggagtcagtctttgcaaagaaagagtacgcacgagcagtcattttggtggccagtcagaaaacgttgccagtgttggttgctgtggttgagcagcttggaagagcgttcggggagtctggatttctggtcattccctgtgttgccgcacacatta

SEQ ID NO: 4416 - DNA, 339 bp, Zea mays
  Clone ID: LIB3117-002-Q1-K1-D6
ttggccggccgtcaacatggcggaggagaagggcgcgttgggggcgcctagggagtggggggtcgaccacaagctccgggccgtcgggacgctgtggctcagcggcatcgtcggctccatcgcctacaactggtccaagccgggcatgaagaccagcgtcaagatcatccacgccaggctgcatgctcaggctctcacgctggctgccttggctgggtccgcgctggtggagtactacgaccaccagcaagggtcaggatcgaaagttcaccaatatgcaaagcagttgctttcatctgatagcaatagcggccaacaaaaggagtagctagctagtgt

SEQ ID NO: 4417 - DNA, 375 bp, Zea mays
  Clone ID: LIB3117-002-Q1-K1-D8
cccacgcgtccgctgaatgaaaggagcagtcgatctcacagcattctgactgtgcatggtggaggggtggatctgaagaatggatctacttccagaggatgtctacatctaattgatcttgctgggagtgaaagagttgagcgatctgaagcaattggagatagattaaaagaagcacagtatattaacaaatccctctctgctcttggtgatgtgattttttctttggcacagaaaaatgcccatgttccttatcgaaacagcaagctgactcaagttctacagagctctttaggtgggcaagcaaagacactgatgtttgttcaaattaatccggatactggatcatattcagaaacaataagcactttgaag

SEQ ID NO: 4418 - DNA, 412 bp, Zea mays
  Clone ID: LIB3117-002-Q1-K1-D9
cacgcatatgacttggtcatagtgcttggcgcttggatcctgcatgtttgcttgatgggcggtttggctattaaaagatggattttgtcactgtgtttgatgaccctggtcctaattaagcttatgcctgtgatacgggggattggatggcaagttagtgtccgcatttgtgttcttttcggagaagcaaggggttgactactataatctacttgaacacacctacagctacaagaaaaaactatgttcttgttacctcttctgaaagcaagtgatgaatcgtccattaaagaaaattaactggcttctttttggttatttgttcttgttgtggattggctgatacttgggctctggatttggttacttgcgtactaagatcattttaatctggccaagtgatccacgaatg

SEQ ID NO: 4419 - DNA, 83 bp, Zea mays
  Clone ID: LIB3117-002-Q1-K1-E10
tgtttgggtgtttccttccatcatcacttgctgaactgctctagtatttgcatttgggagggaagtctgtcgctgtacgagcc

SEQ ID NO: 4420 - DNA, 359 bp, Zea mays
  Clone ID: LIB3117-002-Q1-K1-E2
ttcccccacaccccaataaattccggccgccgccctttcttttccgtcgttggggtggcgcctacgccacgacctctgccatggccccgaagaaggataaggccccgccgccgtcgtccaagccggccaagtccggaggcgggaagcagaagaagaagaagtggagcaagggtaagcaaaaagagaaggtcaacaacgctgtgctcttcgaccaggccacctatgacaagttgctctccgaggtgcccaagtacaagcagatcaccccatccgtcctctccgagcgtctcaggattaatggatcattggcacggaaggcaatcaaagatctgatggcaaggggattcataaagatgatc

SEQ ID NO: 4421 - DNA, 356 bp, Zea mays
  Clone ID: LIB3117-002-Q1-K1-E5
caaggaccgcaaggccctcctcgtacctcaaggcccggggccgctccaccaacacggcgaatttcaaaaatactgccgaccacatcaccaccgctgctggtggcgccgccgccactggcgcgtatatacacaagatcgactaggcgcttcgcggggatctgatggtggtcctaccgcctattactccttatcgctctagtttttgctatcaatgattatgtgctaggagttttatgttacttataaactgctttgaacctcgatgggagttgaacttaatgtggagtgtatctgagatatgaagaactcattatatggctaatatctcttcgtgtgttctgctaaaaaaaaaataa

SEQ ID NO: 4422 - DNA, 392 bp, Zea mays
  Clone ID: LIB3117-002-Q1-K1-F1
agcattcaaaaacacaccaagcgaagcgcactagcaacgacctaacaccaatggctaccaggatattagccctccttgcgcttcttgcccttttagtgagcgcaacaaatgcgttcattattccacagtgctcacttgctcctagtgccagtattccacagttcctcccaccagttacttcaatgggcttcgaacatccagccgtgcaagcctacaggctacaactagcgcttgcggcgagcgccttacaacaaccaattgcccaattgcaacaacaatccttggcacatctaaccctacaaaccattgcaacgcaacaacaacaacaacagtttctgccatcactgagccaactagcccgggtgaaccctgtcacctacttgcaacagcag

SEQ ID NO: 4423 - DNA, 424 bp, Zea mays
  Clone ID: LIB3117-002-Q1-K1-F11
aaacaagtgagtgagaaagagagagagaggagggaaaatgctgcgccacgccgcccgccggctcgtttcccgggccgggggtcccgccaacgggcgccgggcgctcggcaagggggaaggtgcccgcggaggccgtcgaggactccacgttcgtcgaggcctggaaaaaggtcgcccccaacatcgagcccccagcgacgcccctctccctcatgcagccgcgcccgcccacgccagctaccatccctaccaagctcaccgtcaacttcgtcctcccctacaagtccgagatcgccaacaaggaggttgacatggtaattgtaccagctacaactggtcagatgggtgttttgccaggccatgttgccacaattgcagagctcaagcctggtgttctctcagtacatgaaggaaacgatgtgag

SEQ ID NO: 4424 - DNA, 334 bp, Zea mays
  Clone ID: LIB3117-002-Q1-K1-F12
accacgcgtacgacaatccgagaacttacccgagataaagcctaacgacgccgctggggggataaataactttgctgaacctgcaactacttgcaccaactgaactttttgttggagagtgcgaaatacatggtgatccaaggctaaccttgagctatcatccgaagaatgaagggcactgcatgcatcactatcaaaaaaacctgtatgtccttgattatcggaatatatgatgagccaatgactccacaacaatgcaatatgctgttggagacgctccacgattaactgatccaacaaggcatttgacgttgtcataatgctatttacgaca

SEQ ID NO: 4425 - DNA, 326 bp, Zea mays
  unsure at all n locations
  Clone ID: LIB3117-002-Q1-K1-F2
actcaaaaacacactatactaatctcattatcaacaacctaacaccaatttctaccactcgtatttttaaaaacatctcgtctcccccatatnatcaacacaacatattctttcattattccacacttctcactttctcctataaccaatattccacaatccctcccaccacttacttcaactatcttcaaacatccaaccatacaaacctacaatctacaactatcacttacttatatccccttacatcaaccaaattcccaacttctacaacattcctttttacatttaaccctacaaaccatatcatctcaacaacatcaact

SEQ ID NO: 4426 - DNA, 444 bp, Zea mays
  unsure at all n locations
  Clone ID: LIB3117-002-Q1-K1-F3
gaaatccccggnccgacgcaggcgtccgacccaccccatcaacctcattttccgtttcctccagagcaaagcgcgcatccagatctggctctgcgagcacaaggacctgcggattgacggtcgcatcatcggattcgatgagtacatgaacttggtcctcgaagatgctgatgaaatcaacgtcaagaaaaacactaggaagacactgggccggatactcctcaaaggtgacaacataactttgatgatgaacagtggcaagtgaaagttcttatggcaggaacgatgtttggtgctcgcgttgagtatttctggcacgttgtactccatccattcagacttaccatgtacctgctgtaatgaccctgagtaaattattcttgaagcctgccactttggggggccatattggcatcttttcttgtttccccgnnaagnnnnnna

SEQ ID NO: 4427 - DNA, 342 bp, Zea mays
  Clone ID: LIB3117-002-Q1-K1-F6
gtccggccactcatattgaacaagatactgtagtactgtcctcaactacggcacgactacaacagcggctcttactagacgagctggctatctactatcgcatgctacaggttcttccatgcaatcagctagcttacaagaactctgctagatgattgccacactagacacgatacatgtatctctctcactgactacaaccaaacactccactccaataaccgcataggatggttcaactctaacgtttaatatcggtcaaaggatttcatccgatacaccaagattagtggtacgatcaatattgccattttagagcaccagcatcactgatcaacacat

SEQ ID NO: 4428 - DNA, 324 bp, Zea mays
  unsure at all n locations
  Clone ID: LIB3117-002-Q1-K1-F7
atttaaaaacacaccaatctaatcgctttagcaacnacctaacaccaattgctaccaggtattttccaacttgcgctgcttgcccttttactgaacgcaacaaatgctttcattattccacagtgctcactttctcctattgccagtatttcacagttcctcccactcatttctttaatgggcttctaacatccaaccgtgcaagcctacatgctacaactagcgcttgcgtctagctccttacaacaaccaattgcccaattgcaacaacaatccttggcacatctaacctttcaaaccatttcaacgcaccaactacaacaa

SEQ ID NO: 4429 - DNA, 283 bp, Zea mays
  Clone ID: LIB3117-002-Q1-K1-F9
cggactcatggggtttattcttgttaccatgtattaatgtaacaatctctatctcgatggagggttacttccagtcatgtgttggttttcctggagtcaaccaaacgttatttatttttgtgttaacgtcctaatcagacggatgctcttgggctaaacagattcaattctatccttgctgaataaagaacacacaattgtagccacataataacgtgatatataaatatttctttcccaactccttacagcaaccaattttccatttgctacaccaatcctt

SEQ ID NO: 4430 - DNA, 430 bp, Zea mays
  Clone ID: LIB3117-002-Q1-K1-G10
aaagaacacaatagaccactgatttcacaatgaaaagggagacaatgccttcatggctggaactgttgcttgcaacacaattctttacgacttgtgctaaccatcttcttgctagtcgcaatgaatgtaacctattttgcacccagtgtgagaccaaaccagctgctttctgtaactattgtcgttcaagtgatcattccacccaccgtgtaatccagataaggcgttcatcgtaccatgacgttgtgagggtgtccgagattgaggatatccttgatgtcagcgatgtgcaaacttatgtaatcaatagtgcaaggattgtattcctgaatgagcggccacaactgcgtgcttctagtgtccccatttgtaaagcacccacatcatcaacacatagctgtgagacatgtaaccgtgtgctacttgatgc

SEQ ID NO: 4431 - DNA, 412 bp, Zea mays
  unsure at all n locations
  Clone ID: LIB3117-002-Q1-K1-G11
aaaaaacacaatanaccactgatttcacatatgaaaagggagacaatgccttcatgggtcgaactttttatagcaacggagtcgctttacaacttgtgctaaccatcttcttgctagtcgcaatgaatgtaacctattttgcacccagtgtgagaccaaaccagctgctttctgtaactattgtcgttcaagtgatcattccacccaccgtgtaatccagataaggcgttcatcgtaccatgacgttgtgagggtgtccaagattgaggatatccttgatgtcagcgatgtgcaaacttatgtaatcaatagtgcaaagattgtattcctgaatgatcggccacaactgcgtgcttctattgtccccatttgtaaagcacccacatcatcaacacataactgtgaaacatgt

SEQ ID NO: 4432 - DNA, 290 bp, Zea mays
  Clone ID: LIB3117-002-Q1-K1-G12
gagttcctgagtcaccttgccaccatactcatcaccggcacaggaatcaaccctgcgtagcggccttggatcggtcgggatctacaaccgaaatcatgccatgcacgaccattgaatcttctggagtgcacccttcatcggagcgcagacctggctgccatctaccaccaggtgatcatcattgccatccacctcaagagcatgactaaagctgccgcggaactgccaagacatgcctgccagacctgaaggacgagcgctataatgtcgggctgaatgccttgattgac

SEQ ID NO: 4433 - DNA, 365 bp, Zea mays
  Clone ID: LIB3117-002-Q1-K1-G2
cttccggaacctctacttttcattgcctccattcttttgctaagagctgccatctttggcatcttatgggttctccttgggaaacgcgtgtggttcttccccaatataaatgcagaggagacaacatttagagaactggttcgtttttggcctgaaaaagatgaaggagagcggccaaagtggacatcaagacttttctatgctcttgttgctctattggtgatattactgcttaggcaccatgctccggacgaagcagctagagccaggtaccaaaagaaggtttctaacataattgatgatgttcttgaatggtccccgaagttagctatttctggaatgattgaaaaacacactggggctta

SEQ ID NO: 4434 - DNA, 457 bp, Zea mays
  Clone ID: LIB3117-002-Q1-K1-G5
ccgggtcggcccaacccgtccggacatgaaggagcgcctctgcctcgaggtcgagcgcctctcgctcagcgccgtcatcatggggagcaagggcttcggcgccgcgcggaggaccagcaagggcaggctcggcagcgtcagcgactactgcgtgcaccactgtgtctgccccgttgtggtggtgcgcttccctgatgacggctctgccgagggtggggaggccgctggtttgtccgccgcggttggtgctgaggatgtgctgcaccccgtgccggaggaagaaggcgagtaccatgacgctgcggaggagcacaagggtaaactgggtttctactcttatatttgcttgttgtgcatgtcataaggaggttgccttcatcatccatacgaaaatgcaccaaaatttaactcacaataacaatgggataggacaatgcccgcaacaaaattactatcg

SEQ ID NO: 4435 - DNA, 426 bp, Zea mays
  Clone ID: LIB3117-002-Q1-K1-H1
cccacgcgtccgcggacgcgtgggcacatcgccatggcagccaagatgtttgcattgtttgcgcgtcctagctctttgtgcaaccgccactagtgctacccatatcccagggcacttgtcaccactactgatgccattggctaccatgaacccatggatgcagtactgcatgaagcaacagggggttgccaacttgttagcgtggccgaccctgatgctgcagcaactgttggcctcaccgcttcagcagtgccagatgccaatgatgatgccgggtatgatgccaccgatgacgatgatgccgatgccgagtatgatgccatcgatgatggtgccgactatgatgtcaccaatgacgatggctagtatgatgccgccgatgatgatgccaagcatgatttcaccaatgacgatgccgaatatgat

SEQ ID NO: 4436 - DNA, 276 bp, Zea mays
  unsure at all n locations
  Clone ID: LIB3117-002-Q1-K1-H10
gaggagaggagaggagaggagaggttgggtctgggacaccatggctccgatgaagctgtgcggggcggtgatgtcgtggaacgtgacnaggtgcgcaacggcgctggaggaggctggctccgactacgagatcgtgcccatcaacttcgccaccgccgagcacaagagccccgagcacctcgtccgcaacccgtttggtcaggttccagctctgcaggatggtgacttgtacctcttcgaatcacgagcaatctgcaagtacgctgctcgcaaaaa

SEQ ID NO: 4437 - DNA, 174 bp, Zea mays
  Clone ID: LIB3117-002-Q1-K1-H2
cccacgcgtccgcccacgcgtccgcccacgcgtccgctaatggcgactttgtttgaacagggagtagcagacttttttgcggggttcgatttctctctctctctctttttcttttgtaattgtaacccttttttcacctttctggactggtataaaagtaagcctggactcgtc

SEQ ID NO: 4438 - DNA, 379 bp, Zea mays
  Clone ID: LIB3117-002-Q1-K1-H3
ccttgttgtaacagcaaacaaggtgaaatcaaggggctgcggacatatgatggctgcgggggctggtttctcattatcgtcagcgtcacatggatctacacttagagatggcagatggcaaaggggcccgattccccttttttttgcggggaattcctcttgtttggttaggtatgaattggtgggaatttaagtggaatccactcaaattctcattaatccacccgtaaccgaacaagcctagaggtgatgaaaaatgttcttcctccacagagatgtaatccacccataactgaacaagcctaaaagtgatgaaaaatgttcttcctccacagagatgtaaacggagaaaaaattatctccgcggataaagagagat

SEQ ID NO: 4439 - DNA, 333 bp, Zea mays
  unsure at all n locations
  Clone ID: LIB3117-002-Q1-K1-H7
ggaaaaccggccgacccacgcgtacgaccacacnttctactgctactagccaaattttcatccaatcccaaacaacaacctgcgctgcccttttaatatctttagccaccctcactacaactctcaataaccatggttcctcattaaccataattacacccttctctacaatgacaccaagtgtcctctcctttatccactaaccggctaccctcaccctcatagaccttactactgtgccgtcggagccaacaattcctacaccccttacatcgtgcacgctcactacaatgactgcctctacgaccccatcgacatcaatgacatcaactc

SEQ ID NO: 4440 - DNA, 200 bp, Zea mays
  unsure at all n locations
  Clone ID: LIB3117-002-Q1-K1-H8
cactaatnctacccatatcccagagcacttgtcaccactactgatgccattccctaccatgaacccataaatgcagtacttcatgaagcaacaagtggttgccaacttaatagcgatcccgaccctgattctgcatcaactgctgacctcaccgcttcatcagtgccagataccaatgattactccgggtatgatgccac

SEQ ID NO: 4441 - DNA, 303 bp, Zea mays
  Clone ID: LIB3117-003-Q1-K1-A1
cacgcgttccgaaatactcacaatttctatatgatgtatgcaaattctacttggggtggggcacccaatcttatggggctcctcttaatttccttcacaaaccggtcatcttttcctcgctaattcgttcggaacttttcacattcaaaaaaggccttgttaagattgagacccaaggcatattcatttggcatactttcatagacatgtttctgaaaaaatcgtactcataaaaccctttgactggctactcacccaattctttctcattgaccgtctattttcccaaaatggtcacctttt

SEQ ID NO: 4442 - DNA, 286 bp, Zea mays
  Clone ID: LIB3117-003-Q1-K1-A10
cacttactcacctactctctatttttcacctacttcacatcatctctagagccttttacaactttggctaacgtaactacataccatcaacaacaacatcttcaacaatttattccaattctcagtcaactatccatttttaaccctaccttctacctacaactactttcatctatcccactctcattttcaattcacctacttacctacaacaacaattacttcaacaaattttaccaactctcactcatctatcttattcaaacccttctacctacttacaaca

SEQ ID NO: 4443 - DNA, 334 bp, Zea mays
  unsure at all n locations
  Clone ID: LIB3117-003-Q1-K1-A12
atcactnatccacctatccttcatcaatcctttcacctacttccaacatcatctactggaagacttttttaaaactgttgctaacccaacttcatactatcaacaacaacaactacaacaatttattccatttctcactcaactaaccatccttaaccattccttctacctacaactactttcatctatccctctcaccaaaatcaattcacctacctacctacaacaacaatttctacaacaaattacaccatctattactcatctatctctttcaaaccctactacctacttacaacattttcttacattcaaccaactttctttatcaaac

SEQ ID NO: 4444 - DNA, 295 bp, Zea mays
  Clone ID: LIB3117-003-Q1-K1-A2
cgcaaattgcaccaagaaatccatcgagaggccgtcgacaggggaattaatggcgtcgtcgtctagcagcagccaccgccgcctcatcctcgcagccgccgtcctgctctccgtgctcgcggctgccagcgccagcgccgggacctcctgcgtgccggggtgggccatcccgcacaacccgctcccgagctgccgctggtacgtgaccagccggacctgcggcatcgggccgcgcctcccgtggccggagctgaagaagagatgctgccgggagctggcgggcatcccggcgtac

SEQ ID NO: 4445 - DNA, 443 bp, Zea mays
  Clone ID: LIB3117-003-Q1-K1-A3
cccacgcgtccggaagtacgcacagttcctatgtgatgtatgcaagttctacttggactgggacaccgagtcttatggggctcctgtgattttcctccacgatccggtcagctttgccgcgctagttcgtccggagctgttcacgttcaagaagggcgtggtgagggtggagacgcagggcatctgcgtcgggcatacttccatggacatgttgctgaagaagtggaactcagagaacccgtggactggctactcaccgatttcggtcgcatggacggtcgatgtgcccaaggtggtcgcgtttgtgaaggagctcgtcaccaagccgtgaaccaagttaactaacgtgttgtggtctcgcgcaccagatgtgcagcaaatttgagatgtcgatatatttactcacattcgaagcactgcaaacactattatctcaatagttg

SEQ ID NO: 4446 - DNA, 419 bp, Zea mays
  Clone ID: LIB3117-003-Q1-K1-B11
gcctactctcagcaacaacagtttcttccattcaaccaactagctgcattgaactctgctggttatttgcaacaacaacaactaccattcagccagctatctgctgcctacccccagcaatttcttccattcaaccaactgacagctttgaactctcctgcttatttacagcagcaacaactactaccattcagccagctagctggtgtgagccctgctaccttcttgacacaaccacaattgttgccgttctaccagcacgctgcgcctaacgctggcaccctcttacaactgcaacaattgctgccattcaaccaacttgctttgacaaacccaacagcattctaccaacaacccatcattggcggtgccctcttttagaattcttaagagttatagctcaatgattaaggcttttg

SEQ ID NO: 4447 - DNA, 419 bp, Zea mays
  Clone ID: LIB3117-003-Q1-K1-B12
taattccctctccagccactcctccaacctactctaatcaacaacactatcttcattttaaccaactaactgcatctaactctgcttgtaatttattacaactacatctaccattcagccatctatctactgcctacccccaaaaaattcttccattcaaccaactaacacctataaactcttctgcttattcacacctctaacaactactaccattcatacatctaaatccaattatccaatcttacattatcacacaaccacaattatcacccatctaacattaatcatcctctaacctccaacaacctcttacaactattacaacagctaccattcaaccatctttctttacaaaacatcaacacactctacctacaacccatcattctaggaaaccttctttacaactcttaaca

SEQ ID NO: 4448 - DNA, 419 bp, Zea mays
  unsure at all n locations
  Clone ID: LIB3117-003-Q1-K1-B3
gtagagagaaggaaaaatatccccaaaccctagctcccgatctcgatggcgaaccctggcggcttcttcgacatgaccgtcggcggcgccccggcgggccggatcgtgatggagctgtacgccaacgaggtgcccaagaccgcggagaacttccgcgcgctgtgcacgggcgagaagggcgtgggcaagtccgggaagccgctccactacaagggctccaccttccaccgcgtcatccccgagttcatgtgccagggcggcgacttcacccgcggcaacggcaccggcggcgagtccatctacggcgagaagttccccgacgagaagttcgtgcgcaagcacnaccgcccccgtttgctctccatggccaacgccgggcccaacaccaacggcttccagttcttcatctgcaccgtcgc

SEQ ID NO: 4449 - DNA, 438 bp, Zea mays
  Clone ID: LIB3117-003-Q1-K1-B4
ctgaagagaacaaactgatcacagtgaatcccgacaccaaggtcctgcaggcaatgcggcgcatgacagaaaaccgcgtcagacacatcccggtgatcgacggcacggggatgctggggatggtctccatcggtgacgtcgtgcgcgcggtggtggccgagcacagggaggagctgaaccggctcaatgactacatccagggaggctactaggacggcgtgtgaagcgacgaccccctccgatcctgccagtcagtgaagtccgcctttgaaatccaataactcggaacaatgatgatgacgaaataggccgtgttttcttggacaatgatgttaagttcggcaatgttttcctttctcttttttcctactgcgtggtctatgtgtatattgccaaaggcatgcgtgagccatgcgccggccggtgctgtgctggggc

SEQ ID NO: 4450 - DNA, 351 bp, Zea mays
  Clone ID: LIB3117-003-Q1-K1-B5
gacaagcgtacgatcggtcctacagcgcatgctgtagcatcagtcgcaaagcgggcagcgcgcggggctgatcgacagcgcacagcgcccacgaactgacagccatgagcaggctgcagcagtccactccatgcgcctacgctactgccggcagcgtccgccagtggagaaactacgagctggacgatagccagtggctagctagctagatcagccatgtatcgatgatgattgagtaataatgtgtcacgcatcaccatgcgtggaagtgccagtgcgagcaatgacctgaatgaacaacttatatggaaagaaaaaagtcttggtgcaaatcgagcacaaacgggcagc

SEQ ID NO: 4451 - DNA, 427 bp, Zea mays
  Clone ID: LIB3117-003-Q1-K1-B6
tggtagcaatgttccttgcacaagccatgttgtgggatcaaattactgcttcatgaatgtgtatgaggatagaatacctggaagggccatcatcatctctgtcatagataatcttgtgaagggagcatctggtcaggctttgcaaaatcttaatctgatgatgggactgcctgagaatatggggctgcaataccagcccctgttcccttgatcttttgtgtcattatctattattacattatttaggagtccagaaaccaaattatcattactgtcaagaggtggcaaggagcctgacatcagaattcagtcaagtcgaagttagacagttagtgtagcttggtctgtgttgttctagctttattaaaccattaagagaatcatgatgatggcaatctagcagtacaatggtagtaatatgtgggca

SEQ ID NO: 4452 - DNA, 398 bp, Zea mays
  unsure at all n locations
  Clone ID: LIB3117-003-Q1-K1-B7
cgtccggagagagaaggaaaaatatccccaaaccctactcccgatctcgatggcgaacccgggcggttcttcgacatgaccgtcggggcgccccggcgggccggatcgtgatggagctgtacgccaacgaggtgcccaagaccgcggagaacttccgcgcgctgtgcacgggcgagaagggcgtgggcaagtccgggaagccgctccactacaagggctccaccttccaccgcgtcatccccgagttcatgtgccaaggcggcgacttcacccgcggcaacggcaccggcggcgagtccatctacggcgagaagttccccgacgagaagttcgtgcgcaagcacaccgnccccggtttgctctccatggccaacgccgggcccaacaccaacgggttc

SEQ ID NO: 4453 - DNA, 358 bp, Zea mays
  unsure at all n locations
  Clone ID: LIB3117-003-Q1-K1-B8
gccagcagaaagatcttgcggaaggtggcagacgcatagatgagggtgagagcatttggcggtagcgcttgacgagcgacgagtaaaccctaatgctttgatcgcggcggcgtcgtttgggacactcccgaatcgatccgcctacatgcctatgaatcctcctcccccgccgcctcctgggtcggcgtcttcggcgccggcggggcccagctacttccctctccctttccacctgcagcagcaccagccgcagccgcagatgccgccgcctatggcggcgagcagctaccaacagtaccagcaacagctgcatcaggcgcatcagctcttncagcgggacgcgcagaccatacccccg

SEQ ID NO: 4454 - DNA, 387 bp, Zea mays
  Clone ID: LIB3117-003-Q1-K1-B9
tcctaaacaactaccaacatagaaagcacaatactatacctacaatggcagccaaaatattaagcttgggtattctcctaaatctgggtgcaagtgttgctacctcaaccatttttccacaatgctcacaagcttctatagcttcccttcttaccacatacctctcaccaactgtgtcttcaatgtgtgaaaacccaattgttcaaccctacatgatccaacatgcaatcgcaacatgcatcttaccattatcacccttgttactccaacaaccatcagccctattacagcagttacctctgatccattaggtggcacaaaacatcaatacacaacaactacaacaacttgtgctagcaaaccttactgcatactctcagcaacatc

SEQ ID NO: 4455 - DNA, 439 bp, Zea mays
  Clone ID: LIB3117-003-Q1-K1-C1
gtggaatcctgctgtggaagaacaagctgtcatgcgcatccatcgaattggtcaaacgaagactgtttctatcagaagattcatcgtgaagggcactgtcgaagaacgaatggaggctgtgcaggctcgaaagcagcgaatgatttctggagctttgactgaccaagaagtccgcactgcacgtatagaagaactgaagatgcttttctcctgagactacaaaagggctgttgtgcatcggatggtcggcaattcggcatggctaaaacaagatggctggtagccagaatgttggaaggtaagacgagggtaggaaattgcacgcccaaatatcttggcgtttagctgctgttgtgcgcacgatttgtacatcatgaatggttaatggctgacaagagtccaagacgcttcattgagtgaaaatcgaaagcatcatctc

SEQ ID NO: 4456 - DNA, 380 bp, Zea mays
  Clone ID: LIB3117-003-Q1-K1-C10
gcaacatagaaagcacaatagtgtaccaacaatggcagccaaaatattttgcctccttatgcggcttggtctttctgcaagtgctgctaccgcgaccattttcccgcaatgctcacaagctcctatagcttcccttcttcccccgtacctctcaccagcggtgtcttcggtatgtgaaaacccaattcttcaaccctataggatccaacaggcaatcgcagctggcatcttacctttatcacccttgttcctccaacaatcatcagccctattacagcagttacctttggtgcatttattggcacaaaacatcagggcacaacaactacaacaacttgtgctagcaaaccttgctgcctactctcagcaacagcagtttc

SEQ ID NO: 4457 - DNA, 453 bp, Zea mays
  Clone ID: LIB3117-003-Q1-K1-C11
ccgatcggcgtgccgcgtgcgtgaggcgatcggagcatcccgtcccgaggaggaagacaggcggcgacgcggggggaacatggggaagacgccggtgcggatgaaggcggtcgtgtacgcgctgtcgcccttccagcagaaggtaatgccggggctgtggaaggacatcaccaccaagatccaccacaaggtcaccgagaactggatctccgccacgctcctcctcacccccgtcgtcggcacctaccaatacgccatgtggtacaaggagcaggagaagctttcccacagatattaaatgcgctgcccttgacagacagcactcggagttttcatgatgggtttcataatcctcccatgatgatttaacatttgtttgatcaatttcagttcaacgccttttcatcgttccatatgcatatatggtatccgtgtctggcaaacttattttga

SEQ ID NO: 4458 - DNA, 129 bp, Zea mays
  Clone ID: LIB3117-003-Q1-K1-C12
ctaggatctctaaaggttgggtgctaagatttctacttgtttaccgttgtgaatttcacaagtgatatctgatcctattactatcatgatgacgtcaaatttgcttctggtttctaccctttggtttgc

SEQ ID NO: 4459 - DNA, 439 bp, Zea mays
  Clone ID: LIB3117-003-Q1-K1-C2
gcaaccacgatactactcaatttcatcatctccaaagatggctccctccagaattcatgtgacatgtgcattagtttatgggccttcaccaacaggaaggatccaccaaggagtttgttcaacatggatgaagaatacaattcctctggaatatagcgaagaatgcagctgggctcccatatttgtgaggcaatcaaatttcaagttacctgctgacccatccactccgattatcatgattggtcctgggacagggctggctccttttagaggtttcttgcaggaaaggttagcactgaaacaatctggagcagaactgggcacttcaatccttttctttggatgcaggaaccgtaatatggactacatatatgaagatgagctgcaaactttccttgaggagggggcgctttctgagctaattgttgcattctctcgg

SEQ ID NO: 4460 - DNA, 429 bp, Zea mays
  Clone ID: LIB3117-003-Q1-K1-C3
gcacctttatgttgttgtatcctactggcatctctagtgaagttggtctgatctacattggcttgccttacatgaaggcatcggagaaatactgtattaggatgcccaacaaatggaacttctcatacgattacttctattcatctgtccttgccctcctgatctatgttccaggaagcccacacatgtaccgttacatgctctcccagaggaagaaggcgctatcaaaggccaaagcggcgtgatgatgccgcgcaagcaagggaatcggtggactggtttgcgtgatggatgtcggaacgtgttcaagttttcgacatccccagtagaatctagtggtcgggggatatatattactagaatggggctcttcatatgaactgccccgtatgcgtaatgtgttgtaccggagtcatcatttcagatatc

SEQ ID NO: 4461 - DNA, 354 bp, Zea mays
  Clone ID: LIB3117-003-Q1-K1-C6
gcgtccggcaaccatccgccagcgcaagccgtggcgccgcaaggacggtgtctacatgtacttggaagataatgctggagtgattgtgaatcccaagggtgagatgaaaggttccgctatcactggacctatcggcaaggagtgtgctgatctttggcctaggattgctagcgcagcaaacgccatcgtttgagagcttgttggaatatgttcagacttctatatgatcatcttattatcagttgctaagagtgctattgggcttaatgggccctttatgtttgttcactcaattttgtagtaaacagaatttggtataccaaggggatctatatatcaatgtatgccataaaa

SEQ ID NO: 4462 - DNA, 342 bp, Zea mays
  unsure at all n locations
  Clone ID: LIB3117-001-Q1-K1-A1
gaaatcctagagaaggaaaagaaggagaagagtttggctaaaacagaaggtaggccagagcccgcgttgtatggaagcgagcacatccgtcctcctagcatagacgacttcaaatccgcccatgagcaggtttgcgcgagtgtttcatccgactcggcaaacatgaacgagcttctccaatggaacgacctgtacggcgaaggtgggtcgaggaagaggaaagcgctgagctacttcatgtgacggcgagagacataaaaccagaaggatcacaaccgcgccataaagccagaaggtatcgcagttgcgccatattgtacagccgccatagtacttnccccc

SEQ ID NO: 4463 - DNA, 340 bp, Zea mays
  Clone ID: LIB3117-001-Q1-K1-A10
cgtccaccggcttcgagatcaagttcaccgtctgacccccccgtcccgcgacaggttggcgggtcgccgcgcggtcttgaacggtctattcgtgcactactactgcgaatctgcgattaaagatcagaggcgacatctaatgtaccgtagtctgtttacctgaattcctgaaaagctttgctatctgcttgggttggaattcatgccagattgtgggtataaacctgtttccttactacctagtgtccaagtcggaatattaataagctatgccaggattcagatcgaaatatttctgtcaaaaaaaaaaaaaaactacataaatgaaaaagcaatgaac

SEQ ID NO: 4464 - DNA, 240 bp, Zea mays
  Clone ID: LIB3117-001-Q1-K1-A11
gttcttagaaactttatctgaaatcatggaccgtcacctccacaaggaatgagtttagaaattcagaataacttatctagttgctccagctgtatccggtttgttgtaagtattgtagacaaggggtgtcaagggactaatgatttcatttgtttgtatcctctcaaatgatttcacttggttgtaattgctcgagtactttgcttatgcacattttgtgaataatatatttgtttggtt

SEQ ID NO: 4465 - DNA, 383 bp, Zea mays
  Clone ID: LIB3117-001-Q1-K1-A2
cccacgcgtccggcaagatgctttatgcaagctcaaaccaaaaattcaagagtgggctcaatggggttcaggtggaactgcaggctactgatgcaagtgaaatcagccttgatgagatcaaggatcgggctcgctaggcatcatgatcatgcatcatggactcggcctactactgtggatttgtatgccattatagacttggtgctgtgaaagactgcttgatgatttgcgggtttgttgctgtgtaaaaaaaggtcccatggctcccagaagaccatgaaggttcggatctatcatgtaattccttgttatctgccaattatgtatggactatggacatgtgttgcgctgttcaacttactactaccaataagttatcgatt

SEQ ID NO: 4466 - DNA, 431 bp, Zea mays
  unsure at all n locations
  Clone ID: LIB3117-001-Q1-K1-A3
cccacgcgtccgcccacgcgtccgattccaaagaaaagggttcgcttttgaacttggctttggagtgcattagggataaccgaaacatgtcttgtttgcttgatcctaacttgaaggatcacaaagaaaaggacctagaaatcatatgtgatttgctctatgaatgcatccaaagcgatccgaagaagagaccaaccatgagggaggtcaccactagattgcgagaagtactgtcaatttcgcctgaggctgcaacgccccggttatctccactctggtgggcagagcttgagatcctttcagttgaagcaagctagcgaaaatgttctttggttgcagcaacgaagtacttgtgcatattgtaatgcaaccctgtacatnccttgtgtatggtttcatcttgtggtgtaactttggtgtctgcgtgctac

SEQ ID NO: 4467 - DNA, 375 bp, Zea mays
  Clone ID: LIB3117-001-Q1-K1-A4
gtccttaccatggacaccaaggaacaccaatcaaagtttcatatttcagttacaaacactgatgatacttgtttggatgcatctgctggtcgaaggcagactgcctcagagatcaggcttcctatgttctctgcatgcaggtggcatgcaaaacagatgtgggagttaaatgcgaatggaaatcttgtgagcagctattcaaggttatgtgccacagtggaatcaagggacgaaggaggtatatattacataacttttttattttgaactaagtgacatcactatattttcctatgaaatataggtaccagtggaggtcgggcatggattgcaactggaagtgaaaggagaatctatctcgcatttttaatctcg

SEQ ID NO: 4468 - DNA, 317 bp, Zea mays
  Clone ID: LIB3117-001-Q1-K1-A5
atttgttgccattttacccacaagttgtgggaaacattaatgccttcttgcaacagcaacggttgctaccattctacccacagaatgtggcaaacattgttgccttcttacaacaacaacaattgctgccatttatccaacatgctttgacgaatcctaccaccttattgcaaccgcccaccattggtggtgccatcttctagattttttatgatttatactgtaataataaagttctcatgctgatatgtgcgacctctcagtaataaagtattagagatctatattttaaaataaaatataaagaccaatgatag

SEQ ID NO: 4469 - DNA, 330 bp, Zea mays
  Clone ID: LIB3117-001-Q1-K1-A6
atcagtcgccattatacccacaagctgttttaaacattaattccttcatgcaccatcagcggtggttctcattctaccggcagaacgtggcaaacattgacgccttcatacatcaacatcactagctgccatttatccaacatgctttcactaatcctaccaccttattccaaccatacaccattgatgatcccatcttctagattatataccacttatacagtaatggtctagttattatgctaataaatgcgacctctctgttataatatcttacatatctatatcttaaaatgaaatacatgtaatatttgctattatatatattct

SEQ ID NO: 4470 - DNA, 217 bp, Zea mays
  Clone ID: LIB3117-001-Q1-K1-A7
ctgatatcggttagatgctggtatagaggaaatctgagttttggcagcacgacctatttgtgcatggtgcttctgcttcatgctgttaggtccattgtatcgaatatgccgttgagatggcacccccatgtattttattcctgtaatgtttgtaattattcttcctggtgcgaaaacaatcaattgttaaatcctagtatagacagaactttccgtt

SEQ ID NO: 4471 - DNA, 436 bp, Zea mays
  unsure at all n locations
  Clone ID: LIB3117-001-Q1-K1-A8
cccacgcgtccgctcagattgagatcctgaggaagaaggggcactcctactctgagatcatggacgagagcgtgattgagtcggtggactcgctgaacccgttcatgcacgcccgtggggtcgccttcatggtggacaactgctccacaacggctcgcctaggatccaggaagtgggcgcctcgcttcgactacatcctgacgcagcaggccttcgtggcggtggacaaggacgccccaatcaatcaggacctcatcagcaacttcttgtcggacccagtccacggtgccatcgaggtctgcgctgagctgaggcccaccgttgatatctctgtgcctgccaacgccgactttgtgcgcncggagctccggcagtcttcctagattgaagcagtgagcggagaaggagagagaaagagaggatttcgtgtcccgag

SEQ ID NO: 4472 - DNA, 361 bp, Zea mays
  Clone ID: LIB3117-001-Q1-K1-A9
cgacgacctgtaccctctgagctacatgtccaagcccaagcgcctgcacactcaaccagagggcgacgacgacgacgggactgcgcaggacggcgcgagaaggaacgggcgcgagagcagagatactggggcctcgaaacgcggctcgggaggcggagggggagggggagggggaggaggaggcataggagccttcatgggatgggtggctaaaacggcggtcatggtggtgggcagccgtctggataatgaaggccgatggatacgagtccgggacatggcggaacggcggcgccaggctggacattgcggatctgttctgcggcggtggtggtatgcaggcagcggcggcgagcggcgg

SEQ ID NO: 4473 - DNA, 321 bp, Zea mays
  Clone ID: LIB3117-001-Q1-K1-B1
tttcgaccgacgcgtacgcatacgcgtgtatctataaatcctatagtattattaagaacgagaagagtttgactaaaacggaggatttatcataacccgcgtgtggatagaatcgagcacatccgtcctcctatcatagactacttcaaatccgcccattagcacgttttcgctagtgtatcatcctactcggcaaacattaactagcttctccaatggaacgacctgtacagctaatgtgggtcgatgaagaggaaagcgctgagctacttcatgtgactgctagagacataaaaccagaaagatcacaacctctccata

SEQ ID NO: 4474 - DNA, 433 bp, Zea mays
  Clone ID: LIB3117-001-Q1-K1-B10
agaaccttcttaaaatgggtcctattggccaggtcttctctatgttgccagggtttagcgctgaactaatgccaaaaggacatgagaaggaaagccaggctaagattaagcgctacatgacaatgatggattccatgactgatgcagagcttgacagcacaaatcctaagttgatgactgaatcacggatcattcggattgcacgggggtctgggcggcctgtcagggatgtcatggacatgctggaagagtacaagcgacttgctaaaatctggggcaagatgaagggtctcaagctccaaaagaaaggggacatgagtgcactgacccgcaacatgaatgttcagcagatgagcaaggcccttccttcgcagatgcttaaacagaatggtggcatgggcggtctgcagtctctgatgaaacagatgggatc

SEQ ID NO: 4475 - DNA, 266 bp, Zea mays
  Clone ID: LIB3117-001-Q1-K1-B11
tccaccttcaagaaaacgatactatttgcccttccaactctatgcagacacatataggctcgatactaataccaaaaggacatgccacgtaaatccaacctctaacaaatcgctacatgacaatattgtattccatgaccgacacttatctctatcgcacaaatctaaaattgacgactgaattacgcatcatacatattgaaccatatcatgctcaacctttgatcgctaccatttacatactaatacattactagataattgct

SEQ ID NO: 4476 - DNA, 366 bp, Zea mays
  Clone ID: LIB3117-001-Q1-K1-B12
tttatctcagatggttgcttactgagagaatgcaacatcgagcattctgtgattggagtctgctcacgtgtcagctctggatgtgaactcaaggactccgtgatgatgggagcggacacctatgaaactgaagaagaagcttcaaagctactgttagctgggaaggtcccagttggaataggaaggaacacaaagataaggaactgtatcattgacatgaatgctaggattgggaagaacgtggtgatcacaaacagtaagggcatccaagaggctgatcacccggaagaagggtactacataaagtctggaatcgtggtgatcttgaagaatgcaaccatcaacgatgggtctgtcatatagatc

SEQ ID NO: 4477 - DNA, 339 bp, Zea mays
  Clone ID: LIB3117-001-Q1-K1-B2
cccacgcgtccgcttgatgctgcttttgctgatgaagagattgatatcgaggcgaaggttcttcgcgctggcaaggcagtaggggttgccgttgtggaactgaagaagaaatctggcaaaatcatcgcccaagctcgctactccaaatatcttggtgttagtaaactctgaatcatgatgctgcctcccatatatacggggatatggtagcagcaagcaagcagggtgtggtttggttcgacagcaagtgttgttactactctacattatatcttggtgttagtaaactctgaatcatgatgctgtattactgttactcaacccatatctcaagctcct

SEQ ID NO: 4478 - DNA, 328 bp, Zea mays
  Clone ID: LIB3117-001-Q1-K1-B5
cgcacactgcaccaagaaatccatcgagaggctcgtcgacaggggtattaatggcgtcgtcgtctagcatcagccaccggcggctgattctcgcagccgccgtactgctctccgtgctcgcggctgccagcgccagcgccggtacctcctgcgtgccggtgtgggccattcagtacaacccgttcccgagctgtctgtggtacttgaccagccggacctgcggcatcgggccgcgccttccgtggccggagctgaagaggctatgctgcctggagctggctgacatccctgcgtactgtcattgcacggcgctgagcatcctcatgga

SEQ ID NO: 4479 - DNA, 439 bp, Zea mays
  Clone ID: LIB3117-001-Q1-K1-B6
actctcgcggctctcgccagccagtctagggtttcggtcccggcgtgcttatccgcccccggcggccatgtcgaagcaaggagggaaggccaagccgctgaaggcgcccaaggccgacaagaaggagtacgacgagacggatcttgcatatctgcagaagaagaaagatgaggaaaaagcactgaaggagcttaaggccaaggcacagaagggcgcgattgggggctcgggtctgaagaaaagtggaaagaaatgagactggtcacccgtctccaatacctagaggatgataaggcagctgtctatctgtgttgcgcttcactaagtgtgattgtaacagtggtacctcttgtgttctgtgttccgcgatgttgcagttggttgcttgatcgaaagatgtttcaacctcccatctgctagctatgatacagatggtccc

SEQ ID NO: 4480 - DNA, 429 bp, Zea mays
  Clone ID: LIB3117-001-Q1-K1-B7
gtgggaacacaagagcaaagtccctgggaagatgcatggatgtggacatgatgcacatgtggctatgctgttgggatctgctaagattcttcaggagcatcgtgatgagttgaagggtacagtagttcttgtcttccaaccagctgaggaaggtggcggtggggccaagaaaatgatagaagacagagctgtggaaaacatagatgccatttttgggcttcatatagctgactctgtgcctattggtgtgctggcatccaggccagggcctattatggctgggagtggattctttgaggccgtaataagtggaaagggaggacatgctgcacttcctcatcacactatagatccgatattggctgcctcaaatgttattgtgagccttcagcaacttgtttctcgagaagctgatcccttggactcaca

SEQ ID NO: 4481 - DNA, 436 bp, Zea mays
  Clone ID: LIB3117-001-Q1-K1-B8
aagatgctggaatcctactggctggaggaggaagatgatgccatgccctcaggcgacaatggccagaatggcttcaactttgggaaccagccctctgttccatcaggtggattcaactttggctgaagatgcccatttggaatggccgctgtgccattatgccttggctagtgctctgggctagtcagaggtgtggggtagcggcgtcaaccaagtcatggttgagtcccattggtctggtctcagggagttgtcatgtcagtcccagtcagcagggtcagtccttgggctgcattaccagtggtgcagcttggtcggtggtcagtcttgaaggtcagccggttggatcatttgggctcttgctcccaccagcaccacctctggtgggaggcatcaagcatggagtcgcgggtgttgtctggagttgggttttgcc

SEQ ID NO: 4482 - DNA, 365 bp, Zea mays
  Clone ID: LIB3117-001-Q1-K1-B3
aattaccgggtcgaccgacgcgtacgcccacgcgtccgcttgatgctgcttttgcttattaagagattgatatcgaggcgaaggttctgctctctggcaaggcagtaggggttgccgttgtggaactgaagaataaatctggcaaaatcatcgcccaagctcgctactccaaatatcttggtgttagtaaactctgaatcatgatgctgcctcccatatatacggggatatggtagcagcaagcaagcagggtgtggtttggttcgacagcaagtgttgttactactctacattatatcttggtgttagtaaactctgaatcatgatgctgtattactgttactcaaccatcatctcagctactt

SEQ ID NO: 4483 - DNA, 208 bp, Zea mays
  Clone ID: LIB3117-001-Q1-K1-B4
cggacgcgtggggaacaggcagcctacgcactaagcctgtgttctgtcgttggtgcccatagtctcagcttatatttatccaatgtctccaacagttttgagacttgttagaactagagcaaatcgtgttaagatgttgccgtttgtcattctatagcaagaattccatgacaaagattgcttggcacttgattgctgctttgtttgc

SEQ ID NO: 4484 - DNA, 376 bp, Zea mays
  Clone ID: LIB3117-001-Q1-K1-B9
gtcctgaattcccgggtcgacccactcgtccgtactgctgcgagaagactacagaagggggtctcgtgataccatttactttcacagcggttaggtatttatagttaagtgtggagtgcaatgcaattcaatgcctgatattcgcttctttacttgttggattgtcctcatcttctctcatagcaatcaaatcacacttccatcttctcatctcgtaaaccctataccctggtttcagtgacatcgatatcgatcgaacatggatgatgactaccatgtgatcgtattgggcactgatcttaaggagtgcattctcagtcttcttctctccgtagatggactcatggctctgcacatggtcaggtatgactattac

SEQ ID NO: 4485 - DNA, 65 bp, Zea mays
  Clone ID: LIB3117-001-Q1-K1-C3
gtagtatctatcatattggtacccctgttactgagtataattttgttttcatatccaaaaagaga

SEQ ID NO: 4486 - DNA, 296 bp, Zea mays
  Clone ID: LIB3117-001-Q1-K1-C6
cccacgcgtccgagcgcatcaagaagaccatggatgagaagaaggcgaagaaggctgaggggtccaagtcccagaaggcgcagacgaagggtgctgttcagaagggttccaaaggccccaagttgggtggcggcggtggcaaacgctgaaaaggaacgaagtgtcattccgagacctcatcaaagccacctttgtagtaccttggttaattttgtattttctttcagagttacttgtgactcttaattttgcatctttatatattgggagaaatgatcgccgttcgttcatatgaa

SEQ ID NO: 4487 - DNA, 373 bp, Zea mays
  Clone ID: LIB3117-001-Q1-K1-E10
tcggtcctgaattcccggttcgacccactcttccttcctctcgtccaacactactcaaggatgcatttactcttccacctcatcatcctatagacgggcatttttctatattcgtgctcccaaatcaaactccacttccactaatcatattcgattctactctcctattcacatacctctttgcacattttacacattcatactctcatgccaaattcatcatatcatctcactattaaacgccattactctactcactctgacttaacattatatcacatcccataaatcttcaccctatatcttcccccaaacgataacctcatactctttcctactatcaatgcaaaactccacgctaactctaactttc

SEQ ID NO: 4488 - DNA, 400 bp, Zea mays
  Clone ID: LIB3117-001-Q1-K1-E5
ttaaacgccaactcagggagagtttttccaagcagataaaacagtcatacaggtcaatgtttttttatagcatttcagtttagttcgttggaaagcagcttgttacgatgcctgaaacagctccacagtccgttgcggttgtagacgctgcaaagaaagtaattgggagacagttctgcctatatatgaatgcttacctcctcaagctacataacagcaatgggtgataagtaggtctaagcgcaccattgacactgattcctcacaaaatcgcccactattcacagctaatatcgcctataggcccttccaagatcatcatgcctctcatgttgaaactcaccatatgctgcatgagcctttggggctgaatagctatcagaagcatacggatatgtgc

SEQ ID NO: 4489 - DNA, 68 bp, Zea mays
  Clone ID: LIB3117-001-Q1-K1-F1
caataataaagttttttggatgatgtatgtggccaaccagaaataagaagttacatttccagattcta

SEQ ID NO: 4490 - DNA, 307 bp, Zea mays
  Clone ID: LIB3117-001-Q1-K1-F10
cggacgcgtgggctactaccatttagccagctagctgcagcaaaccgtgcttccttcttgacacagcaacagttgctgcctttctaccagcagtttgcggctaaccccgcaaccctcttacaactacaacaattgttgccctttgtccaacttgctttgacagacccagcggcctcctaccaacaacacatcattggtggtgccctcttttagattgcttattagttgtaattcaataataaagtcttttggatgatgtatgtggccaaccagaaataagaagttacatttccagattttaatgtga

SEQ ID NO: 4491 - DNA, 68 bp, Zea mays
  Clone ID: LIB3117-001-Q1-K1-F2
caataataaagttttttggatgatgtatgtggccaaccagaaataagaagttacatttccagatgcta

SEQ ID NO: 4492 - DNA, 300 bp, Zea mays
  unsure at all n locations
  Clone ID: LIB3117-001-Q1-K1-G10
attcccggttcgacccactcttactcacacgcactcttactgctacaagactacttctntactgtcactaccaatattcatcagacagaattctaaatctacacactaagccaatttcacattattattatcactacaacattcatatcaatctatcattaatcctactttacaataaaaaaaattacactacactctatccttacttatattaaatatatcaactctagtacctacctctactatactaaatcatacactatcgtcgataaaccatatacatcccgctactcatcacca

SEQ ID NO: 4493 - DNA, 104 bp, Zea mays
  Clone ID: LIB3117-001-Q1-K1-H10
gttttgcattctggcaccttgcgttataaaattcatttgagtaaaaaaaaaacaaaggaaaggaaaaaaaaaaaaaaaaaaaataaaaaaaaaaaaactaaaaa

SEQ ID NO: 4494 - DNA, 299 bp, Zea mays
  Clone ID: LIB3117-001-Q1-K1-H12
ctcaaactatcttggacgtatcctactggttgattgaacattaatggatcatcttgggtcaggtctatctgtcgcaccgaaacttttaatcaaatcacatcactctttaaaaaaaaaaaaaacaaaaaaagaaaaacctaaacaaaggaaaacaaacaactaatactaaatatagataataacactaagggcatccgtactacagtatccaactttacctacccgtacatgcaaagtcactactgattgatacaatcacctaaatccaactgactggccgtggttaaacatcacacatc

SEQ ID NO: 4495 - DNA, 265 bp, Zea mays
  Clone ID: LIB3117-001-Q1-K1-H8
cccacgcgtccgctgggaaagtccttagggcctccgaagaaaaagcttctcatcttagagggtaatggtttacttgtggatatcaacgaagactaccacaacgctcacatggctgatgccaaggttcgaagaaaattagtattccgaaggccttactgcgatgattttctcaacttttgtgctctgaattttgagctaggcatatggtcctcaaaagaaaacaaacaaactaaaacaaacatatactataaaaggagtaaaccat

SEQ ID NO: 4496 - DNA, 149 bp, Zea mays
  Clone ID: LIB3117-002-Q1-K1-A10
gtaatctgaggttgtgcttaatgactgaatgaataagaatgacacaacagattacacagggaagcatttctgaatgtcttgatagcttcaaatttatacattgaatattgtggtaacaccaatttcattaggctgaccattcttttcaa

SEQ ID NO: 4497 - DNA, 165 bp, Zea mays
  Clone ID: LIB3117-002-Q1-K1-A6
gcatggtttgcgtcaacaagacgaagtttcaaagcttttgtagctgcataggctgctgcagcgtttttcagtcgtaactcgtgtgttcctgttcagggtcttcagcatgacataaatcgtttcagaagtctagtaatattattactatatggtgtcatgtcgtaa

SEQ ID NO: 4498 - DNA, 240 bp, Zea mays
  unsure at all n locations
  Clone ID: LIB3117-002-Q1-K1-B12
ggaatncccgggtcgacccacgcgtacgcccacgcatccgaccacacttacgtttctttattactgacctgaactctggatggcgtctgattgactatataactagacgtgcatgtgcccactttgtatgtacaggaccaattcccgtccataataaaaaaaaacttgttggggggtttttcttctaaaaaatacttaatgacaacacaaacaccaaacaaaaatataacattccataaa

SEQ ID NO: 4499 - DNA, 416 bp, Zea mays
  Clone ID: LIB3117-002-Q1-K1-B4
cgcgtccgcccacgcgtccgagcatacaaggagcaccactgctcttacatttttaggtggaaagatctggagattggaaaactagctatggagtatggtttactccagatcccatccatgccagaagtgaagcatcattctctttcactagagggatttatttctgttgatgatgttgatattacacaaatcaagtacaaggataaagctcgagaaaaacaacgcaagaaggcgctgaaaaggaaagcagaagaggaggctcaaaatccaaagccggagaggaagagacctccagagaagccggagaagccaaagcggaagaagacgggcaagcagcgtcagtcaatccaaactaaagaagacctggatgagctggcgcacgagtaccggcttctgaagaagctcaaacgtggaga

SEQ ID NO: 4500 - DNA, 419 bp, Zea mays
  unsure at all n locations
  Clone ID: LIB3117-002-Q1-K1-C12
ccggntccaaattcccggggcgacccacgcgtacgcggactcttaagcagacacttcgacgttctcttggggtcgccgcgaaacgctccagagagcttccttcaacatgggggggacacatactatggcagccgggcgcaagctcaagacccaccgcaggaaccagcggtgggctgacaaggcatacaagaagagccatttgggcaatgagtggaagaaacccttcgctgggtcatcccatgccaagggcattgtcctggagaagattggtattgaagccaagcagcccaactccgctatccgtaagtgtgctcgtgttcagcttgttaagaatggcaagaagattgctgacttcgtgccaaatgacggttgtttgaactacattgatgaaaatgatgaggtctcgattgctggatttg

SEQ ID NO: 4501 - DNA, 327 bp, Zea mays
  Clone ID: LIB3117-002-Q1-K1-C4
ccgggtcgaccgcacgcgtccgcgagaagctgattgatgactacaacagtgagcgcaagagtaaatgaattggtagctcgtgtgtgtggccatctggggagacattggctgtctagagaaatccctcaaagtttagcttaatctgaacaggcatttttgctatactgtaccggttgaccagtgaatgaatgatgttcgtctagacattaaccttggttcaaagctttctgtcgtgcccatggataactatccgtccgaatcctagaaacgtggtccgtgcttgtaacctgtttgttctggtgcttgcatacgcctgagcaatttttg

SEQ ID NO: 4502 - DNA, 401 bp, Zea mays
  Clone ID: LIB3117-002-Q1-K1-D4
ccggcccggaattcccgggccgaccgacgcgtccggcgcgaccgcctcaacaagatctaccagaagcacacgcgccagcccatcgacaagatcgaggagtgcatggagagggacctcttcatggatcccgacgaggcgcgcgactggggcctcatcgacgaggtcatcgagaaccgacctgcctcgctcatgcccgacggaatcgttggaggcctcgatgtgcccagcctcggtggcggtgggggcgggggcggacggggaagcgacgtcgaggagccttcggcggtgtgagaattggcctcaaaggtgaaatcccgttcgcatccggtggctctgttgtttgttgttagatctgaaagttcgattcttaccgtacaaggttaaccttgttattctggtta

SEQ ID NO: 4503 - DNA, 286 bp, Zea mays
  unsure at all n locations
  Clone ID: LIB3117-002-Q1-K1-E11
acccacgagaacgatttcacatatctccttccatcatcactttctaaactgctctantataaacattcggcgccgaattaaaaactttgaccaccgccaaaaaaaacaaaaaaaaaaacatctcgcccaccccttctacagaatccaaacttacctactcctccatacaacatcataactcttctatacttccacctaacaacaatttactgcccttctttatacaacctcctaactctcaaaaccctgacaaaacccaacttaatcatcttcaaacatatccccc

SEQ ID NO: 4504 - DNA, 372 bp, Zea mays
  Clone ID: LIB3117-002-Q1-K1-E3
aattgccgggtcgacccacgcgtacgattgcacgcgcctcaagttattagtggacagcagatcggtcgagagaaagccatcggggagtgaacaagctccagcacatgttgcaaaggatgcagctaccatccgctctcaccaacaagggcaacagagacctcagaacttgtcgaggcaggaattcttggacaggtttaagaggagcgctggactggtcgcttcaggtgttgcgaagaatctaaacaaaacagccaattatatcaaagaaaatattcaggacatgtacaccgatcgtcgtccaccaaagtagcaaccatgccgagtgattgtcgtcaagagctgaaaaaatcgcttgctactggaaactttaca

SEQ ID NO: 4505 - DNA, 409 bp, Zea mays
  unsure at all n locations
  Clone ID: LIB3117-002-Q1-K1-E6
cggnccggaattcccgggtcggaccacgccttccaagggcctacatgttcgtccacaacggcctggtccaccgccgttttccggtcggccccatgggcgacgtgccctacttgcgccgagtggctgcctcgcacaagatacaccacatggacaagttcggcggcgtcccgtatgggctcttcctgggaccaaaggagctggaggaggttggtggcctggacgagcttgttagcagtccggtgagtgaagctactgatactgaagacgcaggagaagaaaagacgcgtccagttgtatgcgttgtccgaacaagcgtgttcatgggccagagtgtgccaaatgagttctagctttaagcgagtgggccaaatgagtgtgggctgcgtcccaaggtagtataagtactatg

SEQ ID NO: 4506 - DNA, 432 bp, Zea mays
  unsure at all n locations
  Clone ID: LIB3117-002-Q1-K1-F4
cggnccggaattcccgggtcgacccacgccttcgggaacctattttccaaggaatacctgcagtcccatcctcaacttctgaaggactacaagagcggctctgaaaagacgagttttctatatcccagtgctgttgacaggttccgtaggcaatttgctagcttagaagaaaatggagagaggaatgccacgcttgacaggaaacatgtttctctcccaaggacaacaaccgttcactccactccaattcctgcaaaggaaggtccagcagcaacctcccagattgctcaaaggattccagcagctagaccaggaagagtggtaggcccagtattgccattcgagagcgcaagcgtcaccgatcaacacatcgcccgacgggtggcaaggaacccagcttgtcctccagcaacgaacacctcgtcagtctac

SEQ ID NO: 4507 - DNA, 405 bp, Zea mays
  unsure at all n locations
  Clone ID: LIB3117-002-Q1-K1-F5
cggnccggaattcccgggtcggcccaagccgtccggcacttgcaaaaagaccaaggaccataaggaggcaaaatatcagggcacaacaactacagcggcttgtgctagcaaaccttgctgcctactctcagcaacagcagtttcttccattcaaccaactagctgaatggaacttggtggtttattgcacaacaactaccattcaggcagctagctgctgcctacccccaacaatttctttcattcaaccaactgggatgattgaactctcctgcttatttacagcagcaacaactactaccattcagccagctagctggtgtgagccctgctgccttcttgacacaacaacagttattgccgatctacctgcacgctgcgcctaacgctggcacccttttacaa

SEQ ID NO: 4508 - DNA, 404 bp, Zea mays
  unsure at all n locations
  Clone ID: LIB3117-002-Q1-K1-F8
cccacgcgtacgagcattcaaaaccacaccaacccaatcttactaacaacaacctaacaccaatggctacgcacgatattatccatacttgcgcttctatcccttttactgagcgcaacanatgcgttcattattccacactgctcactagctcctagagccagtcttccacagacactcccaccagttacttcactgtgcttccaacatgcaacctctcagcctacaggctaaactagcgcttgggctactctctacacaccaattgccaatgcacaacatccttgcacattaccttacaacattgactcaacacacacacagatctgcatactgagcactaccgtgtgacctgcactactcacacatctctcatcaccactctctgcaactactcatacaca

SEQ ID NO: 4509 - DNA, 324 bp, Zea mays
  unsure at all n locations
  Clone ID: LIB3117-002-Q1-K1-G3
cttccggtttttggctcccttttcagggtcccgaccgctaggctagctgcagctcaggtgcttgtctgagggtgcctctgctcgttggcagccggatcgcctgctgttggtgcatctggtgattaataatactactatgacagagccatgctctgtgaagagtattagtagcagcgctcataaaagctacagttccgtctcttttctcagctatgtaaaacttccaaactgttcatgcttaaaactgagggttttcttggtgtgaaaaaaaaaaataaaataaaaaaaaataaaantnnataaaaaaaaaaaataaatattaat

SEQ ID NO: 4510 - DNA, 377 bp, Zea mays
  unsure at all n locations
  Clone ID: LIB3117-002-Q1-K1-G4
ccggtccggaaaaggnccggcgcgcgcgaacanccacacctcccgtttcttgctcccctttttttgtcccaaacggctagcttagctccaggtgangtgcttaaatgagggtgcgtctgctccttggcagccgtatcgcctgctgttggtgcatctggagatcaataatactactatgacagagccatgctctgtgaagagtattagtagcaacgctcataaaagctacagttccgtctcttttctcagctatgtcaaacttccaaactgttcatgcttaaaactgatggttctcttggcgtgaagaaagtatctaacataattgatgatcttcttgaatggtccccgaagataactatttctggaatgattgaaaa

SEQ ID NO: 4511 - DNA, 354 bp, Zea mays
  unsure at all n locations
  Clone ID: LIB3117-002-Q1-K1-H12
cggnccggaattcccgggcggaccaagccgtccggcaaaccgaaggtcctggcattggcagtttcactgcaaaatccatgcttaagaagggggggatgttcaacagctacctggaggagattagcgcggtgcantcagattgggtgattgcagatgagcacttacaagcagatgttaagtcagcgatagtggattctgttatgcctgcatatagaggcttaattgggagattgagatcatctcctgaagctgcccgagacttgttcatcaaatacaccccagaggatgttcaggaacgcatccaacatctatttgaaggggtggccaagtgattagtctaactattttaatgga

SEQ ID NO: 4512 - DNA, 267 bp, Zea mays
  unsure at all n locations
  Clone ID: LIB3117-002-Q1-K1-H5
gacccacgcgtacgaccacacntcccactactcctagcctcactcatttccaaacccacccaacaaaccacattggggccatacatacaacagtggctaccacaatattatccctccttgcacttcttgcgctttatccgaactcaacaattgcgtacattattccacaatgctcacttgctccaacttccattattacacatttccttccaccactttcttaaattggcttcgaacacccaaatgtccacacctataacctacaac

SEQ ID NO: 4513 - DNA, 450 bp, Zea mays
  Clone ID: LIB3117-003-Q1-K1-A5
cccacgcgtacggccacgcgtccggaagtacgcacagtttctatgtgatgtatgcaagttctacttggagtgggacaccgagtcttatggggctcctgtgattttcctccacgatccggtcagctttgccgcgctagttcgtccggagctgttcacgttcaagaagggcgtggtgagggtggagacgcagggcatctgcgtcgggcatacttccatggacatgttgctgaagaagtggaactcagagaacccgtggactggctactcaccgatttcggtcgcatggacggtcgatgtgcccaaggtggtcgcgtttgtgaaggagctcgtcaccaagccgtgaaccaagttaactaacgtgttgtggtctcgcgcaccagatgtgcagcaaatttgagatgtcgatatatttactcacattcgaaacactgcaaacactattatctcaat

SEQ ID NO: 4514 - DNA, 411 bp, Zea mays
  Clone ID: LIB3117-003-Q1-K1-A6
tccggaattcccgggtcgacccacgcgtacgcccacgcgtccgcccacgcgtccgcccacgcgtccgcccacgcgtacgcccacgcgtccgggcacgcgtccgcccacgcgtgcgcaagacgggagctccttgccggtctgagcgcctggccaaatacaaccagctgctcaggatcgaggaggagctcggtgatgccgcggtctacgccggagcaaagttcagggcaccagtggagccctactaagaaaggaagaggatgaggatgttttcttgtggagctatactagctcgctgctgccttttgttacaatgtttgtacggtcgcaataaatgtatggtcgtgtttgctcgagagctactcacgtgattttgtcgtgggagcaccaaaagcagaaaagaactgtctattt

SEQ ID NO: 4515 - DNA, 469 bp, Zea mays
  unsure at all n locations
  Clone ID: LIB3117-003-Q1-K1-A7
tccggaattccgggtcgacccacgcgtacggccacgcgtccggaagtacgcacagttcctatgtgatgtatgcaagttctacttgggctgggacaccgagtcttatggggctcctgtgattttcctccacgatccggtcagctttgccgcgctagttcgtccggagctgttcacgttcaagaagggcgtggtgagggtggagacgcagggcatctgcgtcgggcatacttccatggacatgttgctgaagaagtggaactcagagaacccgtggactggctactcaccgatttcggtcgcatggacggtcgatgtgcccaaggtggtcgcgtttgtgaaggagctcgtcaccaagccgtgaaccaagttaactaacgtgttgtggtctcgcgcaccagatgtgcagcaaatttgagatgtcgatatatntactcacattcgaagcactgcanacactattatctcaata

SEQ ID NO: 4516 - DNA, 92 bp, Zea mays
  Clone ID: LIB3117-003-Q1-K1-B1
aaaaaaaaaaaaaaaaaaaaaaaaaaaaaaaaaaaaaaaaaaaaaaaaaaaaaaaaaagaaagaaaaaaaaaaaaaaaaagggaaaaaaaaa

SEQ ID NO: 4517 - DNA, 238 bp, Zea mays
  Clone ID: LIB3117-003-Q1-K1-C4
gaattcccggatcgacccacgcgtgccgttgtctgaggagttgaaacggtgggttcagaaagttggcaatggattggagggttgtcggaacaaatgttgatgggaacgtctctatctcaaaattgtgcaattatgctattttgcacttcgtactgcactacaaatatgacttccgtgtaatgtatgtgggctgacgcctttatgtacataggtagtactatacaagacaattttataa

SEQ ID NO: 4518 - DNA, 374 bp, Zea mays
  Clone ID: LIB3117-003-Q1-K1-C5
ggtcgacccacacgtccggcacctttatgttgttgtatcctacttttttctctacagaacttgatctgatctacagtggcttttcttacatgaaggcatcgtacaaatactgtattacgatgcccaacagatggaacttctcatacgattacttctattcatctgtccttgccctcctgatctatgttccaggaagcccacacatgtaccactacatgctctcccatacgaagaatgccctatcaaaggccaaaactgcgtgatgatgcctttcaagcaacggaatcaatagactcgtttgcctgattgatgtcaggacatgttcaagttttcaacatccccactaaaatctattggtcggaggatatatatta

SEQ ID NO: 4519 - DNA, 429 bp, Zea mays
  Clone ID: LIB3117-003-Q1-K1-C8
ccggaattcccgggtcgacccacgcgtgcgcgtccgtggcagccgattcctccgcgggcgcacaggcgccaccgcccgctctgtcgccgtggcgggtccgcgtgcccccggcctccgcgtccaaagtgctggagcaggagcccgaggtgctgccgtgcctcgccgcggactcgccgctctcgccgcagccctcggcggcgggcaccccgcgcctactcgcgggtcccggcatcaaggtctgggacccctgccacgttctcctgcccccgccgccgccgtctccgcacgcagggaggcaggttgacgccgcggccatcgaggtcgctgtggtcagccacggcgagtgcgcagccgcgatgcgcccggaccttgtcggcggccggtggccggccacggcgctcacgagcgcgcgggagcgtcaggcgcgcg

SEQ ID NO: 4520 - DNA, 348 bp, Zea mays
  unsure at all n locations
  Clone ID: LIB3117-003-Q1-K1-D2
cggaattccggtcgaccgacgcgtgcggtcgcggcagcgttcctccgcgggcgcacatgcgccaccgccctctgtcgccgggcggatccggtgccccggcctgcgcgtcaaaggctggagcaggagcccgaggtgctgccggcctcgccgggactcgcgctctcgccgcaccctcggcggcgggcaccccgcgcctccttcgggtcccggcatcaaggtctgggacccctgccacgttctcctgcccccgccgcgccgtctncgaacgcaggaggcaagttgacgccgcggccatcgaagtcgttgtggtcagccacggcgagtgcgcagccgcgatgcgcccggacc

SEQ ID NO: 4521 - DNA, 191 bp, Zea mays
  Clone ID: LIB3117-003-Q1-K1-E11
cgtaactggaatttggtattttttgtctactatttactgtagtggtttctggattttccttgtgttgcctatgctgcaatacaccgttttgttgttgcgatacatctgtagtttggttttgttatccacctgtcgtttataagaagcggctgtactcaggctactatgccgaactgaaatgggaatggagc

SEQ ID NO: 4522 - DNA, 460 bp, Zea mays
  Clone ID: LIB3117-003-Q1-K1-E4
accggccggaattcccgggtcgaccacgcgtcgcccacgcgtccgcccacgcgtccgagatcatcctcgatcgggagacgcagaggtcccgcggcttcggcttcgtcaccttctccacggaggaggcgatgcggaacgccatcgagggcatgaacggcaaggagctggacggccgcaacatcaccgtcaacgaggcccagtcccgcggcggccgtggaggcggcggcggtgggtacggtggtggccgtggaggcggcggctacggcggtggcgggcgccgtgatggcggtggcggctacggcggtggcggcggctacggtggcggcggcggctacggtggtggtggcggcggctacggcggtggcaaccgtggcggcggctacggcaactccgacgggaactggaggaactgagcggtggggcccgcgcggccaagttatcctgttcgctaccgtgatgt

SEQ ID NO: 4523 - DNA, 309 bp, Zea mays
  Clone ID: LIB3117-003-Q1-K1-F3
tcctaccttctttggtcgatggaagctgatggaatgagactgtgaagcggcgtttcggccggtctgttcctgacagaaataagtttagcctgctgctaccatatacatggacacagactcagatgtagacactcaagttttgagagctgtgatcctgtatcatttaatcaaaaacaatttggttcttttttcatcttgtcatggctaatgttacaccagctgcagaataattacaataattgatcttgatccagcgtcacagttacttcgaaaaaaaagcatctggagaataaataatactactatgac

SEQ ID NO: 4524 - DNA, 231 bp, Zea mays
  Clone ID: LIB3117-003-Q1-K1-G12
cccagctaccgcaccaacccctgtggcgtctccgctgccattccgccctactactgattcatgatatttgggaaatctcctctatccatctctctctatctatatatgtaataatgcagtaagacgacacacattatcatgtgtggtatgaccaataatatatgcatggtcataataaagttttggttttaatgaatctatcggccgcttgatgtctatgatggacaaatc

SEQ ID NO: 4525 - DNA, 68 bp, Zea mays
  Clone ID: LIB3117-003-Q1-K1-G5
cccacgcgtccgatgtgtggtatgaccaataatatatgcatggtcataataaagttttggtggtaaaa

SEQ ID NO: 4526 - DNA, 423 bp, Zea mays
  Clone ID: LIB3117-003-Q1-K1-H11
cggtccggaattcccgggtcgagcgccacgcgtacgctttttctttaatgatctataaatgtactttcttatatctgggaagccacaaacattagagaagaaactttattattgaactataactcataagaaatctaaaagagggcaccaccaatgatgggttgttggtcgaacactgctaggtttgtcaaagcaagttggctgaatggcagcaattgttgcagatgtaagagggtgccagcgttaggcgcaccgtgctggtagaactgcaacaactgtggttgtgtcaagaaggtatcagagctcacaccagctagcttggggtatgctactggtagctggctgaatggtcattgttgtttgtgcacatcagaagctgagttcaatgcagctagttggtttaatggaagaaactgctgttgc

SEQ ID NO: 4527 - DNA, 436 bp, Zea mays
  Clone ID: LIB3117-003-Q1-K1-H12
gtcgagccacgcgtccggtgtcattgagtcgttgctggcgaaggtcgatatcctcatccttggtggtggtatgatctacggattttacaaggcacagggatattctgttggaaaatctctcgtggaagaggataaactcgagctcgcaacttctcttattgagaaggcgaaggcaaagggggtttctcttttgcttcccactgatattgtagtagcggacaagtttgcagccgatgctgagagcaagattgtccctgccactgctatccctgatgactggatgggtcttgatgttggccctgatgccaccaaaacattcgacgaagcattggacaccaccaagactgttatttggaacggccccatgggagtgtttgagttccagaagtttgcagctggcaccgaggcgattgccaagaagctagctgagcttaca

SEQ ID NO: 4528 - DNA, 394 bp, Zea mays
  unsure at all n locations
  Clone ID: LIB3117-004-Q1-K1-A10
ggtccggaattcccgggtcgacgcacgcgtccgctgccatcactgagccacctagccgtggtgaaccctgtcacctacttgcaacagcagctgcgtgcatccaacccacttgctctggcgaacgtagctgcataccagcaacaacaacagctgcaacagtttatgccagtgctcagtcaactagccatggtgaaccctgccgtctacctacaactactttcatctagcccgctcgcggtgggcaatgcacctacgtacctacaacaacagttgctgcaacaaattgtaccagctctgactcagctagctgtggcaaaccctgctgcctacttacaacagttgcttncattcaaccaactggctgtgtcaaactctgctgcgtacctacaacagc

SEQ ID NO: 4529 - DNA, 393 bp, Zea mays
  Clone ID: LIB3117-004-Q1-K1-C2
ggaattcccgggtcgacccacgcgtgcgcccacgcgtccgggcggcgtatgtagcggcggtctcaaccccaggcgagctcgggtgcgggcacccgttgatccacgcaaccatgtcgaggaggaagaccagggagcccaaggaggagaacgttacccttggacccactgttcgtgaaggagagtttgtctttggtgttgctcacatctatgcatgcttcaatgacaccttcattcatgtcactgatttgtgtgggagggaaactttggttcggatcactggtggcatgaaggttaaggctgatcgtgatgagtcgtcttcttatgctggtatgcttggtgctcaagatgttgcacagcgtggcaaggagctggggatcaccgggctgcacatta

SEQ ID NO: 4530 - DNA, 154 bp, Zea mays
  Clone ID: LIB3117-004-Q1-K1-C7
ctcagctcgtcaagtttgtgctgggatgccagtttatcccttctagtctattacagaaacgttgttcggagctgagtctattataaacatcttggtctgagtttattgttgagtggtgccagtttttttcaatatacatttatcttaaaaacaa

SEQ ID NO: 4531 - DNA, 295 bp, Zea mays
  Clone ID: LIB3117-004-Q1-K1-D1
ccggtccggaattcccaggtcgacctacgcgtactgtgacaatgcgtggcttggcattgatggaatgactggtgatattgtccagaggacggagctcaggatctgggattgcttcagcgtttaagtacaaacgtacaaggacagcaattgcagctgcttgcatgcttcagagaatggatgaccttgtcagcggtatcaataagacgcacgctcctggagcctcagcttcaaagcaacccccaatcgacactgtagtcgatgcttacattgagcaaatgataacagactagaggct

SEQ ID NO: 4532 - DNA, 67 bp, Zea mays
  Clone ID: LIB3117-004-Q1-K1-D6
accggttccggaattcccgggtgcgacccacgcgtcctgcccacgcgtctcgcggtacacgtgggta

SEQ ID NO: 4533 - DNA, 292 bp, Zea mays
  Clone ID: LIB3117-004-Q1-K1-E2
cggaattcccgggtcgacccacgcgtacgcccactcgtccgcccacgcgtcactccacgcgttcgcaacgtccacgcctacaccgaggctgttttcattcgtgaatgtattgtgaagactaagccatccgaggagcgcgtgattgcaggatgggcgcccaaggtgaacgcgtaagcacatagtgatttggttgctactgatggactccatccatttatctgatcagtcgttgtcagtggtgtgtgtaggtgtgacatctgtagcctatacacatgattcagttggaataaat

SEQ ID NO: 4534 - DNA, 349 bp, Zea mays
  Clone ID: LIB3117-004-Q1-K1-E4
ggaattcccggtgcgacccacgcatacgccactcgtccgggtctctccccgaagaagatcggcgaggacattgccaaggagagggccagggactggaagggcctgcacgtcaccgtcaagctcactagccagaaccgccaggccaaggtctccgtcgtccccttcgccgccgcgctcgtcatcaaggcgctcaatgagcccgagagggacaggatgaatgtcaagaacatcaagcacagctgcgacatcagactcgacgacgtcgtcgagatcgccaggaccatgaggaacaggtccatggccaatgagttggccggcaccgtcaatgagatcctcggcacctgcgtca

SEQ ID NO: 4535 - DNA, 331 bp, Zea mays
  Clone ID: LIB3117-004-Q1-K1-F10
catgatgtgaacaacatcgaggaagagatgcgcaggaagcaggctcatgctgctcaggaggcgtacgaggaggacgacgagatgcctggcggagcccaaagagtgcagtgcgctcaacagtaagcagactaccaaaatgggattcaaggcactttggttgctcttcaattatgcgagtgcgcctgtggactgtatggttctatggttttgctgtcgctgagctacaaagtaggaagctgatgcgcccctggctctgcaagcgggggaatgtatccttttttgctgcaactgaaaaatgctacccaggcaatagctggctaccttataacta

SEQ ID NO: 4536 - DNA, 306 bp, Zea mays
  Clone ID: LIB3117-004-Q1-K1-G12
ttcctcttaatactacttcagaatattttaaaaaactacgctatccatttctatctatctatatatataataatacaattctactacacacatcatcatttcttatataaccaatactatattcatttccataataaaatttaatttttaattaatctatcctactcttcatttctattatatacaaatcaaaacaaaaaaaaaataactatcactctacattatacaatcttacttacacttccattccacttcataacttttctattttttcacctaaattcaattcactttcctttattttac

SEQ ID NO: 4537 - DNA, 332 bp, Zea mays
  Clone ID: LIB3117-004-Q1-K1-G5
acggaattaccggttcgacccacacattcgggctgctcctgttgctgagaatcgaggtgagcagatcgatgccccagcagcagatgaggacggatgagacaaggatgctactgcaaatgaggatgaggaaaaggatgaggacaaggagatgactctgtaggaatttgtgaaaataagagaggagaataggaaagcactacttgcagtgaaagctgaggagaggatagttgaagttgacaaggatctagcgtctctgcagccactttcaaacaagaaagaaaatgatgaagttttcattaagctgggatctgacaaggataagaagaaggaaa

SEQ ID NO: 4538 - DNA, 398 bp, Zea mays
  unsure at all n locations
  Clone ID: LIB3117-005-Q1-K1-A3
ccgggtcgaccgacgcgtgcgaatacatcaagaatctcactgctgtgttggagccagagaaagcggatgagttcaaaaagggtgtcgaggtgcgaccaagtttctccttagcaagctgaaggacctccaattttttgttggtgagtccatgaaggatgatgcgtctgtggtattcgcctattacaaggatggtgccactaatccgacattcctctatttctctcatggtcttaaggagatcaagtgctaggcgtgcggcgaaattagttacccatgttgggtactatctatgtactattattatatccaaaactatagttgtcctggctgaattgaactcaaaagggtttggttgagaaaaaaattgccccaagattgatttgtttgtaaaagctcna

SEQ ID NO: 4539 - DNA, 452 bp, Zea mays
  unsure at all n locations
  Clone ID: LIB3117-005-Q1-K1-B1
cggaattcccgggtcgagcgcagcgcgtgcggacggcgacgccctactgctcgcctcattgccagtcgttgcggcagcagtgttgccagcagctcaggcgaggtgagccgcagcaccggtaccaggcgatcttcggcttggtcctccagtccatcctgcagcagcagccgcaaagcggccaggtcgcggggctgttggcggcgcagatagcgcagcaactgacggcgatgtgcggcctgcagcagccgactccatgcccctacgctgctgccggcggtgtcccccactgaagaaactatgtgctgtagtatagccgctggctagctagctagttgagtcatttagcggcgatgattgagtaataatgtgtcacgcatcaccatgggtggcagtgtcagtgtgagcaatgacctgaatgaacaatngaaatgaaaagaaaaaaagttttntcc

SEQ ID NO: 4540 - DNA, 162 bp, Zea mays
  unsure at all n locations
  Clone ID: LIB3117-005-Q1-K1-C10
cccgggtcgacccgcgcgtgcggtgatgtactcctactacctctcctgcatcgtcngcctgctctggcccgggcggtggaagctcgccgtcacggagcttcatatcgcgcagttgctcttcagcttcgcggcctccgtggtgattcttttgcttcacttcac

SEQ ID NO: 4541 - DNA, 244 bp, Zea mays
  Clone ID: LIB3117-005-Q1-K1-C3
gcgtccgggacttcaattcctatccacagcatgtgtacgccaattcttttgcaataggaaactatctcactagcaaaagactctttatttaaactgttggaaccgatatccacctcgttctctcaaatctccgcccccatctcttgactttattcacaaccttaacacctaccaatcttcaccacattacatgaaacaagaactcttgcctctttgacacactaacattttctcccggtctacc

SEQ ID NO: 4542 - DNA, 394 bp, Zea mays
  Clone ID: LIB3117-005-Q1-K1-C7
ccggaattcccgggtcgacccacgcgtgcgtgagcattcagaaacacaacaggcgaatcactttagcatcatcctaacaacaatggctaccaagatattatcgctccttgcgcttcttgcgctttttgcgagcgcaacaaatgcgttcattattccacaatgctcacttgctccaagttccattattacacagttcctcccaccagttacttcaatgggcttcgaacacccagctgtgcaagcctatatgctacaacaagcaattgcggcgagcgtcttacaacaaccaatttcccagttgcaacaacaatccttggcacatctaacaatacaaaccatcgcaacgcaacagcaacaacaattcctaccagcactgagccacctatccatggtg

SEQ ID NO: 4543 - DNA, 331 bp, Zea mays
  unsure at all n locations
  Clone ID: LIB3117-005-Q1-K1-E1
tcctgtattcccgggtcgacccgcgcgtccggaagatgtggctgangaaaatggataacttgatcaacatgcatttgaagagactgaaatgcagaatacaaagaatgatgctgatgaacctgaagagacagttttagtaaatgggaacaagggtgaggaacatcagggtactgacaatgaaggagctttatctgcctagaattcttggcaaatatgggaaccccaagttttgcctacgtgctaactcaacatgaataggggctgaaagaagcacatctcattggctgcaaatttttttttctgaaggtaacaaatgtgggccccctgtttt

SEQ ID NO: 4544 - DNA, 368 bp, Zea mays
  Clone ID: LIB3117-005-Q1-K1-E3
gtccggatattcccgggtcgacccgcgcgtccgaacatagaaagtggaatccagtagcaacaatagagcaacaatggcgaccaagatattttccctccttatgcgccttgctctttctgcatgtgttgctaacgcgacaattttccctcaatgctcacaagctcctatagcttcccttcttcccccataccttccatcaatgatagcttcagtatgtgaaaacccagctcttcaaccctataggctccaacaagcaatcgcagcaagcaacatacctttatcacccttgtttcaacaatcgccagccctatctttggtgcagtcattggtacaaaccatcagggcacagcagctgcagcaactcgtgc

SEQ ID NO: 4545 - DNA, 376 bp, Zea mays
  Clone ID: LIB3117-005-Q1-K1-E8
tccggaattcccgggtcgacccacgcgtgcgtccacgcgttcggccactccttcgataaaggcctgcgtcaaccctgcagggtccaacctaaccgatcccattgacaaagacatggcggagcgctccatatcacccaacacggtcacgcagaacatcgtcctcagcggctactggaaggccgggcggctggacgacatggagcgagtgctctccgacatgctcgacagcgtgtcatgcaaaccggacgtctggaccatgaacatcatcctcagcctcttcgggaaccggggcgaggttgagctgatggagagatggtatgagaagttccgaggctaccgggtcgagccggagacccgcacgctgaacattctgatt

SEQ ID NO: 4546 - DNA, 417 bp, Zea mays
  unsure at all n locations
  Clone ID: LIB3117-005-Q1-K1-F1
tcccgggtcgacccacgcgtgcgctgggcaactgtgggaagaaggtcctactgtggtggcttcgtgttgaagcacgggctgatagcaagtttggtgaagggtgggtaattgagcgcacctttggaagtcntcgtccctgcaaagcgcactccatggcctgaaacaaccaccgagctgccagccgagttattggatgacaagcaagagcaggaggataggcgcttgtcaagagccaacaaatcatctcggccccgatgcaccacgaagcggaagggcgaccctcaaggacaagataactgatgcagaacgtactggccttgtgatgtatatcttacaccctgcaaaaacacacagtagcaagcatatcctgttaatctggcggggtctggttatttttttcctttcttttcttttctg

SEQ ID NO: 4547 - DNA, 217 bp, Zea mays
  unsure at all n locations
  Clone ID: LIB3117-005-Q1-K1-F12
ccgggtcgaccgcgcgcgtccggttcctgatgattatattaaggctgaccctgttctctttttacagtctactgccactgaagaaagccanagtatggctttaaatggaggagagtagcgttctataccatcttcacgcggatctccttacaagaagaataagtcgcttagagattattagctagatcgtgctaagtgtgcttggaagttctataca

SEQ ID NO: 4548 - DNA, 211 bp, Zea mays
  Clone ID: LIB3117-005-Q1-K1-G4
cgtccggtgttggcttctcctccccctccggttcgggttcgggttcgtgaggttctccggggttcgggttcgtgggtgagcggatcgagatggcggcgtcggatgttgagtaccgctgcttcgtcggcggcctcgcctgtgccacggacgaccactcccttcacaacgccttcagcacctacggcgatgtcctcgagtccaagatcatcct

SEQ ID NO: 4549 - DNA, 338 bp, Zea mays
  Clone ID: LIB3117-005-Q1-K1-G7
ggtccggaattcccgggtcgacccgcgcgtgcgcaacaacagagcaacaatggcgaccaagaattttcccttttatgctcctgctcttctgcagtgtgcggggcgacaattttccctcaatgctcacaagctcctatagcttcccttcttcccccataccttccatcaatgatagcttcagtatgtgaaaacccagctcttcagccctatatgctccaacaagcaatcgcagcaagcaacatacctttatcacccttgttgtttcaacaatcgccagccctatctttggtgcagtcattggtacaaaccatcatggcacagcagctgcagcaactcgt

SEQ ID NO: 4550 - DNA, 328 bp, Zea mays
  Clone ID: LIB3117-005-Q1-K1-G8
tcgacccgcgcgtccgcatgactcaagttgacaacattactgagctggaacggagtctggaggatgctggttatgctgttggtgcaaagttgcttgaactactctgtcacagggagaagggaaatagacgagagacacgacttctgggcattttatcattcatccacagtactgtttggaaagtgttgtttggaaaggtggctgactcacttgaaaagggaacagaacacgatgatgaatacatgatcagtgaaaaggagcttcttgttaaccgtttcatttctgtgccaaaagacatgggagcattcaactgtggagcttttgttgc

SEQ ID NO: 4551 - DNA, 400 bp, Zea mays
  Clone ID: LIB3117-005-Q1-K1-H1
tcccgggtcgacggacgcgtgcgggacaaaatttctcgttccctaaaatattggtccaaatgtgaagttcagacgacatttctatgccatgaagaattcttgggaacactaggtgcattttggagttatcagaacatggggatcgacagtttggcggcacatgaagtcatcacggaagtcttgcttggtgcaccatacacagggcaattcccatctttacctgtcactcaacaacaggagaatggagaacatggtactctcgaaggggaagtagaaagcttacgacatgacaatgccttgctgaaagctgaggttgagcgattacaaagggagaatgcgttgctaagagctaagttggtaagatcaggcgagacttcaacattgtgatttgtaacataat

SEQ ID NO: 4552 - DNA, 309 bp, Zea mays
  Clone ID: LIB3117-005-Q1-K1-H2
cgggtcgacccgcgcgtgcgcaacaagcaatcgcagcaagcaacatacctttatcacccttgtttcaacaatcgccagccctatctttggtggagtcattggtacaaaccatcagggcacagcagctgcagcaactcgtgctacctgtgatcaaccaagtagctctggcaaacctttctccctactctcagcaacaacaatttcttccattcaaccaactgtctacattgaaccgtgctgcttatttgcagcaacaactattaccattcagccagctagctactgcctactctcaagaacaacaacttc

SEQ ID NO: 4553 - DNA, 361 bp, Zea mays
  Clone ID: LIB3117-006-Q1-K1-A1
tccggaattcccgggtcgaccaaggcgtccgcggacccttggccccagaaccggtcccagccaaccttcggctgggtcctccagtccatcctgcagcagcagccgcaaagcggccaggtcgcggggctgttggcggcgcagatagcgcagcaactgacggcgatgtgcggcctgcagcagccgactccatgcccctacgctgctgccggcggtgtcccccactgaagaaactatgtgctgtagtatagccgctggctagctagctagttgagtcatttagcggcgatgattgagtaataatgtgtcacgcatcaccatgggtggcaatgtcagtgtgagcaatgacctgaatgaacaattg

SEQ ID NO: 4554 - DNA, 154 bp, Zea mays
  Clone ID: LIB3117-006-Q1-K1-A9
aacctcacttaaaggactgaggctgccccaaacaaaggtgtgactggttccaactaagagtggtcttgctgccatcaagaagagctacaacttgagactttttgattgaatagcacttctgaactctttaacccataatactatgcttgaatca

SEQ ID NO: 4555 - DNA, 134 bp, Zea mays
  Clone ID: LIB3117-006-Q1-K1-B10
cgacgccacggcgtccaggccacgcgtcacgaccacgcgtccgctcttggagattgcttatgagttatagatcaataatgaagtgattgtggatggaggcttcccagaaataagaaagtacatttctaaaaata

SEQ ID NO: 4556 - DNA, 412 bp, Zea mays
  Clone ID: LIB3117-006-Q1-K1-B4
gaattcccgggtcgaccggtgcgtccaggcttgccgacacatggttagctcatgctcttattgacggcgaagcgcaagaaccgactctgggcatcaaccttgggaaaagggaatggctaatagctcctgaatgcgtgctaccatacagaccggctaatgtaatggatagcgtgtggcacaacatttgatccggtgcgctgcgcctttgcctgacatggaatttaccttctttgcccaagtaccatgatactatagtgaatatgtatcattggtctatattgttagatctttctaatgctatgatgagctctgcaaaaccgcgttcactgtgattggcactctatcacgctgaagcatttgaaccagaacctttgatcaccaacttggacttctactattagtacatcaattg

SEQ ID NO: 4557 - DNA, 349 bp, Zea mays
  Clone ID: LIB3117-006-Q1-K1-C1
attccgggtcgaccaggcgtccgaacttttggtcacgacgaccaagagcattggctacgctgtcacactcaagatgcggatcatgggtaataccaatcgaccatccaatctacatgcaccatcttgtcaaggctactcaaggaaacgagaacaacattgctgtcattgcttacacaactacatatcacaattggatccaaacagttacacctatgaacgtgaccgacatgctgatcatggacacatcgatggccaggatcgtcaatgctatatgcttagtgcctcacatttgaccagctcgctcttcgtgcttcacttggccagaacacgggcctcttgaggtgcccca

SEQ ID NO: 4558 - DNA, 72 bp, Zea mays
  Clone ID: LIB3117-006-Q1-K1-C10
atccggggggcgagccacgcgtgctaatgacctgaatgaacaattgaaattaaaagaaaaaagtattgttcc

SEQ ID NO: 4559 - DNA, 348 bp, Zea mays
  Clone ID: LIB3117-006-Q1-K1-C5
tcggaattcccgggtcgaccgacgcgtccgaacctgtgccacgcgcagaatagaggataggatgggatattacacgctgtttctcgatgtagcgggatgctcattaccctagttttgaggggtattatggtttaggggcgctcaagttggtcagatttcgagtgtatctgcccctaagcaactggtacttgttattcggttgaaacaatcagccttaggtttgtgttctacattctcatgctgtaccgtttggtagcgagttacgtcgtacgatatgcttgttccatataaaaaggcatactatatgtgccctcggggacgctgcggcgtggcctgtgcagggactta

SEQ ID NO: 4560 - DNA, 70 bp, Zea mays
  Clone ID: LIB3117-006-Q1-K1-C7
cacgcgtccgaccacgcgtccgatgcgactcactgaatgtttggcaagctcaattcgggacgtggggtgg

SEQ ID NO: 4561 - DNA, 370 bp, Zea mays
  Clone ID: LIB3117-006-Q1-K1-C8
gttccggaattcacgcgtcgactccacgcctgcggccacgcttgcggtagatctatggatcacgcgcaacggaccagatcggaacgaggatgatggcatccatgctaagatccgcactccactgaagcatgaagacgtttccaacagcagaatgaatgcactatgtgcaatccaacttttgacatggtgactaatcctagctgatgatggcacctcatcatgccatattctactgttatcctgcttaaatctaaggatgtcctgaaacatcactaacttacgatatggctgatggtctgatcccaatgcacaatggactcctactttcttgatcagacgcctgagagactcctgattccataccatattc

SEQ ID NO: 4562 - DNA, 165 bp, Zea mays
  Clone ID: LIB3117-006-Q1-K1-C9
tttctttttttttttttttttattttttttatttttttttggttttgtttatttttatctttaacttttttccttattaaattataatttttttcttcatcaaaacttccctgattctctattcctccccacaatgtcccattctaacacaagacatttaaactt

SEQ ID NO: 4563 - DNA, 369 bp, Zea mays
  Clone ID: LIB3117-006-Q1-K1-D12
ggaattcccgggtcgagccacgcgtccggcgagctagagctagagctatagagatcactctccttctccgcgtgaggtagtgacgcccaggcatggcggacaatggcactgcgcgccgtggcaacggcgctgctggtggtggcggcgtccgtgtgcggcgcgtcggcgtcgacgctggtgctgtacaaccggtgcggggagacggtgtggccgggcattcagccgagcgccgggaaggaggtgctggcgcgcggcgggctgcagctggcgccggggcggtcggcgtcggtgcggctccccgcggtgtggtcggagcgcgtgtgggggcggcaggggtgctcgttcgacgcggcggtgcgcgggcggtgc

SEQ ID NO: 4564 - DNA, 434 bp, Zea mays
  unsure at all n locations
  Clone ID: LIB3117-006-Q1-K1-D3
aattcccgggtcgacccgcgcgtccggagacaagcctcatctcagccgtgcatgaccaagtagttttgcttcactccggcgttccatgcatatccatccatcagaattctcagtctccacagcagcaaggcgcacgaccagcaccagcagccggcaacaaaagacacagcagcgatggcgttcgtgccggtgtgcgtgcagtgcgggacgcggagcaacccgtgccggtgcaaggtggtcgggccgacgctggggttcgtcgcgttcgtggtggccggggtcatcgagtggccgctgggggccgtcgtgtacctgttccgncaccgcaagggacgacgcatcatggcgcacccggccaccgtcgtgtacccgcgcgttaccagtgccatcccgatctaatcggcccaccgatcaaccaggtcgcggtttcatgt

SEQ ID NO: 4565 - DNA, 293 bp, Zea mays
  Clone ID: LIB3117-006-Q1-K1-D6
taccggttccggaattcgcggatcgcatcaggcgtccgctgatctgacacgcggccgtctgttcctctgcgcaagctgtggaactgtacatgggattgttcttgtatttatacatgctacatgagaattcttgtgcataccaaaggattattcgtatgctaggctgacaaaagattctaacgtgttagtaggtcccgaaggtattgggatctgatgtgtcaacagggcataaccactgtctacgaaacttggtcttgctacggtttaacatctgacctactactctatcatgc

SEQ ID NO: 4566 - DNA, 276 bp, Zea mays
  Clone ID: LIB3117-006-Q1-K1-E1
tcgacccgcgcgtccagtcacaagcctcatttcaaccctgcatgaccaattagtttcgcttcactccggcagtccatgcatatccatccatcagaattctcattctccacagcaacaaggcgcacgaccagcaccatcagcccgcaacaaaagacacaacaacgatggccttcctgcccgtgttccttcaagtcgggaccccgaacaacccctgcccgttcaaagtggtccggccgacgcttgggttccgcgccttcatggttgccggtgtcatct

SEQ ID NO: 4567 - DNA, 446 bp, Zea mays
  Clone ID: LIB3117-006-Q1-K1-E6
cggaattcccgggtcgaccgacgcgtccgctgccgccgccaccatgccactaccctactcaaccgccccggcctcagcctcatgcccagcgacacccatgcccgtgccaacagccgcatccaagcccgtgccagctgcagggaacctgcggcgttggcagcaccccgatcctgggccagtgcgtcgagtttctgaggcatcagtgcagcccgacggcgacgccctactgctcgcctcagtgccagtcgttgcggcagcagtgttgccagcagctcaggcaggtggagccgcagcaccggtaccaggcgatcttcggcttggtcctccagtccatcctgcagcagcagccgcaaagcggccaggtcgcggggctgttggcggcgcagatagcgcagcaactgacggcgatgtgcggcctgcagcagccgactccatgcccctacgct

SEQ ID NO: 4568 - DNA, 403 bp, Zea mays
  Clone ID: LIB3117-006-Q1-K1-F2
gaattcccgggtcgaccgacgcgtccggccacgcgtccgcaagaagccatgggccctgtccttctccttcggccgtgccctggatgcgagcaccctcaaggcctgggctggcaaggtggataacgtggagaaggctagagcggtcttcctcgccaggtgcaaggacaactgcgaggctaccctagggacctacaagggtgatgctgacgccgacaccgagagccttcacgtcaaggactacaagtactgagttgcttctctttgcgatcccgatgttttggaactcctgcctgcgagtaggttgctgagtgttgttagcttgttagagcttttatattcggacatgacataaacatgcttcctatgtggatgatggttatctctatatgcgtctatcaactat

SEQ ID NO: 4569 - DNA, 419 bp, Zea mays
  unsure at all n locations
  Clone ID: LIB3117-006-Q1-K1-F7
ccggaattcccgggtcgacccgcgcgtccgggaggaagagaagaaggacggcggcgagaagaatgaggagaagaaggacggcggcgacggagacggcgacaagaaggacgaggccggcgacaaggacaaggacccggccgccagcctgtacatgcactacccgcggttcccgttcgctggagggtactaccagccgccggcctacccgccgcctccggggtacccgtacgcctaccagccggcctacccgccgccgttctacgcgccgncgcaccaccacctgcaccagcagcagcccatggcgccgcagatcttcagcgacgagaaccccaacgcctgctccgtcatgtagttgtcactcaaatgtcatgtaaaaaaaaaagaaccgtaagaccctgtctntgcgcggggtcctggcg

SEQ ID NO: 4570 - DNA, 169 bp, Zea mays
  Clone ID: LIB3117-006-Q1-K1-G2
tcgacccacgcctacgccacacttccgcagactcgtcggatacaacattcataaagaatccagggctaaaaggtcctcctctctataggatccaaacttacgtacccgtgcttgctacgctatagctcttctataacgtcacctaaattaaattcactgaccgctattc

SEQ ID NO: 4571 - DNA, 254 bp, Zea mays
  Clone ID: LIB3117-006-Q1-K1-G9
gaattcccgggtcgagccacgcgtacgctcactctttctcaaagaagtattgtatgagatggctgttgggggtaaatacaactttctggggggccttacccataggagccacatgttgcacgattcattaacttctgatgttgcctatccgtagactgaagataccgtacatgcattttaaaacttcttctccaaccgtgtaatctgaaaaatggtcatcgactgcccaacttttgcagtcactctcttgagaa

SEQ ID NO: 4572 - DNA, 313 bp, Zea mays
  Clone ID: LIB3117-006-Q1-K1-H10
cacgcgtgcggttttggctcaagaacaagatattgttattgtacagctcgaaggatactgagcccggttacggcaccggataagtaacagacggacataaaaaccaggtctattctggaacaagatgctttggtgacttgtatcccctatctgcccattcaagcgattacttaaactgcccttttgctccttcctataagcttgtatcaaagtgaattcgttggagtgcatacctgataagagcatattcggaagtctttcaaaattcactctaaattgctatttttagagtcatttgcttaataactgtcat

SEQ ID NO: 4573 - DNA, 418 bp, Zea mays
  Clone ID: LIB3117-006-Q1-K1-H5
tcggaattcccgggtcgaccgacgcgtccggccgaatatgatgccatcgatgatggtgccgactatgatgtcaccaataacgatagctatgggtgatgccaccgatgatgatgccaaacatggtttcaccaatgatgatgccgagtatgatgccttcgacgatgacgccgagtatgatgccaccgattatgatgccaagtatgataccaccgatgatgatgccgagcatggtgtcatcaatgataatgcctaacatgatgacagtgccacaatgctactctgattccatcttgcacattatacaacaacaactattaccattcatgttcatgcccacagtcgtggcgatctcacccatgtttttacagcagccctttgatggtgctgcattctagatataagcatttgtgttgtaccc

SEQ ID NO: 4574 - DNA, 331 bp, Zea mays
  Clone ID: LIB3117-006-Q1-K1-H6
ccggaattcccgggtcgacccacgcgtacgcccacgcgtccacaggaaccaacaagtcgaacaacgtccaagcttttgtgttatgaggctctctcacgcatggcgacaagcaaagcgtcctccaccatggcttccacgacgactacggcattcaacaacctgactgacgtgcggctcgccgagctttagtcagcgctgtatgggacaaggcaggccatatccgctggacgaactcacggactaggcgaggacgacaacgcgccgctgccctgctagcagcagccgaggccgtaggcactggacgactggagcagcatcgtcaacaaggcgt

SEQ ID NO: 4575 - DNA, 154 bp, Zea mays
  Clone ID: LIB3117-007-Q1-K1-A9
aacttcagagaagggactgaggctgccccaaagaagggtgttgctgctgccaactaagtgtggtcttgctgccatcaagaagtgctagaacttgagactttttgattgaattgtacttctgaactctttagcccataatactatgcttgaatta

SEQ ID NO: 4576 - DNA, 147 bp, Zea mays
  Clone ID: LIB3117-007-Q1-K1-C12
attcccgggtcgagccactcttacacccacgcgttctcccactcatcctttacgtttccacattgagccattctcatcttcaacttgtcaaactcaatatcccccttaaccttcaagctataataatactcatcattcctctaataa

SEQ ID NO: 4577 - DNA, 319 bp, Zea mays
  Clone ID: LIB3117-007-Q1-K1-D12
aattcccgggtcggcccacgcgtaagcccacgcgtccgcccacgcattcgtttgcttttagtgccattattccacatttcctcgccttcgtttacttaaaataagcagcgaacacccaactcttcaatcctataagctacaacaagctcttgcatctagcatcttataacaaccaatttcccaattacaacaacaatccttatcacatttaaccatacaaaccatcttaactcaacatcaactatcacttaacctactatcccttattaaccctattccctactttcaacaacatctgctttcatacaacccactttct

SEQ ID NO: 4578 - DNA, 309 bp, Zea mays
  Clone ID: LIB3117-007-Q1-K1-D7
gagaaaaacagcactagtagctattaaccaatatctcagtgtacattgagtgacaccaaccaattcatggatgaagacatcaattacgacagataccattcgtccaaacatcctaaacattatcatcgtttccaagagcgctgttcttttttatctgaagacggcaaggcaaaggaagcaaatgctaccagcaggtctcaaattacgatccgagatctaaaacatcagcaccacaacataaagcaagaacacaaggcaagcagaagaagaacgagcccaccggatggatgcggatccatcagtcgtcgc

SEQ ID NO: 4579 - DNA, 368 bp, Zea mays
  unsure at all n locations
  Clone ID: LIB3117-007-Q1-K1-D9
gtgtgaagcaaataagtgccttagaagaaagctggaggagaccagcaaccaggtgcgtggccgagtgtgggagcacggtgccaacttattactcggctacgagcggcactcttcaccacagcaagccccatcacatgttggcaatggattattctttcatcccctggaagctgcagcagagccaaccctgcagatcgggttcgctcccgagcatatgaataatttcatgccggcatggctaccctgaagatggatctttgaggcaaagggaataaataaagatgcgatgcatgtcagaatcatattgtactgcaagagtgacaattgtgtgttccactcacatatatgacctagttntgtgtgtcaaa

SEQ ID NO: 4580 - DNA, 302 bp, Zea mays
  unsure at all n locations
  Clone ID: LIB3117-007-Q1-K1-F2
cggaaagcccggggcgacccacgcgngcgacagcaacaacagcaccgaccagcacngagccaacaagaagnggngaacccaggggccgnacagcaacagcaggggcaggcaagcaacccacaggcacaggcaaacggagcagcagaccaacaacaacaacaagagcaacaggnncggccagcgcncaggcaacnagccanggagaacccngccgccgaccgacaacagcaacaacagcngncaacnagcccgcacgaggaggggaaagcaccnacataccngcaacaacaagggcngcaaca

SEQ ID NO: 4581 - DNA, 281 bp, Zea mays
  unsure at all n locations
  Clone ID: LIB3117-007-Q1-K1-F5
ccggnccggaangcccggggcgacccacgcgcccgcgagcgcagccgataccatcgggcacccacggcgaagggcagcagcggccaaggaggacnccggacgcgaaacacganacgncaagcacccacaggagccaacgcacgcacaccaagggggcacaccaaagaggacagcagngccaggaacangacgaagaccaagaccagggcaaaccgcagcagcccngacagccgcaaagacgacgggccaagcaacaccgacaccgggcgcaaggagaacga

SEQ ID NO: 4582 - DNA, 314 bp, Zea mays
  unsure at all n locations
  Clone ID: LIB3117-007-Q1-K1-F6
cggaanncccgggncgacccaggcgnccgcccacgcgnncggagcgagaacgcgggcgggcgctcgagaggagccaagcggacggacgcgggcacgcgacgccacaggggggccatagagccacccaaaagcaagacaccggccggcggggcacaacgccgggacggggaaaaccccggcgggacccaacccaagcgcccagcagcacaagcccccggcgccagaaggcggaacggcgaacaggcccgcaccgaacggccaagccaacagaggcgcacccagaaaggcgaangggacgcgccccggagcggcgc

SEQ ID NO: 4583 - DNA, 86 bp, Zea mays
  Clone ID: LIB3117-007-Q1-K1-F9
cggatatgttcttgtgataaaaaaaaaaaaatacaaaaaaaaaaaaaaaaaaaaaaagacaagggaaaaaagcaaaaaaaaaggaa

SEQ ID NO: 4584 - DNA, 99 bp, Zea mays
  unsure at all n locations
  Clone ID: LIB3117-007-Q1-K1-G10
cggtccggaattcgccgggatcgactccaacgcgtcgcgatcgcatacagtgatgcaatacctaaatctgntcgtcaaagagatgcaaaggtttttaac

SEQ ID NO: 4585 - DNA, 259 bp, Zea mays
  unsure at all n locations
  Clone ID: LIB3117-007-Q1-K1-G2
ccggggcgacccacgcgggcgcccacgcgnacganncaccacgaggcgncaagggcaacggcaagggccaaagcggccgnggaagcagcaggngggacaggaaggcgggggcacgacaacaaacagggacnccaggcacgccagaaaccggagcggacagagaagaaaggccgccggccaccaaaagcagcaaggccaacacgccaagcagcgagacaagggcgagagcaacggccgacagcccgcgccgacaaagcca

SEQ ID NO: 4586 - DNA, 187 bp, Zea mays
  unsure at all n locations
  Clone ID: LIB3117-007-Q1-K1-H1
cggaagncccgggacgacccacgcgnacgaaaaaaaaaaaaaaaaaaaaaaaaaaaaaaaaaaaaaaaaaaaaaaaaaaaaaaagggaaaagggaaaaaaaagaaaaaaagaaaaaaaaaaaaaaaaaaaaaaaaaaaaagaaaaaaaaaaaaaaaggggggggcaggaaaaaaggaaaaaaggaaa

SEQ ID NO: 4587 - DNA, 71 bp, Zea mays
  unsure at all n locations
  Clone ID: LIB3117-007-Q1-K1-H4
tagagganccaagctcacggacgcgngcatgcgacgacanagctctgctatagtgccacctaaattcaatt

SEQ ID NO: 4588 - DNA, 117 bp, Zea mays
  unsure at all n locations
  Clone ID: LIB3117-007-Q1-K1-H7
cggaagncccggggcgacccacgcgnccgcaagaggcagcacacagccgcaaggagcaggacaacaccgcacagcggacaaagggaagcgcaaccaggggcagcaagaccaagaccc

SEQ ID NO: 4589 - DNA, 391 bp, Zea mays
  Clone ID: LIB3117-008-Q1-K1-A12
cggccttgaattcccgggtcgagcgacgcgtccgagaagatcttgatgatcttcttggacccaaagtagaggaacaacaccgaatacaagctggacgcctacagtacggtctaccgcaggctgtgtgggaaagatgtggtctttgagtaccctatggccgaaaatgcataaatatgacgcccggatatccccattttattttgttgaatctggatgtttctttggggtctcaactagactgctccgtatgtacttcaaaaaccatagttttgatgccaaagttgttgcctaagaatttggtactcgggaattggtagcggacgtgaacaatgttaagttttgagcatttaaatttacctttgtcatgataacatgttgcgaagttttattt

SEQ ID NO: 4590 - DNA, 449 bp, Zea mays
  Clone ID: LIB3117-008-Q1-K1-B4
accggtctcgagttcccgggtcgaccgacgcgtacgcccacgcgtccggcgacccttcctccttcgctccttccccgccgactacctgccgtctcctgcatggtgaagtactcgcaggagccgggcaaccctaccaagtcggctaaggccatgggcagggatctgagggtccacttcaagaacacaagggagacagcctttgcgcttcgcaagttgtctttgaccaaggctaagcgataccttgaggatgttattgctcacaagcaggcaattcccttccggagatactgtgggggtgttggtcgcaccgcgcaagctaagtctcgccactccaatgggcagggccgctggccggttaaatcagccgggttcatcctggatttgctgaagaatgctgagagtaacgcttatgtgaaaggcttggatgtggacaacctctatatttcaca

SEQ ID NO: 4591 - DNA, 314 bp, Zea mays
  unsure at all n locations
  Clone ID: LIB3117-008-Q1-K1-D6
aattccctcgtcgacccacgcgtactctttgtttttttttttcagttcataattgattcttcaaattaaccataccacgccataacatgtnacatttattaaactactagtacacttttcaaaattcaactagttcaatactaaaatataaacttaattcaatctaatcttcttcctctccctctttctcaacaatatttaattatctgatctcataaacatttctatcctttttgtcatcaaccactcgtatccaatcccccactttgtgcttcttcaagtacttcttgttcaaatacttcaagtacctcttt

SEQ ID NO: 4592 - DNA, 324 bp, Zea mays
  Clone ID: LIB3117-008-Q1-K1-E11
cccacgcgtccgtctgagcctgctgctcgcctctcgatttgccctggcggacatgtgctttggtcgagttggttgatggttaatggttaatggctaggaactggtgcttaatcctgaaacccgtactgctgtttttcttgccaactgtggcatcgtcgtcttgtggctgcgaagctgcagccacctcgttcgtgtatggcggcagatgagacaattcataatctaagtatatagatataaatagtagtattaccggtttgtttgtatttacgatttatcgtgaactgatggaacataatgtgtatacagcgaaaatttatctga

SEQ ID NO: 4593 - DNA, 361 bp, Zea mays
  Clone ID: LIB3117-008-Q1-K1-E5
caccattgatgatgccgagcatgatgtcaccaatggtcttgccgagcatgatgtcgcaaatgatgatgccagaatgtcactgcgacgccgtctcgcagattatgctgcaacagcagttaccattcatgttcaacccaatggccatgacgattccacccatgttcttacagcaaccctttgttggtgctgcattctagatagaaatatttgtgttgtaccaaataatgagttgacatgccatcgcgtgtgactcattattattaacaataaaacaagtttccttttatcaaaataaaacgatgccatcttaataaaagataacataaactaagctacaaaaagtccaaagtacatggtttgt

SEQ ID NO: 4594 - DNA, 135 bp, Zea mays
  Clone ID: LIB3117-009-Q1-K1-A3
cccacgcgttcgcccacgcgttcgctcaagggattattccgctctgctcttatggtctctgtgttctatttaatgattgttattaccatgtagcagtaaccatcgtcatcagtgataaccttgttgcttctgtct

SEQ ID NO: 4595 - DNA, 352 bp, Zea mays
  Clone ID: LIB3117-009-Q1-K1-A8
aattaccgggtcgacccactcgtccggctagctccgccttttggaccctctccaccgtttctcaccacccttctgttcgtcttccacgagaaggacttcatctccgtctccggctccgtcgacaacctccagatcgtctccgcttcccgcgacaagaccatcaagctctggaacactctcggcgagtgcaagtacaccatcggcggcgacctctgcggcggcgagggccacaacgggtgggtctcctgcgttaggttctccccaaacaccttccagcccaccattgtctccggatcctgtgaccgcaccgtctaggtctggaaccttaccaactgcaatcttcgctgcactc

SEQ ID NO: 4596 - DNA, 260 bp, Zea mays
  Clone ID: LIB3117-009-Q1-K1-B4
atcctaggccgcgtacgaacaacaactgcaacagaaactgccaacgcttaaacaactaggggcggccagctcctagaggagtacatacttacgtacccgtggatgcgatgtaatacgtttgctatggcgtaagctaattcaaacctactgcgccgaatttttacaacagattgtactgggaaaaccttggctatacccaacttaacctgctggctactcataacagttgcttcaattgaagcaactaacaataggccact

SEQ ID NO: 4597 - DNA, 360 bp, Zea mays
  Clone ID: LIB3117-009-Q1-K1-C6
aataaccgggtcgacccacgcgtacgcccacgcgttcgctgcaacagcagttaccattcatgttcaacccaagggccattacgattccacccatgttcttacagcaacaagtttgttggtgctgcattctacatagaaatatttgtgatgtaccgaataatgagttgacatgccatcgcgtgtgactcattattaacaataaaacaagtttgctcttattatcttttaaaaaaatacaactgacaccgacagaacatgtgccgacaacggttcaatctgccgtcgtcaccatgccactactctacttaaccgtcccggccttaacctcattcttcagtcacacccatgcccgttgccaac

SEQ ID NO: 4598 - DNA, 135 bp, Zea mays
  Clone ID: LIB3117-009-Q1-K1-D4
tctcacccatgttttttcagcagccctttgttggtgctgcattctaggtataagcatttgtgttgtacccaataatgaagtcggcatgccatcgcgtgtgactcattattaacaataaaacaagtttccttttaa

SEQ ID NO: 4599 - DNA, 135 bp, Zea mays
  Clone ID: LIB3117-009-Q1-K1-D8
tctcacccatgtttttacagcagccctttgttggtgctgcattctagatataagcatttgtgttgtacccaataatgaagtcggcatgccatcgcgtgtgactcattattaacaataaaacaagtttcctcttaa

SEQ ID NO: 4600 - DNA, 391 bp, Zea mays
  Clone ID: LIB3117-009-Q1-K1-E12
gcaaaatcttaatctgatgatgggactgcctgagaatatggggctgcaataccagcccgtgttcccttgatcttttgtgtcattatctattattacattatttaggagtccagaaaccaaattatcattactgtcaagaggtggcaaggagcctgacatcagaattcagtcaagtcgaagttagacagttagtgtagcttggtctgtgttgttttagctttattaaaccattaagagaataatgatgatggcaatttagcagtacaatggtagtattatgtgggcagcttggttccaataaaatcataagcctatacacatcttgtgcccgcaatgttgtttgctattttgatcacgaaatcaatattgagcttgaattcagttctgaggc

SEQ ID NO: 4601 - DNA, 209 bp, Zea mays
  Clone ID: LIB3117-009-Q1-K1-E2
aatcctatattacatataccatcacatatcactcattatcaacaatatatcatgtttcctctcaaataataaaacaaaatatgtcagccgctctaaatcatccaaccttacatacactttcatactacctcatatctcttctatattatcacctaaattcaatacactacccctccttttacaacattcttacttttaaaaccttatct

SEQ ID NO: 4602 - DNA, 229 bp, Zea mays
  unsure at all n locations
  Clone ID: LIB3117-009-Q1-K1-F11
attcccggntcgacccactcgtccgcccacgcgtccgacgcatattgcaccagtttatccatctagaggccgtcgacaggggaatggatgtctttttcgtgtagcagcatccaccgccgtctcatcctctcagccgtcgtccttctcttcgtgctcgcggctgccagcgccagctccggtaccttctgcgtgccggggtggtccatcccgcacaacccgctccctatct

SEQ ID NO: 4603 - DNA, 239 bp, Zea mays
  Clone ID: LIB3117-009-Q1-K1-F12
aattcccgggcggacccacgcgtccgcccgcgcgttcggaccaacaagcaacatataaagtggaatccagtatcaacaagagatcggcaatgtctaccaagatattgtgcctccttatgctccttgctctttctacatgtgatgctaacgcgacaattttccctcaatgctcacaatctcctatagcttcccttcttcccccataccttccatcaattatagcttcaatatgtgaaaac

SEQ ID NO: 4604 - DNA, 377 bp, Zea mays
  Clone ID: LIB3117-009-Q1-K1-F6
agccgctgcaccggtaccaggcgacatactgtgtggtcctgcagtgggtcctgcatcatcgggcgcatggcgagctcgcggcgctgatggcggcccaggtagcgcagcagctgacggcgatgtgcggcctgcagctgcagcagccaggtccctgcccttgcaacgcagctgccggcggtgtctactactgaggaaactatgtactgtagtaataatgtaatggagccgctggctagctacctagctcgctagtttactcatttagcggcgatgagtaacgtagtgtcacccatcaccatgggtggcagtgtgagcaatgacctgaatgaaccattgaaatggaaaggaataatatataaggaaaaaagatgattgga

SEQ ID NO: 4605 - DNA, 293 bp, Zea mays
  Clone ID: LIB3117-009-Q1-K1-G4
tgccagattgagctgctaacttactgtggagtttacatcactgcaaaggtatcctgtgtcaggtagactcgctgaagatttgctccggctcagaacaaaatctgacttcattgcatttcttaaaatcagtctgctagatggcatggtttggtttggattggtttggtgaaggcgtgaggcccatctgaacatcggtgcggcctccttttttttttggcgaactcctttgtatgctatagcagcagtgcagtttctgtagaagaaaagatacaaggatcatttatagcatcaaa

SEQ ID NO: 4606 - DNA, 176 bp, Zea mays
  unsure at all n locations
  Clone ID: LIB3117-010-Q1-K1-C3
aacaattgttgccctttgtccaacttgctttgacagacccagcggcctcctaccaacagcacagtgattggtggtgccctcttttagattgcttattanttgtaattcaataataaagttttttggatgatgtatgtggccaaccagaaataagaagttacatttccagattttaa

SEQ ID NO: 4607 - DNA, 423 bp, Zea mays
  unsure at all n locations
  Clone ID: LIB3117-010-Q1-K1-C4
accggnccggaanngccggggggacccacgcatccgcggacgcgtgggcggacgcgtgggcggtaaggcgcctcatgttcgtaaaggagagagagccgtcaagcccaccgagttcagaaaggacatggacgccgagaaggaactcaccaagttcatcaaccagtgcaacgaaataaaagctgcgaatcttgctagcaaagagggcggtgacctcaacatagtgaaggcggatggtgaggaatctaaatcaaagaaataggaagccagaaactgaaaacgagtgtgtgaaacgtgatgcgtggtaaactgttaatgcgatgtattctgctgaagaaaattcagttccgtatggctgggtagatgaacatgtttagcgcaaagtgacggtgtaactgcaaccggggtaatggcttgcaagttttg

SEQ ID NO: 4608 - DNA, 470 bp, Zea mays
  unsure at all n locations
  Clone ID: LIB3117-010-Q1-K1-C6
cggaanncccggggggacgcacgcgtccgcgcggccccaaagtcaccgtctcgcttttcagtcctactcgcactgtcncacgcacccgtccccatcctcttccggtctcgccctcccctcacgccgctcgccgcgtccggccgcggcaacccgacctgcgtcaatcgccatgactacctcaaggcgtcttgccgataggaagatagcacgatttgagaagaatatcacaaagaggggctctgttcctgagacagtcaagaaggcaaatgattatcctgttggacctattcttcttgggttctttgtctttgttgttgttggatcatctctctttcagatcatcaagacagcatcaaacgctggtttattctgaggacaattgccaattggtcacttacttttagtcactctaaaaaactatacaagtgtatggcgtagctggtactctacaatgtcgcctttctaatgct

SEQ ID NO: 4609 - DNA, 432 bp, Zea mays
  unsure at all n locations
  Clone ID: LIB3117-010-Q1-K1-C7
cggaattgccggctggacccacgcgtccgcaaaaggtgcgacttanacatgttgactccggaggttatctgcatagtcacagcaagagttacaatcgccttggcggtgggcancaagaggtctgcggtgtccgagagaagcgagctgagaacatttggttgacagcagagggtgtttatctcccagttaacgggagcaagtgaaaaagcactttctagcatttactatttttaatgttaatcagtataggatcagatattttgccagctttcattcgtccttgtcttaagaaaaacgaacatgggacctgaccccctagtgatatgtttaagttggaatgttggatatcgatgatgtccacaagaccaagacagcgcatgcttgtaattgatatttataatccatatatgaccgtgtaaaatcccagaggcc

SEQ ID NO: 4610 - DNA, 451 bp, Zea mays
  unsure at all n locations
  Clone ID: LIB3117-010-Q1-K1-C8
cggaanngccgggtgcgacccacgcgatccgggggaaacttgtttcacttgtgccctcaaacttattcctcattattcaagaaaaccaagggcgttgggtatcattgaaagcgtgggcagacgatttacaattgaaccaatnggtaatgcaggnggtttggaatgatcgtctgtggcctgacgattggactgcagtgactgcagatggtaaacggagtgctcaatttgaacatacacttttggtgacagaaacaggatgtgaagttttgacggcacggttaccctcatcaccggacgtttttccatggttgaagaagccgtgatggggaacgccaccaacagcaacaagcgatactgttacactgggtcagcaaaaagttttgttctgctctatcagtcggccaaagctgaaatttttaaatattctagatcagagtgattagcatgctac

SEQ ID NO: 4611 - DNA, 479 bp, Zea mays
  unsure at all n locations
  Clone ID: LIB3117-010-Q1-K1-C9
attgccgggggacccacgcgtccnaattcttcaaccctacaggatccaacattcaatcgcagctggcatcttacctgtatcagccttgttcctccaacaatcatgcagccctattacagcagttacctttggtgcatttattggcacaaaacatcagggcacaacaactacaacaacttgtgctagcaaaccttgctgcctactctcagcaacagcagtttcttccattcaaccaactagctgcattgaactctgcttcttatttgcaacaacaacaactaccattcagccagctatctgctgcctacccccaacaatttcttccattcaaccaactgacagcattgaactctcctgcttatttacagcagcaacaactactaccattcagccagctagctggtgtgagccctgctaccttcttgacacaaccacagtttgtgccgttttaccacacgctgcgcctaaccttgcaccct

SEQ ID NO: 4612 - DNA, 169 bp, Zea mays
  Clone ID: LIB3117-010-Q1-K1-D12
cccacgcgtccggtcgcaatgctttgatctagaaaaagagttttttttagctgtttacgtcgacgactggtacatttgaaaaggcatattccccatctttgtggcaatgtcggggcgataccatgctgggccgaggatttttttaacgaagttatacttttgaaagatg

SEQ ID NO: 4613 - DNA, 436 bp, Zea mays
  Clone ID: LIB3117-010-Q1-K1-D5
ggaattcgcggtcgacccacgcggcgcgcatgaacacagtcgtttcatagagaagtctgagtgaacaggactattcggaagagctgtgggatcagacgcagactgtaccttgattgagatcaatgatgtgcagacgctgacagctgataggatcgaggcatatattagacgaattggcggctttgatctcgtgataggtggaagcccatgcaacaatctcgctgggagcaaccgccaccacagagatggcttggagggcgaacattcttcattgttttaccattattttaggatcttggactccgtcaagtccatcatggagcgcctgtagtttttagaaacttttgatgttctggttcgtagaattgtagccgtctttccctgtgatcaaacttgtgaatgatttgaaggtcgactggtgtaatattcatgtcac

SEQ ID NO: 4614 - DNA, 416 bp, Zea mays
  unsure at all n locations
  Clone ID: LIB3117-010-Q1-K1-D6
gaatcccggtggacccacgcgtcnccccacgcgtccgcccacgcgttcggacggatctgcggttccagagccacgccgtcctggccctccaggaagccgccgaggcctacctcgtcggcctgttcgaggacaccaacctctgcgccatccacgccaagcgcgtcaccatcatgcccaaagacatccagctcgcccgccgcatccgcggcgagcgcgcgtaggcgtatctcgcgcccggccccagtggcggcggagggatggaggagggcaatttgtaaccttatgctgtttgttcgcttttagacggcgtggtgaagaactagtgtaaaaacggctttaaagtctattttgtgcggtagttcgtgtaggccgcttcgtcccgaagcgatcttggtaaaagacttattcgtgttgcc

SEQ ID NO: 4615 - DNA, 221 bp, Zea mays
  Clone ID: LIB3117-010-Q1-K1-E6
gcatgtgcgcgtcaaggaggcagccagcccaatagcccatgcagggccaggagagcgggaataataatgttggcaaagctgctagcgcatgttagagcgtgtgatgcatagtactatagtagtatgtggaataaagcatgcatcgtgagatagtagcaatgctgttatatataactgcgtttgtgaacaacaacaataatatatatatctgtgtttttata

SEQ ID NO: 4616 - DNA, 526 bp, Zea mays
  unsure at all n locations
  Clone ID: LIB3117-010-Q1-K1-F7
gctcgtacnncggtccggaattcccgggnntcgacccacgccgtctcnngcgaagcgcacctangtcaacgactcttaaccaacctaatggctnnntccaagacnnattatcccgtcgcttggcgcgttnncttgcccnntttttgtnngagtgcannnacaaatgcngnnttcattannttccacaatnngctcacttnngctccganngtgccattattnnncacagttcctccctttccagttacccttcaatggnngcttcgaaccacccnnagctgtgcaagcctatannggctacaacaagcgcttgcggcgagccgtcttagaacaaccaattgcccaattacaacaacaatccttggcacatctaaccatacaaaccatcgcaacgcagcagcaacaagcactgagccacctagccgtggtgaaccctatcgcctacttgcaacaacagctgcttgcatccaacccacttgctttggcaaacgtagctgcataccaacaacaacaacagttgcaacag

SEQ ID NO: 4617 - DNA, 319 bp, Zea mays
  Clone ID: LIB3117-010-Q1-K1-G3
aagaagatcaacaggcgtaaggatttccttcactggtggaccaagtgaagcatgcttgtgctggggctcgcttgctacgtttctttgcactcgacctacctgtcttatctgaaataaggacggactttgctcggattcacaaatttgttgtgcctggaaggatgtatgcccaggttgtgacgaacatataacttgtgtacttggagtcagttcgcctgtaatggacaccagacctgctgtgaatctgtttttaagcttccattgtaatacagcaatacaccatatacttgtatgttaatacaccatatacttgtatgtt

SEQ ID NO: 4618 - DNA, 417 bp, Zea mays
  unsure at all n locations
  Clone ID: LIB3117-010-Q1-K1-G9
aangatttccttcactttttnaccaantnaancatncttctgctgtggttcaatttatacgtttctttgcactcaacctacctgtcttatctgaaataaagactgactttgctcggattcacaaatttgttgtgcctgtaaggatatattccctatttgtgactaacatataacttgtttactttcagtcatttctcctgtaatggacaccataccttctcataatctttttttaagcttccattgtaatacaccaatacaccatatacttttattttaatacaccatatacttctatcttaaaaaaaaaaaaaatattcttctatatctccaactttctttttatattatccaaacttactaacactttcttcctacgncataacttttctatattttcacctaaattcaattcac

SEQ ID NO: 4619 - DNA, 80 bp, Zea mays
  Clone ID: LIB3117-011-Q1-K1-A11
ccgagcggccgctcggacgactcagcttacgtacgctgtttgcgagtcagagctcttcatagtatgacctatattcaatt

SEQ ID NO: 4620 - DNA, 431 bp, Zea mays
  Clone ID: LIB3117-011-Q1-K1-A6
aatacccgggccggccgacgcgtacgcccaggcgtccgcccacgcgtccgaggtgagctcaccggaagcggagacgtgagtggtcgacggaccctgtcgatccggctgcggcgcggcgtgctagatcgctaccgaccatggtggtggaggagatcgccgagggggtgaagaacctcaccgttaccggagatgcggcggcttcaggcggagaggggcagaggaggggcggcggcggcagcagcaaccgcatccaggtgtccaacaccaagaagcccctcttcttctacgtcaacctcgccaagaggtatatgcaacagcacgacgatgtagagctatccgctcttgggatggccatagcaacaattgtgaccgtggcagatattctgaagaacaatggatttgctgttgaaaagaaaattaggacctctact

SEQ ID NO: 4621 - DNA, 346 bp, Zea mays
  Clone ID: LIB3117-011-Q1-K1-B10
cccacgcgtccgcagccctattacagcagttacctttggtgcatttattggcacaaaacatcagggcacaacaactacaacaacttgtgctagcaaaccttgctgcctactctcagcaacagcagtttcttccattcaaccaactagctgcattgaactctgctgcttatttgcaacaacaactaccattcagccagctagctgctgcctacccccaacaatttcttccattcaaccaactggcatcattgaactctcctgcttatttacagcagcaacaactactaccattcagccagctagctggtgtgagccctgctgccttcttgacacaacaacagttatt

SEQ ID NO: 4622 - DNA, 466 bp, Zea mays
  Clone ID: LIB3117-011-Q1-K1-B4
accgggccgacggacgcgtccgcggtgaggaagggtaacacatttctccgccttcaaccagtgcctatgagatctggttcctagactgccttgaaggatacggtggacaaggtttgtgaaattgtgaagaagcagcttgctcttcctgaccacactgaagtttgtggtgaatcgaaattctctgaacttggtgcggattcgctggacacggttgagattgtgatgggccttgaggaacacttcgacattagcgtggaggagtccagcgcgcagacaattgccaccgttgaagacgccgctgacctcattgacaagcttgttgctgtgaaggcataggccgcatctcttctatcattgtcttaccactctaagtttctatggtctgaagacttgtgattttctccgcactgctgttgctattcccgtgtcgtaataatacgagatgttttaagcggctgaacacacg

SEQ ID NO: 4623 - DNA, 270 bp, Zea mays
  Clone ID: LIB3117-012-Q1-K1-A1
cccacgcgttcgcccacgcgtccggctaccttcttgatacaaccacagttgttgccgttcgagcagcacgctgcgcctaacgctggcaccctcttacaactgcaacaattgctgccattcaaccaacttgctttgacaaacccagcagcgttctaccaacaacccatcattggtggtgccctcttttagatttcttatgagttatagttcaataataaagttttttgtctgatgtttgtggcttcccagaaataagaaagtacatttcta

SEQ ID NO: 4624 - DNA, 282 bp, Zea mays
  Clone ID: LIB3117-012-Q1-K1-A2
tccggtcttgaattcccgggtcgacccactcgtggcgtcacgcgtcgcgtcacacatccttccaaattcaaccacagctgtcatacattgagccacggcgctctaactaactgctgacaccttcatacaactactacaactgcaatcattcaaacaacttggtttaactaacccttaaggttactacacacaacccatcataggtggtgccctgcataaaaaggttcatcacatttaatacactgatgaacgcttattgctacacgcagttgcttacatgaa

SEQ ID NO: 4625 - DNA, 172 bp, Zea mays
  Clone ID: LIB3117-012-Q1-K1-F9
gtttttggacaggttaagtgtagatgtcgagttccatattacagagtgaaatgtgcgcctggggctgttcaaacatgaagaaagttatcgtagatgatactatggttttgtgagaatctacttcttggcgtttcgaatcttgctcgacaagtaaattaaatttattgtgcgt

SEQ ID NO: 4626 - DNA, 455 bp, Zea mays
  Clone ID: LIB3117-012-Q1-K1-G1
cggaatttccgggtcgacccacgcgtgcgacgactcactcacaagcacgacgacggggcacacgatctcacgggtgatggcgaacgagggcgtctggtccgatcgggcggtcaaggccccttcaccggagacggagagcatcgtgtggagggaggacaaggggaggttccagacgcccgacggcgaggccttccttcagtaccgcctcctcgacggccgcggggcccccgctgcggcagtgatggacctggtgcacacgtacgtgccgcggagcaagcgcgggcaggggctcgcggcgcggctctgcgacgctgccttcgcccacgcgcaggcccgcggcatgcgcgtcctccccacctgctcctacatctccgacacgtacctgcctcggaatccggcgttgaaggagctcgtggacaaggatcaagaaccccatcccaaacccagcagcatgt

SEQ ID NO: 4627 - DNA, 64 bp, Zea mays
  Clone ID: LIB3117-002-Q1-K1-H7-T7A
cggacgcgtggtcggactcggggggggacccgtgggcggacccgggggcggccccgggggtccc

SEQ ID NO: 4628 - DNA, 311 bp, Zea mays
  unsure at all n locations
  Clone ID: LIB3117-006-Q1-K1-D9-SP6A
cccacgcgtccgggaggtggtacctttgatgtctccctcctcacctttgaggaaggaatctttgaggtcaaggccacagctggtgacacccatcttggtggtgaggactttgacaacaggatggtcaaccacttcgtccaggagttcaagaggaagaacaagaaggatatcactggcaaccccagggctctccggaggctgaggaccgcttgtgagagggcgaagaggactctgtcttccactgcccagaccacgattgagattgactcgctgtatgagggcatcgacttctactncaccatcacccgtgc

SEQ ID NO: 4629 - DNA, 539 bp, Zea mays
  unsure at all n locations
  Clone ID: LIB3117-006-Q1-K1-D9-T7A
gaaaagaagaattaccgtatcacttaaggtttttcagtagccgcgataacatggaaccgaccgactatcacgaggtccaaaaaaaataaccaccacaaaagtaccagcccaccacaaataaagtttaagcggacacaccgcaccgaccgacgacgataactcgcggcagcgactgggccagccagcaactgcagcacgctcaagactgacaacaaaccgcttagtccacctcctcgatcttggggccagggccgccgctgccagcgggggcgtcctcgtccatgccgccagcgccgcccatgtcttcacccgcgccctggtacatcttggcgatgatggggttgcagaggctctccagctccttcatcttgtcctcgaactcgtccgcctcggcgagctggttggcgtccagccagctgatggccgcgtcgatggcgtcctcgatcttcttcttgtcatcggccggcagcttggacgcaatcttctcgtccttgatcgtgtngcgcatgttgtaggagtagttctccagcgagttcttg

SEQ ID NO: 4630 - DNA, 419 bp, Zea mays
  Clone ID: LIB3118-003-B3-R1A
caattctaaatggtggtcagaacggaagtaccatgtctgcgcttggctctgagctagagaatgctgcagcagccatggccaatggccacgagccatcaggtagtggtgtttagccatggggtaaagccacgagcatcatcgcgcaatgatctctgcagtaggcggtcagttggagcctgcttagatatggaatcctgtgcctgtaggttttaagagctgcgacaatgttttgtcccgtgtaatcaagtttgcagccgttgcggctatagcaagtttgtttcttgtcttgagtcgtgactgttaagaactgatgaagttcattacttacttgcgtgtagttatacttagatatgagatgttctagccatgcagcaacgttttctatcaatgccagcaattagggagcgagcgtttggcac

SEQ ID NO: 4631 - DNA, 60 bp, Zea mays
  Clone ID: LIB3118-011-B1-F1A
gaagcaattttattttatattttgagaaaatatttggagataataagtgtatcataatgt

SEQ ID NO: 4632 - DNA, 474 bp, Zea mays
  Clone ID: LIB3118-011-B1-R1A
cccacgcgtccgcaccatgactagtgctgtagcaaggtcagccaagaggaagagaaagaatctatacaggggtatccgccagcaccttggggcaagtgggctgctgagatcagagatcctcagaagggtgttcgtgtttggcttggtactttcaatagtcctgaggaagctgcaagagcttatgatgccgaagcgcgcaggattcgtggcaagaaggccaaggttaactttcctgatgcaccagcagttggtcagaagcaccgttctggctcagcttctgctaaagcatccaagtcaagttttggacagaagcctatcgtcaaaggaagtaactcctttggctgctcagacttgggctgggagaatgataccaagacaccagacatcacttccattgctcccatttccactattgcggaaggcgacgagtctgcatttgtcgacagcaattcaaacagctcatttgtgcttcct

SEQ ID NO: 4633 - DNA, 409 bp, Zea mays
  unsure at all n locations
  Clone ID: LIB3118-014-Q1-K1-B4
caagcataaaatccagggagtaggcccagggtttctacctgaagttctggacacctctgtcggcgacgagaccgtcaccgtgagcaccgaggaggccatggcgaatgcgaggaggctggccagggaagagggcctgctcgtgggcatttcttccggagcaaacctggcagcttgtttgaaggtcgcttcgagacaggagaacaagggcaagatgatcgtcactgtgttcccaagtggcggcgagagatacatcaactccgacctcttttcacatgtgcgagaggagtgcattgccatgacattttgatcttccttttttcttttggacactatggtctgaatggtgtcagcattctccacaccacacagacatatnttcaggacatggtcgtatcatggaatgaatgac

SEQ ID NO: 4634 - DNA, 435 bp, Zea mays
  Clone ID: LIB3118-014-Q1-K1-B5
tcggcaacatagaaagcacaatagtgtaccaacaatggcagccaaaatattttgcctccttatgctccttggtctttctgcaagtgctgctacggcgaccattttcccgcaatgctcacaagctcctatagcttcccttcttcccccgtacctctcaccagtgttgtcttcagtatgtgaaaacccaattcttcaaccctacaggatccaacatgcaattgcatcaggcatcttacctttatcacccttgttcctccaacaatcatcagccctattacagcagttacctttggtgcatttattggcacaaaacatcagggcacaacaactcgtgctagcaaaccttgctgcctactctcagcaacaacagttacctttggtgcatttgttggcacaaaacatcagggcacaacaactacaacaactcgtgctagc

SEQ ID NO: 4635 - DNA, 362 bp, Zea mays
  Clone ID: LIB3118-014-Q1-K1-B6
cggaggcgatgggaaggtgtggttcgctggtaagcgagtgcgcgggaagcttgcaatgtgggaggaagatgacatggggagcagtggcaagtgggactgggtggatggtcttcctggctatggtgatggtgtataccgtggatttgtgttcgatggcgggttcacagcgattccttgaaaacgaatcctagtctggtgggtgtccgctcaaattgcgccggtttactttgacccaggacatctacctatcttatctcatgcatgatgaaaactctagttgttgtacttgattattggaaaagatcagtaagctgtgtgtttcagacaataaaatgatgtagaccatactctatttacatatc

SEQ ID NO: 4636 - DNA, 153 bp, Zea mays
  Clone ID: LIB3118-014-Q1-K1-B7
tgtactttggctgaggaattggttcgtcatatttatgtatgcattttcactctgtgtatagagtgtactagagtgggcttccctaacaaaagggcctatagcctaatggttaaggactttcgaatagcatctacaaatcttgggttagatttc

SEQ ID NO: 4637 - DNA, 416 bp, Zea mays
  Clone ID: LIB3118-014-Q1-K1-C1
cggacgcgtggggaactgcatgatccaggatctctcctggaagggccctgccaagaactgggagaacgtgctgctcagcctcggggtcgccggcggcgagccaggggttgaaggcgaggagatcgcgccgctcgccaaggagaacgtggccgcgccctgaagagttcggcctgcagggcccctgatctcgcgcgtggtgcaaagatgttgggacatcttcttatatatgctgcttcgcttatgtgatatggacaagtatgtgtagatgcttgcttgtgctagtgtaatgtagtgtagtggtggccagtggcacaacctaataagcgcatgaactaattgcttgcgtgtgtagttaagtaccgatcggtaattttatattgcgagtaaataaatggacctgtcgtggggggagtaat

SEQ ID NO: 4638 - DNA, 414 bp, Zea mays
  Clone ID: LIB3118-014-Q1-K1-C10
gaactctgctgcttatttgcaacaacaactaccattcagccagctagctgctgggtacccggggcaatttcttgcattcaaccgactagcagcattgaactctgctgcttatttacagcagcaacaactactaccattcagccagctagctgatgtgagccctgctgccttcttgacacaacaacaggtggtgccgttctacctacacgctatgcctaacgctggcaccctcttacaactgcaacaattggtgccattcaaccaacttgctttgacaaacccagcagtgttctaccaacaacccatcattgggggtgccctcttttagattgcttatgaattatacgtcaataatgaagtcttttggatgatgcttggggcttccagaaaaaagaaagtacctttttagatctt

SEQ ID NO: 4639 - DNA, 52 bp, Zea mays
  Clone ID: LIB3118-014-Q1-K1-C12
cccacacgtccgctgacacttggtctgacttttattcaaaccactaacaaca

SEQ ID NO: 4640 - DNA, 457 bp, Zea mays
  unsure at all n locations
  Clone ID: LIB3118-014-Q1-K1-C3
ggtgattgctgagtacaccgtccgtaccctccagaggaccgtccctgctgctgtgcctgcgtgggtcttcctctctggtggacagagcgaggaggaggccacccgcaacctcaatgccatgaacaagctcagcaccaagaagccgtggtccctgtctttctccttcggccgtgccctccaggcgagcaccctcaaggcctgggctggcaaggtggagaacctggagaaggctagagctgccttcctcgccaggtgcaaggccaactctgaggctaccctcggcacctacaagggtgatgctgccgccgacaccgagagcctccacgtcaaggactacaagtactgagttgcttctctttgcgtgccccgtttggaactcctgcctacgagctangttgcggagtgtggcttggctcgtagagcttattttctgacattccaaaaacatgctttctat

SEQ ID NO: 4641 - DNA, 421 bp, Zea mays
  unsure at all n locations
  Clone ID: LIB3118-014-Q1-K1-C5
cggacgcgtgggtgctcacctcatccgttcgacaaatccacacgaatcctctgattcanaggggggtggtggcattgatcagacgcctgccatggcggatcacttcgtggattcggcgaacaatgtgatcattgaggaggtgaacaagggcctgaacccaggaatggtggttctgcttgtggttgcaagcttcctgctgctcttctttgtggggaactatgcgatgtatgtgtatgcgcagaagacgctcccgccaaagaagaagaagccggtgtcgaagaagaagctgaagagggaaaagctgaagcaaggggtttttgcgccgggagagtaaacggccatgctgccgatcctcccgttcagagctcctattcacatgattattaaagaaaaaaatttatatatatataccagctggagc

SEQ ID NO: 4642 - DNA, 428 bp, Zea mays
  Clone ID: LIB3118-014-Q1-K1-C6
cccacgcgttcgcttttcgctcggtgctccgtttgagctcaaatttttacagcagattcctgactccattctggggtgacccaaacttgattaggtaccttggagaggaccatcaaggacttgggaaaggccaaggtgttgaggaggagcagcaagggcgtccacaacaggaaggagatcaagtccgagtcgcctgcgactctatctcgggttccaggaccagtctgcactaaaatagacgtccaagatgcatcctgactccgattgcgacggactggatatggttggaaagataacgagattatctaaccaacccaaatggttccaccctaaaattcatccggagtcaacggaaatcgtcgaaacaactcagcgttcagattctgttttggtgctgcgacaccgtctgttgggcccttgggccgtgt

SEQ ID NO: 4643 - DNA, 257 bp, Zea mays
  Clone ID: LIB3118-014-Q1-K1-C7
gggaattaatggcgtcgtcgtctagcagcattcaccgccgcctcatcctctcaggcgccgggctgctctccgtgcgtggcgggtgccaacgccagcgccgggacctcctgcgtgccggggtgggccatcccgcacaacccgctcccgagctggcgctggtaccggaccatcccgacctgcggcatcgggccgtcccttccgtggtccgagcttgaataggagatgcctgccgggaagcttggcggacaatccccggc

SEQ ID NO: 4644 - DNA, 268 bp, Zea mays
  Clone ID: LIB3118-014-Q1-K1-C9
aaataacattataatcttatttcttctcatctttctcatctgatgcctaagggaggcgacgggattgttgcaatgggtattgggaacttcacaaccaccacagcaacacgactcgactgactgctaaggagttttacacagggaacgaaccagtactcccacataacatctgcaacttcaacacttgcaaagcatcattatttttaatcacgggaatggtaacacacacttcaagcagtgatggttgtcttttacgcacaacccgcta

SEQ ID NO: 4645 - DNA, 420 bp, Zea mays
  unsure at all n locations
  Clone ID: LIB3118-014-Q1-K1-D3
cccacgcgtccgcccacgcgtncgggcacgcgcgggtacctggcccccgagtggtaccgcggcgccgggcccgtgacggtgaaggcggacgtgtacagctacggcgtggtgctgctggaaatcgtgacgtgccggcggagcatggagctggaggaggcaggcgaggagcggacgctcatggagtgcgcgcacgagtggttggtgcgcggcgaggtgtggcgggtggttggcggcgacgatgccgtggacgtcacggaggtggagcgggcggttaaagtggcagtgtggtgcgcgcangcggagccccaggcgaggcccgacatgaggagcgtcatcctgatgctcgaaaggctcgtggaggtgccgttccccccgccgccgccggcgttcttgtgatccccagataccggtgggggattg

SEQ ID NO: 4646 - DNA, 261 bp, Zea mays
  unsure at all n locations
  Clone ID: LIB3118-014-Q1-K1-D6
ccgggcggtcctttttagtttataccccggnccccaacgttggcgtgatgctgctggcatgtagcccaacgctcccccctcggcttcaccggcggcggcggcaacgaccgtgaaaactacatcgggtgctagcttcgacggtggtgcgtgccctgttgacaatagggcgcgcggggcgcgggcagctcgtatgcgttccatcgggcatgtaggggaactatacatctttgggaggtctccatcatccttcgtgggagagaa

SEQ ID NO: 4647 - DNA, 210 bp, Zea mays
  Clone ID: LIB3118-014-Q1-K1-D8
gcctacccccagtttttctttcttcaaccaactgacacatggggcttggtcttattacaggggaacaactactaccatttaccatctatccgtgtgagccctcctacctatttgacacaaccacacttgtttgcgttataccaacactcttaacctaactcttgcacccctttacaacttcaacaattgccatccaattcaaccaacttt

SEQ ID NO: 4648 - DNA, 403 bp, Zea mays
  Clone ID: LIB3118-014-Q1-K1-D9
cccacgcgtccgaccttccggatcgttgccgccgcggggttcacgctaatgactggactcgatgcggcttttacggggacagagcactatggcttcaacctcaagaccgctatgttcatcctgttgcttgcagttgtgtcgagcttgagccgtctggcaatcccacttcacatgcctgaggcgggagtgggaggagtcatcgagttcggcattgttagtatagctctctcttttcccctgctggcgcttctggctgccattccattggtgttcaaggtcttcgtcgaccattacatcaatcgctagtctttgggttgtctggcgcaattcttcctgtggtacagtgccagtaatgaatgatgcgtttttaaactaagggcataaatttaaaaatcttattttt

SEQ ID NO: 4649 - DNA, 268 bp, Zea mays
  Clone ID: LIB3118-014-Q1-K1-E1
actagttctagatcgcgagcgggccccttttttttttttttttggacaagaggcgatatcggttcagctgactcacagcatattcgaaattcgaaatcgttgaaggaatgcaaaatctacaactccttgtgggggaaaaagagcagtatcaattcaaaatggtggcattcaccgtcctgaactcacgaattcgaattcaccgtcctgcagttgagcctgacctcccccgcggaacccgtgagcgggccgatgttgccgagcttgacca

SEQ ID NO: 4650 - DNA, 371 bp, Zea mays
  Clone ID: LIB3118-014-Q1-K1-E12
ccaactagctgaggtgaaccctgtcgcctacttgcaacagcagttgctttcatggaacccggttgctctggcaagggtagttgcataccaacaacaacaacaattgcaacagcttctaccagcgctcagtcaactagccatggggaaccctgccgcctacctacaacagcaacaactgatttcatctagccctctcggtgtgggtaatgcacctacatacctgcaacaacacttgctgcaacagattgtaccatctctgactcaactagctgtggcaaaccctgctgcctacttgcaacagctgctttcattcaaccaactgactgtggtgaactttgctgcgtacctacaacagcgacaacagttactta

SEQ ID NO: 4651 - DNA, 208 bp, Zea mays
  Clone ID: LIB3118-014-Q1-K1-E2
ggagaacgatggctgtatcaatgctgttttgctagtgtagagccatagtgagattttgttgatggtggtgaatcgtcccatttgtatctgctccgatatgctattttttgaccatgtcatggctaatcccagtagtttgttgtgcaccatgggcataatgagcattctgtattcacgctgtgtgctacaaacatatatggagtaatat

SEQ ID NO: 4652 - DNA, 378 bp, Zea mays
  unsure at all n locations
  Clone ID: LIB3118-014-Q1-K1-E4
cccacgcgtncggctagctgctgcctacccccaacaatttcttccattcaaccaactggcatcattgaactctcctgcttatttacagcagcaacaactactaccattcagccagctagctggtgtgagccctgctgccttcttgacacaacaacagttattgccgttctacctgcacgctgcgcctaacgctggcaccctcttacaactgcaacaattgctgccattcaaccaacttgctttgacaaacccagcagcgttctaccaacaacccatcattggtggtgccctcttttagatttcttatgagttatagttcaataataaagtttttttgatgatgtttggggctttccagaaataagaaagtacatttct

SEQ ID NO: 4653 - DNA, 59 bp, Zea mays
  Clone ID: LIB3118-014-Q1-K1-E7
aaaaaaaaaaaaaaaaaaaagacaaatcaaacgaaaaaaaaaaaaaaaagaggcgaagg

SEQ ID NO: 4654 - DNA, 87 bp, Zea mays
  Clone ID: LIB3118-014-Q1-K1-F1
caattcctagtgagaacttttgtaacagaagaatccaagtatttcatatcaaagtttaaaagtcttatcgagggttcgcggtgtggg

SEQ ID NO: 4655 - DNA, 423 bp, Zea mays
  unsure at all n locations
  Clone ID: LIB3118-014-Q1-K1-F4
gagaagactaaggcaaactttgataagaaggagagcacaagctcaaagaaggctaagactgaggatgaggatggctcgaagtcagaggttgatgacnaggatggcagcagtgacgaggaaaacgatgacgatgagtaaacagtctccaaggtcacgaggtagcaaatcgagtgttaggtccccaattagcttactgttttgctgcctttaaatgttaagttgtttcaaacaggtgtttatgaaggggatctattagtttcgcgatgtcgttagtttagtgcattagcaaagaaaaagccgaatgctgctagctgttctgttgcttttcttttgctaaccacttgtgtcacaactttctgtacctgcttcattgactaatctagtgactagtcagntattggttcaatatttggtcttggcttt

SEQ ID NO: 4656 - DNA, 355 bp, Zea mays
  unsure at all n locations
  Clone ID: LIB3118-014-Q1-K1-F5
gttgtactgagctgagctgccggaggcagaataggagaggcaggcgatgaccatggcnacgagaggcggcgtgcgtgctggcggtgtgggtgctcntcncctcgggcctgtgcgacctgggctcagcgcgcgcgcccctgggcagcaagccgcagcgggagttcgactacttcgcgctctccctccagtggcccggcaccatctgcgcctccacccgccactgctgcgccaccaacggctgctgccgctcggagccgctccagacgttcacgatccacgggctatggccggactacgacgacgggacctggccgtcgtgctgccgccgcacccaattcgagatggacaagatatt

SEQ ID NO: 4657 - DNA, 373 bp, Zea mays
  Clone ID: LIB3118-014-Q1-K1-F6
gccccctcgcagacgagacgcgtggtagctatggttttggtctcgccgcgcacgccttctggagcttctagacgttcgaggaggaggaggggaggcttccgtcgccgccgccgcagtcatggcgttcaccaacgtgcagcgtatcatgacccagcccatcaacctcatctttcgtttcctccagagcaaagcgcgcatccacatctggctcttctagcagaaagacctcccgattgagggtcgcatcatctgattcgatgagtacatgaacttggtcctcgaagatgctgaggaaatcaacgtcaagaaaaacactatgaagacacttggccggatacttctcaaaggtgacaacataactttgatgatgaac

SEQ ID NO: 4658 - DNA, 455 bp, Zea mays
  Clone ID: LIB3118-014-Q1-K1-G1
cccacgcgtccgaaggaaagctgaagtgttacaagctaaacactgacgagaaccctgacatggcgacccaattcggcatccggagcatccccaccatgatgatattcaagaatggtgagaagaaggacgcggtgattggagccgtgccagagagcaccctggtcacctgcatcgacaagtacgttggtgggaggtgaaatctcaatctgggccactagccttggacttccatatgtagacggatgggtatgtgtataccgttcatatcgaactgctgttgagtagttgtatgtagataataatgtgatgctcactccaataaatgtgattcaaggatgggcaagtcatctggatgaaagggtgcttttggtctagctttttaaggtctatggttcattcaattgaggtggggccggattgacatcttgatagtcatatgcagcttatttttcttc

SEQ ID NO: 4659 - DNA, 430 bp, Zea mays
  Clone ID: LIB3118-014-Q1-K1-G10
cccacgcgtccgaagaatatgattatcaatttatgcaagcaaggaatgataaaaggcttgcggagaacatgactccaacggagggagcttcactaaagaattcatagggtgagaatactccaccgagttcattcaatagaccaccgcagtcccttattgacgactatgttggctcgggaaagcgtaagagaggcttaccactttttgcatcctcccttactcgccaggacatgccgtctctacaatgataagaccctgccgcgcagtagtgcttacttcctctttcacgtgagtcgaataccttactagcttaatttatgcaatgatgacatacggtaattattaatcctaaattggacatttatgtgcatgcttccttaatatcttacatctcgacaactgtttcttcccacttaacacatatcccttt

SEQ ID NO: 4660 - DNA, 361 bp, Zea mays
  Clone ID: LIB3118-014-Q1-K1-G2
agaaaagagagtaatattgtgctctcatctcatggtagttacaaaatgcaagacaacgaggaatgtacacctgacaagtacatttttcctaatacttgtgatcatttgttcagcctcaccgtcatgcaaaggtatatgtatataatatagagataattacttccacatcacattgttacatattaatcctttagtcgcaaataacagttcactttatctttatcgtaagttaaactactttaaatttaaacaagtttccataaaaatatcaacatgtacaaatttaaataaatacactaacgaaatagggtgatagagtatttttaaaactgattcgatattttagaatgtggtacatttt

SEQ ID NO: 4661 - DNA, 410 bp, Zea mays
  Clone ID: LIB3118-014-Q1-K1-G6
gcgtggctcgaagcagccaacagtctgctcagtctgggtgcaccggactgtccggtagtgcgccggacagtgtccggtgcgccaggctagctctggcgaactggctgctctcgggacttcgacggcggcatacggctaaaattcaccggactgtccggtggtgcaccggactgtccggtgagccaacagtcggccgggtcaacggtcggccacggaatccgcgcgcgacgcgtggcaagtgccaacggtcggatggggcaccggactgtccggtgtgcaccggacagtgtccggtgcgccaacggctccaagactgcaatggtcggcttcgccaaataaggaaagagatccgcaccggacagtgtccggtggtgcaccaaactgtctggtgcgccaggcgacagaaggca

SEQ ID NO: 4662 - DNA, 348 bp, Zea mays
  unsure at all n locations
  Clone ID: LIB3118-014-Q1-K1-G9
acgtggtcatcctgcatcagcactactagtttttcttgaccctgagcanaacaaggcattcggccatcactattgggaggtggcgttcgacctgtcaaaagtcatatttgttgcaactgccaataggatgcaacctataccccctcctctgttagacaggatggaaatcattgagctgccaggctacacacccgaagagaacttaaaaatagccatgaaacatctcataccaagggtattggagcaacatggcttgagtacgacaaatcttcagattcctgaggctatcgtcaaacttgtcatcgagaagtacacgagaaaaacttgtgtgcgcatctttaacggacc

SEQ ID NO: 4663 - DNA, 241 bp, Zea mays
  Clone ID: LIB3118-014-Q1-K1-H1
gcgtgcgccacgcgtcggagcggccatctgagattttattttgttggatcaacatatattggcggcgaaagttgggaccactgagcgtctatgcctgtgagataggatgcgcctagctgttcggctgctagaaaagttggtgcacccacagcatttcctgagagggaaaaaaaagcctactgctcactttaacaggtcaacagcatcgttacctgcctcttcagcaggtcaacagctttta

SEQ ID NO: 4664 - DNA, 338 bp, Zea mays
  Clone ID: LIB3118-014-Q1-K1-H12
attatgtataaaaaaaaactataaaaagggagaaaagggaaaaaaaagagaggggaacaaaaaaaaaaataaaaaaataaaataaataaaaaaaaaaaaagaaaaacaaaaaaaaaaaataaataatataaaaaaaaaaaaaaaaacaaatactataaaataaaagtaaaaataaaaaaatataaataaaaaagaacaaaaaaacaaataaaaaaaaaaaaaaaaaaaaaaaacaaaaaaaaaaaagaaaaaaataaaaaaataaaagtataaaaaataaaaaataaaaaaaaaaaaaaaaaataaaagaaaaagtaaaaataaaaaataatagatat

SEQ ID NO: 4665 - DNA, 270 bp, Zea mays
  Clone ID: LIB3118-014-Q1-K1-H2
gcctggaggagggcgccatgtgcgagccgctgagcgtgggcgtgcacgcgtgccgccgcgcgggggtggggcccgagacgggcgtgctcgtggtgggcgccggccccatcggcctggtgtcgctgctggcggcgcgggccttctgcgcgccgcgcgtggtggtcgtggacgtggacgaccaccgcctggccgtggccaggtcgctgggcgcggacgcggcggtgcgggtgtcgccccgcgtggaggacctggcggacgaggtggagcgca

SEQ ID NO: 4666 - DNA, 366 bp, Zea mays
  Clone ID: LIB3118-014-Q1-K1-H4
cccacgcgttcggttggtgtctacaatggcaagaccttcaaccaggttgagatcaagcctgagatgattggccactatcttgcagagttctccatttcctacaagccggtcaagcacgggaggcccggtattggtgccactcactcctcgcggtttatccctctgaaatgagttgttacccacatctgtagcgtcccaagggtgtccagtggcattgccctttcagctttgctgcttgtttcgaacaagttacatacccaagacattttgttctgttttcagcactagatttcaaagctaagcattgcataactatgctgctttgttggaagtatgtgagtataatcttatctaatatgtgatgtt

SEQ ID NO: 4667 - DNA, 380 bp, Zea mays
  Clone ID: LIB3118-014-Q1-K1-H5
tgcatacggtgtttccaaagagttgggaattggtgattctgtcaccaagcttcactgtgatatgtctgatgcggtcaatatcctcacacatactgatgaaataaaactcaaagcaaaaaggattgccgcggtggaaaagaagaagcggcgtttaggaatgaagattctatctaccaaggaagcaagtggaggccttcaacggtgtgcagattatgttggtatgccaacagctcccagtgaatctaacaaggagccaaggcctgaagagtgtgtaaatgaactgggcattaaacaaccagtacagcatgtttgctttcgaggagcaggaaggagttcaagatgatgccaaagcagatgcaaatgttatgaatggttctttt

SEQ ID NO: 4668 - DNA, 82 bp, Zea mays
  Clone ID: LIB3118-014-Q1-K1-H6
tgccattaaaggcgccaacagagggcattgttcgtccattcagagatcagttcacacacacgcacagacacagaaagagggg

SEQ ID NO: 4669 - DNA, 325 bp, Zea mays
  Clone ID: LIB3118-014-Q1-K1-H9
aaaaaaaaaaaaaataaataaaaaaaaaaaaaggagggaaaaaaagagaaaaaaaaaaaaaaaaaaaaaaacaaaaaaaaaaaaaaaaaaaaaaaaaaaaaaaaaaaaaaaaaaaaaaaaaaaaaaaacaaaaaaaaaaaaaaaaaaaagaaagaaaaaaaaaaaaagaaaaaaaaaaaaaaaaaaaaaaaaaaataaagaaaaaaaaaagaaaaaaaaaaaagaaagaaaaaaaaaaaaaaaaaaaaaaagaaaaagcaaaaaatatataaaaataataaaaaaaaaataaataaaaaaaaaaaataaaaaataaaaaaaataa

SEQ ID NO: 4670 - DNA, 371 bp, Zea mays
  Clone ID: LIB3118-014-Q1-K1-B3
cccacgcgtccgattgagaccaactagcaacatagaaagcacaatagtgtaccaacaatggcggccaaaatattttgcctccttatgctccttggtctttctgcaagtgctgctaccgcgaccattttcccgcaatgctcacaagctcctatagcttcccttcttcccccgtacctctcaccagcggtgtcttcggtatgtgaaaacccaattcttcaaccctataggatccaacaggcaatcgcagctggcatcttacctttatcacccttgttcctccaacaatcatcagccctattacagcagttacctttggtgcatttattggcacaaaacattagggcacaacaactacaacaacttgtgctagc

SEQ ID NO: 4671 - DNA, 312 bp, Zea mays
  Clone ID: LIB3118-011-Q1-K1-F11
gaactctcctgcttatttacagcagcaacaactactaccattcagccagctagctggtgtgagccctgctgccttcttgacacaacaacagttattgccgttctacctgcacgctgcgcctaacgctggcaccctcttacaactgcaacaattgctgccattcaaccaacttgctttgacaaacccagcagcgttctaccaacaacccatcattggtggtgccctcttttagatttcttatgagttataggtcaataataaagttttttgtctgatgtttgtggcttcccagaaataataaagtccatttct

SEQ ID NO: 4672 - DNA, 152 bp, Zea mays
  unsure at all n locations
  Clone ID: LIB3118-011-Q1-K1-F2
cccacgcgtccgcccacgcgtacgctcactcttttgctgacgcgtgcgccctcacacaacngggagaatttctgacattcaaccggcttgcttttactaacctcacagcattctaccaacaacccatcattgttggggcccacttttacatt

SEQ ID NO: 4673 - DNA, 281 bp, Zea mays
  unsure at all n locations
  Clone ID: LIB3118-011-Q1-K1-F3
ctcgtgcgacttgaccctttactctgtttgtgttaacaaagaaatgactcntctgggggggcttctgccgtatgttaccataccgtctttcacatncgagaagaagaaagaacaactagacgtcgtactctaattatggtacccttcatgtgtgctcactcaccgctctatagacttttgattggctccaacatcttaaatttattccggccgctggaagattattgattagtcaaacccttgctgaatggaacaacataacactcacacttcttggtcca

SEQ ID NO: 4674 - DNA, 288 bp, Zea mays
  unsure at all n locations
  Clone ID: LIB3118-011-Q1-K1-F4
tgtagatcgtgagcgggcggcctttttttttttatttcggggaactacaatatcaccncggggggtatcaggagggcgagtttgctttcacggacttaaagcccttcggttaagcacacaccaactttatcgcacgcaatcagttaacaataagagctatgcagtgaggattacacacccagacctagtaaaaggatatgggccactccatcgtagccatgaacggtcggtactttgtaggacgtcttatcttcgtggtgcctgtaccagccggcggcggacatggac

SEQ ID NO: 4675 - DNA, 288 bp, Zea mays
  Clone ID: LIB3118-011-Q1-K1-F5
cccacgcgtgcgactggacgctgcagcctgtctgagtcaacaaagcgatgacgctactggcgggtcttctgcagtatgttaccatagttcttccacaagcaagaggagaaggatcactagacgtctactctaattgtggtacgcttcaggtgtgctcctcaccgctctaggagtttttgattggttcaaacatcttaaatttagttcggccgctggaggattatggtttagtcaaatacttgctgaatggaacaacaaaacacgcacactacttggtccataaagaca

SEQ ID NO: 4676 - DNA, 364 bp, Zea mays
  unsure at all n locations
  Clone ID: LIB3118-011-Q1-K1-F8
tctagatcgcgagcgggcgcccttttttttttttttttggggaacgacaatatcatctcaggggggataagcacgacaagtttactttcacggacagaaagccctatggtaaaacacacaccaactttattgcacgcaatcaggtaacaataagagctatgcacggaggattacacaccctcacctaggaagactatatggcccactttctcgtagccttgatcggtcgggactttgtaggacgtcttatcttcgtggagcctgtagcaactggtggcggacatggacacgccttgtanctctacacctttcaaccgcgaggtcttctcataagtggtgacaggaatatgcacaaatggtgcag

SEQ ID NO: 4677 - DNA, 430 bp, Zea mays
  Clone ID: LIB3118-011-Q1-K1-F9
cgtcgaacagaacagcatgaagatggtcatcgttctcgtcgtgtgcctggctctgtcaggtggcagcgcctctgcaatgcagatgccctgcccctgcgcggggctgcagggcttgtacggcgctggcgccggcctgacgacgatgatgggcgccggcgggctgtacccctacgcggagtacctgaggcagccgcagtgcagcccgctggcggcggcgccctactacgccgggtgtgggcagccgagcgccatgttccagccgctccggcaacagtgctgccagcagcagatgaggatgatggacgtgcagtccgtcgcgcagcagctgcagatgatgatgcagcttgagcgtgccgctgccgccagcagcagcctgtacgagccagctctgatgcagcagcagcagcaactgctggcagcccagggtctc

SEQ ID NO: 4678 - DNA, 274 bp, Zea mays
  Clone ID: LIB3118-011-Q1-K1-G10
ctgcgacatgcaccgctcgcgccgccgcgcccgcatcgtcgccgccgccctcctctccgggttcgccgccgccggcggcgggctcacggtgtacctcgtcttccgtccgctgaagccgcaggcctccgtggtgcgcgtcgccgtgtaccgcatggccacggccgccgggaactcctcggaggggcgggccccgccgccgtacacgctcgcggcgagcgcgcggttcacggcgctgctgcacaacccgagcgaccgcgccgtggtgttctacgac

SEQ ID NO: 4679 - DNA, 190 bp, Zea mays
  Clone ID: LIB3118-011-Q1-K1-G11
acctgtattaaatctactttttttctttattacctatcttcttattattccatgggggctatttatacgcgtcgggaggggcaaatctaaataaatataacttcttcacttactttggtatcttaaactagcaaacaccaccagcaaaaacttcataaccatacattcctttgtcagacctcgatctaca

SEQ ID NO: 4680 - DNA, 435 bp, Zea mays
  unsure at all n locations
  Clone ID: LIB3118-011-Q1-K1-G12
gaagaatcttggtaaagtcgacgtgtgttctgattcagatgagtacttattaggccatgatgatgatgatgatgtattggatgttgaaagtgaaaatccagatgacatcttagatgactgttctatttcagatgattctgagatggatttaggggatgcagatgccagatgaattttgcagagactgagttggtggcatgtgtgtagcaaaaaagaacacaaaaaaaaagttgtgttaagtttgtttatgaaaacacagttcagcaataactgtttgtgactntaagctcaggatataattgtgtactatactctagctgctgtcatctatggagttccaagtaacacttgaggcggactgtattcttctctcgtcagttgtatttggactttcaaatattagtcaaagctcaaacagatcacaatgatttgaaa

SEQ ID NO: 4681 - DNA, 378 bp, Zea mays
  Clone ID: LIB3118-011-Q1-K1-G2
cggacgcgtgggcaagggtggtccacaaaaagagctaaaagcaatacagtacttggagagaagagagtgtgagtacgaccagaaaatatccattgatttctacaaggaaggagatcccttgaaaccagctgtgacgggcgtcttagtgttcgtttccactccagatccaattggcaacaagtactatcttggccctgctcctctgcaggatatggcaaggcaaattgctacagccaatggccctactggctataatagggattacctgttctcaatggagaaggcattagccagcattagccacgaagatgattcgatcatagagcttgcaaacgaggggaggaaggtgctcaacataacaaaggagaccaagatcac

SEQ ID NO: 4682 - DNA, 289 bp, Zea mays
  unsure at all n locations
  Clone ID: LIB3118-011-Q1-K1-G3
ctgacgcgtgggcaagggtggtccagaaaaatagctaaaagcaatacagtacttggnnanaagggagtgtgagtacgaccagaggatatccattgatttctgcaaggaaggagaacccttgaaaccagctgtgacggccgttttagcgttcgtttgcactccacatccaattggcaacaagtactatcttgggcctggtcctctgcaggatatgggaaggcaaattgctacagccaatggccctactggctataatagggattacctggtttcaatggagaaagcatta

SEQ ID NO: 4683 - DNA, 270 bp, Zea mays
  unsure at all n locations
  Clone ID: LIB3118-011-Q1-K1-G7
gccactggatcgtgatttcagtgagccccaacttctgcagcactagtattttgnnnagagggatcngctataagcatgccatctgcccaataaacttgggcatcatgtaagatcaatgctgttagtttttgtcccagtttgtgcttgcgtttgcttatacttaccatcataagaatggttgtctgaaaagcttgttcttctgtaagaagtgttgaatgttggaaatcctaaccctcggggttgggagattaaaatataaacttagtttgg

SEQ ID NO: 4684 - DNA, 284 bp, Zea mays
  Clone ID: LIB3118-011-Q1-K1-G8
acggagtcccggacctgtctagattctaccctggcccccaacattggcctgatgctgttgcgggggagcccagcgctgcgccctgggctttaccggcggcggaggcaaccacagtgaagactacatcgcgtgctagctccgacggtggtgcgtgccctgttgaccatagggcactcggagcgcgcgcagcttgtaagcgtttgatcggacatgtagggcaactatacatctgtggcaggtctacaactctccatcatcctgcgtgggagagaacatggttatgg

SEQ ID NO: 4685 - DNA, 368 bp, Zea mays
  Clone ID: LIB3118-011-Q1-K1-H11
gccaagttggtcatggaaagcttgaaattttattgcatgacaatgatgaagaggaggtagcattgcagagagttgcccaagctgaatgtgcggcaaaataggttgtacaaagagctattcgactgcgcaacaaggtccaattctcatgacgaacacagagctcgcaacatacaaatctatcatggctctcaggattgccgaggctgctagggtatcagactcgtcccaagatattatttgtattatcctcgactaaagaataatatgggttcattatttttgtgaagagcatgggaaacactcttcgtagccatgatattgtctttttgatgtgttgctcattgttttttaagaatatactgccttgt

SEQ ID NO: 4686 - DNA, 210 bp, Zea mays
  Clone ID: LIB3118-011-Q1-K1-H12
agggagatgggctgagcattatattcccaagtgaaccatggctatcaatatcgcagggtctgtaacaaggattatataatcgtcgaacattagagcgtgggttcttgagaacgctactctaggttgtgcgtcgtttaattatatctggctactgtaaggcattcctgattggcttggttttttaagttcctcgggaatggtctgcgttgc

SEQ ID NO: 4687 - DNA, 236 bp, Zea mays
  Clone ID: LIB3118-011-Q1-K1-H2
cattcagccagctagctggtgtgagccctgctaccttcttgacacaaccacagttgttgccggtctaccagcacgctgcgcctaacgctggcaccctcttacaactgcaacaattgctgccattcaaccaacttgctttgacaaacctagcagtgttctaccaacaacccatcattggtggtgccctcttttagatttcttatgagttatagttcaataataaagttttttgtctg

SEQ ID NO: 4688 - DNA, 300 bp, Zea mays
  Clone ID: LIB3118-011-Q1-K1-H3
agcggctcatgggcaccgacgtcgtggccgcgtccacggacgcgcgcacgggcgtcacctcccgcgacgtcaccatcgacccgtccacgggcgtcgccgcgcggctctacctcccgagcctccgcgcccgcgcgcccgtggtcgtctacttccacggcggcgcgttcgtggtggagtccgcgttcacgcccgtctaccacgcctacctcaacacgctggccgccagggcgggcgcggtcgcggtgtcggtgaactaccgcctcgcgcccgagcacccgcttccggcggcgtacgacgact

SEQ ID NO: 4689 - DNA, 287 bp, Zea mays
  Clone ID: LIB3118-011-Q1-K1-H4
cccacgcgtccgcccacgcgtccgctttattgtttctaataaaggaaaggaaaatatccgatgctcaaaaggggcttaactaaaaacgaatccaaacgcagcgaatggactagtagagtcatcattccgtctgtccgggccacgaaatggcatcaggagctcaggtgaggatcaggcaatatgacgcgcgcggagtccccgggctcgcagaccagaacacggcgatccgcggggatcctggagaccagctcgggctgggccttttcgtactcggcacggacgtatgc

SEQ ID NO: 4690 - DNA, 284 bp, Zea mays
  unsure at all n locations
  Clone ID: LIB3118-011-Q1-K1-H5
gccgtgccgaccaagctgctggcgggcattcggtcgcgctgcgcgccgggcgcgnccacgtactgctcggtgacggcgcacctgtggcgcgccatgtgcgtcgcccggggcctcccggcgggcagcgacacgcggctgcgcgtcccggccaacgtccggcagcgcctgcgcccgccgctcccgccgtcctacttcggcaacgccatcntgcgggacctggtcaccgtgcgggtggccgacgtgctgtcgcatacgctgtgcttcgtgggggagcggatcaagcg

SEQ ID NO: 4691 - DNA, 195 bp, Zea mays
  Clone ID: LIB3118-011-Q1-K1-H7
catgcacgcacccggaattaactgctcgaccgacgcactccgagcgcggtcatggtgcaccgactatacaacgcgtgttcacaacatcgcgcacgggctttacctccggcgacgttagcatagatccgtgcacatgcgaaaacgctcgagtctaccttatgaacctgggcgtgctagcgcccgtgtaagtgtact

SEQ ID NO: 4692 - DNA, 256 bp, Zea mays
  unsure at all n locations
  Clone ID: LIB3118-011-Q1-K1-H8
gttcaacctctaggcgggcaagccgtctctctttcggtccagccgtctaggcgccgtcggcggatgcccctgcccccacccaggccacatcttctggaataaaaatgacagaaaagaaactttattgttcgatgaatgggcggcttgccgtggttttggaataatttggacttcgtcttttttcgcttctgttgtcgnaccattggcttaatcgattagtggattttgaagtctccttttattgccaaaagttcgc

SEQ ID NO: 4693 - DNA, 332 bp, Zea mays
  Clone ID: LIB3118-012-Q1-K1-A10
ccacgcgttcgtgccggtgtgggaacttgttctgttcactccaccgctactccgacaagcgggagtgcaagttctactaccggactgctgccacggacgccattgccaatgctaatccggtggtgaaggcagacaagctcgacaagatctatggggggttccctacgggtgggtatcaggaagattgtaaaccgcggtaactcgtcatgcggaactgctgccttgccccccgcgcctttctcttacatgtttgctgctacaatcttgttgttgggcattgcaatgcacggtgcacacttgtgtagcccgcctcgagaattcctgcctctgca

SEQ ID NO: 4694 - DNA, 335 bp, Zea mays
  Clone ID: LIB3118-012-Q1-K1-A11
cggacgcgtgggaggatattatccacgtgaaactgacaggtcaggataccattccctcagagagaacgacacacttggggcatcttatgaccgttacttgcgcaatgggatggcctccgtcggtgcaaatgacacttctagggctgccgggatgggtgctggattggctgcagggatgactgcagggatgggtgctggaatggctgcagggatggctggctatggtgttgatggtcagcgtatgatgggtgttgttggtatggacagcagagggatgggatatggtggcagacctgagccacctcttccgcctgatgcatcaagcactctatata

SEQ ID NO: 4695 - DNA, 303 bp, Zea mays
  Clone ID: LIB3118-012-Q1-K1-A12
gtgccagggtgttaacttcttctgcccactccaccggtactccatcccgcgcgagtgaacgtcagactaccggactgctatcaccgacaccatcgccaaggctaatcctgcggtgaaggcaaacacactcgtcaggatctaggggtggttgcctactgttgggtatcaagaacatcgtaaaccgcggctactcttcatgcggaactgctggcttgtcccccgcacctttatcttacatgtttgctgctacaatctggctgtgacattgcaatcacggtgcacacttgagtaacccgtctcgag

SEQ ID NO: 4696 - DNA, 387 bp, Zea mays
  Clone ID: LIB3118-012-Q1-K1-A2
cggaggcctccagagcactttgcagatcttgtcgctggccactttcgggtgcatgggcacacgattctcgcggcatgcaagcactacatggcgggtaatgatattgggtcagtggtgccagaggaggaggaggaggaggaggaggaagagtcatcagaacacaagagcggtgatgctggagcatcgggtagtgcaccagagctaggagtgatcaaggcaatccctacgaagagacgcagctcattcaatccaagcttgaaggtgctgtacgaagatctgctgatggaattcaatgtgaagggtgccgacacaaggaaattcatcgatgagaagttgaagaagaacatacctgcagccgcctgatgaacatgcttgcaggcaaagctt

SEQ ID NO: 4697 - DNA, 234 bp, Zea mays
  Clone ID: LIB3118-012-Q1-K1-A3
ggttggagaactcgacaccaagaaagtgctgatcgctgcccttgctctactggcgctcgctgggagcgccgtctacagtacaagcggtggctgtggctgccatataccaacgtttcatttaccggcttcgttctatatgccggcttcgttctatattccggcggagcagcatccgcatccatggcaataccccacttaacctccgtagcttatcccgtgccagcagttcggatc

SEQ ID NO: 4698 - DNA, 418 bp, Zea mays
  unsure at all n locations
  Clone ID: LIB3118-012-Q1-K1-A4
tcgcccacgcgtccgcccacgcgttcgcaactgtctacactgaaccctatcgcctacttgcaacaacagctgcttgcatccaacccacttgctttggcaaacgtatctgcataccaacaacaacaacagttgcaacagtttctaccagcgctcagtcaactagccatggtgaaccctatcgcctacctacaacagcaacaacttctttcatctagcccgctcgctatgggcaatgcacctacatacctgcaacaacagttgttgcaacaacagttgctgcaacaaattgtaccagctcttactcagctagctgtggcaaaccctgctgcctacttgcaacaactacttncattcaaccaactgactgtgtcgaactctgctgcgtacctacaacagcgacatcagttacttaatccac

SEQ ID NO: 4699 - DNA, 304 bp, Zea mays
  Clone ID: LIB3118-012-Q1-K1-A5
gtcgttgtcgtccagtttacacgtaacccctcgcgcttattcagaattctgaaattccaagggcgatctcctctcctcttccccgaatctcgggcgccggcgtaaccctagcccccgcgatccgctcgccggagggaaggagggatctccgcaggcgcccatggaggtgaagttgtggaacgacaagcgcgagcgggagctcctggagagctacgcggacctgtacgcgatcatcaaggccgtggagaagctggaacgggcctacgtccgggacctcgtctcattcgccgactacgaggcggag

SEQ ID NO: 4700 - DNA, 130 bp, Zea mays
  unsure at all n locations
  Clone ID: LIB3118-012-Q1-K1-A6
acgcgtccgttcaggccttcanagaaacttgcacaactggttgctgtgcaccctatggcgcactggcacacgaaggtgcttgcatgcaaacaacatgtggtgggtaacgattttgcgtacctacaacaac

SEQ ID NO: 4701 - DNA, 365 bp, Zea mays
  Clone ID: LIB3118-012-Q1-K1-A7
gattggagaactcgacaccatgaaggtgctgatcgttgcccttgctctcctggcgctcgctgcgagcgccgcctccagtacaagcggcggctgtggctgccagacaccaccgtttcatctaccgcctccgttctatatgccgcctccgttctatctgccgccgcagcagcagccgcagccatggcaataccccactcaaccaccgcagctaagcccgtgccagcagttcggatcctgcggcgtcggcagcgtcggcagcccgttcctgggccagtgcgtcgagttcctgaggcaccagtgcagcccggcggcgacgccctacggctcgccacagtgccaggcgctgcagcagcagtgctgcacca

SEQ ID NO: 4702 - DNA, 282 bp, Zea mays
  Clone ID: LIB3118-012-Q1-K1-A8
cgcccgcgtgttcaggtaccccgtggctgacgttgctgcagcaccagagatgcagcccattgcttcccagtagaagatgaaatggaatgtgaactgcataaaccaatatcaagaagtattactgtgttttgtctttgcgtaccttatggtgaactcatgcgtggttcagtatcgtttcattcctttttgttgcagtgagcctacacaagttcgtctttgttttatggataatatgtataacattatctattggaatagcaatgttgatgcttgtgctttgtc

SEQ ID NO: 4703 - DNA, 370 bp, Zea mays
  Clone ID: LIB3118-012-Q1-K1-A9
actagttctagatcgcgagcggcgccctttttttttttttttatcgagcataagccgcgcccgcgcatacatataaaaccctagctcgtaccgggcagcacgctgttatttggggatgtaaagttcttgagagtagacggaggagtctaatcaagacacatcaaggtgacacagcactgcgcaggtgtacgcatgaaccgcatgcaccagtagtcttgtagctaggcgaaggagaacttaaagagcatgtcatggctatacaccttgcccggcctcacgatctgcgacgggaagctcgggtggttgacggcatcggggaacccctgcgtctcgaggcacagcgcggcgtaccgccggtacacgctaccgc

SEQ ID NO: 4704 - DNA, 296 bp, Zea mays
  Clone ID: LIB3118-012-Q1-K1-B1
cccaagcgtaggcacaggcacgaatgctgctgtgctgagaacatgatacatcatattggtgctgcgcttgttcgttggatgacctgtggaaccttaaaatatttcgcaccgatgacatccttgcagggatcgcgtgtactagtaatgtacaatgggaatgccagcatgatcctgtacgcctattacgtggggaggaaccgtgatgctattaagacttaatttttttatggaacatcgaatgtaaggcatacatggttatgagttttgtactaccctttgcagtgtgttcctgtttt

SEQ ID NO: 4705 - DNA, 360 bp, Zea mays
  Clone ID: LIB3118-012-Q1-K1-B10
cccacgcgttcgcggacgcgtgggtagttctagatcgcgagcggctgccctttttttttttgttttttttgtgtactgaaagaaatcaaaaaatagatgcaccttatatgaatttaccgcaatccataacgatccacgcagtgaaatactacacttgcataccgaacgttccaaccccaattaactcaaagtttttaagaacaaacccaaacacatgagactgctccaactcgccccaaaaaaattagcaaacatatttcatggctaaagggcagaggaactgattcagcacggtgaggatctgcgtgcaaccacaccaactactcggctggggctgcatcggctttggtttcggtcact

SEQ ID NO: 4706 - DNA, 351 bp, Zea mays
  Clone ID: LIB3118-012-Q1-K1-B11
cggacgcgtgggaggatattatccacgtgaaactgacaggtcaggataccattccctcagagagaacgacacacttggggcatcttatgaccgttacttgcgcaatgggatggcctccgtctgtgcaaatgacacttttagggctgccgggatgggtgctggattggctgcagggatgactgcagggatgggtgctggaatggctgcagggatggctggctatggtgttgatggtcagcgtatgatgggtgttgttggtatggacagcagagggatgggatatggtggcagacctgagccacctctttcgcctgatgcatcaagcactctatatattgagggcttacctgc

SEQ ID NO: 4707 - DNA, 372 bp, Zea mays
  Clone ID: LIB3118-012-Q1-K1-B12
attcacaccaaccttgaccttcacataacccagcgagagatctaccaacacccaagcgcctggcgcgccctcatgtagatggcacacacaatatcataatgcccagctgataagttgggcttccacatacctacatacatatatcgatcctatgtgaaaacccagctcttcagccctataggctccaacaagcaatcgcagcaagcaacatacctttatcacccttgttgtttcaacaaatcgccagccctatctttggtgcagtcattggtacaaaccatcatggcacagcagctgcagcaactcgtgctacctgtgatcaaaccaattaggtgtggcgaacctttgtccctactctcaacaacaacaatt

SEQ ID NO: 4708 - DNA, 282 bp, Zea mays
  Clone ID: LIB3118-012-Q1-K1-B2
cacaggaaaccctaggcgccgccaccgtagcggtcttccaggtaagcaggagcgtccaccccgccgtcgtcatgaaacgcaatgcgcgcgtcacgagctcccgccggaagtgccgcaaggcgcactttacggtcccgtcctccgtccgccgcgttctcatgtccgccgggctgtcgacggatctccgccacaagtacaacgtgcgctccatcccgatccgcaaggacgacgaggtgcaggtcgtgcgcggcacctacaagggccgcgaggggaaggtggtgc

SEQ ID NO: 4709 - DNA, 374 bp, Zea mays
  unsure at all n locations
  Clone ID: LIB3118-012-Q1-K1-B3
cccacgcgtccgcaaacctctatggtgacattattagcgatctatgtgctggtttgattgggggcttgggcctaacacccagttgcaatattggtgaaggtggcatttgtctagcagaagctgttcatggttctgctcctgatattgctggcaagaaccttgcgaacccgactgctcttatgctgagtgctgtcatgatgttgcgccacttgcaattcaacgacaaagcagaccggatccacaacgccatcctccagactattgctggggggaagtacaggactgctgatcttggtggaaaggcatcaacatccgagtttacaaatgcagtctgtgatcacatctgagaatcggatgtggntctttccttctga

SEQ ID NO: 4710 - DNA, 374 bp, Zea mays
  unsure at all n locations
  Clone ID: LIB3118-012-Q1-K1-B4
cccacgcgtacggtaaagaatgatatcagcggcaatatcacaaggctggaaaacaagtattcttcagatccatcaaagtatggacacatgtacagcatggttcacgaagaagttcaaaacaagaccgcgaaaggttcctcaagctgcacaaatggtcttctgtggctcacgagggccatggatttccttgttgagttgttccgtaacctgcttgagcatccagactggaccatgactcaagcttgcgctgattcatacaccaagaccttgaagaaatttcatggctggctagccagttctagttntactgtggccatgaagctctctcctaatagagataaattcatggaggtcattagtggaactggtgatat

SEQ ID NO: 4711 - DNA, 329 bp, Zea mays
  unsure at all n locations
  Clone ID: LIB3118-012-Q1-K1-B6
cacagaaaaccctagccgccgccaccgaagcggcctcccaggtaagcaggagcgtccaccccgccgccgtcatgaagcgcaatccccgcgtcacgagctcccgccggaagtgccgcaaggcgcactttacggccccgtcctccgtccgccgcgttctcatgtccgccgggctgtcgactgagctccgccacaagtacaacgtgcgctccatcccgatccgcaaggacgacgaggtgcacgtcgtgcgcggcacctacaagggccgcgaggggaaggtggtgcangtctaccgccgccgctgggtcatccacgtcgagcggatcacccgc

SEQ ID NO: 4712 - DNA, 355 bp, Zea mays
  Clone ID: LIB3118-012-Q1-K1-B7
tcgtccacgcgtgcgaaaacatctatggtgacattctttgccatctatgtgccggtttcattgggcgcttgagcctaacacccagcggcgatattggtgaaagctgcctttgtctatcacaagctgttcatggttctgctcctgatattgctggcaagaaccttgcgaacccgacttctcttatgctgagtgctgtcatgatgtttcgccacttgtaattcaacgacaaatcataccggatccacaactgcattctccatactattgctgggaggaaatacacgactgcttatcttggtggaaaggcatcaacatccgagtttacaaatgcagtctgtgatcacatcttagaatc

SEQ ID NO: 4713 - DNA, 429 bp, Zea mays
  Clone ID: LIB3118-012-Q1-K1-B8
ggggtactgaagaggatgatgaacctgttgtggtcgttgccaaaatgtgggagaacggcaggtttgctgactgtgattcatctaaggagaaggataatgatggtgactcgcacgttgatttggaatcaaacaagggggatgcaggtcttgacagcaatgggttgcactcaactaatgagagcagtggcagagcatcaactaaacagccgcaacagcataagaagcctttgctgaagagattccgtggtttgctgaagaagaaaagcgaaaagtagcataaaaccatctgatgatattctttgttctatcttttgacatatttctacatatttccttgattagctatctagatcctgagtctttccccgatattatgcgtaactgagtgatggatgcttaaagaatacaaaatgtcgcctgtattacatc

SEQ ID NO: 4714 - DNA, 438 bp, Zea mays
  Clone ID: LIB3118-012-Q1-K1-C1
cggacgcgtgggtgaagaaactccgaccggccggtgggcggtggcggcacggcaggatctgtgccgcgatggcgacgtcgaacacggcgcggatggaggacggcggcggcgacctgcggagcaccatcaagaagtggaatatcatctaccctgtctacctcaactccaagaagacggtcgccgagggccgccgcatcgccgctgccaaggcctgcccggaccccacctgcatcgagatcgctgactgctgttcgcacctcaagatcccccacgccatcgagttggataaggcgtaccctcgggatttcttccacgtggggagggtcagggtgcagcttaagaaagatgacggctcccccgtcaatcctgctattaaaacgaagaagcagctgatgatccaagtagcagagctagtttccaagcatcacgggaaggaca

SEQ ID NO: 4715 - DNA, 137 bp, Zea mays
  Clone ID: LIB3118-012-Q1-K1-C10
tcgcggacgcgtgggcggacgcgtgggcggacgcgtgggtctgtggcggttaagttttgaacttgcctgttatggtataaattctgaagtgtttgggtctgcgtgtgatgaacatgatatttatattcttgcgcttt

SEQ ID NO: 4716 - DNA, 378 bp, Zea mays
  Clone ID: LIB3118-012-Q1-K1-C11
ggaaaggaaaatgtgttgttctgaagacctccacaagacaaactatattccttcctgttgttgggctagtggaccctgacaagctaaagcctggtgatctggttggagtcaataaagatagctaccttatactagatacattgccatcagagtacgattcacgagtgaaggcaatggaagtggatgaaaagcccactgaagattataatgacattgggggtcttgaaaagcagattcaagagcttgtagaggcaattgtactgcccatgacacataaagaccggttccagaagttgggtattcgtcctccacaaggggttcttttgtacggaccaccaggaactggcaagacactcatggctcgtgcatgtgctgcac

SEQ ID NO: 4717 - DNA, 191 bp, Zea mays
  Clone ID: LIB3118-012-Q1-K1-C12
ggtatagaaaaagtaccggtacgaagtacctcttcatgacagactatacatcccacccgggggggggatactggaagctgacaagctaaagcctagttatctgggcagagtcaataaaaagagacagctaagaccagacacaatcacaccacagtacgcctcaacagtgatggcagcggagtcccataaag

SEQ ID NO: 4718 - DNA, 426 bp, Zea mays
  Clone ID: LIB3118-012-Q1-K1-C2
ttcaagaaggttgccaatttccttgctcggttcaagtccatccccagcatagttgagcttgacagcttgaaggtttctggtgatgtctggtttggctctggaattacactcaagggcaaggtgacaattatcgccaagcctggagtgaagttggagattccagatggagacgtacttgagaacaaggatgtcaatggccctgaggatctttaagcaatgtttgtcatcaccagtttttcccaaggacatgtcacaggaactgccaagcctagtcactcctactgagctctatattttgtaattttcatgtgcattccgattccgctgtgagggtcatgtgagcccgctagagaataattgtaatcttctttgctgcgtctgtacttctgtttttgtgcgccaggacgtatatttttactgaaatga

SEQ ID NO: 4719 - DNA, 415 bp, Zea mays
  Clone ID: LIB3118-012-Q1-K1-C3
cggacgcgtgggcggacgcgtgggcggcgattcgcggcggtgagggcgtccgcggagacgatggcgacggagaagctgggcatcaaggtggagcgcaacccgcccgagtcccgcctctccgagctcggcgtccgccagtggcccaagtgggggtgcgagaagagcaagttcccgtggacctactccgccaaggagacgtgctacctgctgcaggggaaggtgaaggtgtaccccgaaggccacggggaggagttcgtggagatcggcgcgggagaccttgtcgtcttccccaagggcatgagctgcacctgtgacgtcgccgaggccgtcgacaagcactacaacttcgagtagccgccgccgccgactagccctgcggcgctcgatgtaaactgctggctcttgactctgacca

SEQ ID NO: 4720 - DNA, 438 bp, Zea mays
  Clone ID: LIB3118-012-Q1-K1-C4
cttcgctcgcgccgccgccgccgtcgccgctacgccccgcacctcgcttcatttcgtgtcgccaagatgacgaagcgcactaagaaggcaggaattgttggcaaatatggaaccaggtatggtgctagcttgcgtaagcaaatcaagaagatggaggtatctcagcattccaagtacttttgcgagttctgtgggaagtttgctgtgaagaggaaagcagttggaatttgggggtgcaaggactgtgggaaggtgaaggctggtggtgcttacaccatgaacactgctagtgcggtcaccgtcaggagcacgatccgccgcctgagggagcagactgaagcatgatatagctctttatattattggggtttccctgtagtgctcttgtcaggcatgttgtggggggcctatctagtggaaatgtggaatcactgtact

SEQ ID NO: 4721 - DNA, 342 bp, Zea mays
  Clone ID: LIB3118-012-Q1-K1-C5
cccacgcgtccggggttggcttctcctccccctccggttcgggttcgggttcgtgaggttgtccggggttcggtttcgtgggtgagcggatcgagatggcggcgtcggatgttgagtaccgctgcttcgtcggcggcctcgcctgggccacggacgaccactccctccacaacgccttcagcacctacggcgaggtcctcgagtccaagatcatcctcgatcgggagacgcagaggtcccgcggcttcggcttcgtcaccttctccacggaggaggcgatgcggaacgccatcgatggcatgaacggcaaggagctggacggccgcaacatcaccgtcaacg

SEQ ID NO: 4722 - DNA, 391 bp, Zea mays
  Clone ID: LIB3118-012-Q1-K1-C8
cccacgcgtccgcccacgcgtccgcggacgcgtggggcagcatcggagacacagtcgtcatgtcggtgactaaggagggcgtgaagttctccacatctggagaaattgggagtgcaaacattgtctgcaggcagaaccaaactattgacaagccagaagaggctaccattatagagatgcaggagccggtttccctgacctttgccctgcggtacatgaactccttcaccaaggcgtcttcactgtctgagcaagtcactatcagcctgtcgtccgagcttccagtggtggtcgagtacaagatcgctgagatgggttacattagattttacctggcccccaagatcgacgatgacgaagagatgaagccctgatggcctgtgacgacata

SEQ ID NO: 4723 - DNA, 303 bp, Zea mays
  Clone ID: LIB3118-012-Q1-K1-C9
tcgggccgagcgacgcgttcacacaaagtgaagagcactatcaacaactctttcaacaatggctaccaatatattatcgggccgtgcgcttcttgcgcttgattgaagcgcaacaaatgcgttcattattccacaatgcttacttgatccataatacattatttcacagttcatcccaccaggtactactaaggcattggaagacccagatgtgcaagcctataagctacaacaagttattgcggcgagcgtcttacaacaaccaattgtccaattgcaacaacaatccttggcacatctaac

SEQ ID NO: 4724 - DNA, 420 bp, Zea mays
  Clone ID: LIB3118-012-Q1-K1-D10
gtgtatgacatccccaagggccacatcgtctcgacatcaccatccttcgccaacaggctgccccacatctacaagaaccctgactcatatgaccctgaccggttcggtcccggaagggaggaggacaaggctgcaggtgccttctcgtacatctccttcggtggtggcaggcatgggtgcctcggtgagcccttcgcctaccttcacatcaaggcgatctggacgcacctactgaggaactttgagttcgagctggtatcgccgttcccagagaacgactggaacgccatggtggttggcatcaagggcgaggtgatgggtaactacaagaggcggaagcttgtcgtggacaactaacattggggtcgccagtctctatctcttaaatgcttgcttgcttctttttgatacgattgcttt

SEQ ID NO: 4725 - DNA, 352 bp, Zea mays
  Clone ID: LIB3118-012-Q1-K1-D11
ggtggagccgcagcaccggtaccaggcgatcttcggcttggtcctccagtccatcctgcagcagcagccgcaaagcggccaggtcgcggggctgttggcggcgcagatagcgcagcaactgacggcgatgtgcggcctgcagcagccgactccatgcccctacgctgctgccggcggtgtcccccactgaagaaactatgtgctgtagtatagccgctggctagctagctagttgagtcatttagcggcgatgattgagtaataatgtgtcacgcatcaccatgggtggcagtgtcagtgtgagcaatgacctgaatgaacaattgaaatgaaaagaaaaaagtattgttcc

SEQ ID NO: 4726 - DNA, 273 bp, Zea mays
  Clone ID: LIB3118-012-Q1-K1-D12
tgtggtgccctacaccggaccaggcgatcttaggttgttcctgcattccattcgggggcgaccgcctcaaaacggccaggtcgcgatgctagtaccggcgcttatagcgcagcacctgactgcgacatggaggatgaatcactccactccatgcccataacctactgccaggggcttgcctcaatgaacaaactatatcctgaaacacagacgttcgctagctagctatttgagacctttatcaccgatgatgcgatacttaacgcgaacgca

SEQ ID NO: 4727 - DNA, 137 bp, Zea mays
  Clone ID: LIB3118-012-Q1-K1-D3
tgcccgaacaaatcctcaaggcatttatttctaccagtctgtttaggttgtctttgagtctggtatcggtgtcaaacaaatcttcatctgtttttttttaatgggtcaggaatatcaggcttgttctttttcatctc

SEQ ID NO: 4728 - DNA, 425 bp, Zea mays
  unsure at all n locations
  Clone ID: LIB3118-012-Q1-K1-D4
ctccagctgcatcgacgaggaccgccgtagcgatttgcgaagcaagggacgggagaggaacccgaggaaggcgaaaatgatctaccgcaactggtcgctgctctcgtccacagtcgtcatttggggcggcgtcgccaccgccggcctcgccggtatcttcctcttgggcggcaaggagaaattcaatggttatctgtgccgcgaaggcgagaggcttatgcagcaggacagagccacgatgggccgaagctaagcgttagcttctttggtatctcaagggagcaatagcccttggaaatttcacaagattcctgcgtgcctaccagaacaagtccctatctaggatggaatccatccttctngcaggcttcactttcctgattataacagtaacaataaattgacaatgggttgtgttcttctgc

SEQ ID NO: 4729 - DNA, 331 bp, Zea mays
  Clone ID: LIB3118-012-Q1-K1-D5
tcgtgcacgcatacatccacacgtcctgtatttgtacccggccggtcacgttatatgatacacggggatgtacgcctaccaaatacggattatctcttctataatgggacctagaatcaattgcctggccgttttctttccacgacatagactgggaaggccctgccgttaccaaacttaatcttcctgccgcacacatcccgcttcatagctgtcgtattagcgaaaatgccctcacctaactgcccttccatctacatcgcagcctgtatggagaacgtgacgcgccctatctcaatgcactatgcgcgcatgctcctttggttacccg

SEQ ID NO: 4730 - DNA, 213 bp, Zea mays
  unsure at all n locations
  Clone ID: LIB3118-012-Q1-K1-D6
ccgcgcgttcganttggttttagtggcaccattccacagtatttccatgcacttgcttcaatgagctacccgggggaagctgtaaaagcctaccggctacaacaagtgcttgcgtccaccgtcttacaacaacgccattgtccactcccaacaacaatccttggtacatctaaccatacacaccatgaaaacgcaacagcatcaacaacctct

SEQ ID NO: 4731 - DNA, 350 bp, Zea mays
  Clone ID: LIB3118-012-Q1-K1-D7
gcgtccacgcgttcggtaacaacaactaccattcagccagctagctgctgcctacccccaacaatggtcgtccattcaaccaactggcggcattgaactctcctgcttatttacagcagcaacaactactaccattcatccagctagctggtgtgagccctgctgccttcttgacacaacaacagttattgccgttctacctgcacgctgcgcctaacgctggcaccctcttacaactgcaacaattgctggcattcaaccaacttgctttgacaaacccagcagcgttctaccaacaacccatcattggtggtgccctctcttagatttcttatgagttataggtcaat

SEQ ID NO: 4732 - DNA, 206 bp, Zea mays
  Clone ID: LIB3118-012-Q1-K1-D9
agtgagcatctgaagattttttacacttagtacttccaggtgaaggcacgttttgctgatggagagcgaactactaggaacgtgctatgagaggtacttgagccatgaggcagactacatcggtaccaaacacagtagcaaggctgccggtacgggaggcgcatctgatgcacgaggaaacaccacattgggcatcaacttaacta

SEQ ID NO: 4733 - DNA, 401 bp, Zea mays
  Clone ID: LIB3118-012-Q1-K1-E1
cccacgcgtccggcaacaacaactaccattcagccagctagctgctgcctacccccaacaatgtcttccattcaaccaactggcatcattgaactctcctgcttatttacagcagcaacaactactaccattcagccagctagctggtgtgagccctgctgccttcttgacacaacaacagttattgccgttctacctgcacgctgcgcctaacgctggcaccctcttacaactgcaacaattgctgccattcaaccaacttgctttgacaaacccagcagcgttctaccaacaacccatcattgggtggtgccctctttagaatttctatgaagtataggtcaatataaaagttttttgtctgatgttcggggcttccaagaaataataaagtccattct

SEQ ID NO: 4734 - DNA, 424 bp, Zea mays
  Clone ID: LIB3118-012-Q1-K1-E10
attgagaccaactagcaacatagaaagcacaatattgtaccaataatggcagccaaaatattttgcctcattatgctccttggtctttctgcaagtgctgctacggcgagcattttcccgcaatgctcacaagctcctatagcttcccttcttcccccatacctctcaccagcgatgtcttcagtatgtgaaaatccaattcttctaccctacaggatccaacaggcaatcgcagcaggcatcttacctttatcacccttgttcctccaacaatcatcagccctattacagcagttacctttggtgcatttattggcacaaaacatcagggcacaacaactacaacaactcgtgctagcaaaccttgctgcctactctcagcaacagcagttacctttggtgcatttgttggcacaaaacatca

SEQ ID NO: 4735 - DNA, 394 bp, Zea mays
  Clone ID: LIB3118-012-Q1-K1-E11
gcgaggtcgtcctcttcgagcaccttctctggatgctggagaacgccgacccgcagccggagtccctcgacgagctggtcgactactacgcttgctgagtcagcgctgactgctccgacttggaagccttccgaatcctccaagccgcgtgcgtcccgcgcgcgggggtaaatcatgcatgcatacttcaattctgatgttttaagtaggggggagtagaggaaccgatgttgcagctcatggacgacgacgctgctctttcggctccgtagatttggttccattgacatgcagtactagtatagctttgctttatcttcgctacttcatcgtaataaagagtctggacgagtgcttctatgtttaaaaaaagccgtcagctctagaagatcca

SEQ ID NO: 4736 - DNA, 352 bp, Zea mays
  Clone ID: LIB3118-012-Q1-K1-E12
ggtggagccgcagcaccggtaccaggcgatcttcggcttggtcctccagtccatcctgcaggagcagccgcaaagcggccaggtcgcggggctgttggcggcgcagatagcgcagcaactgacggcgatgtgcggcctgcagcatccgactccatgcccctacgctgctgccggcggtgtcccccactgaagaaactatgtgctgtagtatagccgctggctagctagctagttgagtcatttagcggcgatgattgagtaataatgtgtcacgcatcaccatgggtggcagtgtcagtgtgagcaatgacctgaatgaacaattgaaatgaaaagaaaaaagtattgttcc

SEQ ID NO: 4737 - DNA, 335 bp, Zea mays
  Clone ID: LIB3118-012-Q1-K1-E2
ctatgatctcaggttttgtgcacaatgttcttggtgaagaagcaatagatttttttgaacgggttaagcagacaggggacaagccagatcatggcatgttcagacatgttttcttggcatgtggaattttgggatctgttaatgaaggaatgttgcattttgaatccatgcagaaagattttggcatacatcccactacagagcattatgcaagcattgttactatgcttggacagtctggctacattgtcgaggcttatgaattcgtggaacggatgcctgtggaaccaagcattgaggtatgggaaaatttgatgaacatgtgtcgacttaat

SEQ ID NO: 4738 - DNA, 65 bp, Zea mays
  Clone ID: LIB3118-012-Q1-K1-E3
attcaataataaagttttttggatgatgtatgtggccaaccagaaataagaagttacatttgcag

SEQ ID NO: 4739 - DNA, 402 bp, Zea mays
  Clone ID: LIB3118-012-Q1-K1-E5
cccacgcgttcggcaacaacaactaccattcatccatctagctgctgcctacccccaacaatgtggtccattcaaccaactggggtcattgaactctcctgcttatttacagcagcaacaactactaccattcagccagctagctggtgtgagccctgctgccttcttgacacaacaacagttattgccgttctacctgcacgctgcgcctaacgctggcaccctcttacaactgcaacaattgctgccattcaaccaacttgctttgacaaacccagcagcgttttaccaacaacccatcattggtggtgccctcttttagatttcttatgagttataggtcaataaatcaacttctttgcctgacgcttgtggccttccagaaataataaagtccatttt

SEQ ID NO: 4740 - DNA, 335 bp, Zea mays
  Clone ID: LIB3118-012-Q1-K1-E6
tctgatcataggttttgtgcacaatgttctttgtgaataagcaatatatttttttgaacggggggagcagacaggggacaagccagatcatggcatgttcagacatgttttcttggcatgtggaattttgggatctgttaatgaaggaatgttgcattttgaatccatgcacaaagattttggcatacatcccactacagagcattatgcaagcattgttactatgcttggacagtctggctacattgttcgaggcttatgaattcttggaacggatgcctgtggaaccaatcattgatggatgggaaaatttgatgaacatgtgtcgacttaat

SEQ ID NO: 4741 - DNA, 265 bp, Zea mays
  Clone ID: LIB3118-012-Q1-K1-E7
aatgcacgtgcggggctggctaccgaccagcatcccgtgagggatgaagacagaccgggaggccgagacacggagcggctgagctcttcagtgcactcctgggtggaggaacacaagctctcgtccatcgcagccgcgttagccactgtggtggtcgcgttcttatcgtacagcctgagatcgacgccggagcggccctcgaacctgcgcttcattcagaccaggatgcactcacaagcgctcacgctcgccgagctaagaagag

SEQ ID NO: 4742 - DNA, 95 bp, Zea mays
  Clone ID: LIB3118-012-Q1-K1-E8
ggggcacataaggggttgcataaccagttgcttttcgtggcgattcgtgtttaaacggggggggccgcctctgagatcctcgtgaatagagcgat

SEQ ID NO: 4743 - DNA, 433 bp, Zea mays
  Clone ID: LIB3118-012-Q1-K1-E9
gctagagacaaccgctgcgtaaacgaatccatcgccatggcgtctcgtctcgttgcggcgggggcctcctcctcctccctctcctcagcgtcccccctcgctcgcctaatctctcgccgcggccttgccggtgccgcagacggccatgggtctgcgaaggtgccctcgtggaaagatccgttgagcccgagcaagtggaaggaagagcactttgttctagcaagcctctcaatgtggggggttatcttttatggcggttacaagctttttagtggaaagaaggaagccaagactgaggcggcatcaccacaggcataggtggcggagatggagttatacccgtatctgtggcctggcaacaatgttaaataaaaggaatgcgttatgttgtgccttcaggttgttaaattgtggcaacagggatttttgctta

SEQ ID NO: 4744 - DNA, 309 bp, Zea mays
  unsure at all n locations
  Clone ID: LIB3118-012-Q1-K1-F1
gcgaaatccaagagcagcagcagcagcagaccaagatcgagggagggaggaagacagacagacagacagagagatggagcggatgagctcgtcggtgcagtcctgggtggaggaacacaagctctcgtccatcggagccgtgtgggcgacggcggtgggcgcgtccgtggcgtacagccggcggagggcgccggcgcgggccacgagcctgcgcctcattcacgccaggatgcacgcccaggcgctcacgctcgccgtgctcgggggagccgcgctcgcgcaccgctattacngcagcatcgagaggag

SEQ ID NO: 4745 - DNA, 430 bp, Zea mays
  Clone ID: LIB3118-012-Q1-K1-F10
attgagaccaactagcaacatagaaagcacattattgtaccaataatggcagccaaaggagtgtgcctcattatgctccttggtctttctgcaagtgctgctacggctagcattttcccgcaatgctcacaagctcctatagcttcccttcttcccccatacctctcaccagcgatgtcttcagtatgtgaaaatccaattcttctaccctacatgatccaacaggcaatcgcagcaggcatcttacctttatcacccttgttcctccaacaatcatcatccctattacagcaagtacctttgaggcatttatttggacaaatcatcatggcacaacatctacaacaactcgcgctatcaaaccttgcttcctactcttagcacagtcagtaccttttgtgcaattgttgcatcaaaacattatggctca

SEQ ID NO: 4746 - DNA, 339 bp, Zea mays
  Clone ID: LIB3118-012-Q1-K1-F11
cagagctttaagtccaaggagtatgttagggagaccttctcctggcagtactactactggtatctcaccaacgatggcattgagcacctacgcaactacctgaacctcccgtctgagatcgtgcctgccacgctcaagaagtctgccaagccacctggccgcccatttggctctggccctcctggtgaccgcccaaggggcccaggtcgttttgacggcgacaggccaaggtttggtgacagggatgggtaccgtggtggtcctcgtggtgctcctggtgactttggtggcgataagagtggagctcctgctgagttccagccatcattcaggaggcct

SEQ ID NO: 4747 - DNA, 374 bp, Zea mays
  Clone ID: LIB3118-012-Q1-K1-F12
tccacgcgtacgcccacgcgtccaggacgccatggttcagacaccgcacgggttgaaagagtgcaagctgctagtctccggcagcatgaacggttccattcggttatacggattatggactgctctgagtaactttgataatgaggcatagtttttgccccaacctgcttgtactcgcgtgggaaagcacaaagcatgaccactccccagtatttggtcacctggaacaggcttcatagctttctcatccatcatcgcatgcataaagaagctcggacgtcatgtccctgatgcatcgatcacccattcacctgttcatagagcattggtggctactcttgcatctggagaatctcatgcctccttatatatta

SEQ ID NO: 4748 - DNA, 122 bp, Zea mays
  Clone ID: LIB3118-012-Q1-K1-F2
gcggcgaaatgcaaaagcaacatcggcagcagacttttatggagggagggaggaagacacacagagggggggagagatggaggggaggaggtcttctgtgcattcctgggtggaagaacaca

SEQ ID NO: 4749 - DNA, 101 bp, Zea mays
  Clone ID: LIB3118-012-Q1-K1-F3
atttttttttactactactactaaggaacctggatgtaaattatgtatggtatcagcgagactgtcgtcgcagccttatgtaattctgttcagaacttttg

SEQ ID NO: 4750 - DNA, 245 bp, Zea mays
  Clone ID: LIB3118-012-Q1-K1-F4
gcgtccacgcgttactgcatcaccatgggtggcatttgtctgtgttagcaatgacctgactgaacgggggtaatgaaaagaaaaacggaccgttcctaaattttactaaccgttaatcaaaaagctgcgttaaataaaaatcaatcctcaaccgatataaaagaggactcattactttttgctgctttcttgaaaaaagatattaaaggacctttatttgtgggggtcgttcttaagacaccatt

SEQ ID NO: 4751 - DNA, 277 bp, Zea mays
  unsure at all n locations
  Clone ID: LIB3118-012-Q1-K1-F5
cggcgaaatccaatagcagcagctgcagcagaccaagttcgagggagggaggaagacagacagaggggcagagagatggagcggatgagctcttcngtgcattcctgggtggaggaacacaagctctcgtccatcggagccgtgtgggcgacggcggtgggcgcgtccgtggcgtacagccggcggagggcgccggcgcggtccactagcctgcgcctcattcacgccaggatgcacgcccaggcgctcacgctcggcgtgctcggtggagccgcgc

SEQ ID NO: 4752 - DNA, 380 bp, Zea mays
  Clone ID: LIB3118-012-Q1-K1-F6
gaagaaaatgagaaattgcagcaggcatttattgaagatgccaattcccaagcagggagtggttcatcaattaatgagcggacgaattctgggttttctcgcggttcatcagaggctgggttagatgaagatcagtcctcaaccggtaagagtggggactcatcattttttgctggtttcttgaagaagggtttcaaggacctttctttattaaataagtccatggacagcgttaaggtttcaattaatggtcatccaatctctgaaatagcccttaagaaggcagagaagaaagctggtcctgttgacccaggttcatattggtacgactaccgtgctggtttttggggtatcatgggacgagaatgtatcggcattgt

SEQ ID NO: 4753 - DNA, 210 bp, Zea mays
  Clone ID: LIB3118-012-Q1-K1-F7
ggtacacatgaggagctgcatcacgagtcttattgtctatacgatccacgcttacatgggcgggccatccatcttttagctgccgaatactgccacctctattcaatcaactgaggctcggttatattaacactaaccctgaaaaccctagagttaccacacataatcgtctagtaggtcatcccccattggccagctggagctatatct

SEQ ID NO: 4754 - DNA, 448 bp, Zea mays
  Clone ID: LIB3118-012-Q1-K1-F8
gaagatggtcatcgttctcgtcgtgtgcctggctctgtcagctgccagcgcctctgcaatgcagatgccctgcccctgcgcggggctgcagggcttgtacggcgctggcgccggcctgacgacgatgatgggcgccggcgggctgtacccctacgcggagtacctgaggcagccgcagtgcagcccgctggcggcggcgccctactacgccgggtgtgggcagacgagcgccatgtaccagccgctccggcaacagtgctgccagcagcagatgaggatgatggacgtgcagtccgtcgcgcagcagctgcagatgatgatgcagcttgagcgtgccgctgccgccagcagcagcctgtacgagccagctctgatgcagcagcagcagcagcttgtggcaactcaaggtctcaaccccatgggcatgatgatggcccataacatgccg

SEQ ID NO: 4755 - DNA, 330 bp, Zea mays
  Clone ID: LIB3118-012-Q1-K1-G1
attgagaacagacctaattattgagctgggtcttgttgtatgtaatattgcatattgcatgggggggggtcgcactagaacacggaggaaacagcatattttgaaacgttagctgaacagtagtaatatacaaagacgatagatcggtgctcatttgcaaacaataaagcttccggagatgggggagaatcagagatgggaagaaggagcctgcacgtcatcctctttaaatcacgagggccatatgctggtctgaactttgtagggtaggaaaactaagtatggacttcctctagtcgcaaaaactggtcatttaagacagaaatgggc

SEQ ID NO: 4756 - DNA, 390 bp, Zea mays
  Clone ID: LIB3118-012-Q1-K1-G2
tgaagatggtcatcgttctcgtcgtgtgcctggctctgtcagctgccagcgcctctgcaatgcagatgccctgcccctgcgcggggctgcagggcttgtacggcgctggcgccggcctgacgacgatgatgggcgccggcgggctgtacccctacgcggagtacctgaggcagccgcagtgcagcccgctggcggcggcgccctactacgccgggtgtgggcagacgagcgccatgtaccagccgctccggcaacagtgctgccagcagcagatgaggatgatggacgtgcagtccgtcgcgcagcagctgcagatgatgatgcagcttgagcgtgccgctgccgccagcagcagcctgtacgagccagctctgatgcagcagcagcagc

SEQ ID NO: 4757 - DNA, 395 bp, Zea mays
  Clone ID: LIB3118-012-Q1-K1-G3
attgagaacagccctagttattgagctgggccttgttgtatgtatttttgctttttgcattggtcggcgtcgcactagaacacgcaggagacagcatattttgaaacgttagctgaacagtagtaatatacaaagacgatagatcggtgctcatttgcaaacattaaagcttccggagatggtggagaatcagagatgggatgaaggagcctgcacgtcatcctctttaaatcacgaggtccatctgctgttctgaactttgtagggtaggaaaattaagtatgtactccctctagtcgcagaaacttgtcatttatgacagatatggtcaaacctttaaaagtgcaagtatttacattatttactttggaaccatgtaggtctaatgtcgatct

SEQ ID NO: 4758 - DNA, 383 bp, Zea mays
  unsure at all n locations
  Clone ID: LIB3118-012-Q1-K1-G4
cggacgcgtgggtgaacatgtgctccaagtgccacaaggagatgataacgaagcacgatcaggccaagctggctgcctcctctatcgacagcatcgtgaacggcagcgacgccgtcatggagccggttgttgctggcagcaacacggtagtagctgttgcccaagtcgagttgcaaacaatgaacgtgcatcagcccgctgatgttgccggacccagcgagggggtggcggcgatctccaaaggggggaaggtagggccgaaccggtgcagcgcctgcaggaagagggttgggctcacgggattcaactgccggtgtgggaacttgtactgagcgctccaccgntacttcgacaagcacgactgcaagttcgactaccggact

SEQ ID NO: 4759 - DNA, 341 bp, Zea mays
  Clone ID: LIB3118-012-Q1-K1-G5
tcgaactaacaacatagaaagcgcactagtgctccaacaatggcagccaaaatattttgccggcttatgctcctcggtctttctgcaagtgctgctacctcgaccatctttccgcgatgctcacaagctcccatagattaccttcttgcgccgatcctctcaccatcggtgtcttcggtatgtgaaaacccaattcttcaaccctataagatccaacaggctatcgcatctggcatcttacccttatcaccctcggtactccaacaatcatgagacctattacagcacttacctttggtgcatttattggcacattacatcagggctcagcaactactaca

SEQ ID NO: 4760 - DNA, 211 bp, Zea mays
  Clone ID: LIB3118-012-Q1-K1-G6
gcagatgctcatggggctctacatctggctcggtctgtctagtggcaccacgcttacgttggcgatcccgctaccctgagcggtgcttataggttgtacaggctatcgcctggccgacgactatcatcggcgccagcgggatgtacccctactcggagaacctaatgcactcgcagtgcatcccgctttcggcagctggctacttcgccaa

SEQ ID NO: 4761 - DNA, 281 bp, Zea mays
  Clone ID: LIB3118-012-Q1-K1-G7
cggacgcgtgggcggacgcgtgggcggtcgcgtggggtggtgagcaacatttcaaggagggggtgatgcttgctgacaacctatgaaaaggcgtttctgtagctgactacttggtttgtccgtcagacaattctagacgtgaattttgatctgttggctagattagctgccaagtaggtatttcgtatctctagatttatgggattcacattcactcattcttgttgctattcacttgcctttgttatgttcgaaattaaaaaggtaagaaaccttaatat

SEQ ID NO: 4762 - DNA, 310 bp, Zea mays
  Clone ID: LIB3118-012-Q1-K1-G9
tgatgacctccctgagcagacattctacatggttggtggcattgacgcacctcagccgcggcggggtctttaaagaggcgcggggtacctccactattattgcacaatggcttacaaacatttcctgtctcccgaaacatgccgatggatttcaatacccaactatacaatcctacatgggacaagaggccatccaagcatgcatcgtacgggcattagcattaacccttctacaaccatatgctctattggaacatccatccttaatgcatctgtatctccaaagaatcggggtataaccacctccacc

SEQ ID NO: 4763 - DNA, 443 bp, Zea mays
  Clone ID: LIB3118-012-Q1-K1-H10
cccacgcgtccgctccccgcttggtgtccgtcgtgtgggtgcgagtcttccatgggagtttggagggaggaagaaggaagaaaagaaggaggaaaggaggaacccaaggtggtggacttccggatcgtacttatggatttgcccgaacttccagtaaaggtacttgatacatgttgggaatgaggggagtagcagcacgtccactttcactctcacaataactctgcccagacgcagccatgatttaattagaaacttattgtcaaaggaagtttgtttttttaattagtcgtgcgcactagttaattcacttcatgtcggatgtttaacttctctttgctagccgattaataatacttaatatgtttttgtcatgaaatatgtttaatacactggtgcccccttatttattcaattttgcaggggggatgcttcccatattt

SEQ ID NO: 4764 - DNA, 123 bp, Zea mays
  Clone ID: LIB3118-012-Q1-K1-H11
acgacgcgtacgatgggaaatgctgtctctacaaaagaccacctttgccgcccaagtctccgatgcgaaatatgctcgctctacgttcatgctcgcgggtgcatctgaggggctgtcatgctg

SEQ ID NO: 4765 - DNA, 466 bp, Zea mays
  unsure at all n locations
  Clone ID: LIB3118-012-Q1-K1-H3
gcggcggcgatcgggcgatggcatggcgggcgagcctgtctcggagcctaaaggagatccgcgtcctcttctgtcagtcctccccggccagcgccgccgcccgtgagttcgtgaagaagaactatggtgacatcaaggctcgcaacccctccctccccttccttgtccgcgagtgctccggtgtccagccccagctctgggcgcgctacgatatgggtgtggagagatgcgtgaacttggatggcctgacggaagcacagattgataaaaagctggaggagcttgccaaggccggcgagtctcttaaaaccaaatagttttggaactctatcctgccatgtttaacgttcccaaataaatgatgccatatgggtgagcaactggtactctatcngtatctgtagttgtgcctggattaaagtctttaatgggctaactttgtgaataatcactactctttactaaa

SEQ ID NO: 4766 - DNA, 330 bp, Zea mays
  Clone ID: LIB3118-012-Q1-K1-H4
gagcgttcggcggcggccatcgggcgatggcatggcggtctagcctgtctcggagactaaaggatatccgggggcgcttctgagagagctgggcggccaacagcgtcgcccgtgagttctttaagaataactatggagacatcaaggctcgtaaaccctccctgccattccttgttcaacgagtgctccggtgtccaaccccagctttgggcgcgctacgatatgggagtggagagatgccggaacttggatggcctgacggaagcaccgattgataaaaagctggaagagcttgcctatgacggcgagtctcttaaaaccaaatatttt

SEQ ID NO: 4767 - DNA, 62 bp, Zea mays
  Clone ID: LIB3118-012-Q1-K1-H5
cccacgcgtccgcccacgcgtccgcccacgcgtccgcccacgcgttcggttctagatcgcga

SEQ ID NO: 4768 - DNA, 271 bp, Zea mays
  Clone ID: LIB3118-012-Q1-K1-H7
gcgtggggggcgacagaacactttgcaaatcttgttgcttggcactttctgttgcatgggcacaggagggtctctgcatgcaaacactacatggcgggtaatgatattgggtcagcggtgccagaagaagatgaggaggaggaggaggaaaactcatcttaacacaagatgggtgatgctggagcatccggtaatgcaccatagctaggagtgatcaaggcgatccctacgaagagacgcagctcattcaattcaaacttgaaggtgctgt

SEQ ID NO: 4769 - DNA, 263 bp, Zea mays
  Clone ID: LIB3118-012-Q1-K1-H8
tcgcccacgcgttcgcccacgcgtttcgcccattctttcgttgacgcgtggtctctccttcgggggcgttcgtacctagccccatcgggatggcccggatcaaggtgcacgagctgcggttattgagcaaggtggatctgctagctcatcttaaggagtttaaggttgagctcttccttctacgcgtagccaatgtcatcggcggggctcccaacaagctctccataatcaaggttgtgcgcacctccattgcgcgcgtgctg

SEQ ID NO: 4770 - DNA, 369 bp, Zea mays
  Clone ID: LIB3118-013-Q1-K1-A1
cccacgcgttcgcccacgcgttcgcccacgcgttcgcccacgcgtccgcccacgcgtgcgcccacgcgtccgcccacgcgtccggaattaatggcgtcgtcgtctagcagcagccaccgccgcctcatcctcgcagccgccgtcctgctctccgtgctcgcggctgccagcgccagcgccgggacctcctgcgtgccggggtgggccatcccgcacaacccgctcccgagctgccgctggtacgtgaccagccggacctgcggcatcgggccgcgcctcccgtggccggagctgaagaggagatgctgccgggagctggcggacatcccggcgtactgccggtgcacgggcgctgagcatcctcatgga

SEQ ID NO: 4771 - DNA, 415 bp, Zea mays
  Clone ID: LIB3118-013-Q1-K1-A10
ctgctgcttatttgcaacaacaactaccattcagtcagctagctgctgcctaccggcagcaatttcttccattcaaccaagtggcagcattgaactctgctgcttatttacaacagcaacagctaccaccattcagccagctagctgatgtgagccctgttgccttcttgacacaacaacaggtgttgccgttctacctgcacgctgcgcctaacgctggcaccctcttacaactgcaacaattgctgccattcaaccaacttgctttgacaaacccaacaacgttctaccaacaacccatcattggcggtgccctcttttagattgcttatgagttatagttcaataatgaacgtttttggatgatgtttggggcttcccagaaataagaaaggacatttctagattcttatgt

SEQ ID NO: 4772 - DNA, 280 bp, Zea mays
  Clone ID: LIB3118-013-Q1-K1-A11
ctggtgcttatctgaaacaacatctaccattcaatcaggtacctgctatctaccggcaggactatctttcattgagccgactcgcaccataaaactatgctgcttattcacaacacctacagctaccaccattcaaacacctagctgacgtgagccctcttgccttcttaacacaacaacatgtgttgacgctctacctgcacgctgcgcctaacgctgacaccctattacaactgcaacaattgctggcattcaaccaacttgctttaacaaacccaac

SEQ ID NO: 4773 - DNA, 157 bp, Zea mays
  Clone ID: LIB3118-013-Q1-K1-A2
atcagggtcatcgacttagaggtgggccacagatgattcagctgagcttggatggcaagaggatatacgtgacaaactcacttttcagccgatgggatgagcagtttttcggtgatgatcttgtcaagaagggctcccacatgttgcagatcgatgt

SEQ ID NO: 4774 - DNA, 424 bp, Zea mays
  unsure at all n locations
  Clone ID: LIB3118-013-Q1-K1-A3
caaatgtcttcatcaatgggaagcatattggcggctgtgatgataccatggcactgaacaatgatgggaagctggtgcctctgctgactgaggctggagccatcgccggttctgcctcgaagacaaccatcactgcttgacatgtgtgttaccattcccgtgcttaaaaataatgatgctttgcaagtgctgaacttgcagatgctatgtgggagtgactgttcgttccctgtgtaaaactccctagacatcantcgagtcgtgttgctgtggtggttgtgaaatctacaataatcattgctacaataatgtcgtgttccctagacatcagatgagaaagatgagaagaaaaacattataatcttattcgaactatcatctgtaagcttcttttgatacaatatttttattatagattttaaaa

SEQ ID NO: 4775 - DNA, 395 bp, Zea mays
  unsure at all n locations
  Clone ID: LIB3118-013-Q1-K1-A4
cggacgcgtgggtaataagcacgaagaaatcaaatgtactagaaagacagcaggttagcatgcgagatcacggtgtgtgacgcatgcgccgcgaagttaaatgtgcaatcaaactctaaggaggtagatgctaagctccgggccgccattgccgccggtgctgctgtcagggttcatcatgtagaatgcctccgagtcgcgggagcccacgacgcgctcaaagcgagcgcgcatgtacatgacgtncccctcgccgncaccgcacgccgncggtatgacgcccgcgcccatagagacgggctccagcgcgcgcagcacgcgcaggtctgcggnaccgnactcgcgccgcaccgcgtacccgcagcccttgccgntgcagtacgcgcgccacgcct

SEQ ID NO: 4776 - DNA, 234 bp, Zea mays
  Clone ID: LIB3118-013-Q1-K1-A5
tcggtcacatagacgggaactacctttaatgaatactttcatggacacctcgcgcagtgggatggggtcatctttgggagacggggaggcccatatgacattatttatccccaatacaactcttaaaagatacacctacttcctgtaattaccagacctgcatactagaagatacattggatacaaaccaccttcctttgcctatcttacttacccgcgcctgactaccaaaat

SEQ ID NO: 4777 - DNA, 65 bp, Zea mays
  unsure at all n locations
  Clone ID: LIB3118-013-Q1-K1-A6
cccacgcgtncgcccacgcgttcgcccacgcgttcgcccacgcgtccgctagttctagatcgcga

SEQ ID NO: 4778 - DNA, 380 bp, Zea mays
  unsure at all n locations
  Clone ID: LIB3118-013-Q1-K1-A7
acattcgggggnnncntttgcccacgcgttctgccactcttgcgtgcacacatatggacaggctttcactaactcttggggcgactcttgcgaccacgcgggcggaattaatgacgtcttcatctatcaacagccaccgccgcctcattctcgcgggcggcgttgttaaaggacccctccttactgccagtgccagcgacgggacctccttcgtatcggggtaccccattccaaacaaccggctcccgatctacacctcgtacatgaccaaaccgtcctgtgacataagttcaatcctttcgaggacatagctctttaggagatgctgccaatagctaacagacatccacgcatactgcttgcgcacagtgctgaacatt

SEQ ID NO: 4779 - DNA, 83 bp, Zea mays
  Clone ID: LIB3118-013-Q1-K1-A8
ggtcacccacctcctagttaataatgaagttttttggatgatgtttgtggcttcccagaaataagaaagtacatttctagatt

SEQ ID NO: 4780 - DNA, 398 bp, Zea mays
  unsure at all n locations
  Clone ID: LIB3118-013-Q1-K1-B12
gggggcacgcgtccggggagtgcactatctacatgaaattaaggattctggtgaggctggtttccaatgggcagcgaacgagggtgggctgggggaggagaacatgcncactatttgcttcaagggctgcgatgtccatcttcatgcctatgctatccacaggggtggtggccaagtcattccaactgccaggaggggcatttatgcttctcagctcacaacctagccgacgctggtggaaccaatgtacctggtggagatccaggccccagaaaatgcacttgggggcatatacagagttctgaaccanaagagaggacatgtattctaggacatgcaaaggcctcgtaccccgctctacaacattaaggctttccttccctggaatccagtccttt

SEQ ID NO: 4781 - DNA, 347 bp, Zea mays
  Clone ID: LIB3118-013-Q1-K1-B3
cccacgcgtccgggcaaacgtttcttgcttgtgctccaaggtcaccaaagaaactgagaagggtgtgtgcatggagaagggtgtgtatgttgctgagcagtgtaagaggccatttgagcatggcttccagtgcggaagctacaagggtccagcaaactgatgatatcacaagagggaagcgcttgacgtagtctttagatttcaattgttgcagccgatcaaccttcttagggttgtataatatgaagtcaatgttgagactaatgtgaggtgggagaggcctattgatgcatcaaaagtattatgagctaataataaagccttctccacagattttatgattgctc

SEQ ID NO: 4782 - DNA, 337 bp, Zea mays
  Clone ID: LIB3118-013-Q1-K1-B4
cttccagagccccccgccgccgctgcgccctcctctcggtcctgccgtccgtcgaggtggaaggacagcatggtgaggggcagcgtgctcaatgatgctctcaagtccatgtacaatgctgaaaagatagggaaacgtcaggtcatgatcaggccgtcatccaaggtgatcatcaagttcctgacggtcatgcagcgccatggttacattggcgagttcgagtacgtggatgaccacagagctgggaagatcgtggtggagctgaatggaagactgaataaatgtggtgttattagcccacgttttgatgtacgtgttaaggagatcgagggatgga

SEQ ID NO: 4783 - DNA, 393 bp, Zea mays
  Clone ID: LIB3118-013-Q1-K1-B5
gccccccgccgccgctgcgccctcctctcggtcctgccgtccgtcgagggagaaggacagcatggtgagggtggagcgtgctcaatgatgctctcaagtccatgtacaatgctgaaaagatagggaaacgtcacgtcatgatcaggccgtcatccaacgtgatcatcaagttcctgaccgtcatgcagcgccatggttacattggcgagttcgagtacgtggatgaccacagagctgggaacatcgtggtggagctgaatggaagactgaataaatgtggtgttattagcccacgttttgatgtacgtgttaaggacatcgagggatggacggcgaagcttctttcatctcgccagtttggctacatcgtcctaacaacttctgctggaatta

SEQ ID NO: 4784 - DNA, 231 bp, Zea mays
  unsure at all n locations
  Clone ID: LIB3118-013-Q1-K1-B6
ctcacacagacggcaactacctttaatctatactttcatgcacacctcgcgcagacgtgtggggtcatctttgggagggtcagcggcctatatgacactatcttcnccctatacaactcttaaaagatacacctacttcctgtaattaccacacctgcatactataatatacatatcatactaaccaccattcttcgcctttcttacatacccgagtctgactaacaaaat

SEQ ID NO: 4785 - DNA, 372 bp, Zea mays
  Clone ID: LIB3118-013-Q1-K1-B7
cggacgcgtggggctgcggctgttttccaccgccgccggttcatctaccgccggcggggcgtctgccacctgcgggtcggctgccacctcctgtgcatctcccaccgccggtccacctgccgccgccggtccacctgccaccgccggtccatgtgccgccgccggttcatctgccgccgccaccatgccactaccctactcaaccgccccggcctcagcctcatccccagccacacccatgcccgtgccaacagccgcatccaagcccgtgccagctgcagggaacctgcggcgttggcagcacccccatcctgggccagtgcgttgagttcctgaggcatcattgcagcccgacggcgacgccctactggt

SEQ ID NO: 4786 - DNA, 255 bp, Zea mays
  unsure at all n locations
  Clone ID: LIB3118-013-Q1-K1-B8
ctacgtggagggcggtgacgccggcaaccgtgagaactacatcaacnaccttgtgcaaggggatgaactaggctcggtcttgtatcctgtgagaatgcttttctgtgtcagcgtggttgtttttgctctagtaagttgacggataatgatcgatatgcaaattttttttggtgttccatggctctaatacagccagacttcactaggaactgtgtcgctgtttatgttggcagttggttctggaggtttttgtgt

SEQ ID NO: 4787 - DNA, 328 bp, Zea mays
  unsure at all n locations
  Clone ID: LIB3118-013-Q1-K1-B9
gttggcttctcctccccctccggttcgggttcgggttcgtgaggttctccnggggtcgggttcttgggtgagcggatcgagatggcngcntcngatgttgagtaccgctgcttcgtcggcggcctcgcctgggccacggacgaccactccctccacaacgccttcagcacctacggcgaggtcctcgagtccaacatcatcctccatcgggagacgcagacgtcccgcggcttcggcttcgtcaccttctccacggaggangcgatgcggaacgccatcgagggcatgaacggcaaagagctggacggccgcaacatcaccgtcaacg

SEQ ID NO: 4788 - DNA, 422 bp, Zea mays
  unsure at all n locations
  Clone ID: LIB3118-013-Q1-K1-C1
aaagaatggtacaagaagagccaataatcttagtggtcctttgtcacttccaactcgtgcttctgcaaatagtctttcaagagccaataatcttagtggccctctgtcacttccaactcgtgcttctgcaaatagtctttctgctcctattcgatcttctgcaggttatgtaggctctttgggtgataaacctaagcgcactatggtggaaattaaaggccgcttctcagtgacatctgagaatgtggatcttgcaaaggttcaagaaattccagggagcagtgcctcacgtaaattgcaagaggggccttcactgagaaaatcagccagtgttggtgattggtcagcgaatgataagacaacgtctactaatcatcaaaggaaggaactctgncatagctctgtatctacatcaattctga

SEQ ID NO: 4789 - DNA, 164 bp, Zea mays
  unsure at all n locations
  Clone ID: LIB3118-013-Q1-K1-C10
tcccactctttcncccacacntncttcctcttctccctcnctccacatctcccttgggagccgnccaaggaccccgggacagggcnnnanatnnctcatcangaggccccacttgcacttgaggcaccaaccccacttcttggagagccaatggactttatgac

SEQ ID NO: 4790 - DNA, 279 bp, Zea mays
  unsure at all n locations
  Clone ID: LIB3118-013-Q1-K1-C11
gttaattatcctgtacttaatgtttttttttgcgtcgcctgtacaaccatctcggtgggtattttcgcaccaactcgagaacctcacccctcatcntttatgttatggtgcatgatgtgtatgcatcctccacacctttttagctgactcatccgacacttactcctaagcaactcttctttctacattttcaaatcgtgtttgaaactcttccttttctcctgcataacatctacttaattcttcttcatacgtcttaataacacattgatcttattc

SEQ ID NO: 4791 - DNA, 365 bp, Zea mays
  Clone ID: LIB3118-013-Q1-K1-C12
tttaaattcttcaaaaaaaaaaaaatataattttaaaaaaaaaaaaaaaaaaaattccgcacattttaaaaacaacccccgcccccctaaaaaaaaaaaatatacataaaaatattaattcttctaattaaaaaacacaataattataaatatcatccccctccccttttaaataatccaattttcctcacccttccttctcacattacttttttttttttttctaaccaaaataaatttcacttccctccctttatcaaccccctaattataaaaccctctcccttcccaactaaattcccctttcttcaaaccccctcttttccaattccatattaaaaaaaaatccttcccctcccctcttc

SEQ ID NO: 4792 - DNA, 405 bp, Zea mays
  unsure at all n locations
  Clone ID: LIB3118-013-Q1-K1-C3
cccacgcgtncgcccacgcgtccgcaactagcaacatagaaagcacaatagtgtaccaacaatggcagccaaaatattttgcctccttatgctccttggtctttctgcaagtgctgctaccgcgaccattttcccgcaatgctcacaagctcctatagcttcccttcttcccccgtacctctcaccagcggtgtcttcggtatgtgaaaacccaattcttcaaccctataggatccaacaggcaatcgcagctggcatcttacctttatcacccttgttcctccaacaatcatcagccctattacagcagttacctttggtgcatttattggcacaaaacatcagggcacaacaactacaacaactngtgctagcaaaccttgctgcctactctcagcaacagca

SEQ ID NO: 4793 - DNA, 295 bp, Zea mays
  unsure at all n locations
  Clone ID: LIB3118-013-Q1-K1-C5
tcgcacgtntacggtctaccacacgaagcatcgtatccagccagccagctaaacccacaccgcacatggccnggatcgtggtggtgtgcgacttcnacaagaccatcatcgacgtggacagcgacaactgggtggtggacagcctcagcctcaccgacctgttcgagcgccttcttcccaccacgccctggaacacgctcatggacacgatgatgggggagctgcacgcgcggggcaagacgcttgccgatgtgaccgaagcgctcaaggcggcgcccattgacccgcgcgtgcc

SEQ ID NO: 4794 - DNA, 54 bp, Zea mays
  Clone ID: LIB3118-013-Q1-K1-C6
gtgacgagtgcggctgcgcttatacaaataccttggcgaggacgttttatgcca

SEQ ID NO: 4795 - DNA, 419 bp, Zea mays
  unsure at all n locations
  Clone ID: LIB3118-013-Q1-K1-C7
cccacgcgtccgcggacgcgtgggagaagaccagttcccctctcctgatcgtccgggggctcacagcagcaggcgtgggggccganccggagaagcangcggcccccgcggcacaggagacggccgtgcacatcgtgtacgttgaccgccccgaggacgccgaccctgaggagttccacatccgcaccctcacccccgtcctcggcagcgaacagaaggccagggacgcagtgctctaccactacaagaacgccgccagcggcttctccgcgaagctcaccccccagcacgtcaaggatctcaaggagcaaccaggtgttctccaggttgtgccgagccagacttaccagctacatggtcctgggtctggcactcaccagggcacgacacacaccttgggccttatgtgaaggcgtatg

SEQ ID NO: 4796 - DNA, 400 bp, Zea mays
  unsure at all n locations
  Clone ID: LIB3118-013-Q1-K1-C8
cggacgcgtgggcggaattccgaaggttgggcatggaggcgagcggcgagaaggctggggtggtgcgacggctgatggaggcgaangaggtgtccgggaagaccttctcgggaatcgccgccgagacgggtctcaccaacgtctacgtggcgcagctgctgcggcgccaggcgcagctcaaggccgacacggtgcccgcgctgagggcggccctgcccacgctcacggacgacctcatcgaactcatgatgcagccgcccttccggtcctaccaccccaacatcgtccacgagcccgccatttacagattgaatgaagctgttatgcattttggagagagcatcaaggaaatcatcaatgaggagtttggtgatggaatcatgtcagccatagacttcta

SEQ ID NO: 4797 - DNA, 427 bp, Zea mays
  unsure at all n locations
  Clone ID: LIB3118-013-Q1-K1-D1
cttcaagaagcccttatgaagaatgagcgacttcttgggcctgtccatgttcaaacaggggtgtgctatcatgctctaggcattgcatttagttgtatgagcttatataagctttcaattcagcatgaaaagaagacatatgatatactggtaaaacaattaggggaaaatgactcacggactgaagactcaaaaaattggttgaatacatttaagcttcgagaagagcaggtcaacgcccagaagcagaagggccaggaagctaatgcatccgataacgctgttaaattcttgaaggcaaaccctgcagttttacaagcaatgaaggctgctgcgatccaatcaggtggtgtgtcagcaaatgtcaacaggtcgctcaatgctgcagtcgttggagaaggtgtaccacgactganaggagtggatg

SEQ ID NO: 4798 - DNA, 311 bp, Zea mays
  unsure at all n locations
  Clone ID: LIB3118-013-Q1-K1-D10
cccacgcgtccggcaaagcggcagtgcgtatagaggatcgtcgaacanaacagcgggaggattgtcatcggtgctgggcgggtgccttgctctgtcaactgccancgcctctgcaatgcacatgccctgcccctgcgcggggctgcagggcttgtacggcgctggcgccggcctgacgacnatgatgggcgccggcgggctgtacccctacgcggagtacctgaggcagccgcagtgcaacccgctggcggcggcgccctactacgccgggtgtgggcagacgagcgccatgtaccagccgctccggcaac

SEQ ID NO: 4799 - DNA, 248 bp, Zea mays
  Clone ID: LIB3118-013-Q1-K1-D12
aaaaaaaaaaaaaaaaaaaaaaaaaaaaaataataaaaaaaaaaaaaaaaattaaaaaaaataaaaaaaaaaaaataaaaaaaaaaaaaaaaaaaaaaaaaaaattaaaataaaaataaaaaaaaaaaaaaaaataaaataaaaaataaaaataaaaaaaaaaaaaataaataaaaaaaatttaaaacattttaaaaaaataaacaaaagattaaaaaaaaataaatataaaaaaaaaaaaaaaaaaa

SEQ ID NO: 4800 - DNA, 421 bp, Zea mays
  unsure at all n locations
  Clone ID: LIB3118-013-Q1-K1-D2
gccacgcgtncgcagcgctagtaactaccatgggaaccctgccgcctacctacgacagcaacaactgcgttcatgtagcccgctcgctgtggccaatgcacctacatacctgcaacaacaattgttgcaacagattgtaccagctctgactcagctagttgtggcaaaccctgctgcctacttgcaacagctgcttccattcaaccaactgactatgtcgaactctgctgcgtacctacaacagcgacaacagntacttaatccactagcagtggctaacccattggtcgctgccttcctacagcagcaacaattgctggcatacaaccagttctctttgataaaccctgtcttgtcgaggcagcaacccatcgttggaggtgccatcttttagattacatatgagatgtactcgataatg

SEQ ID NO: 4801 - DNA, 417 bp, Zea mays
  unsure at all n locations
  Clone ID: LIB3118-013-Q1-K1-D3
cccacgcgtncgcccacgcgttcgcggacgcgtggggaaacacaccaagcgaagcacagtagcaacaacctaacaacaatggctaccaagatattatccctccttgcgcttcttgcgctttttgcgagcgcaacaaatgcgttcattattccacaatgctcacttgctccaagttccattattacacagttcctcccaccagttacttcaatgggcttcgaacacccagctgtgcaagcctataggctacaacaagcaattgcggcgagcgtcttacaacaaccaatttcccagttgcaacaacaatccttggcacatctaacaatacaaaccatcgcaacgcaacagcaacaacaattcctaccagcactgagccacctagccatggtgaaccctgccgcctacttgcaacagcag

SEQ ID NO: 4802 - DNA, 190 bp, Zea mays
  Clone ID: LIB3118-013-Q1-K1-D5
cccacacctgcggccaatcttaacaagattcatttgcaaacacacttaacgaaacccgggcgggctacactaacaggagggcgagccatatattatactcacctaccactttcttacccttttaaatcaccacaaatttctttaatataacacacttttcacttgatccaagaaccatcattccacattt

SEQ ID NO: 4803 - DNA, 391 bp, Zea mays
  Clone ID: LIB3118-013-Q1-K1-D6
cttacgtccgagtctgagctcatctacacgcgccggcgacggcgctcgacgcccaccgggcagccatagcggagcagagggagaacgctttcctcaaccaccctaaggtgttcctcacctcaaagaaatctggcaagggtaagaagccaggcaagggtggcaatcgattttggaagagcattggccttggtttcaagactcccacggaagcaattgaagggacctacattgacaagaaatgttcattcactggaaccgcttctatcagaggcagaattattgctggaacatgccacagtgctaaaatgaacagaaccatcattggtcgcaggaactatctccactttggtaagaaataccagacgtatgaaaagaggcacttcaacatttc

SEQ ID NO: 4804 - DNA, 244 bp, Zea mays
  unsure at all n locations
  Clone ID: LIB3118-013-Q1-K1-D7
gtaccgatctctaattcccgcctcgacccacacatccgcccacacatgcatgctacacttaatttttttcttctacaactacattttaatcccgctcttttttaaaataccccccgccccctaaaaaatttnttataccttcctatacacttactaaacacaaacatatctatacttatttcacctcataaatcatttttgctcttattataaaaacactttaccaatactttcattaactatc

SEQ ID NO: 4805 - DNA, 344 bp, Zea mays
  unsure at all n locations
  Clone ID: LIB3118-013-Q1-K1-D8
gtgatgcgatctgagaagccagagtttggtgaatggacatggatgacacccaaggggaggatcgaaaaggcgagggggttgcaaaaaacctgtatatgatgaagcattgaaacactttgccccctacctgcagtcacatccagccgcttcatcatagaacatttggccaatttgcttgcatccctgctgtatctggacccccaataannngacacgacgcaatgtagccatgacgtgtgctatacaatttgatagtgtgtggcctgtttgagtgaattatatatgccagcattgcatcctccccctctacttaatcacataagtatacaataagtggtggaaac

SEQ ID NO: 4806 - DNA, 428 bp, Zea mays
  Clone ID: LIB3118-013-Q1-K1-D9
gcacaatagtgtaccaacaatggcagccaaaatattttgcctccttatgctccgtggggtttctgcaagtgctggtgcggcgaccattttcccacaatgctcacaagctcctatagcttcccttcttcccccgtacctctcaccagcggtgtcttcggtatgtgaaaacccacttcttcaaccctataggatccaacaggcaatcgcagctggcatcttacctttatcaccctcgttcctccaacaatcatcagccctattacagcagttacctttggtgcatttattggcacaaaacatcagggcacaacaactacaacaacttgtgctagcaaaccttgctggctactctcagcaacaacagtttctttcattcaaccaactaactgcattgaactctgcttcttatttggaacaacaacaactac

SEQ ID NO: 4807 - DNA, 253 bp, Zea mays
  unsure at all n locations
  Clone ID: LIB3118-013-Q1-K1-E2
agatcatcctcgatcgggagacgcagaggtcccgcggcttcggcttcgtcaccttctggacggangaagcgatgcggaacgccatcnanggcatgaacggcaaggagctggacgggcgcaacatcaccgtcaacgaggcccagtcccgcggcggccgtggaggcggcggcggtgggtaccgtggtggccgtggaggcggcggctactgcggtggcgggcgccgtgatggcggcggcggctactgcggtggcgg

SEQ ID NO: 4808 - DNA, 322 bp, Zea mays
  Clone ID: LIB3118-013-Q1-K1-E3
cccacaccttcgaccacgcattacaagtttctttgggaaacacatcaagcgaatctcagtcggggcaacctaacagcaggggcgaccaatatattatatccttcttgagctattctcgctctttaacatcgcaacaaatgcgtttattaatacacaatgcttacttaatccaagattcattattacaaatgttctaccaccaatttctataattggcttttaacaccctatctatctaaatcttttatctataacaagcatttgtttgttaacgttttacaacaaccaatttttcactttcaacatacaattcttttcacat

SEQ ID NO: 4809 - DNA, 159 bp, Zea mays
  Clone ID: LIB3118-013-Q1-K1-E4
cccacacctgcggctaatcttaacctgatacatttgcaaacacccatcacgtagcctggggacaccacactagcgagaggggtaccttaattaacatccacctaccgccatctcaccctttaaaatcaccaaaaatgttttactactcaactttcactt

SEQ ID NO: 4810 - DNA, 53 bp, Zea mays
  unsure at all n locations
  Clone ID: LIB3118-013-Q1-K1-E5
tagcanctatcacatcaaacaagtggcgacagacaaagatttgtgagggtcat

SEQ ID NO: 4811 - DNA, 306 bp, Zea mays
  unsure at all n locations
  Clone ID: LIB3118-013-Q1-K1-E7
ncccacccctccnnctttgcctcctttacttttagcacatctcctcntaccccggcggggactatctccggctcacgggggcgccacnanacctcctacatcaacaccttcntcttgggcgtctctaaccgctgtgcgtccgtgcgcgtgggcctctacacctataatgaatgcaaattctacttctatgaccggatgcctgcctccaacatttacccttacgtcgtgacctctctcatctcttatacaaccattctgtgtgagcccatccactccaacttcgactacaatggcccccccgctcct

SEQ ID NO: 4812 - DNA, 346 bp, Zea mays
  unsure at all n locations
  Clone ID: LIB3118-013-Q1-K1-E8
cttttagattgcttattacttgtaattcaataataaagttttttggatgatggagctgggcaaccagaaataagagcggacatttccagattttaaaaaaaaaaaaaaaaaaaaaaaaaaaaaaaaaaaaaaaaaaaaaaaaaaaaaaaaaaaaaaaaaaaaaaaaaaaaaaaaaaaaaaaaaaaaaaaaaaaaaaaaaaaaaaaaaaaaaaaaaaaaaaaaaaaaaaaaaaaaaaaaaaaaaataaaaaaataaaaaattgaaaaaaaaaaaaaatatataaaaaattaatatattataaaaaaaaaattnggtggctgatttttttataaaaattaattttttt

SEQ ID NO: 4813 - DNA, 225 bp, Zea mays
  unsure at all n locations
  Clone ID: LIB3118-013-Q1-K1-F1
aaaaaaaaaaaanaaaaaaaaaaaaaaaaggggagaaaaaaaaaaaaaaaaggaaaaaaaaaaaaaaaaaaaaaaaaaaaaaaaaaaaaaaaaaaaaaaaaattnggggcggccgttttaaaaaaataaagtttaattacccgtgcatgcaaagtaaaaatttttttataggggaaccaaaattaaattaaatggccggcgtttaaaaaagtcggaactggaaaa

SEQ ID NO: 4814 - DNA, 318 bp, Zea mays
  unsure at all n locations
  Clone ID: LIB3118-013-Q1-K1-F3
caacgatggctcaaacaaaatttcaggcgacagcctgaaagacctgtacaagtccttgggttctgagtaccggatcgaggggatcgaagatccatttgatcaggatgactggagcacttatgccaaactcactgatgagattggacagaaagtgcagattgtaggagatgatcttctcgttaccaaccccaccagggtcgccaagggcatcaatgagaagacctgcaatgctctcctcttgaaggtgaaccaaatcgggtctgtgaccgagagtatcgaagctgtcaggatgtccaancgcgccggatggggagtgat

SEQ ID NO: 4815 - DNA, 404 bp, Zea mays
  Clone ID: LIB3118-013-Q1-K1-G1
ggcccatggagcgctaagagctactcagtcttagcgccgtcatcaagcgccaaggccacagcagcggtgaagggcattttgctgctgctgttcccgcagtctgtacacatgctaacacataatccgcgtcatttgtgaagagaagctgctgccatggacaatggacttcagccacaatattatgttggatgtcggttcatgggctgccggcgatgctacaggccccgatcgaatgatgatcagcagatgggaactcgtagttccttgctgtctgcagcatctttctcatgtaccgttagcatgtgcgtgtttgtggttgggttgggttgggttggttggccgatttactgatcattggcgaatgaagtgagccatgtacatcattttgaagaattaatatcttt

SEQ ID NO: 4816 - DNA, 117 bp, Zea mays
  unsure at all n locations
  Clone ID: LIB3118-013-Q1-K1-G10
nngctcgccttnaatccancctatttcattcaccctctgcctttaccccacccggaagcggctttttcagtgggcggtcggggatnttnancccctcaaaaaaaantccttcactct

SEQ ID NO: 4817 - DNA, 305 bp, Zea mays
  unsure at all n locations
  Clone ID: LIB3118-013-Q1-K1-G11
naattcttcccccctctcccatctcnacacccaccnatncgggccatntcntcgggcggggattttatgctgggggcgcgggttctcnnancanctccccttctcngctgcgactnttaaggggcctggctgtagactaccccatgggacgaggagcgccccaaggggtacctcttcaaccggccaccgcctcctccgggggaatctcgcaagtgggatgattgggagcttccctgctacatgacctccttcctcaccgtcgtcatcctctgcgtcggcctcaacacgaatcccgaccttacaat

SEQ ID NO: 4818 - DNA, 60 bp, Zea mays
  Clone ID: LIB3118-013-Q1-K1-G3
cggacgcgtgggataccaaggggatctatatatcaatgtatgccataaattgtctgacgg

SEQ ID NO: 4819 - DNA, 333 bp, Zea mays
  unsure at all n locations
  Clone ID: LIB3118-013-Q1-K1-G4
caactggcagcattgaactctcctgcttatttacagcagcaacaactactaccattcgggcaggtanctggggtgaggcggggtccttcttgatacaaccacacttgttgccggtctaccagcacgctgcgcctaacgctggcaccctcttacaactgcaacaattgctgccattcaaccaacttgctttgacaaacccagcagcgttctaccaacaacccatcattggtggtgccctcttttagatttcttatgagttatacttcaataataaagttttttgtctgatgtttgtggcttcccaaaaataagaaagtacatttctagattctt

SEQ ID NO: 4820 - DNA, 270 bp, Zea mays
  unsure at all n locations
  Clone ID: LIB3118-013-Q1-K1-G5
aaatctctcttntaaaaaaataaactctatctcncaacttctcttattnanaacgcccggcctaattgcaaggctctccgccttcccacttatattntaatatcanacaacttttcacccaatccttataacaaaattntccctcccacttctatccctcattactacattcntcttaataaaaacccttaatccaccaaaacattctaccaaccattttacaccaccaaaacttttattttaaacctccccattctaatcttttacttc

SEQ ID NO: 4821 - DNA, 331 bp, Zea mays
  unsure at all n locations
  Clone ID: LIB3118-013-Q1-K1-G6
gcgcgcaaattgcaccaagaaatccatcgagaggccgtctacaggggaattaatggcntcggcggggagcaacaggcacgcgggggctgatcctcncanccnccctcctgctctccgtgctcgcgggtgccagcgccagcgccgggacctcctgcgtgccggggtgggccatcccgcacaacccgctcccgagctgccgctggtacgtgaccagccggacctgcggcatcgggccgcgcctcccgtggccggagctgaagaggagatgctgccgggagctggcggacatcccggcgtactggcggtgcacggcgctgagcatcctcatgga

SEQ ID NO: 4822 - DNA, 300 bp, Zea mays
  unsure at all n locations
  Clone ID: LIB3118-013-Q1-K1-G9
ngaaaggtgtcactaccatcatcggcggcggcgattctgtcgctgctgtcaaagggggggctttccgcagggggagggcatttctaccggcngccgtgccagcttggaactcttggaaggcaagactctacctggtgtccttgccctccatgacgcctacatccgctgctgctgctgctgctactcacgttctgccagctttgcgtgtcatcttgtttcggaccttggtgtagcactgcaaggctaaggtttactcctccacacatggactttcggggataggcttgccaccgtgttttg

SEQ ID NO: 4823 - DNA, 406 bp, Zea mays
  unsure at all n locations
  Clone ID: LIB3118-013-Q1-K1-H10
nnccacncntccntatcaatagccatggtttaccctcttgggcaaacctatanagtacggcaatcncttacaggggcacgggacaacaaccctttncccaattacaacaacaactcttggcacatctaaccatacataacatcctaagccaacaacaacaacattttttgccatcactgaaccaactatccacctttaaccctttctcctactttcaacaataactactttcattcaacccactttctctagcaaacatagctgcttaccagcaacaactacaattgcaacaccttcttccatctctcaatcaactatccattaagaacctcttcacatacctactacaacaacaactcctttcatctaacccactctccttaaacaatgcggctacataccttca

SEQ ID NO: 4824 - DNA, 397 bp, Zea mays
  unsure at all n locations
  Clone ID: LIB3118-013-Q1-K1-H2
ttgccttgcgatgcattcccactgccggctgccgccacagctgctgccgcaagccagctgccgccttcngctgtacaggacagtgaggggaggggcggtatacagattgcagcaggagcagcagcagcagcaagggggtgaagacagtgaatagcgggggggagcaaattcttgttcgttttgcactatgattgagattgattcattangctctggtttggaggctgtgactatcatgggatggaaggaattacttggttggtggtgtacaattcttggataggacaaaggtttcggctttttggtgtattagttcagaattgcttcatttacatgtctattcagtacactcgtgtaatacggattaaaatgatttgaaacaaattgagtgcaaaaa

SEQ ID NO: 4825 - DNA, 253 bp, Zea mays
  unsure at all n locations
  Clone ID: LIB3118-013-Q1-K1-H7
ctagcatgaacataacaaggtcgtctttttctacctacaacatgactaccngcggggggtaacttaagagagggcggggcgtcattacatcttaattctactcgtgccaaaacattgactatcccaccatctcagagtgcttgaagaactgccaatcgtaaatcactctagtatagaaaacgaataaactcgtctctgctatcttaaaaaaaataactaaacacatataaattaaaatacggcctccctttaa

SEQ ID NO: 4826 - DNA, 211 bp, Zea mays
  unsure at all n locations
  Clone ID: LIB3118-013-Q1-K1-H8
cccacgcgtccgaacttctttcccacccctcctgtgcaccgctcactttctaacgacggggttcacccgggcgaggtgcgctttaatctcccctactgtttcatcctcnaaaatgtcgccatgtactatcctatcagcgttggcgtgcactcatgccgcctcactgctgtgttgcccaaaacgctcctactcttcttgggcgcctgcccca

SEQ ID NO: 4827 - DNA, 230 bp, Zea mays
  Clone ID: LIB3118-013-Q1-K1-H9
gaacggcgttactaccatcatccacggaggcaattctatcgctgctttcctcaacggggggcttggcgacaggaggaggggcatttggaccggtgatgcttctagcttgtaactcttggaaactaataatatacctggtgaccttggccttgataacgactaaaacctctcttacatgctatgatactcatgctctgccaacattacgctgcatcttggggatgaccttg

SEQ ID NO: 4828 - DNA, 342 bp, Zea mays
  Clone ID: LIB3118-014-Q1-K1-A1
gctacatataaagcacaatagtgtaccaacattggcagccaaaatattttgccttcttatgcggcttggtctttctgcaagtggtgctaccgcgaccatttttccgcaatgctcacaagctcctatagctttccttcttcccccgtacctttttaccagcggggtcttttgtatgtgaaaacccaattcttcaaccctataggatccaacaggcaattgcagcttgcattttaactttatcacccttgttccttcaacaatcatcaaccctattacaacagttaccttttgtgcatttattggcacaaaacattagggcacaacaactacaacaacttgtgc

SEQ ID NO: 4829 - DNA, 126 bp, Zea mays
  Clone ID: LIB3118-014-Q1-K1-A10
acggtactgcgaccagggagcagaacgttgctgtttacttatcctggtgtctcctagaggactgtgggtggttggcacgggactcgggcaatttcggcatctgctacgtggtctataacacgcttt

SEQ ID NO: 4830 - DNA, 283 bp, Zea mays
  Clone ID: LIB3118-014-Q1-K1-A11
cgacgagtgcaacaacaacctggacctcaagaaccgctgcggcgccggcatcgtgccgtacgagctgctcaagcccttctccaagccgggagtcaccgggaggggcatccccagcagcatctccatctgatccatcctcagcatgcattagtccaattaattaaatcgggggttgtactattattgcatgcagaggctgcttgtcgaataaaacgtactatatgtacgattgtattgtacatgtgtgtcaatgcaacaagaggcacgtttgagactttgagtt

SEQ ID NO: 4831 - DNA, 215 bp, Zea mays
  Clone ID: LIB3118-014-Q1-K1-A12
caaactctataaacacaccctattttttattttcactgttcaccctaatataaagggaggtccgtaactttttaggctgggctcccttcacataatgataccattctatgcaatctcatacaccatttaatattggacgacctcatggatggctaccgcgaaaaaatacatcttgatggaactaattattatatataaacactttattgtcatac

SEQ ID NO: 4832 - DNA, 303 bp, Zea mays
  unsure at all n locations
  Clone ID: LIB3118-014-Q1-K1-A2
cccacgcgtncgaaaagaagatgtttgaagttaaacttaaagagataaagtcaacactgaccactatgatcaatgatgaggctgcaatacctgaagtgattgagactgtcaaacagcaagttaaggatgctaaatttcctgatctagaggtcattcgcatgttgtgggatgtgctcatggaggctgttcagtggtctgggaagaaccagcaacagaattctaatgcagcacttccgcaggtgaaagcatgggctgagcttttgaatgctttttgcacgagtggcagactcgaactggaactta

SEQ ID NO: 4833 - DNA, 307 bp, Zea mays
  Clone ID: LIB3118-014-Q1-K1-A3
cgcaacggctccacctccaaggtggtcaaggtcgctgactgcggacagctctcctagatctgtctgatctggtctgttcggccgccctccctccgtcatcgtcgactccccctgcgtccgttcctttggatctgaataagatggtggtgatctgagtggtggtcttagtttatcatgtatcgctcgcagcttaatttagcggtttaggtgtggatctgtgaaccccatggcgcctctgcttgaatcgtgtttcaccctgtatgttctgagattcatgataatgctatgagaactgaaattcccgttt

SEQ ID NO: 4834 - DNA, 240 bp, Zea mays
  Clone ID: LIB3118-014-Q1-K1-A5
cttctgatgatccttaggaccgcaattgtactgtatgttctgctgctccatgtcatcgtttgcataaagatatcagtctgaaagcagatgagctagcgcttcataagttcgtatagggaaacagatacttgcttttgtgttccaaaccatgcaaacgtttcttgttgtaaataactttgtatgtgagtatgtatctcgcttgatggatctataggagaggtatatgaaatacctgttgtc

SEQ ID NO: 4835 - DNA, 150 bp, Zea mays
  Clone ID: LIB3118-014-Q1-K1-A7
gcccacgcctcctaaaagaagatgtttgaagttaaactttaagagataaagtcaacactgaccgctatgagcaatgatgaggctgcaatacctgaaatgaattaaactgtcaaacagcaaattaaagattctaataattatcctatccct

SEQ ID NO: 4836 - DNA, 126 bp, Zea mays
  Clone ID: LIB3118-014-Q1-K1-A8
tgtaaaaacttgacatagtgcatcgcgggggatcagacggcgtgctcctccagtctctatgaacaagctaagctataatagtattttgctatcctatgatccccgggttggtggcttattggtgtc

SEQ ID NO: 4837 - DNA, 282 bp, Zea mays
  Clone ID: LIB3118-014-Q1-K1-A9
tcgcccacgcgttcgcccactcgttttaagagttatcaacggaacacaacatattcgggggctgggataactgttccgcggggtgccatgctacctgtgagcgggataaatcgttcattcaaccgctatgtgctggggcctgctatgtttccaggcctgcgtttaccaaacgaatggaagcacagatgggataccccttaagacatattggaaggcttatttgcttacgtagtctgcgacagcttgggatattgtgttaagaccggactgtcttatgtgatg

SEQ ID NO: 4838 - DNA, 337 bp, Zea mays
  unsure at all n locations
  Clone ID: LIB3118-014-Q1-K1-B1
cgtccgcatcccggtcgaccacgcgtccgcccacgcgttcgnggacgcgtgggcggactcttgggcggacacgtgggcgccacgctgctgagggggagggccgtcatgggggggctcacgtcaggcacgctggggctcgggggcctgtcctcgctcacgtgcctcgccaacacggcgcggcaggcgttccagcgcaccccggactacgtggaggaggcgcaccgcaagatggcggaggccgtggtgcacgctggccacaagaccgggcaagcagggcaggccatccacggcaaggcgcaagaagcccgcgccgggggaggtgcatgtgcccgcgctt

SEQ ID NO: 4839 - DNA, 238 bp, Zea mays
  Clone ID: LIB3118-014-Q1-K1-B11
acgtggacgcgtgggcagacacttggtgtccctttcactgctatccctcataactgggggggtggggatatttatcctggtgccaccaaaacatttaattaagcattggacaccatcaagactgttatttggaacggccccaagggagtgtttgagttctagaagattgcatctgtcacttatgctaatgtcaagaaacttacttaccttacaaccacgaaaggtgctactaccatca

SEQ ID NO: 4840 - DNA, 351 bp, Zea mays
  Clone ID: LIB3118-014-Q1-K1-B12
cggacgcgtgggcggacgcgtggggtccctgccactgctatccctgatgactggatggggggtgatgttggccctgatgccacgaaaacattcaacgaagcattggacaccaccaagactgttatttggaacggccccatgggagtgtttgagttcgagaagtttgcagctggcactgaggcgattgccaagaagctagctgagcttacaaccacgaagggtgtcactaccatcatcggcggcggcgattctgtcgctgctgtcgagaaggctgggctggccgacaagatgagccacatttcgaccggcggccgtgcgagcttggaactcttggaaggcaagactctacct

SEQ ID NO: 4841 - DNA, 211 bp, Zea mays
  unsure at all n locations
  Clone ID: LIB3118-011-Q1-K1-F10
cctattatttaatataatcaanttggatttttttaactttcctgcttatttactataccggtggctactaccttgcagcggggtagcccttcctatcccttgtaccttattgactcaaccacattttttccctgtttaccaccatgattgtcctaacccttcctccctcctacaactataacaataggtaacattctatcaacctcctttt

SEQ ID NO: 4842 - DNA, 460 bp, Zea mays
  unsure at all n locations
  Clone ID: LIB3118-014-Q1-K1-B2
cccacgcgtncgcggacgcgtgggcgcgccgtcgncgtcgtcgncgtcgcagccgcaacagtgccgtcgcacaagaccttccggatcaagaagaagctggcgaagaagatgcgccagaaccgccccatcccctactggatccgcatgcgcactgacaataccatcaggtacaacgccaagcgcaggcactggcgccgcaccaagctcggcttctgagcgtcgggattggccggctgctgcgtcggaaggctagggtctaagagctatcttccttctgttttatcaatgcgtcagtttttctgtaagctagcaagtggtgctatgacgcttttattaagattctggtgagccgtgatgttaagagaaaattggcactactggggtgtaccccaagattccttgcagcattgctatgctaaagaaagaaccctttatcttattatatatgtaggggttgatt

SEQ ID NO: 4843 - DNA, 430 bp, Zea mays
  Clone ID: LIB3118-008-Q1-K1-H1
cggcggaaacgtcctgtgccgccttcatggcctttagggcgccgctcgagcagcagttccggaggggcggctgcagccgccgcggcggtgcctgtgctggacgtcgaggagcggtgactcgcgaccatggatctcttgatgcaattccatgcgtgatgcgtatgaaggaacgaatgggtttacaagccccatataataaatcataacagtgcgggagcattttttggatgtccttcacacagatgcaggcaatgaaagatacagaaaatagacaatgtttgctcggagtgagacagataggaattgggatagaatcattcttgttctcagatcagctgtactgctttttttattatggtagtatatcatacctggtcgagtagactgacggttgcttgcttaacattaatatcgttgtatttgcaattgg

SEQ ID NO: 4844 - DNA, 346 bp, Zea mays
  Clone ID: LIB3118-008-Q1-K1-H10
gaagaatcttggtaaagtcgacgtgtgttctgattcagatgagtacttattaggccatgatgatgatgatgatgtattggatggtgaaagtgaaaatccagatgacatcttagatgactgttctatttcagatgattctgagatggatttaggggatgcagatgcagatgaattttgcagagactgagttggtggcatgtgtgtagcataaaagaacaaaaaaaaaagttgtgttaagtttcgtatgaaaacaaagttcaacaataactgtttgtgactttaagctcaggatataattgggtactatactctagctgctgtcatctatggagttccaagtaacact

SEQ ID NO: 4845 - DNA, 372 bp, Zea mays
  Clone ID: LIB3118-008-Q1-K1-H11
ccgcaacatcaccgtcaacgaggcccagtcccgcggcggccgtggaggcggcggcggtgggtacggtggtggccgtggaggcggcggctactgcggtggcgggcgccgtgatggcggtggcggctacggcggtggcggcggctactgtggcggcggcggctactgtggtggtggcggcggctactgcggtggcaaccgtggcggcggctacggcaactccgacgggaactggaggaactgagcggtggggcccgcgcggacaagttatcctgttcgctaccgtgatgtttaccctagtacagagggtttatcttcgatcgtgtcgtgtttgttgttgcccatctgtgtttttgattgcaaggtcgctctgtg

SEQ ID NO: 4846 - DNA, 244 bp, Zea mays
  Clone ID: LIB3118-008-Q1-K1-H12
gcgtacgctgactgcttggtctgacacgttgacttttttttgtgcggtcgcgtggttctaatggagaggggcttatcattatattccggagggaaccatggctatcaatatctcagggtctgtaacaaggattatataatcttctaacattagagcgtgggttcttgagaacgctactctaggttgtgcgtcgtttaataatatctggctactgtaaggcatccttgattggtttggtttttta

SEQ ID NO: 4847 - DNA, 327 bp, Zea mays
  unsure at all n locations
  Clone ID: LIB3118-008-Q1-K1-H2
ctttctatctatatctgtaataatgcagtaagacgacacacattatcatgtgtggtatgaccaataatatatgcatgatcataataaagttttggttttaaaaaaaaaaaaaaaaaaaaaaaaaaaaaaaaaaaaaaaaaaaaaaaaaaaaaaaaaaaaaaaaaaaaaaaaaaaaaaaaaaaaaaaaaaannaaaaaaaaaaaaaaaaaagggggaaaaaaaaaaaaaaaaaaaaaaaaaaaaaaaaaaaaaaaanngggggggggccttttaaaaaaaaaaaatttttttcccgggggaagaaaaaaaaaaattttttattagggg

SEQ ID NO: 4848 - DNA, 265 bp, Zea mays
  Clone ID: LIB3118-008-Q1-K1-H3
ctttctatctatatctgtaataatgcagtaatatctacacacattatcatgtgtggtatgaccgaggaatatatgcatgatcataataaagttttggttttaaaaaaaaataaaataatataatttatattattaaatatttaaaataaataataaaattttattattaaataaataaaaatttaaattatatttttatattcattaaataatataaagataataaaaattttatttttttaaaaaaataaaaaaaaaaaatatt

SEQ ID NO: 4849 - DNA, 92 bp, Zea mays
  Clone ID: LIB3118-008-Q1-K1-H4
ggacagccgaacatgtccaaccattttttaaagttcaattcatgtacaatgatgagtgatgaataatgaataaagatttgcagcttcttgtg

SEQ ID NO: 4850 - DNA, 323 bp, Zea mays
  Clone ID: LIB3118-008-Q1-K1-H8
ctggcatcattgaactctcctgcttatttacagcagcaacaactactaccattcagccagctagctggtgtgagccctgctgccttcttgacacaacaacagttattgccgttctacctgcacgctgcgcctaacgctggcaccctcttacaactgcaacaattgctgccattcaaccaacttgctttgacaaacccagcagcgttctaccaacaacccatcattggtggtgccctcttttagatttcttatgagttatagttcaataataaagttttttgtctgatgtttgtggcttcccagaaataataaagtccatttct

SEQ ID NO: 4851 - DNA, 366 bp, Zea mays
  Clone ID: LIB3118-008-Q1-K1-H9
cccacgcgttcgcccacgcgttcgctttattgtttctaataaaggaaaggaaaatatccgaggcggaaaaggggcttaactaaaaacgaatccaaacgcagcgaatggactattagagtcatcattccgtctgtccgggccacgaaatggcatcaggagctcaggtgaggatcatgcaatatgacgcgcgcggagtccccgggctcgcagaccagaacacggcgatccgcggggatcctggagaccagctcgggctgggccttttcgtactcggcacggacgtatgcagccgcatcctccgcgcggtcgctcttcacgatggccatgctgcagtccctgaagccggcgccgttgaaccgggcgccg

SEQ ID NO: 4852 - DNA, 392 bp, Zea mays
  Clone ID: LIB3118-009-Q1-K1-A1
ggtgggttggcttctcctccccctccggttcgggttcgggttcgtgaggttctccggggttcgggttcgtgggtgagcggatcgagatggcggcgtcggatgttgagtaccgctgcttcgtcggcggcctcgcctgggccacggacgaccactccctccacaacgccttcagcacctacggcgaggtcctcgagtccaagatcatcctcgatcgggagacgcagaggtcccgcggcttcggcttcgtcaccttctccacggaggaggcgatgcggaacgccatcgagggcatgaacggcaaggagctggacggccgcaacatcaccgtcaacgaggcccagtcccgcggcggccgtggaggcggcggcggtgggtactgtggtggcccgtga

SEQ ID NO: 4853 - DNA, 406 bp, Zea mays
  Clone ID: LIB3118-009-Q1-K1-A4
ctcagatgatggtgagagcactggtggaggtggaacactgcagatatggcgaatgagtgatttgatctaccgcccagaggatgaagttcttacagagctggagaatttcaaggctcacctggccagttgcgctccgaggaattgagtcatgtgaaaactctgagtaggttatgtagtttcctggccctaagtagtttcctggccataagtatggccccaattgacattggatctgtcttctcatgctcctagagctgtacccttcgaggtgcttgtgcctttgtgagcttgtgttgaaccatgttgtatgactaaatagtccgcaaacgagtcagctggatggctaatctgtaggccaactattgggatattgttggatattatcaacaaccggttcagattcggg

SEQ ID NO: 4854 - DNA, 440 bp, Zea mays
  Clone ID: LIB3118-009-Q1-K1-A5
cccacgcgtccgggcaaacgcggctgcgagcgcggcgcccctctcccactccccagcagccgccagcccgcacacccctccctcgcgcgctcagggtttcggaatggaagccgaggcggcggccaagaggacgcgggacagcggggaggacgccgccgcggcggggatctccgccgtcatcccgggatggttctccgagatcagccccatgtggcccggtgaggcgcactctttgaaggtggacaaggtgctgttccaagggaagtcagactaccaaagcgttatggtctttcagtcctctacgtacgggaaggtgctcgtcctcgatggagttattcaggtgacggatagggatgagtgtgcgtaccaagagatgatcactcacctgcccctttgctccatcaaagaccccaagaaggtgttggttattggagggggtg

SEQ ID NO: 4855 - DNA, 250 bp, Zea mays
  Clone ID: LIB3118-009-Q1-K1-A6
gtcatatgatggtgagagcactggtggaggtggaacacttcagatatggcgaatgagtgaggggatctagcgcccagaggatgaagttcttacacagctggataatttcaagggtctcctggccccgtgcgctccgaggaattgagtcatgtgaaaactctgagtagggtatgtagttttcctggccctaaatagtttcctgggcataagtatgggccccatagtcattggagatgtcttttttattctc

SEQ ID NO: 4856 - DNA, 324 bp, Zea mays
  Clone ID: LIB3118-009-Q1-K1-A7
aaagcgaaaggccattaatgagtgatcggaagcagagacttggctaatagagaaaaagcagggggacgatgctatgccaaagcatgctaatgcagtactccttgctgctgaccttaaaaaaaaagctgaaacacttgataggttctgcaagccgatcatgacgaaaccgaagccagctgctaagccggagactacgcctgtggcagaaaaccaagctcctgagcctcagacaccagagcaggagcaatcacgtggcgaaagcacagccagcgagggagccgcacaggagcctcgagccgagcagatggagacagacaaacctga

SEQ ID NO: 4857 - DNA, 339 bp, Zea mays
  Clone ID: LIB3118-009-Q1-K1-A8
aagagttcgaggaggtccatcttggcggcctcggtcttcgactcgtcgtaacaggtcggggccaacttgagcggtccatgaggaaattcttgctggctgggggcttcaacaaggggcagccccacttcgccgagaacatcttcaaagggatcgacgcccggttcctgagcgaagccctgggcgtcagcatgcacgtcgcctagaagctgcagagccggcgtgaccagcgaggcgagatcgtgcgcgtggagccggagcacggcttttaccatctgaaatcgtcgccgtcgtcgtcgtcctgtttcgataccatcgtgacaagtccagtaccaaacgtgc

SEQ ID NO: 4858 - DNA, 431 bp, Zea mays
  Clone ID: LIB3118-009-Q1-K1-B1
aaagcgaaaggtcattaatgagtgttcggaagcagagacttggctaatagagaaaaagcagcagcaggatgctctgccaaagcatgctaatccggtactccttgctgctgaccttaagaagaaagctgaaacacttgataggttctgcaagccgatcatgacgaaaccgaagccagctcctaagccgcagactccgcctgtggcagaaaaccaagctcctgagcctcagacaccagagcagcagcaatcaggtggcgaaagcacagccagcgagggagccgcagaggagcctcgagccgagcagatggagacagacaaacctgagggagccacagatccctcggcttagctttgccagtgatcaaacatttgtgtgattgaccctgttcacctgctgttatagtcggtaggggggagtgaactaagcgaga

SEQ ID NO: 4859 - DNA, 376 bp, Zea mays
  Clone ID: LIB3118-009-Q1-K1-B2
cccacgcgtccgcccacgcgtccgcgcgccgcttgtggcggtctacgtcttcgacgagaacaacaacatcaaccagctcgagccttccatgaggaaattcttgctggctgggggcttcagcaaggggcagccccacttcgccgagaacatcttcaaagggatcgacgcccggttcctgagcgaagccctgggcgtcagcatgcacgtcgccgagaagctgcagagccggcgtgaccagcgaggcgagatcgtccgcgtggagccggagcacggctttcaccagctgaatccgtcgccgtcgtcgtcgtcgttttcgttcccatcgtcacaagtccagtaccaaacgtgccagcgcgacgtcgacaggcacaacgtc

SEQ ID NO: 4860 - DNA, 359 bp, Zea mays
  Clone ID: LIB3118-009-Q1-K1-B3
cccacgcgtacggagcaacatagaaagcacatttgtgtaccaacaatgggagctaacatattacgcctgcttatgctccttggtctttctggaagcgctgctacggcgaccattttaccacaatgctcacatgctcctatagcttggcttcttcccccgtacctttcaacatcggtgtcttccgtatgtgtaaacccaattcttcaacccttcaggatccaacaggcaatcgcatctggcatgttacctttatcaccctcgttcctcacaacaatcatcagccctattacaggaggtacctttggtgcattcattggcacaaaacatcatggcacaacatctacaacaacttgtgctag

SEQ ID NO: 4861 - DNA, 102 bp, Zea mays
  Clone ID: LIB3118-009-Q1-K1-B4
cgtttgttcattgcttagagttgggtattcatggaagcaatggaggactcttgtactactattttgttgtcaataatcatgaaaccctcccccttttggact

SEQ ID NO: 4862 - DNA, 320 bp, Zea mays
  Clone ID: LIB3118-009-Q1-K1-B5
tccacgcgtccgcccacgcgtccgagagaaaaatggcgagaaaggaaatgatgtcgccccacaggacccgaaaacacaaactgagaagttggcgggtctaaatggctgttaatatttttcgttagctcaagccgttgacagtggtgtctgggtggaacctaaggctgtggtgggttgtttgaggaaattctgatgtcccattgagcttgtttcctatagttcataggagctagaggcttagctagttgcttgtgtttggtgatagtcatggtctgtgttctggcgtgtcaggtattttaggaatagaaggatgattaact

SEQ ID NO: 4863 - DNA, 361 bp, Zea mays
  Clone ID: LIB3118-009-Q1-K1-B7
tgcggccacgcgtacgtagcaacatataaagcacatttgtgttctatcaatgggagctaaaatatggggactgcttttgcttcttgggggttttgctagtgctgctacggcgaccattttaccacaatgctcacatgctgctatatctaggcttcttcccctgcaccatacaagaacggtgtcttcggtttgagaaaaccacaattctgtaaccttacaggatggatcaggcattctcagctggaattttacctttatcacccttgtttctcacaacaatcattattcctattacaggagttacctttgtgtgcatttattggttcatataattatggtacatcaacttcaacaacttgtg

SEQ ID NO: 4864 - DNA, 68 bp, Zea mays
  Clone ID: LIB3118-009-Q1-K1-B8
atttgcagaaatttatatttaccaaaacccttctaatattttaaagggcccccgagactctttggggg

SEQ ID NO: 4865 - DNA, 370 bp, Zea mays
  Clone ID: LIB3118-009-Q1-K1-C4
tccgcaaggatctcgatgcccaaatcctctccaggttccaaaggccccctggtgctttgccgtcatctctgcttggatacgaggcactgacaggttccctggatgattttggatttgaagattatcttaacatgcctcatgattctgacagtttccgtcaacctgacatgcaccatggaatggaggttcgccttggtttgtccaagggacctatctgtcctagcttcaattgaggcagtaatgtaattctgctgcaagttcacctctcagtccagtacttcagtcaatagaccatattaagatggtgaaatatgaaaactggtagcttgcatctgttcaatgttatgttttaatcaacgctgaatttaat

SEQ ID NO: 4866 - DNA, 239 bp, Zea mays
  unsure at all n locations
  Clone ID: LIB3118-009-Q1-K1-C6
gatcttnatgcccaaatcctcttcttgttccttaagccccctcgtgctttttcggggtctctgcttggatacgagggactgacaacttccccggatgattttggattataagattatcttaacatgcctcatgatttttacagcttccgtcaacctcacatgcaccacggaatgaaggttgtccttcgtatgttcataggacctatctgttctagcttttattgaggcggcaatgtaat

SEQ ID NO: 4867 - DNA, 361 bp, Zea mays
  unsure at all n locations
  Clone ID: LIB3118-009-Q1-K1-C7
gaagcatagaaaatttacaatcacacgtaccacgatatgtatatgaaacctcaagggaacatgcttaaaaataagagggtactcatgcanaacatccacaagtcaaaggcccacaacgccatatagaagactctttccgatcaatttgatgcctagcgagccaacagcaaagctatccgtgagagaaacatttcaaggatggttgagagattggctcatggcccaatggaacctgctgcatctccagtaacaactactgatccccttgcagctgcaccaaagaaggcgaaaaattgaaacacgtggtcttctacatctaggacctacttttggttctcccccactctcttgctggtacata

SEQ ID NO: 4868 - DNA, 341 bp, Zea mays
  Clone ID: LIB3118-009-Q1-K1-C8
cgcataaacgagagggccggagcagccgcagtcccggcgatcccgccgccggtcgccctcatggttcctcgtcactgccttcgggtctctttccaacaatcaagatgagccgtggcggtagcgcgggtggtggtcaaagttctctgggttacctctttggaagcggtgagccccccaaaccagcagtggcaccagctgtaagtgctccacctgctgctgcaggtgctccacctgctgagaaaccacctgctgcaaagcctgatggcaccagtcaaattgctgctggggttaccagccaaaccaataactaccacagggccgacggtcagaacaccggaaac

SEQ ID NO: 4869 - DNA, 387 bp, Zea mays
  unsure at all n locations
  Clone ID: LIB3118-009-Q1-K1-D1
cccacgcgtccggtttggatagttggatccaccaggacatggcattagactcagcgtcttggttggcggcttggctgtaaaggatattctgtacagcattaggttggattcagcgcaccatctgttctattgttcttcctgccggcacagtacctcattggcagcttgacatccagtagatgttagtagtctctatttgttttttcttagctgtgtcatgcattgttttttgagcgtaacttgatgtatggtgatttttgtaatctttgtaatatgtaaatgctgcaggaaataggtctgcacaaattctgtccatcagcagtaccattcttttctttttttgacttccnnnnnnnaaaaannnnannnaaannnaaannnanaana

SEQ ID NO: 4870 - DNA, 341 bp, Zea mays
  Clone ID: LIB3118-009-Q1-K1-D2
cgcagaaacgagagggccggagcagccgcagtcccggcgatcccgccgccggtcgccctcatacttcctcgtcactgccttcgtttctctttccaacaatcaagatgagccgtggcggtagcgcgggtggtggtcaaagttctctgggttacctctttggaagcggtgagccccccaaaccagcagtggcaccagctgtaagtgctccacctgctgctgcaggtgctccacctgctgagaaaccacctgctgcaaagcctgatggcaccagtcagattgctgctggggttaccagccaaaccaataactaccacagggccgacggtcagaacaccggaaac

SEQ ID NO: 4871 - DNA, 394 bp, Zea mays
  Clone ID: LIB3118-009-Q1-K1-D3
cggacgcgtgggcactggcggaattactgattcctttgcaaactttgtttgggaacctgctggtgtaaagatcaatgctataaatgctgcaaccgaagcttcctgccttattcttagcgtcgacgagacagtgaaaaacccaaagtcggagagcgcacaaggtgaggctgctgccggtgcgatggctggtcgcggtcgacgtgcaatgcgaggacgtggtggcaggggcatgcgcacgcgataaactgggtcaagtagatcatggtgagatttttttgcatgtgtgcgagtgcttttgtgccttactgcacatgtattgacgctgcacttactattgtgcgctcttggttgtgaagcagtcgtagactttttttttgtttcagaagagatgcac

SEQ ID NO: 4872 - DNA, 392 bp, Zea mays
  Clone ID: LIB3118-009-Q1-K1-D4
cccacgcgtccgcccacgcgttcgcggacgcgtgggtgaaggcggagaagcttgacaagatctgaggcgggggcattgggtaacgaaaaaaggttgcgatctgcaagaattcagcatgtctctttgctgctttatcattgaacttcccattcttgtcttgctgtcacgtcccctggggttcaatactatgatgcacacagcatcctggcagctgcaagaattcatccccagtcgagtcacgaaaatggtttgcgtgttggctatgtcgtgtaagcttattcagttattcttggtggtttgggtcggtatcgtgtcattccccgggttaggtagctctgtaatctactattctcatgtgtgttgccttccaatcagtaatagtaatcagcaat

SEQ ID NO: 4873 - DNA, 364 bp, Zea mays
  Clone ID: LIB3118-009-Q1-K1-D5
gatacgtgctcacgcgcgcgtccaggaaccgcgagctcaacaagcacgcgcgcctgggctggcaggtcgtcctcgcgccggagctgcaggggatggtcgtcgccatccccgagcctaagccgtgggacatcccataatggcctgccgacgaaaggtaaggtgcggcttttgacgctgtgagccttccttaattcccttggctcggtcaagctgtgcgcctgtgccatccccttttatatgttacggatttagtgaagaataataatttgatgagcaaaacttggcattggttaacttttgttcctagtatatggatgctctaatgtggaatccttttgcaactaccgcaggttaatgtttcatg

SEQ ID NO: 4874 - DNA, 218 bp, Zea mays
  Clone ID: LIB3118-009-Q1-K1-D6
caatacttcacttctttgctttcttcggtgccccagtagctggagctgtggatgagacacggggtgaagtattgaaataaagctgtagctttctagtccagtactgcactttcttttataagctctagacaaatcttggagcgcctgaactgttttgctgttatataacttagcgtattgataaattcgactatcacatctggattattctgctggat

SEQ ID NO: 4875 - DNA, 291 bp, Zea mays
  Clone ID: LIB3118-009-Q1-K1-D7
cttgagcgacgcatcccgtatggtggcacaacttagaggtgtggcagaaaagctgaaagaatcaaatgagaagctgcgggagaatatcaaggacctgaaggaggagaagaatgagctccgcgaagagaaagtgaggctgaacgtagaaaaggataggctggagcagcaagtcaaagccatgagtgtagctcctacaggatatgttccccatctccctcatgcagcttcataccacccggctgcatttgctccatttgtgccgtcacagcaagccgcaggcaacaaaagtgc

SEQ ID NO: 4876 - DNA, 215 bp, Zea mays
  Clone ID: LIB3118-009-Q1-K1-D8
accacacattcgcccacgcatgcgctgtctcatccgtgttttctgagaagctttacaccaacggaggcgggggcattgtactaggcaaaaaagttgccctctacaacaattcaccctgtgatcatgattctttatcatcgcactcacaattctcttcttgataacacgccccctgtcattgaattctactatgcacacaacataatggcaacttc

SEQ ID NO: 4877 - DNA, 303 bp, Zea mays
  Clone ID: LIB3118-009-Q1-K1-E2
agaagaagttcgtcagcgacggtgttttctacgccgagctcaatgagatgctgacgcgggagctggcggaggatggctactctggcgtggaggtgcgcgtcacgccgatgcgcacggagatcatcatccgcgccacgcgcacgcagaacgtgctcggcgagaagggccgcaggatcagggagcttacctccgtcgtccagaagaggttcaacttccctgagaatggcgtcgagctttacgccgagaaggtcgtcaaccgtgggctctgtgccatcgcgcaggccgagtccctccgttacaagc

SEQ ID NO: 4878 - DNA, 313 bp, Zea mays
  unsure at all n locations
  Clone ID: LIB3118-009-Q1-K1-E3
cccactcgttcgtggacgcgtgggcggacgcgtggggagaaggttgtgtgcatggnagaaagggggtatggtgctgagcagcgggagagggcatttgagcatggcttccagtgcggaagctacaaggttccagcaaactgatgatatcacaagagggaagcgcttgacgtagtctttatatttcaattgttgcagccgatcaaccttcttagggttgtataatatgaagccaatgtggagactaatgtgaggtgggagaggcctattgatgcatcaaaaggattatgagctaataataaagccttctccacag

SEQ ID NO: 4879 - DNA, 354 bp, Zea mays
  Clone ID: LIB3118-009-Q1-K1-E4
catgtatggtatccgtgtctggcaaacttattttgaggcttgttaaatatgtaccttttgtgtctcaagatgttaaataaagcaaattaacttccagtttaaaaaaaaaaaaaaaaaaaaaaaaaaaaaaaaaaaaaaaaaaaaaaaaaaaaaaaaaaaaaaaaaaaaaaaaaaaaaggggggccgaaaaaaaaaaaacaaagttaaaaaaagcgggaaaaaaaaaaaaaaaaaactaataaaaaaaaacggggggggcctttaaaaaaaaccaaatttaaaaccccgggaatgggaaaacaaaatcttttttttaggggaaccaaattgaattaaatgggccgttttttaaaa

SEQ ID NO: 4880 - DNA, 234 bp, Zea mays
  Clone ID: LIB3118-009-Q1-K1-E5
gcaacatagaaagcacaatagtgtaccaacaatggcagccaaaatattttgcttccttatgctgcttggtctttatgcaagtgctgctaccgcgaccattttcccgcaatgctcacaagctcctatagcttcccttcttcccccatacctctcatcagcggcgtcttcagtatgtgaaaacccaattcttcaaccctgctgctattgcctgttggatcctgttctacatcgcga

SEQ ID NO: 4881 - DNA, 176 bp, Zea mays
  Clone ID: LIB3118-009-Q1-K1-E6
gtccgcatgtatggtatccgagtctggcaaacttattttgaggctgtttaaatatataccttttgtcggtcaagatgttaaataaagcggattaacttccacttaaaaaaaaaataataaaataaaaaaaaataaaaaaaaaaaaaatatataaaattaatatataaaaaaaagat

SEQ ID NO: 4882 - DNA, 302 bp, Zea mays
  Clone ID: LIB3118-009-Q1-K1-E8
catacacgggttaaagcatcacagcacccctttggggatgccttttctccaaccacccttgggacaaccaaatagctgccggggattacctcaacaatgttgtcatgatcttatgcagaatgaaccacaatacattcaccaagcaatctacaacatggttcaatccataattccaggaggagcaacaacaacaaccatgtgaagtatgtggatctcaacaagctacttaaagtgcggtggcaattcttgacagcagcacaatacctaccatcaatgtgcgggttgttccactcatactacca

SEQ ID NO: 4883 - DNA, 431 bp, Zea mays
  Clone ID: LIB3118-009-Q1-K1-F1
atccgctcaggccaatcaacagaagtgacgcgagcacgagcacacatcccctcccttcttcgggtattcctcgccgcgtgccctggccgcagacctctgccatggcggaccagctcaccgacgagcagatcgcggagttcaaggaggccttcagcctcttcgataaggatggcgacggctgcatcactaccaaggagcttggaacggtgatgcgctcccttggccagaaccctaccgaggcagagctgcaggacatgatcaacgaggtcgatgcggatggcaatgggaccatcgacttcccggagttcctgaacctgatggcgaggaagatgaaggacacggactcagaggaggagctcaaggaggccttccgcgtcttcgacaaggaccagaacgggttcatctcggctgccgagctccgccatgtcatg

SEQ ID NO: 4884 - DNA, 435 bp, Zea mays
  Clone ID: LIB3118-009-Q1-K1-F2
cggacgcgtgggtaaggcagcagtgcagccctttggtaatgccttttctccaatcacgtttgatacaaccaagtagctgccaggtattgcagcaacaatgttgtcatgatcttaggcagattgagccacaatacattcaccaagcaatctacaacatggttcaatccataatccaggaggagcaacaacaacaaccatgtgagttatgtggatctcaacaagctactcaaagtgcggtggcaatcttgacagcagcacaatacctaccatcaatgtgcggcttgtaccactcatactaccaaaataatccatgcagcagcaatgacattagtggtgtttgcaattgaagaattgtgtctacctagccgttatactcctataacggtgttaagcaataaagtaccatacattatgatgtttgtactatgatatttg

SEQ ID NO: 4885 - DNA, 438 bp, Zea mays
  Clone ID: LIB3118-009-Q1-K1-F3
gcagcagccaccgccgcctcatcctcgcagccgccgtcctgctctccgtgctcgcggctgccggcgccagcgccgggacctcctgcgtgccggggtgggccatcccgcacaacccgctcccgagctgccgctggtacgtgaccagccggacctgcggcatcgggccgcgcctcccgtggccggagctgaagaggagatgctgccgggagctggcggacatcccggcgtactgccggtgcacggcgctgagcatcctcatggacggcgcgatcccgccgggcccggacgcgcagctggagggccgcctagaggacctgccgggctgcccgcgggaggtgcagaggggattctccgccaccctcgtcacggaggccgagtgcaacctggccaccatcagcggcgtcgccgaatgcccctggattctcggcggcggaacga

SEQ ID NO: 4886 - DNA, 404 bp, Zea mays
  Clone ID: LIB3118-009-Q1-K1-F5
tccttgttgatggccctcatgacattgatcgctgcgcttacgtcactgagacagtccttgctgcctgctacaaggctctcaacgagcaccatgtcctcctggagggtaccctcctgaagcccaacatggtgactcctggctccgactctaagaaggtgacacctgaggtgatcgcccagtacaccgtccgtaccctccagaggaccgtccctgctgctgtgcctgctgttgtcttcctctccggtggacagagcgaggaggaggccaccctgaatctcaatgccatgaacaagctcagcaccaagaagccatgggccctgtccttctccttcggccgtgccctccaggcgagcaccctcaaggcctgggctggcaaggtggagaacgtggagaaggctagagcg

SEQ ID NO: 4887 - DNA, 423 bp, Zea mays
  Clone ID: LIB3118-009-Q1-K1-F7
cccacgcgtacgaggcttcgttaccttctccttcgagaactccatgctctacgctgtcgatgacatgaacggcaaggagctcgagggccgtaacatcaccgttaaccaggcccagtcccgtggcggtggcggtggcggcggtggctacggcggctgtcgctgcggcggggcggttatggtggcgggcgccgtgacggcggttatggcggcggtggcggctaccgcggtcggcgcgaatgtggcggcggcggctacagaggcggtggcggctacggcggtcggcgcgagggtggcggtggcggctacggcggcagtgtcggcggcggctggagggactgatgtgtgggcccatcctggcttcggacgagttatcttatctatctatagtatcgcgttaccgttcgcttctgtcaccgtgttagt

SEQ ID NO: 4888 - DNA, 169 bp, Zea mays
  Clone ID: LIB3118-009-Q1-K1-G1
cccacgcgtccgtctagatcaaagcattgcgacatggggtacaaaaagagtttttttagctggttacatcgactactggtacatttgaaaaggcatattccccatctttgtggcaatgtcggggcgataccatgctgggccgagaatttttaacgaagttatacttttg

SEQ ID NO: 4889 - DNA, 437 bp, Zea mays
  Clone ID: LIB3118-009-Q1-K1-G2
gagcattcataaacacacctagcgaagcgcactagcaacgacctaacaacaatggcttccaagacattatccctccttgcgcttcttgccctttttgtgagtgcaacaaatgcgttcattattccacaatgctcacttgctccgagtgccattattccacagttcctccctccagttacttcaatgggcttcgaacacccagctgtgcaagcctataggctacaacaagcgcttgcggcgagcgtcttataacaaccaattgcccaattacaacaacaatccttggcacatctaaccatacaaaccatcgcaacgcagcagcaacaagcactgagccacctagccgtggtgaaccctatcgcctacttgcaacaacagctgcttgcatccaacccacttgctttggcaaacgtagctgcataccaacaacaacaaca

SEQ ID NO: 4890 - DNA, 356 bp, Zea mays
  Clone ID: LIB3118-009-Q1-K1-G3
caatgaagtcagcgagatcgccatggctaactcccgccagaacatccggaagttggttaaggatgggtttatcatcaggaagcctcagaagggtcactctaggtcccgtgcaagaagggcacatgaggccaagcagaagggaaggcactctggatacggcaagcgcaggggtaccagggaggctaggctccccaccaagattctgtggatgaggaggatgcgtgttctgaggcgcctgctccgcaagtaccgtgaggccaagaagattgacaagcacatgtatcatgacatgtacatgaaggtcaagggtaatatgtttaagaacaagagggtacttatggagagtatccacaagt

SEQ ID NO: 4891 - DNA, 426 bp, Zea mays
  Clone ID: LIB3118-009-Q1-K1-G4
cggacgcgtgggttccccatgccgaccgaagagggttccgacggcggtggcggctcctgaggcggatccggggagaagaagaggtctcaggcgccctcaaagcttggagcgtgcggcgccgcaaagttcctcgcggggttgccgtcgcgcggcaacttctcttccggctccgccccctccaacctgggagggttcaggggttacgtctgcgagcacagcacagatcccccagaaggacaagttataaagacggattcaacgaatattttaatcaggcatctccagttgaacaagcagaagactgagggcgaagatgtggattccagaactgtcggggaaaacaacagagggaaaagatctgctgccagaagtttggatgtcaacaattcagcaaagaaggctaacttgggtacttcatctggatca

SEQ ID NO: 4892 - DNA, 435 bp, Zea mays
  Clone ID: LIB3118-009-Q1-K1-G5
tccacgcgtccgagaatattgctgtgtttaagcctattgatgaggaacccatggcgaaaaacaacccaaggggtcttgctttgtccactgatggcgaggggatgaagaggggaacaattgtagggggaggtgcattcagggaggttgcagcttatattctcgaccatccagttagtgatagtaaatctggtcacagttttgggttttctggtgtgcctcccaccacattggtccgaacctcgcatagggggaagaacttcaagattggttcactgcacatgttcatggacaacaatggaagcactgaagatatgggtcctcgaccttttcctgtcaaggaggttcataaaatagcagtactagatattacgttagctaatgctgatcgtcatgctgggaatattctagtgtgcaaggagagagaaggtggcaact

SEQ ID NO: 4893 - DNA, 437 bp, Zea mays
  Clone ID: LIB3118-009-Q1-K1-G6
ctagatcgcgggcggccgctcagcaacatcagtttcttccattcaaccaactggctgcattgaactctgctgcttatttgcaacaacaactaccattcagccagctagctgctgcctacccccagcaatttcttccattcaaccaactagcagcattgaactctgctgcttatttacagcagcaacaactactaccattcagccagctagctgatgtgagccctgctgccttcttgacacaacaacagttgttgccgttctacctacacgctatgcctaacgctggcaccctcttacaactgcaacaattgctgccattcaaccaacttgctttgacaaacccagcagtgttctaccaacaacccatcattggtggtgccctcttttagattgcttatgagttatagttcaataatgaagttctttggatgatgttt

SEQ ID NO: 4894 - DNA, 320 bp, Zea mays
  Clone ID: LIB3118-009-Q1-K1-G8
gaactctcctgcttatttacagcagcaacaactactaccattcagccagctagctggtgtgagccctgctaccttcttgatacaaccacagttgttgccgttctaccagcacgctgcgcctaacgctggcaccctcttacaactgcaacaattgctgccattcaaccaacttgctttgacaaacccagcagcgttctaccaacaacccatcattggtggtgccctcttttagatttcttatgagttatagttcaataataaagttttttgtctgatgtttgtggcttcccagaaataagaaagtacatttctagattctt

SEQ ID NO: 4895 - DNA, 368 bp, Zea mays
  unsure at all n locations
  Clone ID: LIB3118-009-Q1-K1-H1
cgctgcttatttgcagcagcaaatactactaccatttagccagctagctgcagcaagccgtgcttccttcttgacacagcaacagttgctgcctttctaccagcagtttgcggctaaccccgcaaccctcttacaactacaacaattgttgccctttgtccaacttgctttgacaaacccagcagcctcctaccaacaacacatcattggtggtgccctcttttagattgcttattagttgtaattcaataataaagttttttggatgatgtatgtggccaaccagaaataagaagttacatttccagattccttannnaaaaaaaaaaaaaaaaaaaaaaaaaaaaaaaaaccccnncnnnaataat

SEQ ID NO: 4896 - DNA, 271 bp, Zea mays
  Clone ID: LIB3118-009-Q1-K1-H3
tcggacgcgtggtcggacgcgtgggtctagaatgacgtatacgacaacgtctcgcacgccttcgtgaacatcctacgggacgagggcccgtctgatctttaccctgggcttacacccaccctgatcggcgtggtgccgtacgcgggctgtaacttctacgcctacgagacgcttaatcgggtctaccgtctcgcgaccgggcggcgtgcctgcgcggacgtgggccccctggcgacacttctcatctggtccgcggggggcgccatcttca

SEQ ID NO: 4897 - DNA, 254 bp, Zea mays
  Clone ID: LIB3118-009-Q1-K1-H5
tctagaattacttatactactacctctctcacaccttcgtgaatattctacgcgacgagggcccctctcatctttaccattttcttacacccatcctcatccgcttatttccctactcctcctgttacttttactcctactagactcttaaactgctctaccctcttaccaccataccttgtttcctctcttactttttccccttttctactcttctcatctcatcctctgattctccattttcatctctttca

SEQ ID NO: 4898 - DNA, 349 bp, Zea mays
  Clone ID: LIB3118-009-Q1-K1-H6
aaaaaaaaaaaaaacaaaaaaaaaaagaagaaaaaaaagaaaataaaaaaaaaaaaaaaaaaaaaaaataaaaaaaaaaatataaaaaaaaaaaacaaaaagaaaaaaaaaaacaaaaaaaaaaaaagaagaaaggaagaaaaaaaaaaaattaaaaagaaaaagaagaaaaaaaaaaagaaaaagaaaaaaaaaagaaaaaggaagaaaaaaaaaaaaaaaaagtaaaaaaagaaaaaaaaaaaaaaaaaaaaaaaaaggagaaaaaaaaaaaaaaaaaaagaaaaaagaaaaaaaaaaaaaaaaagataaaagagaaaaaagaaaaaaaaaaaaaaaaaaaaaaaaa

SEQ ID NO: 4899 - DNA, 452 bp, Zea mays
  Clone ID: LIB3118-010-Q1-K1-A1
gctcagtcaactagccatggtgaaccctgccgcctacctacaacagcaacaactgctttcatctagcccgctcgctgtggccaatgcacctacatacctgcaacaacaattgttgcaacagattgtaccagctctgactcagctagttgtggcaaaccctgctgcctacttgcaacagctgcttccattcaaccaactgactatgtcgaactctgctgcgtacctacaacagcgacaacagttacttaatccactagcagtggctaacccattggtcgctgccttcctacagcagcaacaattgctgccatacaaccagttctctttgataaaccctgtcttgtcgaggcagcaacccatcgttggaggtgccatcttttagattacatatgagatgtactcgataatggtgccctcattccggcatgtgttttctagaaataatcaatata

SEQ ID NO: 4900 - DNA, 326 bp, Zea mays
  Clone ID: LIB3118-010-Q1-K1-A11
tccacgcgtccgcggacgcgtgggtgggacccgaaaggcacgggtggcccgatcacccctcttgcgggcctggtgaccatccataccccgaaggacgaggacgagctgcgccctcctgtcttggcagctgaggtctaacgtcccaacagcgtcctctaaatggcagattgatctggtcctagctaggtttgtatcttatgataagggcagcgctaatacagttcgttccgtgtcacttctgtttaaaaataagttttgccgagacaagctatatgtaccggatgaaagtgtggttccttattgtatgctctggaattttatttttg

SEQ ID NO: 4901 - DNA, 363 bp, Zea mays
  Clone ID: LIB3118-010-Q1-K1-A12
cccacgcgttcgtgccggtgtgggaacttgtactgcgcactccaccgctactccgacaagcacgactgcaagttcgactaccggactgctgccagggacgccattgccaaggctaatccggtggtgaaggcagacaagctcgacaagatctagggggggttccctacggttgggtatcaggaagattgtaaaccgcggtaactcgtcatgcggaactgctgccttgccccccgcgcctttctcttccatgtttgctgctacaatcttgttggtgggccattgcagtgcacggtgcacacttgtgtagcccgcctcgagaattcctgcctctgcatctggtcagttctaaaatgatttgcatgt

SEQ ID NO: 4902 - DNA, 456 bp, Zea mays
  Clone ID: LIB3118-010-Q1-K1-A5
gctcagtcaactagccatggtgaaccctgccgcctacctacaacagcaacaactgctttcatctagcccgctcgctgtggccaatgcacctacatacctgcaacaacaattgttgcaacagattgtaccagctctgactcagctagttgtggcaaaccctgctgcctacttgcaacagctgcttccattcaaccaactgactatgtcgaactctgctgcgtacctacaacagcgacaacagttacttaatccactagcagtggctaacccattggtcgctgccttcctacagcagcaacaattgctgccatacaaccagttctctttgataaaccctgtcttgtcgaggcagcaacccatcgttggaggtgccatcttttagattacatatgagatgtactcgataatggggccctcattccggcatgtgtttcctagaaataatcaatatattga

SEQ ID NO: 4903 - DNA, 318 bp, Zea mays
  Clone ID: LIB3118-010-Q1-K1-A7
cggacgcgtgggctcgcgcgctcttgttttcttatatccgatgccgccctacgtcgggtgcgggaattctgcattttcgggcccttctccagcgacgagcacccgtcagaggattatggattggctggggcagaaacgcgcggagatgctgatgcatgtgctgctggtggcgtctgcggtggcggcgttcctggagggctacctgcgcgcggacttccatgtcatgctggtcgtgtacgccggtggcgtcgtgctcacggttctggtcaccgtacccaactggcctttctacaacctgaacccgctcaagtgggtcga

SEQ ID NO: 4904 - DNA, 202 bp, Zea mays
  unsure at all n locations
  Clone ID: LIB3118-010-Q1-K1-A9
actagttctagatcgcgagcggggccctttttttttttttttattgagcataanccgggccggcgcatacatataaaaccctagctcgtaccgggcagcacgcctgtatctggggatgtaaagttcttgagagtagacggaggagtctaatcaagacacatcaaggtgacacagcactgcgcaggtgtacgcatgaaccgca

SEQ ID NO: 4905 - DNA, 125 bp, Zea mays
  Clone ID: LIB3118-010-Q1-K1-B1
ctacatagctctaaagtttttgatacaccgagtgatttgccaggaaaaaaatgagcagattgttgtaagcaaaacatgtttgttatggctaaactgcatgtctacctggatttgtattttttttc

SEQ ID NO: 4906 - DNA, 378 bp, Zea mays
  Clone ID: LIB3118-010-Q1-K1-B10
tccacgcgtccgctccgtgcttcccggcgcgaaccctagccgagattagattggaggcgagcgccatcaccggaggaagagggcgacacgatgctgcgggttgcgggaagaaggctctcgtcttacgtctcctggcgccccgccgtggcggcggccaggggcccccttgccggtgctggcgcccccgaccgggacgactgctcggctcgcggccggagccagacgcggttctccatcgactcccccttctttgtcactgccaggggtttctcttcgactgaaacacttgtcccacgaaaccaagatgctggcctagctgacctcccatcaactgtggctgctgtgaagaatcctaaccctaaagtgtttatgatgagt

SEQ ID NO: 4907 - DNA, 165 bp, Zea mays
  Clone ID: LIB3118-010-Q1-K1-B11
gccgtcacgcgtccgctccgtgcattacaaagcgaaccctatccgagattaaatagcaggcgagggcgggcaacggaagaagagggggacactatgatcgtacccagcagcaaaaaagcggtcgtcttccgtctaatagacccccgtcgaggtggcggacagggt

SEQ ID NO: 4908 - DNA, 296 bp, Zea mays
  Clone ID: LIB3118-010-Q1-K1-B12
acccacccgggtgttatctctacttcagcactgtggtctccctcccttttatgcttgctcaaccatagttcaatagctgaccacctttacatgatgcttggggggttccctacagccgagcatccatgatatctttcacacttgaaaacccacatgctataccgttttctcttccaacaacccctctctgttagcagcatactgctacaaccctggtggttggaacaatagcccaccctactcactgtgctagccctgcttcagaaattctggctcagcacttgtcacatctaaaa

SEQ ID NO: 4909 - DNA, 436 bp, Zea mays
  Clone ID: LIB3118-010-Q1-K1-B2
cggacgcgtgggccgacgaccagatcgccgagttcaaggaagcattcagcctcttcgacaaggacggcgacggctgcatcaccaccaaggaacttggaactgtgatgcgctcgttggggcagaaccctactgaggctgagcttcaggacatgatcaacgaggttgatgctgatggcaatggaaccatcgacttccctgagtttctcaacctgatggcacgcaagatgaaggacaccgactctgaggaggagctcaaggaggccttccgcgtgttcgacaaggaccagaacggcttcatctctgctgctgagcttcgacatgtcatgaccaacctaggtgagaagctgacggacgaggaggtggatgagatgattcgtgaagccgacgtggacggtgatggccagatcaactactaggagttcgtgaaggtgatgat

SEQ ID NO: 4910 - DNA, 412 bp, Zea mays
  Clone ID: LIB3118-010-Q1-K1-B3
cccacgcgttcgcggacgcgtgggcgacggcgaggccaccgatcctatctatatatattcaggcgtaccatggaggaggaattgcaggaggccgaaatcctatggccggcaggcgtggacggcggcggcgaggcggcgcctgcttgctcggtccgtcatcgtcccagggcagccacgccggtcgacatctctcggcagaagcggcggtgccgcccctgcccggtgtcgtcgtcggagcattattacgccaccacgctcgacgaccaggaaaccgacgacgtcggcgatggtgcaacaaaagggacgactgcgaaccacggctcggcggtcgtgccgccgcacgtccttgtcgcgcggcggaggaggctggtgcgccggccgacggcggcctactccatgtgcgctggcaggg

SEQ ID NO: 4911 - DNA, 419 bp, Zea mays
  Clone ID: LIB3118-010-Q1-K1-B5
ctcttccggaacatcaccggcaacccggaagtcagggtaaacaaggcagggagggcggctggtgtgcttgagaaccatgaggaggggagacgttacgccatgcatggcctaagaagctttgtgcacgacaagactcctgagatcatgcctgcagttaacaagttcttcactgaccctaagtgaagcatgttgattggcatactactactactactacttgctactgtggattttacactttgctggcaactcaatatgttggggacatccatgacctctaaaagtactttgagcgcttggtgatgacttggtatatgtatgatggtggatgagtttgatcgtccatgcttgatgttcatattcatctgtcatctggatttgccgcacttcagtgataaaattgtcatttggatactggg

SEQ ID NO: 4912 - DNA, 297 bp, Zea mays
  Clone ID: LIB3118-010-Q1-K1-B7
gcgcagacacgtgggcaagctcctacttcccctttaccaagtgctacacggaatatggggccggaggacattgtggaggggggagggcttcaatcttatgtggagtaccgtcgcttcagcggcgggcttgcctgggccaccagcaacgagtcgcaggagaaagccttcgcctcctacggtgagatcctcgactccaagggtatcacctgaccggtagacggggaggtcccgcggcttacggcttcggtaccttaccctccgagaactacatgctcgacgctaataagaacatgaacg

SEQ ID NO: 4913 - DNA, 416 bp, Zea mays
  Clone ID: LIB3118-010-Q1-K1-B9
agaaggatcactccaaattcaaaagaaagggtgaagatctcttctatgagcacaccttgtctgtgaccgaagcactatgtgggttccaatttgttcttacacatctggacaacaggcagcttctcatcaaatcagaccctggtgaagttgttaaacctgaccaattcaaggcgattaatgatgaggggatgccaatttaccagaggcctttcatgaaggggaagctgtacatccatttcacggtggagttccctgactcgttggcaccagagcagtgcaaggctctcgagacagtacttccaccaaggccttcatccaagctgacagacatggagatagatgaatgcgaggagacgactatgcatgatgtgaacaacatcgatgaagagatgcgcatgaagcaagctcacgctgcc

SEQ ID NO: 4914 - DNA, 395 bp, Zea mays
  Clone ID: LIB3118-010-Q1-K1-C10
cgagaccaacaagcaacatagaaagtggaatccagtagcaacaacagagcaacaatggcgaccaagatattttccctccttatgctccttgctctttctgcatgtgttgctaacgcgacaattttccctcaatgctcacaagctcctatagcttcccttcttcccccataccttccatcaatgatagcttcagtatgtgaaaacccagctcttcagccctataggctccaacaagcaatcgcagcaagcaacatacctttatcacccttgttgtttcaacaatcgccagccctatctttggtgcagtcattggtacaaaccatcatggcacagcagctgcagcaactcgtgctacctgtgatcaaccaagtagctttggcaaacctttttcccta

SEQ ID NO: 4915 - DNA, 366 bp, Zea mays
  Clone ID: LIB3118-010-Q1-K1-C11
gagacgcacaagcaaaatcgtacgtgcaatcctcttacaacgacataactgcattgtctacccagaggtgctgactccgtatgaagcttgctctcactgcgtgcgatgctaaccccacaatttagactgactgctaacaagctactattgctatggttgctactgcataccgatgatcaatgatagctgacgtatgtggatacccaactttttactcctatacgctccaacaagcagtggcatcatgcaacatacgtttgtcacgcctgggagattcaacaattgccagacctatatttggtgcacgcattggtccaaaccatcacggctcatcaggtgccacaactcttgctaaatgagatcaac

SEQ ID NO: 4916 - DNA, 331 bp, Zea mays
  Clone ID: LIB3118-010-Q1-K1-C12
ggttggcttctcctccccctccggttcgggttcgggttcgtgaggttctccggggttcggtgtcgtgggtgggcggatcgagatggcggcgtctgatgttgagtaccgctgcttcgtcggcggcctcgcctgggccacggacgaccactccctccacaacgccttcagcacctacggcgaggtcctcgagtccaagatcatcctccatcgggagacgcataggtcccgcggcttctgcttcgtcaccttctccacggaggaggcgatgcggaacgccatcgagggcatgaacggcaaggagctggacggccgcatcatcaccgtcaacgag

SEQ ID NO: 4917 - DNA, 425 bp, Zea mays
  unsure at all n locations
  Clone ID: LIB3118-010-Q1-K1-C2
cccacgcgtncgggttggcgtaccatactcggatccactggctgatgggccagttattcaggcttctgcaacacgggcgcttaagaaaggcactacacttgattctgtcatagagatgctgaagggggttacacctgagctttcttgccccattgttcttttcacatactataatccaattctgaaacgtggtgtgggaaacttcatgtctactatcaaacaagctggcatacatggacttgtagtgcctgatcttcctttggaggagacagcgttgctgaggagcgaggccattatgcacaacatagagctggttcatacccactctcatctttgcatgcaccacttgcacaaagtttgttgcgtacttgtgttgctatctgggtgctaactaaattcttactcgagatgggacctatcaaatc

SEQ ID NO: 4918 - DNA, 433 bp, Zea mays
  Clone ID: LIB3118-010-Q1-K1-C4
gccacctcaacccaggaacagagcgaggcgacgccgcggcacctcttctccggcgaagggaaatggcaaccgttccaggggatctgatctggcaggttgtgaggaagaacaactccttccttgtgaagcagttcggcaacggcaatgccaaggtgcagttcaccaaggagccgaacaacctctacaacatccactccttcaaacactcgggtttggcgaacaagaagactgtgacgatccagccagctgcaaaggactcggctgtggtcctctctactaccaagaccaagaagcagaacgcacctgcgaagctcagccacaagtctgtgatgcgcaaggagttccgcaagatggccaaggctgtgaaaaaccaggttagtgacaactactacaggcctgatctgaccaagccagctcttgctaggctaagctc

SEQ ID NO: 4919 - DNA, 345 bp, Zea mays
  unsure at all n locations
  Clone ID: LIB3118-010-Q1-K1-C5
tctagcgatcgttatactcacaattactcataatgtattctttaggtttagcataaaaaaaaaaaaaaaattaaaataataattggattaatttatatttntttttttaatttaataattatataaaattttaattttttatatattatttattttaattaattaataataaaagggggcgccctttttaaagtatccaaccttactttcccttcctttcaacgttatattttttttttttggttcccctaaattcattttactgcccgtctttttacacctcctttcctttaaaaccccttcctttccccatcttattcccttttcttaacttccccttttttc

SEQ ID NO: 4920 - DNA, 412 bp, Zea mays
  unsure at all n locations
  Clone ID: LIB3118-010-Q1-K1-C6
gtggaaattatcacccctgtggagctgatcaagaagggtgaaaaggtgggctcgtgcgagtgtgccctgctcgccaagctgggtatccgtcccttctcgtacggcctccaggtcaccagtgtctacgaggatgggtccgtgttcagccctgaggtgctcgacctttccgaggaggacctgattgagaagtttgccactggtgtatccatggttgcctccctgtcactggcgatctcgtacccgacccttgctgctgtgccccacatgttcatcaatgggtacaagaatgtgcttgctgttgctgtcgagacagactactcgtacccacatgctgacaagatcaaggagtacctcaaggacccaagcaagtttgctgttgccgcccccgttgctgctggngactctggcgctg

SEQ ID NO: 4921 - DNA, 416 bp, Zea mays
  Clone ID: LIB3118-010-Q1-K1-C7
cggacgcgtgggctggcttctcctccccctcttaccaagtcctcctcgggttagggttcctgagggttttgtggaggggcgatggcggcggctgatgtggagtaccgttgcttcgtcggcgggcttgcctgggccaccagcaacgagtcgctggagaatgccttcgcctcctacggcgagatcctcgactccaaggtcatcaccgaccgggagacggggaggtcccgcggcttcggcttcgttaccttctcctccgagaactccatgctcgacgctatcgagaacatgaacggcaaggagctcgacggccgtaacatcaccgttaaccaggcccagtcccgtggcggtggcggtggcggcggtggctaccgcggcggtcgcggcggcggcggcggttatggtggcgggcgccgtga

SEQ ID NO: 4922 - DNA, 306 bp, Zea mays
  Clone ID: LIB3118-010-Q1-K1-C8
cggacgcgtgggctggcttctccttccccttttaccaagacctcctcgggatagggggcctgagggttatgtggaggggcgatggcaacaactgatgtgaagtaccgttgcttcgacggcgggcttgcctgggccaccagcaacgaggcgctggataatgccttcgcctcctacggcgagatccttgactccaaggtcatcaccgaccggtagacggggaggtcccgcggctacagctacgttaccttcacctccgagaacttcatgctcgacgctatagagaacatgaacggcaaggagctcgac

SEQ ID NO: 4923 - DNA, 400 bp, Zea mays
  Clone ID: LIB3118-010-Q1-K1-C9
aaacacaccaagcgaagcgcactagcaacaacctaacaacaatggctaccaagatattatccctccttgcgcttcttgcgctttttgcgagcgcaacaaatgcgtccattattccacaatgctcacttgctcctagttccattattccacagttcctcccaccagttacttcaatggccttcgaacacccagctgtgcaagcctataggctacaacaagcgattgcggcgagcgtcttacaacaaccaattgcccaattgcaacaacaatccttggcacatctaacaatacaaaccatcgcaacgcaacagcaacaacagttcctaccagcactgagccacctagccatggtgaaccctgtcgcctacttgcaacagcagctgcttgcattcaacccact

SEQ ID NO: 4924 - DNA, 459 bp, Zea mays
  Clone ID: LIB3118-010-Q1-K1-D1
cccacgcgtccggcagagtgaaagcaagtgtgctcttgtctacgggcagatgaatgagcccccgggtgctcgtgctcgtgttgggttgactggtttgactgttgctgaacatttccgtgatgctgaaggacaagatgtgcttctgtttattgacaacattttccgttcacccaggcaaattctgaggtgtctgctcttcttggacgtatcccatctgctgtgggataccagccaacccttgccactgatcttggaggactgcaagagcgtattacgacaacaaagaagggttctattacgtctgtccaggctatatatgtgcctgctgatgacttgacagatcctgctcctgctactacctttgcccatcttgatgctacaactgtgttgtcacggcagatctctgagcttggtatttatcctgctgtcgatccactggattccacatcaagaatgctt

SEQ ID NO: 4925 - DNA, 357 bp, Zea mays
  Clone ID: LIB3118-010-Q1-K1-D12
gccacgcgtgcgattttgagcattcagaaacacacctagcgaagcacatttgcaacaacctgggagcaatggctaccaagatattatccctccttgcgcttcttgcgctttttgggagcgcaacaaatgcgttcattattccacaatgctcacttgctccaagttccattattacacagttgctcccaccaggtactataatgggcttcgaacacccaggtgtgcaagcctattggctacaacaagcaattgcggtgagcgtcttacaacaaccaattttccagttgcaacaacaatcctttggcacatctaacaatacaaaccatcggtacgcatcagcagcatacaatttctacc

SEQ ID NO: 4926 - DNA, 465 bp, Zea mays
  Clone ID: LIB3118-010-Q1-K1-D3
caccttccaccgcgtcatccccgagttcatgtgccagggcggcgacttcacccgcggcaacggcaccggcggcgagtccatctacggcgagaagttccccgacgagaagttcgtgcgcaagcacaccgcccccggtgtgctctccatggccaacgccgggcccaacaccaacggctcccagttcttcatctgcaccgtcgcgaccccttggctcgacggcaagcacgtcgtcttcggccaggtcgtcgagggcatggacgtcgtcaaggccatcgagaaggtgggcacccgcaacggctccacctccaaagtggtcaaggtcgctgactgcggacagctctcctagatctctctgatctggtctgttcggccgccctccctccgtcatcgtcgactccccctgcgtccgttcctttggatcttgataaaatggtggtgatctgagtggtgggcttagtttatcat

SEQ ID NO: 4927 - DNA, 460 bp, Zea mays
  unsure at all n locations
  Clone ID: LIB3118-010-Q1-K1-D7
cccacgcgtccgtgctactctgctccgtgatctggtctggtgagatcggggatcggaccgtggactcgacaaacatggcggactggggccccgtggtggtgggcgtggtgctgttcgtgctgctctcgccgggcctgctctgcgagctgccgggcacccaccgccacgtcgacttcggcggcttccacaccaacggcaaggccatcttcgtccacaccctcgtcttcttcgccgccttcaccatcctcacgctcgcgctccacatccacatctacaccggctagctagctagtgcggagcatatgttgcgtcggtctggactcgcggaggtctcagatcagaaaggaacgccggccggcggcgcgtcctgtgttgctgctcttgttcctctgcagttcgatcgattcgaccaagtgcttgtaactgcctagcttcctcgttgctatgctagntactctct

SEQ ID NO: 4928 - DNA, 405 bp, Zea mays
  Clone ID: LIB3118-010-Q1-K1-D9
agagaatgagcaactgaaaagtagccgcaatgagtacctcaaactgaaggcacgtgttgataatttacagcggactcaaaggaacttgcttggtgaagatcttgagtcattaggcataaaagagctggagcacctggagaagcagctcgattcgtccttgaagcacataagatctacaaggacacaacacatggttgatcaactgacagaacttcagaaaaaagaacaaatgttttgtgaagcaaataagtgtcttcgaagaagactggaggagagcaaccaggttatatggcagcatgcgtgggagcaaagcgagcggcattctgaagtgcagccgcagcagctcaatggcaataacttcttccatcccctcgatggtgctggtgaacccacccttcagatagg

SEQ ID NO: 4929 - DNA, 351 bp, Zea mays
  Clone ID: LIB3118-010-Q1-K1-E1
cccacgcgtccgcccacgcgtccgggcagcgccgccaactgggccgcctgggacgaagccatatagtagatctagccatgccatgtccactgcgctgcctgcaacccgttcgccggtgcccctgcccgtggtctttatcatcttaccaaccacgagactttgcttctaaaccagaggctccatctgtgtgccgccttgttttactagaaatccttttttattttatcctttttcacttttcctgcctagtttttttccttatcctgccattgtacaaacaatttctccagtgcttgtagcttgtggacttgggttgtccaacatgtcatgaatacaaactgagtttgcttg

SEQ ID NO: 4930 - DNA, 341 bp, Zea mays
  Clone ID: LIB3118-010-Q1-K1-E10
ggcttctcctccccctccggttcgggttcgggttcgtgaggttctccggggttcgggttcgtgggtgagcggatcgagatggcggcgtcggatgttgagtaccgctgcttcgtcggcggcctcgcctgggccacggacgaccactccctccacaacgccttcagcacctacggcgaggtcctcgagtccaagatcatcctcgatcgggagacgcacaggtcccgcggcttcggcttcgtcaccttcttcacggaggaggcgatgcggaacgccatctagggcatgaacggcaaggagctggacgggcggcacatcaccgtcaacgaggcccagtcccgccg

SEQ ID NO: 4931 - DNA, 366 bp, Zea mays
  Clone ID: LIB3118-010-Q1-K1-E11
agcaggtgcacccggacattggcatctcgtccaaggccatgtccatcatgaactccttcatcaacgacatcttcgagaagctggcggcggaggcggccaagctggcgcggtacaacaagaagcctaccattacgtcccgcgagatccagacctccgttcgcctcgtcctccccggcgagctcgccaagcacgccgtcttcgagggcaccaaagccgtcaccaagttcaccagctcctatgcgagcgatgcgacgtgcactcgtctcctcttcttgcaggagtacaatagtagtacggttaggtgtgttgccgcggtggtagttgccgctgcgtttgctttctgggctcggttgatgtcttttatgt

SEQ ID NO: 4932 - DNA, 465 bp, Zea mays
  Clone ID: LIB3118-010-Q1-K1-E3
cggacgcgtgggtctagaagcacccctctccctctctctctcttcgccgaccgaagctccggaccccaatctaatcgacacctcaccgagatgggccgcaagttcttcgtcggtggcaactggaaatgcaatggaaccacagatcaggtcgagaagattgtcaaaaccctgaatgaaggacaggttcccccttcagatgttgtcgaggtcgttgtcagccctccttatgtcttccttcctgtggtcaagagccagctgcgccaagagttccatgttgctgctcagaactgctgggtgaagaagggaggtgctttcactggtgaagtcagtgctgagatgctcgtcaaccttggtgttccctgggtcattcttggacactctgaaaggagagctctgctgggagaatcaaattgaattgttggagacaaggttgcgtatgccctgtctcagggactaaaggtcatt

SEQ ID NO: 4933 - DNA, 369 bp, Zea mays
  Clone ID: LIB3118-010-Q1-K1-E4
cggacgcgtgggccagcacgctgcgcctaattctggcaccctcttacaactgcaacaattgctgccattcaaccaacttgctttgacaaacccaacagcattctaccaacaacccatcattggtggtgccctcttttagatttcttatgagttatagttcaataataaagttttttgtctgatgtttgtggcttcccagaaataagaaagtacatttctagattcttatgtgcttctagtctccaaatgtggttgatagttattttgctctaagattagcagtaatgaagtataaatcatcgttgtggtgtgctactcggttaattgagcattaacacacacaaacatgacgaggatggtataatctct

SEQ ID NO: 4934 - DNA, 160 bp, Zea mays
  Clone ID: LIB3118-010-Q1-K1-E5
attctgttcacacggccacatcatcattgtcctagtttacctcgtttttattatagattcagcgcaaccaatctactagcacaaccctaagtccatgatgatgtggccgtgtgtatttaatgtattctgttcacaattatgtttcgtgctcttttttttt

SEQ ID NO: 4935 - DNA, 234 bp, Zea mays
  Clone ID: LIB3118-010-Q1-K1-E7
atatgaagaatacaccttctatcaatatcttctttagacagcgtaaccttcttcttgggggggcgtcaatggccaactgggcagaaagaccaattgactacaccttctactctcatgattgcagccctcatgccgcataagccactgaggaccactaggacatctctaggataatctgcgactgcattggcgactacttcttcaactacaacatgttcatagttcagactgttc

SEQ ID NO: 4936 - DNA, 441 bp, Zea mays
  Clone ID: LIB3118-010-Q1-K1-E8
agaggaagaagacacctcgaagcaaacctgcgacagccagggtaacctcgtgctaactgggcgatcaatggccacctcggcagaaagtccaattgccttcaccttctacctccatgatggcagcccgcaagccggagaagccgctgaggacgacgaggacatcgggaggataatctgcgactgcatcggcgacgacttctccaactacaacagggccatagtcgagactgtccaaatgggctatggcctcgctgaagtgatctatgccgtgctgaacaacggcgtccaaggccgggtcgctgtcaaacttgctcgcctgccggtgttcaaagccggagaagaagacgccaccgccattctcgggaggatcgttgctcgcagcaagctgttcgacgtcggctgcgtgctcttctacaaagagggtgacaatggagtgagcgt

SEQ ID NO: 4937 - DNA, 121 bp, Zea mays
  Clone ID: LIB3118-010-Q1-K1-E9
caacaacccatcattggtggtgccctcttttagattgcttatgagttatagttcaataataaagtttttttgctgatgtttgtggcttcccaaaaataagaaagtgcatttctagtttctt

SEQ ID NO: 4938 - DNA, 443 bp, Zea mays
  Clone ID: LIB3118-010-Q1-K1-F1
atccagatcagcaaagcggcagtgcgtagagaggatcgtcgaacagaacagcatgaagatggtcatcgttctcgtcgtgtgcctggctctgtcagctgccagcgcctctgcaatgcagatgccctgcccctgcgcggggctgcagggcttgtacggcgctggcgccggcctgacgacgatgatgggcgccggcgggctgtacccctacgcggagtacctgaggcagccgcagtgcagcccgctggcggcggcgccctactacgccgggtgtgggcagacgagcgccatgtaccagccgctccggcaacagtgctgccagcagcagatgaggatgatggacgtgcagtccgtcgcgcagcagctgcagatgatgatgcagcttgagcgtgccgctgccgccagcagcagcctgtacgagccagctctgatgcagcagcaacagc

SEQ ID NO: 4939 - DNA, 409 bp, Zea mays
  Clone ID: LIB3118-010-Q1-K1-F12
acgcccacgcgtacgcccacgcgtccgcagggatctcattggccctgctatgtactttggtctcatgggtgatggccagcccatcggtcgctactacaacatgtgggcaggatggcgtgtgaaggtcatctgcgaccacctgagcctgggagtcaagactggcctgccatacatctggcacagcaaggctagcaaccccttcgttaacttgaagaaggaatacaagggcatcttctggcaggaggacatcatccccttctttcagaacgtgaccatccccaaggactgcgacaccgtccaaaagtgctacatctacctctctggacaagtgaaggagaagctgggcacgattgacccctacttcgtcaagctcggtgacgccatggtcacctggatcgaggcctgtgat

SEQ ID NO: 4940 - DNA, 105 bp, Zea mays
  Clone ID: LIB3118-010-Q1-K1-F2
ttttggagttctgggacctcatgttgagaacctagcgattgttttgccatagttttgtttagaagattctgaattgaattctatatccgtaaccgcttgccagtg

SEQ ID NO: 4941 - DNA, 222 bp, Zea mays
  Clone ID: LIB3118-010-Q1-K1-F5
aaaaaagaaaaaagagaaaaaaaaagaaaaaaaaaaaaaaaaaaaaaaaagaaaggaggaaaggaaaagagaaaaagagaaaattaaaaaagagaaaaaggagaaaaaaaaaaaaaaaaaggaagaaaaaaaaaaaagaaaaagaaaagaaaaggaggaagaaaagaaaaaagagaagaaagaaagaggaggaaaaaagaaaagagaaaaggaggaggaagg

SEQ ID NO: 4942 - DNA, 104 bp, Zea mays
  unsure at all n locations
  Clone ID: LIB3118-010-Q1-K1-F6
attatanttatatatnttaaaatatttatttatttatgaataatttttttaggaaagtttaaattagtttagatattatataatttatttaaaaaaaaataaaa

SEQ ID NO: 4943 - DNA, 437 bp, Zea mays
  Clone ID: LIB3118-010-Q1-K1-F7
cccacgcgtccgcaaagaacacaatataccactgatttcacaatgaaaagggagacaatgccttcatggctagaactgttgcttgcaacacaattctttacgacttgtgctaaccatcttcttgctagtcgcaatgaatgtaacctattttgcacccagtgtgagaccaaaccagctgctttctgtaactattgtcgttcaagtgatcattccacccaccgtgtaatccagataaggcgttcatcgtaccatgacgttgtgagggtgtccgagattgaggatatccttgatgtcagcgatgtgcaaacttatgtaatcaatagtgcaaggattgtattcctgaatgagcggccacaactgcgtgcttctagtgtccccatttgtaaggcacccacatcatcaacacatagctgtgagacatgtagccgtgggctact

SEQ ID NO: 4944 - DNA, 403 bp, Zea mays
  Clone ID: LIB3118-010-Q1-K1-F8
cgtttatcctctcctctctctttctctgtcttgctgcggcgacacctccgcttccgccgggcgagtcccgagcggagccgaagcaacaaccgccggggaggcgagggattgattcggagatggcgtcaactagctctataggcgacgtgggagcctcagatgcaaaatcacgtgtggaggatgtttggaagaagatgaatggtggctttcctaataagatgcccaaacctgcaatgacgaagctcagttcaacagcaacagaaaagaaaaataagccaacaaataattggatgactgttctaggcctctcaccaagtaaggcatgtaattccagtcaaggatcaaaaaatggtctaaaatggacacaacatgaaacgagagaggatgccaaaaaacttgcagc

SEQ ID NO: 4945 - DNA, 290 bp, Zea mays
  Clone ID: LIB3118-010-Q1-K1-G11
ctgcatgttcgggccgaccgacgcgttctaggtcgcgtagcgcggcggtggtaaatgacttcataacttacaatactcgtgccgcgctacgtcgtggggttggtatggggacaacttaaatcccttaactgggctccattgtacggcatgtctgctgccatcacccgcgggtttcccaacttcattagcgtatatttaattcgtcgctggtcaaaatggcctatatggaacttgggccgggccgtccggcttgcctaacggtgagcaccgtgcatgtcgacccttacgcc

SEQ ID NO: 4946 - DNA, 379 bp, Zea mays
  Clone ID: LIB3118-010-Q1-K1-G3
gagaacatgaacggcaaggagctcgacggccgtaacatcaccgttaaccaggcccagtcccggggcggtggcggtggcggcggtggctacggcggcggtcgcggcggcggcggcggttatggtggcgggcgccgtgacggcggttatggcggcggtggcggctacggcggtcggcgcgaaggtggcggcggcggctacggaggcggtggcggctactgcggtcggcgcgagggtggcggtggcggctactgcggcggtggcggcggcggctggagggactgatgtgtgggcccatcctggcttcggccgagttatcttatctatctatagtatcgtgttacccgtcgcttctgtcaccgcgttagtgtccgttctacct

SEQ ID NO: 4947 - DNA, 379 bp, Zea mays
  Clone ID: LIB3118-010-Q1-K1-G4
gttagtttttggtttcatgttggatcagcaatttgttttgagtgttgtcaaagccagaattagtaatatgtttcctgtgtacccgtttcaaacttcatcaagaatgggtgtgctctggatattttgtcgggaatgatatggaacacttaaaagttagctgtcgacaaatgtgcattgcttcccatttgagttttgtttattgccagtgtttttaggaaaccaggttattggcataaactattttgtgatccaaaaaaaaaaaaaaaaaaaaaaaaaaaaaaaaaaaaaaaaaaaaaaaaaataaaaaaaaaaaaaaaaaaaaaaaaaataatataattatttaaaaaaaaaataaaaattaaaaatataaaataaaaat

SEQ ID NO: 4948 - DNA, 458 bp, Zea mays
  Clone ID: LIB3118-010-Q1-K1-G5
gagaacatgaacggcaaggagctcgacggccgtaacatcaccgttaaccaggcccagtcccgtggcggtggcggtggcggcggtggctacggcggcggtcgcggcggcggcggcggttatggtggcgggcgccgtgacggcggttatggcggcggtggcggctacggcggtcggcgcgaaggtggcggcggcggctacggaggcggtggcggctacggcggtcggcgcgagggtggcggtggcggctacggcggcggtggcggcggcggctggagggactgatgtgtgggcccatcctggcttcggccgagttatcttatctatctatagtatcgtgttaccgttcgcttctgtcaccgtgttagtgtccgttctacctttggattaggtgttggtaccctgttgttcgctttggttgctcccgctatgaaacgagacgagagaagaatgagcaaggt

SEQ ID NO: 4949 - DNA, 430 bp, Zea mays
  Clone ID: LIB3118-010-Q1-K1-G8
ggcagtgcgtagagaggatcgtcgaacagaacagcatgaagatggtcatcgttctcgtcgtgtgcctggctctgtcagctgccagcgcctctgcaatgcagatgccctgcccctgcgcggggctgcagggcttgtacggcgctggcgccggcctgacgacgatgatgggcgccggcgggctgtacccctacgcggagtacctgaggcagccgcagtgcagcccgctggcggcggcgccctactacgccgggtgtgggcagccgagcgccatgttccagccgctccggcaacagtgctgccagcagcagatgaggatgatggacgtgcagtccgtcgcgcagcagctgcagatgatgatgcagcttgagcgtgccgctgccgccagcagcagcctgtacgagccagctctgatgcagcagcagcagcagct

SEQ ID NO: 4950 - DNA, 373 bp, Zea mays
  Clone ID: LIB3118-010-Q1-K1-G9
gtgaagtacactagcaacatcttagcaccaatgggagccaagatttttgccctccttgccctccttgctctttcagcaagcgctgctacctcgacttttattccacaatgctcacaacaatacctctctccggtgacagccgcgggatttcaatacccaactatacaatcctacatggtacaagaggccatccaagcaagcatcttacggtcattagcattaaccctccaacaaccatatgctctattgcaacagccatccttagtgcatctgtatctccaaagaatcgcggcacaacaactacaacaacagttgctaccaacaatcaatcaagtagttgcagcgaaccttgttgcttacctcgagcaacaac

SEQ ID NO: 4951 - DNA, 238 bp, Zea mays
  Clone ID: LIB3118-010-Q1-K1-H10
cccacgcgtccgcccacgcgtccgcccacgcgtccgcggacgcgtgggcgctcacagacgaggagagtaacaatcttcagttgaatgtcagggaagctgtgaaagataaattgggcgtaagagtgtcagaagagtgcagcagtaactatatcgatgcgactttttatatgttgctatatcatgtgtgacaatctcctaataataaatatatggagtatcgtcctacgtttctgtggct

SEQ ID NO: 4952 - DNA, 344 bp, Zea mays
  Clone ID: LIB3118-010-Q1-K1-H12
cagaaacacaccaagcgaagcgcactagcaacgacctaacaacaatggctaccaagatattagccctccttgcgcttcttgccctttttgtgagcgcaacaaatgcgttcattattccacaatgctcacttgctcctagtgccattattccacagttcctcccaccagttacttcaatgggcttcgaacacctagctgtgcaagccaacatgcaacaacaagcgcttgcggcgagcgtcttacaacaaccaattgcccaattgcaacaacaatccttgccacatctaacaatacaagccatcacaacgcaacagcaacaacagttcctaccagcactgagccac

SEQ ID NO: 4953 - DNA, 422 bp, Zea mays
  unsure at all n locations
  Clone ID: LIB3118-010-Q1-K1-H2
aggagctcgacggccgtaacatcaccgttaaccaggcccagtcccgtggcggtggcggtggcggcggtggctacggcggcggtcgcggcggcggcggctatggtggcgggcgccgtgacggcggttatggcggcggtggcggctacggcggtcggcgcgagggtggtggcggcggctacggaggcggtggcggctacggcggtcggcgcgagggtggtggtggcggctactgcggcggcggcggcggctggagggactgatgtgtgggcccatcctggcttcggccgagttatcttatctatctatagtatcgngttaccgttcgcttctgtcaccgtgttagtgtccggtctacctttggattaggtgttggtacccctgttgttccctttgtttgctcccgctatggaacgagaccagag

SEQ ID NO: 4954 - DNA, 402 bp, Zea mays
  Clone ID: LIB3118-010-Q1-K1-H4
agataacgatagagtaacaattgctcacccatatggcatcatttatttgggaacgttaaacatggcaggatagagttccaaaactatttggttttaagagactcgccggccttggcaagctcctccagctttttatcaatctgtgcttccgtcaggccatccaagttcacgcatctctccacacccatatcgtagcgcgcccagagctggggctggacaccggagcactcgcggacaaggagtggactcgcctgtatgcgagcggtgcatgagagcgcagtgctgttctttgtgtaataaccccatcatacttcagtcctaatccgttgccatttgcttgataaaaatagactggagatatttgccatggaatgaagtctctaaatgactaccactctgaat

SEQ ID NO: 4955 - DNA, 407 bp, Zea mays
  Clone ID: LIB3118-010-Q1-K1-H6
agataacgatagagaaacaattgcttacccatatggcatcatttatttgggaacgggaaacggggcaggatagagttccaaaactatttggttttaagagactcgccggccttggcaagctcctccagctttttatcaatctgtgcttccgtcaggccattcaagatgacgcatctcttcacacccatatcgtagcgcgcccagagctggggctggacaccggagcactcgcggacaaggagtggactcgcctgtatgcgagcggtgcatgagagcgcagtgctgttctttgtgtaataaccccatcatacttcagtcctaatccgttgccatttgcttgataaaaatagactggagatatttgccatggaatgaagtctctaaatgactaccactctgaattggtt

SEQ ID NO: 4956 - DNA, 180 bp, Zea mays
  Clone ID: LIB3118-011-Q1-K1-A10
gccccgatttgctttatccgccaacctatcaagcattcagatgttggttactcaaattgtatctcatttagatctgtctgaggttgaaacttaaatggagcagtagtatctatcatattggtacccctgttactgagtataattttgttttcatatccatccttacagacgattgcactt

SEQ ID NO: 4957 - DNA, 219 bp, Zea mays
  Clone ID: LIB3118-011-Q1-K1-A11
gcgacccgtcttctgacgcgcaggccctcccgtggccggacgcttggcgctgcgacaagtgagtaaatatgcaccatgcttgaccacggctagcagcatcaccatgatccttgacaccattgaacaattcacaatgaaactacttaggcttgtccttgggtttacagcgccgcaagcacagagagccctgagtaccactgccgcttgtgcggaaggtgc

SEQ ID NO: 4958 - DNA, 269 bp, Zea mays
  Clone ID: LIB3118-011-Q1-K1-A12
gccactggatcgtgatttcagtgagccccaacttctgcagcactagtattttgttgagacagatcagctataagcatgccatctgcccaataaacttgttcatcatgtaagatcaatgctgttagtttttgtccgagtttgtgcttgcgtttgcttatacttacctgcagaagaatggttgtctgaaaagtttgtccttctgtaataagtgttgaatgttggaaatcctaaccctcggggttgggagattaatatatagacttagttgg

SEQ ID NO: 4959 - DNA, 324 bp, Zea mays
  Clone ID: LIB3118-011-Q1-K1-A2
ctcctgcgttaggttctccccaaacaccttccagcccaccattgtctccggatcctgggaccgcaccgtcaaggtctggaaccttaccaactgcaagctgcgctgcactctggatgggcacggtggctatgttaacgccgtcgctgtgagccccgacgggtcgctgtgcgcctccggcgggaaggacggtgttactctgctgtgggatttgcctgaggggaagaggctgtactcgctggacgcgggctccatcatccactctctctgcttctcacccaaccgctactggctctgcgctgcgacgcaggaactctgtcaaagatc

SEQ ID NO: 4960 - DNA, 103 bp, Zea mays
  Clone ID: LIB3118-011-Q1-K1-A3
ggactatgaggggggattaagtgggggccttttatatcaaaaaacaacaacaggtcatgctggtatacaagagcctagtttacgtgctcgcggatgccacatc

SEQ ID NO: 4961 - DNA, 274 bp, Zea mays
  Clone ID: LIB3118-011-Q1-K1-A6
tcgcccacgcgtccgaacggatatctcggctctcgcatcgatgaagaacgtagcaaaatgcgatacctggtgtgaattgcagaatcccgcgaaccatcgagtttttgaacgcaagttgcgcccgaagccttctggcggagggcacgtctgcctgggcgtcacgccaaaagacaaaaaaaaagaagaaaaaaatacttcatgaagaggaaaaaaaatgaagggaagaagctaaacgaagatgaacgcaggctaaatcatacaataatctatactg

SEQ ID NO: 4962 - DNA, 281 bp, Zea mays
  Clone ID: LIB3118-011-Q1-K1-A7
ctcaagggagctttggatggtggcctggatattcctcacagcgagaaaaagtttgcttggttcaaaaaagatgacaagcagctggatgctgatatccatcgcaagtacatctatggtggccatgttgctgactacatgaggaacctctctgaagaggagccagagaagtaccagtctcacttcagtgagtacattaagaagggaattgaggctgacgacatggaagctctgtacaagaaggtccatgctgccatccgtgctgatccttctgtggtcaagtc

SEQ ID NO: 4963 - DNA, 260 bp, Zea mays
  unsure at all n locations
  Clone ID: LIB3118-011-Q1-K1-A8
cggacgcgtggggccccggcctcagcctcattctcagccacacccatgcccgtgccaacagcgggatccaaacccgtgccagctggagggaacctgcngcgttngcancaccccgatcctgggccagtgcgtcgagttcctgaggcatcagtgcagcccgacggcgacgccctactgctcgcctcagtgccaatcgttgcggcagcagtgttgccagcagctcatgcaggtggagccgcagcaccggtaccaggcgatct

SEQ ID NO: 4964 - DNA, 391 bp, Zea mays
  unsure at all n locations
  Clone ID: LIB3118-011-Q1-K1-B1
cccacgcgtgcgcaccatgactagtgctgtagcaaggtcagccaagaggaagagaaagaatctatacaggggtatccgccagcggccttggggcaagtgggctgctgagatcagagatcctcagaagggtgttcgtgtttggcttggtactttcaatagtcctgaggaagctgcaagagcttatgatgccgaagcgcgcaggattcgtggcaagaaggccaaggttaactttcctgatgcaccagcagttggtcagaagcaccgttctggctcagcttctgctaaagcatccaagtcaagttttggacagaagcctatcgtcaaaggaagtaactcctttggctgctcagacttgggctgggagaatgataccaagacaccanacatcact

SEQ ID NO: 4965 - DNA, 374 bp, Zea mays
  Clone ID: LIB3118-011-Q1-K1-B10
cggacgcgtgggatgtgctgtagtatagccgctggctagctagctagttgagtcatttagcggcgatgattgagtaataatgtgtcacgcatcaccatgggtggcagtgtcagtgtgagcaatgacctgaatgaacaattgaaatgaaaagaaagaaataaaaaaaaaaaaaaaaaaaaaaaaaagaaaaagaaaaaaataaaaaaaaaataaaaaaaaagaactaaaaataaaaaagaaagagtgaaaagagcaagaaaaagaaagatagtaagctaataatgaaaaaataaaaaagggggggggccctttttaaggagccaatttttatttcgcgggtttggagaaaaataactttttttttggggcccaaa

SEQ ID NO: 4966 - DNA, 403 bp, Zea mays
  Clone ID: LIB3118-011-Q1-K1-B11
cagacgcgtgccatctgctgtagtatatcttttggctagatagctcactccatcattgggggcgcattattgagcgagtgggtgtcacacatcaccatgagtctcaataggaatctgagcaatgacctgaataaactattgaaacgcatctagtgaccaaggaatataaaatcttctactgcaccattgatataacactttggaatgattgtctccctttgtatacttgcttttctgtttacgtatgccattgtaaaccttctttttgaataactctattatgttcttatacttcgctgtatttctttattttaagaacaattttatcatgcctctactctcattgatatttcctttcattctgattaccttataatttatttttttttcaaaaatatttaaa

SEQ ID NO: 4967 - DNA, 261 bp, Zea mays
  Clone ID: LIB3118-011-Q1-K1-B2
cggacgcgtggggccccggcctcagcctcattcccagccacacccatgcccgtgccaacaggggcatccaagcccgtgccagctgcagggaacctgcggcgttggcagcaccccgatcctgggccagtgcgtcgagttcctgaggcatcagtgcagcccgacggcgacgccctactgctcgcctcagtgccagtcgttgcggcagcagtgttgccagcagctcaggcaggtggagccgcagcaccggtaccaggcgatctt

SEQ ID NO: 4968 - DNA, 446 bp, Zea mays
  Clone ID: LIB3118-011-Q1-K1-B3
agcctgtgcgccgtggagaagcgcgggcgggtgcacgtcatcaccctcaccggcgcgggggagcaccgcctcagcccggccctgctctccgccctccgctccgcggtcgcagccgcccgccgcgcctcccccggtgcgctcgtcctggccggcgagggcaagttcttcagcaacggctacgacctcgcgtgggcgcgcgcggggccggccccggcgccggagcaccgcctctccacgatgcgcgccgcgttccgcggcctcgtcgccgacctgctcgcgctccccgtgccaacggtcgcggccgtcacgggccacggagcgggcgctggctgcgcgctcgcgctggcgcacgacgccgtcgccatgcgcgcctcccgcgggttcctctacatgagcgaggtcgacgccgggatcaagatcgtcgattttgtcggcgagctgggtcc

SEQ ID NO: 4969 - DNA, 283 bp, Zea mays
  unsure at all n locations
  Clone ID: LIB3118-011-Q1-K1-B4
acggccttatgatatggattgagacaatctttttgttatcatctgccttgccgattnnnnggggggtggaatctgctgtacctgggcgggttgtggacagacctggaactaattaggacagtgaagacttgagagctggtaggtgagtgtgtgcagggtgtccattccattcgcctgtgcatatatacacccaggccccagcgtatactgtgcatacggtgaccgggacttgggggtcctgtcaggacctaatgcttgtgatgctaatggacctaatggtgcg

SEQ ID NO: 4970 - DNA, 229 bp, Zea mays
  unsure at all n locations
  Clone ID: LIB3118-011-Q1-K1-B5
aacccgcgcgccgtcgataaccacggccggtttcacgtcatcaccctcaccgacacnnaggaggaccaccttaacccggccctgctcttcagcctccgcttctgcgtagaagacagcccccgagcatgccccggagcgctcgttctgtcctgcgaggacaacttcttcagcaacagctactacctatcctgaacacgcgcggagccggccccagaaccggaacaccaac

SEQ ID NO: 4971 - DNA, 177 bp, Zea mays
  unsure at all n locations
  Clone ID: LIB3118-011-Q1-K1-B6
tcgcggacgcgtgtggccccggcctcacctcattttttccacacccatgcccgtgccaacancggggtccaaacccgtgccagctggagggaacctgcngcgttntcaacacccctatcctgggccagtgcttcgagttcctgaggcatcagtgcagaccgactgctactccctact

SEQ ID NO: 4972 - DNA, 291 bp, Zea mays
  unsure at all n locations
  Clone ID: LIB3118-011-Q1-K1-B7
agcctgtacgccacgaagaaacgcggccggttgcacgtcatcaccctcaccggagcgngggggcgccgtctcagccggggcctgggctccgccctccgctccagggacacagacgcccgccgcgcctcccccggtgcgctcgtcctggccggcgagggcaagttcttcaccaacggctacgacctctcgtgggcgcgcgcggggccagccccggctccggagcaccgcctctccactatgcgcgccgcgttccgcggtctcgtcgccgacctgctcgcgctccccgtgcca

SEQ ID NO: 4973 - DNA, 323 bp, Zea mays
  Clone ID: LIB3118-011-Q1-K1-B8
gcctcatgatatggattgagacaatctgtctgtaatcatctgccttgccgattttttttctggtagaatctgctctacctaccgtagttgtggacagacctggaactaattaggacagtgaagacttgagagctggtaggtgagtgtgtgcagggtgtccattccattcgcctgtgcatatatacacccaggccccagcgtagactgtgcatccgttgaccgggacttgggggtcctgtcaggacctagtgcttgtgatgctaatggacctaatggtgcgaaggaacttgtcgatatctgattttggcaatttagtttattac

SEQ ID NO: 4974 - DNA, 291 bp, Zea mays
  Clone ID: LIB3118-011-Q1-K1-B9
cccacgcgtccgcggacgcgtggggttctgtcgtgaagtatattgtgctgatacgtttgtgagtccatgactccccgccgcatattgccaaagataaatgcttctgtttgtgaggcgagggattgtgtgtaatgttcacgaactgtggtagtgcggcatgtgactcaactgttttaaggatggtgatgaccaatttcaaataaatttgctgccatcgtagaattagaagtactatgtggatttacaggagctgtttctggaatttgtagtatcatgttactctttttttca

SEQ ID NO: 4975 - DNA, 158 bp, Zea mays
  Clone ID: LIB3118-011-Q1-K1-C10
gcgaacacgcgtccgacgaaatagagctagaccatccgcacatcaaccaaaaccaagaccagtgcggccaaggtcgcggaggcggaggagaagaataccgaggacgccatcgacgcggccattacctgggtggacgccaaccagatggccgaggcgga

SEQ ID NO: 4976 - DNA, 339 bp, Zea mays
  Clone ID: LIB3118-011-Q1-K1-C11
tcttatagatcatcttggaattgagcctttgatgatggaagctcttgagaagattgagaaggacattaagaaaccacttttgaggagcgacaagaagaacatggccaccctcttggcagagtttgacaagattaacaaaaagcttggctttcggaaggaggatcttcccaagatcgaggaagagcttgaattggaaattgccaaaagtgagctgactgaacttaagaaggaatgcgttgaagcaatggagactcaactcaagagggaggagtttcaagatgaggagatgcctgatgtcaggaaattggacatcagaaacttcctgtaggcctgatcgac

SEQ ID NO: 4977 - DNA, 351 bp, Zea mays
  Clone ID: LIB3118-011-Q1-K1-C12
cccacgcgtccggactcccgcagccttgctgtggaatttgcgcctttgatcatgtggcgggggggtgatgctggcacagatttgcgtaaccacctcaagttaaccctgaaaccgccttcaaaaattgtggatacaacataaaatactgtcacgtgggacctgtttgatgaggatggcgaggatgcttcatcccacatccccttggacgatgctatacccccagactacaactacattgaggtcatccagtgtctgatcgagcatgataatgccatcttcactgatgcacatgaaaccgtgtggagatgatcaacgactcttctagatctctctggtgatagctcgtgctac

SEQ ID NO: 4978 - DNA, 244 bp, Zea mays
  Clone ID: LIB3118-011-Q1-K1-C2
gtagatcgatggaagaggggggaagaccttacatgagaccaagcgctttcaacgctttcaaggggcgtgtaccggctgtgtcgagtgcaactgtgtacataactctagtgcggatgctaacgggcacgctccgaattcaccggctaacgctcgaggccatgcgcttccgtccttctgacgcgtatcgacgagcaccgcaccacgccgactctgcttagaatgatcacccacttgaagctcctcg

SEQ ID NO: 4979 - DNA, 332 bp, Zea mays
  Clone ID: LIB3118-011-Q1-K1-C3
aaggagggccagggatgcctgaaatgttgactccaacaagcgcaataatgggtgctggtctcggaaaggagtgcgccctgctgacagatggtagattttcaggaggctcacatggatttgttgtcggccacatatgccctgaagcacaggaaggtggcccaattggtcttgtccatagtggtgatgtaatcactatcgatgtaagtaagagggtaatcgacgttgaccttaccgagcagcagctcgaagaaagacggaggaaatggaccccaccgccatacaagtccacctgtggagctctttggaagtacatcaagctttgggcttcagcg

SEQ ID NO: 4980 - DNA, 345 bp, Zea mays
  unsure at all n locations
  Clone ID: LIB3118-011-Q1-K1-C4
cggacgcgtgggcgcagaagacgtcggcaagcgttacgccgtctcggcaagccatgacggcatggaccagcgcgccagggacgcggccgtccagaagttcaggtctgggtcgtccagcatcctcatcgccactgaccacggaggcaccaccaacgcgatgccgcaggttcccatcatcatcaactatgatcttccgacagagtccatgcggtacgtccgtcgtctccagcagcagaacaggcagttcaggaggtcggtcagtgtggccatcagtttcgtgactcctgctgaccgacgcaccctctccgncatcacgagctttttgcagtgctacatgggggagct

SEQ ID NO: 4981 - DNA, 395 bp, Zea mays
  Clone ID: LIB3118-011-Q1-K1-C5
ctgatccaaccaccgacccgggcgagccagccatctccgtttccttgccagtcccgcgagcaccattcaccacaccagcgcaggcggcatggccgacgtcgagaaggccacccccgtagccgcaccggccgagggctcgggcggcgacatggccggcaggagaaccggcgcggtggccgccctgctgcggtggtggcggacccaggacctgctggaccgatcggggtccgcgctgcgcgccgcggcgtgggcgttctacctgctggcgttcctcgtcatggcctgcaacgagcatggggactggaggcagttcgaccgctacgaggagtacaggtacatcggtgccatcggcctgctggccttcgtctacacgacgctgcagcttcttcggcacg

SEQ ID NO: 4982 - DNA, 457 bp, Zea mays
  Clone ID: LIB3118-011-Q1-K1-C6
actagctgtggtgaaccctgtcgcctacttgcaacagcagttgcttgcatccaacccacttgctctggcaaacatagttgcataccaacaacaacaacaattgcaacagtttctaccagcgctcagtcaactagccatggtgaaccctgccgcctacctacaacagcaacaactgatttcatctagccctctcgctgtggttaatgcacctacatacctgcaacaacagttgctgcaacagattgtaccagctctgactcagctagctgtggcaaaccctgctgcctacttgcaacagctgcttccattcaaccaactgactgtgtcgaactctgctgcgtacctacaacagcgacaacagttacttaatccactagcggtggctaacccattggtcgctgccttcctacagcagcaacaattgctgccatacaaccagttctctttgatgaaccct

SEQ ID NO: 4983 - DNA, 282 bp, Zea mays
  unsure at all n locations
  Clone ID: LIB3118-011-Q1-K1-C7
acgagcagcacaggcatggtgaaacagctattccaaatgcaccgatcgtgcctgctgncccggggaaggaccgccccccgctggtagatcttagactccgacgacgccgacatcacagtgtacctcgtcatacatgccctgaagcacaagaactgcgtggagcgcgtcttcgtgcatcggatggacaaagccgtatggaactacttagaagggcggatccacgcgacctaaccctcgaggagagcgcagcaaataacgaggatattgaacaaaccgagatac

SEQ ID NO: 4984 - DNA, 289 bp, Zea mays
  unsure at all n locations
  Clone ID: LIB3118-011-Q1-K1-D1
tcgcgcagtacaaccatggggaagcagctcttctacatgcaccgctcgcgccgccnnncccggggggncgccggcgcccgacgggtgcgccttcgccggcgtcagcaccgagctcacngtgtacctcgtcttccgttcgctgaagccgcaagcctccgtggtgcgcgtagccatgtaccgcatggccacggccgcctagaactcctcagangggcagtccccgccttcgtacactctcgcggcgagcgcgcggttcacggcgctgctgcacaacccgagcgaccgcgcc

SEQ ID NO: 4985 - DNA, 356 bp, Zea mays
  Clone ID: LIB3118-011-Q1-K1-D10
gtgagcggatcgagatggcggcgtcggatgttgagtaccgctgcttcgtcggcggcctggggggggccacggacgagcactggctccacaacgccttcagcacctacggcgaggtcctcgagtccaagatcatcctcgatcgggagacgcagaggtcccgcggcttcggcttcgtcaccttctccacggaggaggcgatgcggaacgccatcgagggcatgaacggcaaggagctggacggccgcaacatcaccgtcaacgaggcccagtcccgcggcggccgcggaggcggcggcggtgggtaccgtggtggccgtggaggcggcggctactgcggtggcgggcgccgtgatggc

SEQ ID NO: 4986 - DNA, 296 bp, Zea mays
  Clone ID: LIB3118-011-Q1-K1-D11
caaggagcaagcctaatcccagaaccccacggtcgtgagaccctagctgccgtcgccggcgcgggtgaccggcgacggcgatctacatgggggcgtcggcctccgtgctctcgttcccaacggccgccgcgttcccagcagccgccaccgccgtcgtcggggccgccggctgcttcgcgctcggctacctcctggacttcacccgcctcccgcgccacgccgccggcccaggttcgggagggacctccgatgacgattccgacgatgactctgaagaagatgatgacgaaaactcc

SEQ ID NO: 4987 - DNA, 351 bp, Zea mays
  Clone ID: LIB3118-011-Q1-K1-D12
cacacagaagcggcggcggcggagcaaacgcaggcgaaggcgagggtgtgagggaaggagcaccagccatggtgcacgtcaacttctaccgcaactatggtaagacgttcaagaaaccaaggcgtccttatgagaaggagcgtcttgatgctgaactgaagctggtcggtgagtatgggctgaggtgcaagcgtgagctttggagggtccagtatgcactgagcaggatccgtaatgctgcaaggcacttgctcacccttgacgagaagaacccccgtcgtatctttgagggtgaggcgcttcttcgccgcatgaaccgctatgggctgcttgctgagggtcagaacaagc

SEQ ID NO: 4988 - DNA, 263 bp, Zea mays
  unsure at all n locations
  Clone ID: LIB3118-011-Q1-K1-D2
ctcctgcgttaggttctccccaaacaccttttatcccaccattgtctccggatcctggnaccggggcgtcaaggtgtggaaccttaccaactgcaagctgcgctgcactctggatggacacggtggctatgttaacgccgtcgatgcgagccccgacgggtcgctgtgcgcctccggcgggaaggacggtgttactctgctgtgggattngactgacaggaacatggcttactcgctggacgcgggctccatcatccactctc

SEQ ID NO: 4989 - DNA, 444 bp, Zea mays
  unsure at all n locations
  Clone ID: LIB3118-011-Q1-K1-D3
ctcacgcagatgacctttggctacagcagggatgatgtggggaagttcatccccatttatctggctcagggcatcctccagcatgaccccttcgaggttctcgaccagagaggagtgggcgagctggttaagcttgctacagagaggggccgcaaagctaggcctaacttgaaggtgggcatttgtggagaacatggtggagagccttcatcggttgctttcttcgccaagactgggctggattacgtttcttgctcccctttcagggtcccgatcgctaggctagctgcagctcaggtgcttgtctgaggggctgcctcctcgntggcagcctgctgttggtgcatctggtgataataatactactatgaacagaccctatgcctctgggaaaggattaatagccacgctcattaaagctaccggtcatttaatttcttagtt

SEQ ID NO: 4990 - DNA, 327 bp, Zea mays
  Clone ID: LIB3118-011-Q1-K1-D4
gcctccgacccccttcctctctccctccgccgccgctgcgcacgcagggaacaagcgacatgggcgtctacacctttgtgtgccgcaacaacggcggcgagtggaccgccaagcagcactccggcgagatcgaggcttccgccgctaccccatacgagctgcagcgccgcctcgtcgctgccgcctccgcggccgactctgcctacggcgtccagtcgtccttctccatggtcacccccagctccgccgtgttccaggtgatcgtcggtgctgtcggtggtggtgcaatgatggtgagcggaggtggcggcggcggtgctgctgcat

SEQ ID NO: 4991 - DNA, 296 bp, Zea mays
  unsure at all n locations
  Clone ID: LIB3118-011-Q1-K1-D5
ctcacgcagatgacctttggctacagcagggatgatgtggggaagttcatccccatntatcggggtcanggcatcctgcagcatgaccccttcgaggttctcgaccagagaggagtgggcgagctggttaagcttgctacagagaggggccgcaaagctaggcctaacttgaaggtgggcatttgtggagaacatggtggagagccttcatcggttgctttcttcgccaagactgggctggattacgtttcttgctcccctttcagggtccccatcgctaggctagctgcanctca

SEQ ID NO: 4992 - DNA, 401 bp, Zea mays
  Clone ID: LIB3118-011-Q1-K1-D6
gggattactctctgcatagaaaaggcactagctgatgcaggggtagcaagggaagaaatcaactacgtgaatgcccatgcaacttctacacaagcaggtgacctgaaggagtatgaggctattgtgcgctgttttcgccagaaccctcaactgagggtgaactcgaccaaatcaatgactgggcatcttataggagcagctggtggaatagaagcagttgcttctatacaagctataagaactggttgggtccatccaaatttgaatttagaaaatcctgaggacactgtggatgtgggcatcttggtaggatcacagaaggagagatgtgaggtgaaagtggcgttatccaactcattcggcttcggtgggcacaactcatcaattctctttgccccctt

SEQ ID NO: 4993 - DNA, 303 bp, Zea mays
  Clone ID: LIB3118-011-Q1-K1-D7
tgccgcaccacccggccttaattcctgcgtcgacgcactcgttcgaagcaacatatattgtggtatccagttgctgctacggagcatcttatgcaaccaaaatggggtccctgcatatgctagtgggtccttctgcatgtgttgcgaacgcgacaattttccctcactgctcacatgcttctatagctggccctcttacctcataccttctatcaaggatagcttcagtgtgagaaaacccaacagtttacatctattggcttcttcaagaaaactgagctagcatcatacctttattaccct

SEQ ID NO: 4994 - DNA, 388 bp, Zea mays
  Clone ID: LIB3118-011-Q1-K1-D8
agcccatggtggtggagaccttttctcagtatcctcctcttggtcgatttgctgtccgtgacattaggcaaacggtggctgtcggagtcatcaagagtgtggagaagaaggacccaactggagccaaggtgacgaaagctgttgtcaagaataaatgatctatctggctggtgactaaggctgctgccaagaagaaatgatctatctggctggtgctgtgcttgcttgttggttacctcgtggaagcttaaaatatctcgtcttgttgacatccttgcagttgtcgcgtgaacaagcaatctatgatggcaatgtatgcctgtgcatgaagtattattactttcgttggaaaccgcgatgctattaagacttaattttttttatggaa

SEQ ID NO: 4995 - DNA, 287 bp, Zea mays
  unsure at all n locations
  Clone ID: LIB3118-011-Q1-K1-E1
atgggacctgagattagctttttgctgcttgtggtgaggttgcatattagcgagccnnnntggggtcgntgcttaggctgcttgggcgttctgcatgtgttgcttcctcttcattntttccttattgctcacaagctcctatatcttcccttcttcccccatacctttcatcaatgattgcttcagtttgttttaactcagcttttcgntcttgtttgcttctacaatcaatctcatcttgcatcatacctttatcacccttgttgttttaactatcgcctgcccta

SEQ ID NO: 4996 - DNA, 290 bp, Zea mays
  Clone ID: LIB3118-011-Q1-K1-E10
cccacgcgtccgcggacgcgtggggttctgtcgtgaagtatattgtgctgatacgtttctcagtccatgactccccgccgcatattgccaaagataaatgcttctgtttgtgaggcgagggattgtgtgtaatgttcacgaactgtggtagtgcggcatgtgactcaactgttttaaggatggtgatgaccaatttcaaataaatttgctgccatcgtagaattagaagtactatgtggatttacaggagctgtttctggaatttgtagtatcatgttactttttttttc

SEQ ID NO: 4997 - DNA, 365 bp, Zea mays
  Clone ID: LIB3118-011-Q1-K1-E11
cacacgtagcgccggcggcggaggctatttctccgacgtcccagtcgtaaagccacaggttgcagataccttgcctgcggcggtccaactgaactaacgtatgcagtacacgaagcgatcccctgcgtgagatgacgaggctttcgacgccgatgcttatgcaccacgcactgtcactgattcggtcgaccagcgagctgttgacgtctccgtctatcgcgatcagaacactccatggttccatgcacgaataacaacggtatgcgcagattgtgttgtgattcctaaatgtatactcgctttgtgttgagcagaggcgttcttgtgtacctacgtatggctatataacacgtttcgatattttt

SEQ ID NO: 4998 - DNA, 167 bp, Zea mays
  Clone ID: LIB3118-011-Q1-K1-E12
cacacataaccgtcgcctgcggagcattctttcgccaatgctacggtctgagggaaggagcggcaaccatggtgcacgtgggcggtctaccccaactattgtaagacgttcaataaaccaacgcgttcttatgagaaagagcgtctttatgctgaactgaagctggt

SEQ ID NO: 4999 - DNA, 311 bp, Zea mays
  Clone ID: LIB3118-011-Q1-K1-E2
cccacgcgttcgcccacgcgtccgcgcagatcgagtccaagcattcaccggagaatcccaaaggacactctccagtaaccgcccgcttctccagccgcatctctagccgagtctatctcctcctcctcctccgccgccgcaactatcctaatggctcgcttcgccgtggtcgccggcatcgtcgccctcctcgccgtcgtcgcggcggcgcaggccccggccgccaccccgaccacagctcccaaggccgcgcccaggatggccccgctgccgccaccccctgtgcggtccccggccaccgccccggcgcc

SEQ ID NO: 5000 - DNA, 180 bp, Zea mays
  unsure at all n locations
  Clone ID: LIB3118-011-Q1-K1-E3
atcacacctgagattaccttttcgctgctattgtttacgatccataacagcaaacnncccagggggactctccagggaccgcccgcttctccagccgcatgnttaaccgagtttanattcttctcctcctccgccgtcgtaactatcctaatggctctcttcaccatggtcaccgccatc

SEQ ID NO: 5001 - DNA, 277 bp, Zea mays
  unsure at all n locations
  Clone ID: LIB3118-011-Q1-K1-E4
tcgcccacagcgttcgcccacgtcgtacgaccacgcgtnntgttgacgcttgggcggacgcataaccggtggaaaagctggaagcgaggggaagagatttaacaaaaatacatctattataccatcaacctatcattgttggtggactaattaatatatacaaagagttatagattataaacacacatgacaagttggagtgttggtgtttgcctaaaaatnataatattgatccctaaaaaaaaaatatgttgcttcttgtgaataacaggactaa

SEQ ID NO: 5002 - DNA, 219 bp, Zea mays
  Clone ID: LIB3118-011-Q1-K1-E6
ggtttcagtgtactttagccgtcttgagtttgagtaacacctgctcgccgtcagaaattttgtaccccatgtcgcagtgctttgatctagaaaaagagttttttttagctgtttacatcgactactggtacatttgaaaaggcatattccccatctttgtggcaatgtcgcggcgataccatgctgggccgaggattttttaacgaagttatacttttg

SEQ ID NO: 5003 - DNA, 402 bp, Zea mays
  Clone ID: LIB3118-011-Q1-K1-E9
cccacgcgtccgagaaaggcgaaacgaggccaccagctcaccgccgagcggaagcggcgccgggcaaccaacccctgttctcgtgcgccgccgtctccccggaccatggccatggccgccgcctcctcccggctgctctgggcgtcccgcgccgccgcctacctcaggatcttcaccttccccagggccttctgcaccgtgctgaaggatctgaagtatgctgacactcatgaatgggtgaaagttgagggtgattcatcaaccgtggggattactgaccatgcccaggaccatttgggtgatgttgtttttgtggagctaccagaagttggcatcagcgtatcccagggaaagaactttggtgctgttgagagtgtgaaggcaaccagcgatatcaattca

SEQ ID NO: 5004 - DNA, 103 bp, Zea mays
  Clone ID: LIB3118-011-Q1-K1-F1
cggacgcgtggggtgaaataagcttttacttcctcgctgctgtgggtgaagtgactggaattcggaaatttggaactaacaaaaccccccgtggatttgtatg

SEQ ID NO: 5005 - DNA, 256 bp, Zea mays
  unsure at all n locations
  Clone ID: LIB3118-008-Q1-K1-G9
ctgaagaaactatgtgctgtagtatagccgttggctagctagctagttgagtcatttagcggcgaggattgagtaataatgtgggacgcatcaccatgggtggcagtgtcagcgtgagcaatgacctgaatgaacaattgaaatgaaaagaaaaaagtattcgttcnaacaaaaagctttgacgaaacccaacaacggtctatcaacaacccatcattggtggagccctcttttagacttcctatgaaaaataagg

SEQ ID NO: 5006 - DNA, 422 bp, Zea mays
  unsure at all n locations
  Clone ID: LIB3118-006-Q1-K1-C4
cccacgcgtccgctggagcgggcgctgtcgatcatggagcgcaagatgcggtccagcggcatggagcgcctcatccgggcgcgcacccatcaccacgtcaaggactcggagaagcgcgtgctcgcacgtaaggggcttatgcagcgcgtccgttcccaggagctcggcaagaagctccgcgagatcctcatcaagaagatcaggggccagtgagggcatcagcgcattggccgtttaccggtagcatttgtgtgtgggtgcttcgttttgagcgcgtaacgatgctgggtacttncatcgatggttctgtggcgcagcctgagaataactcaacctaccttgagcaaaaaggcttttgctatattgcatggaggacagattgatggtaaaactattggttttttattgtacaacttcagtat

SEQ ID NO: 5007 - DNA, 291 bp, Zea mays
  Clone ID: LIB3118-006-Q1-K1-C5
ggaccacaaggcctaccttgctgaccatcctggagcgtcttcgatcacgacgggacagggcgaggaactgaggaggcaaatcggcgctgcggcttacatcgaatgcagttcgaaaacgcagcataatgtcaagatgggcttcgacacagtcatcaaagtggttctttaacccccgcggaggatggaggcgacgcctgccaggaggaaaaacaggtgtggctcggggggctctatcatgaccctatgtggggcatcatgggcgctgcttaagagtctagaacactgatctgg

SEQ ID NO: 5008 - DNA, 375 bp, Zea mays
  Clone ID: LIB3118-006-Q1-K1-C7
ctgtgagagtttcttcaactttttcaatcccccgcaggtccctgaagatgatgatgacatcgatgaagacactgctgatgagctgcagagtcaaatggagcatgattatgacattgggaccaccataagggataagattatccctcatgcagtttcctggtttactggtgaggctgtgcaaggtgaggattttggtgagttgggcgatgatgatgaagatgatgatgatgaagacgatgacgaagatgatgaggatgaagaagaggatgatgatgaggaagaggatgatgaggaagaaagcaagccagcaaggaagtcaggatctggtcgcagacataaggtgccacagaacgtgtcgcagggaaatgctgaaca

SEQ ID NO: 5009 - DNA, 370 bp, Zea mays
  Clone ID: LIB3118-006-Q1-K1-C9
gattggcaacggctatgccccagtgctggactgccacacctcccacattgctgtcaagtttgctgagctcattaccaagatcgacaggcggtctggcaaggagcttgagaaggagccaaagttcctgaagaacggtgatgctggtatggtgaagatgataccgaccaagcccatggtggtggagacgttctcagcgtatcctccccttggtaggtttgctgtccgtgacatgaggcagacggttgctgttggagttatcaagagtgtggagaagaaggacccgaccggcgccaaggtgaccaaggcggctgccaagaagaaatgatgcgatcctgcgcctgctttaacaatacctagttttcatcatcac

SEQ ID NO: 5010 - DNA, 170 bp, Zea mays
  Clone ID: LIB3118-006-Q1-K1-D11
tcgttatgaaatactaacacgaactatgacgagtttcgcataagatattgacaggaatgaacggggggagctgtgtgtagcacctgcatcaaacattcatgcgggtactttgataaagggactagtggaaagcaagcaaatggatgcggactgagctgccatctacatca

SEQ ID NO: 5011 - DNA, 309 bp, Zea mays
  Clone ID: LIB3118-006-Q1-K1-D12
gataccaatttccacatggacttgatcgctgtctttgccaacatgcgggctaggagttacggcgttcctgaagatgacaaattgaaggcaaagttcatagctggaagaatcattccagccatcgccaccttaactgcaatggccaccgggcttgtctgcctggagctttacaaaagccttgctggtgggcacaagcggtgaagactaccggaacacatttgctaacctggccaaccccctcttatccatggtggagcctgtgccacccaagaccattaagcaccaagacatgtgctggaccgtgtggga

SEQ ID NO: 5012 - DNA, 366 bp, Zea mays
  Clone ID: LIB3118-006-Q1-K1-D2
gaactctgctgcgtacctacaacagcgacaacagttacttaatccactagcagtgcctaacccattggtcactgccttcctacagcagcaacaattgctaccatacagccagttctctttgatgaaccctgccttgtcgtggcaacaacccatcgttggaggtgccatcttttagattacatatgagatgtaatcgataatggtgccctcataccggcatgtgtttcctagaaataatcaatatattgattgacatttatctcgatatatttttgaactatgttcatcatataaataattgaaaacatcaaatcgtaattataaactcatgctgggtcaatacatagacaatacaatattacttct

SEQ ID NO: 5013 - DNA, 392 bp, Zea mays
  Clone ID: LIB3118-006-Q1-K1-D4
ggtggaggcggtacgacaagaccagacaagctcttgctaaggcccagctggagatgatcgtgtcggccaatgggctctccgaaaacgtgttcgagattgcttcaaaaagcttggcggattagcttgggcagttccgaggaattgcgagtgggagtgcttaactgaatctctcttttgttggtaaaatgacaagtagagataataaacaggcgggccgaatttgcatgaactgataaaatataagtgtgatgatgcccgctttgtggggggctttggagcatgcatgcgcgctcgtctgttggaatggaactgctcgtttttttttacgttctccgctcagcggaccgctgtggggcagaaaacatctgaagcacgacggctgctctctgtct

SEQ ID NO: 5014 - DNA, 323 bp, Zea mays
  Clone ID: LIB3118-006-Q1-K1-D6
gctggacggccgcaacatcaccgtcaacgaggcccactcccgcggcggccgtggaggcggcggcggtgggtacggtggtggccgtggaagcggctgctacagcggtggcgggcgccgtgatggcggcggcggctacggcggtggcggcggctaccgtggcggcggcggctaccgtggtggtggcggcggctacagcggtggcaaccgtggcggcggctacggcaactccgacgggaactggaagaactgagcggtggggcccgcgcggccaacttatcctgttcgctgccgtgatgattaccctagtccagagggtttatctt

SEQ ID NO: 5015 - DNA, 329 bp, Zea mays
  Clone ID: LIB3118-006-Q1-K1-D9
tcgcccacgcgttcgcggacgcgtgggtgaggattgaacacatccttctgcaagagatggcacgggaaacaaatcttatgctgtgcgtgcacccaatctggaacattcattctccacgatacagttaagagagccaccagtcgtcctgaagccttcagaacaccattctgagcaggaggcgcttgaaatatcgatcacaaagttgctattgaagtcatattacaatattgtcaggaaaaatgtggaggacttcataccaaaagcagttatgcatttcttggttaatcatacaaaaagggcgctgcataattaccttataacaaaacttt

SEQ ID NO: 5016 - DNA, 277 bp, Zea mays
  Clone ID: LIB3118-006-Q1-K1-E12
ccacgcaaacgaccacgcgacctttcacacttccgaccacgcagacagcctatgggcgacggcaagcaatagcggagagcggctcacaacaaccaacttcccacgtgcaacaacaatccttggcacatctaacaatacaaaccatcgcaacgcaacaacaacaacaattgctaccagcactgagccacctagccatggggaaccctggcgtctactagcaacaacacgtgcttgcataaaacccacttgctccggcaaacataggtgcaaaccaacc

SEQ ID NO: 5017 - DNA, 62 bp, Zea mays
  Clone ID: LIB3118-006-Q1-K1-E2
cccacgcgtccgcccacgcgttcgcccacgcgttcgcccacgcgtccggttctagatcgcga

SEQ ID NO: 5018 - DNA, 416 bp, Zea mays
  Clone ID: LIB3118-006-Q1-K1-E3
cccacgcgtccgaaattacctgttgagtcaagggcatgctactcgaagatggcagaggagctatgcgcgcttctggtggacacgccaagcgagacgctgaacctacccatggggtgtcttctgacgatgctcaacgctccagttccagacgagagcaggtcgtcgtacctgcaggatgcactctccgtcttcaccgaaatcctttgcagcgatccgtaggtgaaggggagtgaagcctacaggcaacacgccgaagagtttgtacgtctcatgtttgatacttgtagaaaattaggaatgtataactatgacctgatgttgctccggtgaatttgtaacgccatctgaagacatgtgtcgggatcttcgttgtatgtgagtaccacgtcttatgaaacgttgacttgcgagctgta

SEQ ID NO: 5019 - DNA, 364 bp, Zea mays
  Clone ID: LIB3118-006-Q1-K1-E6
gctgaaagagaagaacggggcaagaagtccctgagcatcaacgagttcttgaagccagctgaaggcgaaaggtactataaccctagtggccgtggccgtggtaggggccgtggggggttccgtggtggttacaacggcggttatcggggaccagctgctgctccagcgatcgaagaccaggctcagttccctgccctggcctaagcacagctcgtgttctcgctcaagattgtgtcacttttgcggagtgcgtcagtcagtcctagtgttgttgctcccaagcttgctttccggattatgtgtatccaacattttctgatattatgtactggtgtgctcgtgattgcatggttttgctaagctc

SEQ ID NO: 5020 - DNA, 447 bp, Zea mays
  Clone ID: LIB3118-006-Q1-K1-E7
cccacgcgtccgcaacaagcaacatagaaagtggaatccagtagcaacaatagagcaacaatggagaccaagatatgttccctccttatgctccttgctctttctacatgtgttgctaacgcgacaattttccctcaatgctcacaagctcctatagcttccctttttcccccataccttccatcaattatagcttcagtatgtgaaaacccagctcttcaaccatataggcttcaacaagcaatcgcagcaagcaacatacctttatcgcccttgttgtgtcaacaatcgccagccctatctttggtgcagtcattggtacaaaccatcagggcacaacagctgcagcaactcgtgctacctgtgatcaaccaagtagctctggcaaacctttttccctactctccgcaacaacaatttcttccattcaaccaactgtctacactg

SEQ ID NO: 5021 - DNA, 394 bp, Zea mays
  unsure at all n locations
  Clone ID: LIB3118-006-Q1-K1-F1
cccacgcgtccggtgggttggcttctcctccccctccggttcgggttcgggttcgtgaggttctccggggttcggtttcgtgggtgagcggatcgagatggcggcgtcggatgttgagtaccgctgcttcgtcggcggcctcgcctgggccacggacgaccactccctccacaacgcctttagcacctacggcgaggtcctcgagtccaagatcatcctcgatcgggagacgcagaggtcccgcggcttcggcttcgtcaccttctccacggaggaggcgatgcggaacgccatcgagggcatgaacggcaaggagctggacggccgcaacatcaccgtcaacgaggcccantcccgcggcggccgtggaggcggcggctgcggcgggtaccgt

SEQ ID NO: 5022 - DNA, 371 bp, Zea mays
  Clone ID: LIB3118-006-Q1-K1-F2
gggaacttatagagagctttttgcctgttctcgacaactttgaaagagcgaaagtgcaaataaaggtggaaacagagggagaggagaaaataaataatagctaccagagcatttataagcaattcatcgagattttgaattcattgggcgttgaagatgttgaaacggtcggcaaaccatttgatcccatgcttcatgaggctattatgagagaagaatcatcagagtttgaagaggggattattctccaggaattccgaaaaggtttcaaactcggggaaagactgcttcgcccagcaatggtcaaagtgtctgcaggaccaggccctgaaaagtttggagatgatgacccaacagctgtcgaaggtagt

SEQ ID NO: 5023 - DNA, 349 bp, Zea mays
  Clone ID: LIB3118-006-Q1-K1-F3
cccacgcgtccgcccacgcgtccgggggaagggagcgcaagggagcgatgcggcggcggcgggcggcgaggtggaggagaacatggcggcgtggctggttgccaagaacaccctcaagatcatgcccttcaagctcccgcccgtcggcccttatgatgtccgcgtgcgcatgaaggcagtggggatttgcggcagcgatgtgcactacctcagggagatgcgcatcgcgcacttcgtggtgaatgagccgatggtgatcgggcacgagtgcgcgggcgtggtcgatgaggtgggcgccggcgtgatgcacctgtccgtgggcgaccgcgtggcgctggagccgggcgtc

SEQ ID NO: 5024 - DNA, 381 bp, Zea mays
  Clone ID: LIB3118-006-Q1-K1-F4
catcttccacggcaccaacgcaaattgcaccaagaaatccatcgagaggccggcgacaggggaattaatggcgtcgtcgtctagcaacagccaccgccgcctcatcctcgcagccgccgtcctgctctccgtgctcgcggctgccagcgccagcgccgggacctcctgcgtgccggggtgggccatcccgcacaacccgctcccgagctgccgctggtacgtgaccagccggacctgcggcatcgggccgcgcctcccgtggccggagctgaagaggagatgctgtcgggagctggcggacatcccggcgtactgccggtgcacggcgctgagcatcctcatggacggcgcgatcccgccgggcccggacgcgcacctgga

SEQ ID NO: 5025 - DNA, 373 bp, Zea mays
  unsure at all n locations
  Clone ID: LIB3118-006-Q1-K1-F5
caagcagatcggcgcccacgccgacgccgagaaggccaaggactccgtcggcatccgccccggcaagggtaagatgcgcaaccgccgctacatcaaccgcaagggcccgctcatcgtctacggcaccgagggctccaaggtcgtcaaggccttccgcaaccttcccggtgtggatgttgccaacgtcgagcgcctcaacctactagaccttgcccccggtggccaccttgggcgctttgtgatctggacccagagcgcgttcaataagctcgaggaggtgtatgggagctatgacgccccgtcgcagaagaagaagggcttcgtgctgccgaggcctaagatgtccaacgctgacctgngcaggatcatcaac

SEQ ID NO: 5026 - DNA, 101 bp, Zea mays
  Clone ID: LIB3118-006-Q1-K1-F7
aatctgatctcgatcgcgagccgacgctttacagttagagacttacgtcctcctgtgggccaccgcgtacggcttatatggtgtcaccttaatttaattca

SEQ ID NO: 5027 - DNA, 413 bp, Zea mays
  unsure at all n locations
  Clone ID: LIB3118-006-Q1-K1-F8
caaggacacaaatcagcatcgccgagaagttgaacactgctgctcaagcgctgtgactttggttgtggcagatctatctggttgaaacgtggatgtttggcctacgtgaccaattggtgacagggatgcattttttgttatttgttattaaaaaatgggagagctggcaggaaagaaaagggttagtcaatgatgggatcccggtagagtggtggatgtttctgtttggatagcattatgtgctccaggctgaatatttgtaatgctccttggttgtgtagcgacacagttaacgacatggcangcaaccgacgtcgtctgggtacatcgcaaataagctggtgccgaggtgacctcgacaggagtcgcagcaggctggcactaatgatgcgaataaagaataccttcaacac

SEQ ID NO: 5028 - DNA, 410 bp, Zea mays
  Clone ID: LIB3118-006-Q1-K1-G1
ttccaatcttagccggacccggaggcagcagcgaccagcgagcgacgccggccatgctctgcgccgccgcgtccgccatacccaggctccgcttagcgtcgggcccgcggctgaggcggccgtcggctaggacgcactggccacggccactctcgtcctccagccacgtaacgcccgtggcggctgcgggggctggggagctggagccgccggacctcacccgcttagccaacgccgcgcgcatctcgctctccccgcaggaggccgaggacttcgagcccaagattcgtcaggttgtggattggtttgggcaacttcaggcagtagaccttgagttcattgagccttcacttagagctggtacaacggctgatatttctttgagagaaataggcctgaaacattcgata

SEQ ID NO: 5029 - DNA, 243 bp, Zea mays
  Clone ID: LIB3118-006-Q1-K1-G10
catcgatctgctcaacccgccggcagaacttttgaagctcaagcacaagaaaaagagactggtgcagtcgcacaactccgttctgtatggatgataaatgccaggggggcttcagcataaccactgttgttaagcactcccagactggttgtgggtgccctggctgacaaactgtcctctgtcaacccacaggaggaaaggcaggggtcatggggggctggtctttccgcaggaagggagact

SEQ ID NO: 5030 - DNA, 404 bp, Zea mays
  Clone ID: LIB3118-006-Q1-K1-G2
caaggacacaaatcagcatcgccgagaagttgaacactgctgctcaggcgctgtgactttggttgtggcagatctatctggttgaaacgtggatgtttggcctacgtgaccaattggtgacagggatgcattttttgttatttgttattaaaaaatgggagagctggcaggaaagaaaagggttagtcaatgatgggatcccggtagagtggtggatgtttctgtttggatagcattatgtgctccaggctgaatatttgtaatgctccttggttgtgtagcgacacagttaacgacatggcaggcaaccgaggtcgtctgggtacatcgcaaataggctggtgccgaggtgacctcgacaggagtcgcagcaggcttgcactaatgatgcgaataaagcaata

SEQ ID NO: 5031 - DNA, 435 bp, Zea mays
  Clone ID: LIB3118-006-Q1-K1-G4
acgccaaaatgcatcgatatatagtaccaaaaaagtgtcgcaagcacagtctgcacacatcatacaacacagatcaaactcaaacagcactacagaaattcgtatgctgcgtctgcatcactgatgaagcgcaaagctagcaattcggcttactcccatcaagaccaaacaactaagcagccatacgcaacgtaatgcacaggtggcaaactggtgctcacacccacaagcgctgcccccctccggagaaactcgaaccgggtttgctagcattccctactaacagggacctcgaatcacttgcatctagtgcttcttggctttcgcaagacccctgggtactttgctcagaaccttctcatcgaacacggcatactgcttcttatttcaacccacccctttttggcatacgaagcaatctgatcctcggacttc

SEQ ID NO: 5032 - DNA, 298 bp, Zea mays
  Clone ID: LIB3118-006-Q1-K1-G6
cccacgcgttcgcccacgcattcgaaaactggtggtcaagcgctttgactttggttgggggggatctatttgggtggaaccggggatgtttggcctacctgaccaattggtgacagggatgcattgtttggtatttgggattaaaaaatggagaaccttggcctgaaaaaaaatggttaggcaatgatgtgatccctgtgaagtggtggctttttttgattggataacaatatctgctttcatgctaataatttgaatgctccgttggcgtggatccacaccacttacggcatgacag

SEQ ID NO: 5033 - DNA, 407 bp, Zea mays
  Clone ID: LIB3118-006-Q1-K1-G7
acggaggctctcatagggccttgcatctccagcgtcggcattcacgacgccggggaccaactgcgaggcgtccactttgctgtggggctctcgtccgtctccacaatttgtgcagaccaaagacaaagtaagggtatgctgaaagaagaaattgacctacttaaggtggaaccaaacgaaagcgaagtggatctagaaagaagcatttaacgaccggccgcactagaccaaaccgtagcagaactcaactgaaggcaactgcgggcccgcggccacaatgagtcagcaggaatgcagtctatcagatgatgaaaaccagaaggaatcccttctcaaagagtgaaatgcaaaactggggctttcaaatatttgaggatctgatttacatgcattcacatggatatttt

SEQ ID NO: 5034 - DNA, 321 bp, Zea mays
  Clone ID: LIB3118-006-Q1-K1-G8
cgcacctgtccgtgggcgaccgcgtggcgctggagccgggcgtcagctgctggcgctgccgccactgcaagggcgggcggtgcaacctgtgcgaggacatgaagttcttcgccaccccgccggtgcacggctcgctggcgaaccacgtggtgcacccggccgacctgtgcttcaagctccccgacggggtgagcctggaggagggcgccatgtgcgagccgctgagcgtgggcgtgcacgcgtgccgccgcgcgggggtggggcccgagacgggcgtgctcgtggtgggcgccggccccatcggcctggtgtcgctgtagc

SEQ ID NO: 5035 - DNA, 400 bp, Zea mays
  unsure at all n locations
  Clone ID: LIB3118-006-Q1-K1-H1
ggggctctcagagggccttgcatctccagcgtcggcatccacgacgccggggaccagcggccatgcgtccactttcctgttgcgctctcgtccgtctccacaatttgtgcagaccaaagacaaagtaagggtatgctgaaagaagaaattgacctacttaaggtggaaccaaacgaaagcgaagtggatctagaaagaagcatttaacgaccggccgcactagaccaaaccgtagcagaactcaactgaaggcaactgcgggcccgcggccacaatgagtcagcaggaatgcagtctatcagatgatgaaaaccagaaggaatcccttctcnagagtgaaatccaaaactggtgctttcaaatatttcaagatctgatttgacatgcattcacatggata

SEQ ID NO: 5036 - DNA, 324 bp, Zea mays
  Clone ID: LIB3118-006-Q1-K1-H3
cccacgcgtccgaccacgcgtacgtggacgcgtgggcggacgcgtgggcccacacaacggcgcgattctcctcctccgtccgcgtagctctcgctttccgccatgtccgggcgcggcaagggcggcaaggggctgggcaagggcggcgccaagcgccaccgcaaggtgctgcgcgacaacattcagggcatcacgaaaccggcgatccgtatgctggccaggaggggctgcgtcaagcgcatttctgggctcatctacgaggagacccgccgcgtgctcaaaatcttgctggagaacgtcattcgcgacgtcgtcacctacacc

SEQ ID NO: 5037 - DNA, 336 bp, Zea mays
  Clone ID: LIB3118-006-Q1-K1-H4
ctcgctccagccgcttcacagcgccgccgctcgcctcttcgaccgccgcgagaatgccgttcaagaggttcgtggagatcgggcgcgtggccctggtgaactacggcaaagactatggccgcctcgtcgtcatcgtcgatgtggtcgaccagaacagggcacttgtggacgcccctgatatggtcaggtgccagattaacttcaaacggctctcacttactgacatcaagattgacatcaaacgcgttcccaagaagtcaaccctgatcaaggctatggaggaagctgatgtgaagacgaagtgggaaaacagctcatggggcaagaagctgattg

SEQ ID NO: 5038 - DNA, 328 bp, Zea mays
  Clone ID: LIB3118-006-Q1-K1-H5
gggggctcttaaagggccttgcatttacagcgttggcatttacgacgccggggaccaacggggatgcatgcactatgctgggggggtctcgtccgtctccacaatttgggcagaccaaagacaaagtaagggtatgctgaaagaagaaattgacctacttaaggtggaaccaaacgaaagcgaagtggatctagaaagaagcatttaacgaccggccggactagaccaaaccgtagcagaacttaactgaaggcaactgcgggcccgcgggcacaatgagtcagcaggaatgcagtctatcagatgatgaaaaccataaggaatccct

SEQ ID NO: 5039 - DNA, 382 bp, Zea mays
  Clone ID: LIB3118-006-Q1-K1-H6
acagttttacagctgaggaacgattctttcttctcttcacatgcacggaaatttgggtccttattggcgtacaaacaaacaaggcaaagagcaggagccacgcaagggaatttggtcctgctgctccaacaggcgagacggcgacgggtggccagaacaatgcagccaaatgatcataggaatctacagttgtcgccatcgccttcgtgttctcgacagcgctgaaccgcgggctccgcctcctcgccgccggcgccgaggcgtccaaaccagcttctcgtggattccatgccaccggcgtgaagagaatgggagggcatggccatgatgagccatactacatccatgccaagcacatgtataacttgcacaggatgaagca

SEQ ID NO: 5040 - DNA, 443 bp, Zea mays
  unsure at all n locations
  Clone ID: LIB3118-007-Q1-K1-A1
gctctgcgtcgcgccaagttcaagttccctggccgccaaaagattattgagagcagaaagtggggcttcaccaagttcagccgtgccgactacctgaagtacaagagtgagggtagaattgttcctgatggtgtcaacgcaaagctgctcggtaaccatggaagacttgagaagcgtgctcctgggaaggctttcctcgaggccgttgcttaagtccaatctacagttggaatgcgaatccagacgttttggtttagcctatcttattttgctttgtgcaacatgaattttaagtgtatggggtattacagtgccttgtgtgaacctgcttatctcgtgctgaacatcgntatgcatggaagtacttatcttttgttctgctaaaaattaaagtgttctgcgactaaatatatcttctcaatctggaatggctctttaattgt

SEQ ID NO: 5041 - DNA, 319 bp, Zea mays
  Clone ID: LIB3118-007-Q1-K1-A2
gctcttacccctctactttgaagcagctatgtttgccatacgctctcatgctgatggagactgtgagaatgacctccaaagcctgataagggactgcaagacatacgtgatgctcccagcttatgcaaaggtccctacttcggatgcttgctgaggtgtcatcaagaaggcaaacgcttcttgcttgagctccaacgtgaccaaagaaactgacaaagttgtgtgcatggacaaaggtgtgtatgttgctgaacagtgtaagaggccatttgcgcatgggttacagggcggaatcttcactgttacagcaaactgatta

SEQ ID NO: 5042 - DNA, 277 bp, Zea mays
  Clone ID: LIB3118-007-Q1-K1-A3
aaaaaaaaataaaaaaaaaaaaaataaggtttaaaatactttaaaactcaaaaaaaccaaagggggaattggataacaaaaaatggggttctataaacataaaatataacttaaaaacttttatttactcctatttaaaaacataaaaaaaaaggggggcgccctttttaaaaaatcaaattttttttccctttttttccaccgtttttttttttttttaggcccccttaatttcatttttttgcccccctttttaccacctgagaattggaaaaac

SEQ ID NO: 5043 - DNA, 473 bp, Zea mays
  Clone ID: LIB3118-007-Q1-K1-A4
acgcccacgcgttcgtccacgcgttcttccacgcttgcggatccaccagcccctgcattagtgagggaaagggcaaaaaatggtgggactggtaattcaagaacaagaattaacaagcgtacacaagatgggaatgtggttgagatgatgggaaggtttctaaaaatgaaagaaaaacaagcttgggcggatgaaagggccacaactaatgcaaatgaggatgatttgcctattcaaacatgcattgctattggggatggaatggaagaattttctgatgatgaaaacgttgattcttatgatgtttttaaagatgcccaaaaccgggccattttcatgactggcaaagatgctacgcgcataaaatggttgacgaaaaagattgcaggacatgatatgggattgatcctcttctcatacttttaacttggtttaatttaagtatatgggatgttttaagcgcattacttatg

SEQ ID NO: 5044 - DNA, 247 bp, Zea mays
  Clone ID: LIB3118-007-Q1-K1-A5
acgatttttcttatctgattgtctaaaacctataattggtgtaatggtatcgtagtggttgggtgagcattgagtgactcatattttgtcaggtctatgtgttatcgttaaacttttaacggtcattctatttcaaaaaaaaaaaagggggggggaaaaaaaaaaaaaaaaaaaaaaagccaagaattgaaaaagaagggttttttaaaagggaagggaaatattttttgcggggccggggtttaaa

SEQ ID NO: 5045 - DNA, 251 bp, Zea mays
  Clone ID: LIB3118-007-Q1-K1-A6
gctcttacccctctcctttgtaaacagtatgtttgccatatgctctcatgctgatagaaactgtgagagggacctccaaagcctgataagtgactgcaagacatacatgatgttcccagctaatccaaatgtacctccttcggatgcttgctgtgatgtcatcaagaaggcaaacgtttcttgcttgtgctccaacgtcaccaaagaaactgagaaagatgtgtgcatggagaacgtttgtgatgttgctc

SEQ ID NO: 5046 - DNA, 269 bp, Zea mays
  Clone ID: LIB3118-007-Q1-K1-A7
cgcgtggacgatgattgagatatccttgcggctctagagactcacgggatggctgggcatgctgaattggggtcctttaaaactaacgacctctcgcagattatcttgggctacagcagggatgatgtgaggaacttgatgctcatatatctggctcatggcatcctgcagcatgacctcttcgaggttgtcgaccacagaggactgggcgaactggtttagctggctacaaatatgggccggacagctaggcctaacttgaaggcggg

SEQ ID NO: 5047 - DNA, 478 bp, Zea mays
  Clone ID: LIB3118-007-Q1-K1-A8
cccacgcgtccgcccacgcgtccgcccacgcgtccggatccaccagcccctgcatcagtgagcaaaagggcaaaaaatgttggtactggtaattcaagaacaagaattaacaagcgtacacaagatgggaatgtggttgagatgatgggaaggtttctagaaatgaaagaaaaacaagctgaggcggatgaaagggccacaactaatgcaaatgaggatgatttccctattcaaacatgcattgctattgtggatggaatggaagagttttctgatgatgagaaggttgattcttatgatgtttttaaggatgcccaaaaccgggccattttcatgactgccaaagatgctacgcgcataaaatggttgaggaagaagattgcaagaacatgatatggtattgatcctcttctcatcccttttaacttggttttaatttacgtatatggatgtatgaagtaagcatacttatgaaaat

SEQ ID NO: 5048 - DNA, 312 bp, Zea mays
  Clone ID: LIB3118-007-Q1-K1-B1
gaagactactacaacccaaattttgcggttgaagatgctcgcggcccaagagaaccatgggatgacttgcattccaagatcgacggtccagaagcatacgatgtcctgaaaaactttgaggagcgctggttaaaggcatcaaagcgcagtgccgctaagaaactgtcaaaattgtcgaggtcgcataatgattcgctgctgtggatcaacaagatacctgatattattgctattgacgacgaaatctattcaaatgacgatgatccagagagatgggacgtgcagattttccgatcaattgattcgaattct

SEQ ID NO: 5049 - DNA, 372 bp, Zea mays
  unsure at all n locations
  Clone ID: LIB3118-007-Q1-K1-B4
gtgaaccctgccgcctacgtacaacaacaacaactgctttcatctatcccnctcgctgtgggcgatgcacctacatacctgcggcaacaattgttgcaacagattgtaccagctctgactcaactagctgtggcaaaccctgttgcctacttgcaacagctgctttcattcaaccaactgactctgtcgaactctgctgcgtacctacaacagcgacaacaggtacttaatccattggtagtggctaacccattggtcggcgcctttctacagcagcaacaattgctgtcatacaaccaaantctctttgatgaatactgtcttgtcgaggcagcaacccattcgttgaggtgccatcttttaaattacata

SEQ ID NO: 5050 - DNA, 314 bp, Zea mays
  Clone ID: LIB3118-007-Q1-K1-B5
cccacgcgtccgcggacgcgtgggccggcgaggcgctcaagcactccacggggcagggccgccccgtcaagctcgtgccctacaacccggactaccaggacgagtccgtgctctggaccgagagccgcgacgtcggcaacggcttccgctgcgtccgcatggtcaacaacatctacctcaacttcgacgccttccacggcgacaaggctcacggcggcgtccatgacggtaccgagatcgtgctctggaagtggtgcgagggcgacaaccagcgctggaagatccgtccttggggaacgaacgaaagaaactac

SEQ ID NO: 5051 - DNA, 328 bp, Zea mays
  Clone ID: LIB3118-007-Q1-K1-B6
gccaagatccaggacaaggagggcattcccccagaccagcagcgtctgatctttgcgggcgggcacctggaggatggccggactctcgcggactacaacatacagaaggagagcacccttcaccttgttctacgcctcaggggtggtatgcagatctttgtgaagaccctgactggaaaaaccataaccctggacgttgagagctcggacaccatcgacaatgtgaaggcgaacatccatgacaaggagggcataccaccggaccagcagcgactgatcttcgccggcaaacagatggaggatggtcgtaccctagcagactacaaca

SEQ ID NO: 5052 - DNA, 453 bp, Zea mays
  unsure at all n locations
  Clone ID: LIB3118-007-Q1-K1-B8
gtgaaccctgccgcctacgtacaacaacaacaactgctttcatctagcccgctcgctgtgggcaatgcacctacatacctgcaacaacaattgttgcaacagattgtaccagctctgactcaactagctgtggcaaaccctgttgcctacttgcaacagctgcttccattcaaccaactgactctgtcgaactctgctgcgtacctacaacagcgacaacagttacttaatccattggtagtggctaacccattggtcgccgccttcctacagcagcaacaattgctgccatacaaccagttctctttgatgaatcctgtcttgtcgaggcagcaacccatcgttggaggtgccgatctttaaatacatatgagatgtactcgataatggtgccctcataccgacgtgntgtttctagaaataatcaatatattgattgagacttatctcaat

SEQ ID NO: 5053 - DNA, 303 bp, Zea mays
  Clone ID: LIB3118-007-Q1-K1-C1
cagaaacacacctagcgaagcgcactagctacgacctaacaacaatggctttcaagacatgatccctccttgcgcttcttgccctttttgtgaccgcaacaaatgcgttcattattccacaatgctcacttgctccgagtgccattattacacaggtactacctacaattacttcaatgggcttctaacacccagctgtgcaagcctataagctacaacaagcgcttgcggcgagcgttttacaacaaccaattggccaattacaacaacaatccttggcacatgttaccatacaaaccattg

SEQ ID NO: 5054 - DNA, 284 bp, Zea mays
  Clone ID: LIB3118-007-Q1-K1-C2
agcacgcgtgggagacgcctgcatcgattgagccattactggaacatataacctttcgtgacgttatgcttgtacatccaaaacgcaacttatgatctgacatcatattggctactaacactcatctacatcatgcgatcctgcgcctactgaagatactgacatcattcaaccgattcagtttaccatcatcaactacctgctgtacgaagagactgaataaaatgaatagatggctaggggcgaacctattgggatgaaacctccttccaaaaaagcggata

SEQ ID NO: 5055 - DNA, 362 bp, Zea mays
  Clone ID: LIB3118-007-Q1-K1-C3
cccacgcgtccgcccacgcgtccgcggacgcgtggggccgcgcacctatctggcaagcgacgccgcgggctccatcggagtcggaggcgaacacccccatggcggcggctggcggcggcgcacgagggaaggtatccttcaagatcatcctcacctccgaccccaagctccctttcaaagtgttcagcgtgcccgaggcggcgcccttcaccgcggtgctcaagtacgccgcggaggagttcaaggtcccgccccagaccagtgccatcatcaccaacgatggaattggcatcaacccccagcaaagtgcacgcaacgtgtttctgaaacatggttcggagctgcgtctcatccctcgcgat

SEQ ID NO: 5056 - DNA, 333 bp, Zea mays
  Clone ID: LIB3118-007-Q1-K1-C4
cccacgcgtccgcaacgacctaacaccaatggctaccaagatattagccctccttgcgcttgttgcccttttagtgagcgcaacaaatgcgttcattattccacagtgctcacttgctcctagtgccagtattccacagttcctcccaccagttacttcaatgggcttcgaacatccagccgtgcaagcctacaggctacaactagcgcttgcggcgagcgccttacaacaaccaattgcccaattgcaacaacaatgcttggcacatctaaccctacaaaccattgcgacgcaacaacaacaacaacagtttctgccatcactgagccacct

SEQ ID NO: 5057 - DNA, 331 bp, Zea mays
  Clone ID: LIB3118-007-Q1-K1-C5
cccacgcgtccggttggcttctcctccccctccggttcgggttcgggttcgtgaggttctgcggggttcgggttcgtgggtgagcggatcgagatggcggcgtcggatgttgagtaccgctgcttcgtcggcggcctcgcctgggccacggacgaccactccctccacaacgccttcagcacctacggcgaggtcctcgagtccaagatcatcctcgatcgggagacgcagaggtcccgcggcttcggcttcgtcaccttctccacggaggaggcgatgcggaacgccatcgagggcatgaacggcaaagagctggacggccgcaacatca

SEQ ID NO: 5058 - DNA, 302 bp, Zea mays
  unsure at all n locations
  Clone ID: LIB3118-007-Q1-K1-C6
acgcccacgcgtncgcaacgacctaacaccaatggctaccaaaatattaaccctcctttcccttcgtgcccttttaatgagcgcaagaaatgcgttcattattccacagagctcacttgctcctaatgccagtattccacagttcctcccaccaggtacttcaatgggcttcgaacatccagccgtgcaagcctacaggctacaactagcgcttgctgcgagcgccttacaacaaccaattgcccaattgcaacaacaatccttggcacatctaaccctacaaaccattgcgacgcaacaac

SEQ ID NO: 5059 - DNA, 389 bp, Zea mays
  Clone ID: LIB3118-007-Q1-K1-C7
ataaaatcgagaggacgccagggccgattctctgcgtgacttggggcgtcgtcgccgagtgttctccggccgagggcggcgcgaccggacaaccagcgtgagcgcgaccggcgacatgactcgcggcaaccagcgtgaccgcgaccgtgagcgcgcggcggcgcggaagcccaacgccaagaactcccacgacgggctcaccccggagcagcgccgcgagagggacaagaaagctctggaggagaaggcggccaagaaggcgcatcatgcagcggccggcggcaccggtacctccacggacaacaacaagaacaaggcaggtggcaagaagtatgaggcagtggcgcgccgccacctctgtacgattaatcgatgccttgagcttgaac

SEQ ID NO: 5060 - DNA, 315 bp, Zea mays
  Clone ID: LIB3118-007-Q1-K1-C8
cgcagcttggcgccgggccggtttccgaccggcgctcgttggcggatccgcgcctccccggggccactctggtccccgccccggtgcgccgcacctgattgcagaccctgtggcgggcgacagttctgcggcggtaggggttggggttggggaccgtggcggcggggtccatgcccgcttctggtcggggccgtggtcgggcaacgcgggatctgagccgcctttgatggacctttttcgagccttctgttgcgaatgagtggttttgagacattgcgagttgggaggagttgttggaaacttctctttcattct

SEQ ID NO: 5061 - DNA, 288 bp, Zea mays
  Clone ID: LIB3118-007-Q1-K1-D1
gttctagatcgcgggcggccctgctccaactccgattcgtcactccaccctcgtcgcgccggcgccggcgccgacgcctgccgcgttcccggccagcctcgcggcccggtggtctgctagccacagcggagagaccaggagtcatggtgatccctccaccagcaagggcagctagagtcacccgtttcctcaagccctacctattgaggatgcatttctcaaacaagtatgtatctgctcaggtcgtccacaccccaacagcaactgttgcatgttctgcaagctcgc

SEQ ID NO: 5062 - DNA, 422 bp, Zea mays
  Clone ID: LIB3118-007-Q1-K1-D2
cgcagcttggcgccgggccggtttccgaccggcgctcgttgccggatccgcgcctccccggggccactctggtccccgccccgttgcgccgcgccggattgcggaccctgtggcgggcgacggttctgcggcggtaggggttggggttggggaccgtggcggcggggtccgtgccggcttctggtcggggccgtggtcgggcagcgcgggatctgagccgcctttgatggacctttttcgagccttctgttgcgaatgagtggttttgagacattgggagttgggaggagttgttggagagttctcttccatcctgccgaaaaaaccaaatttgggagtgagttttgggaactattggagatgctctgtgcatattttcactactgctgactgatggaacatgcatacttttctctgatgcg

SEQ ID NO: 5063 - DNA, 357 bp, Zea mays
  unsure at all n locations
  Clone ID: LIB3118-007-Q1-K1-D3
cggacgcgtgggcggacgcgtgggcggacgcgtgggggcaatgagctagattctgtccacttttcactgaagaaggctagtcgaatggtgaaagagattggccgtcaggttgctactgacaaatgcattatggcgttcctgtttctgattgtctgtggtgtcattgcaataattgttgttaagattgtcaacccgcataacaagaacatcagagacattccgggcctagcacctcccgccatgaacaggaagctgctgtccatcgacgctgcangactctgagcgttgtgaatggctgcctcccgcagcacagcgcaacgcagcgcgtcagagttctcttatgagccacgatacatg

SEQ ID NO: 5064 - DNA, 391 bp, Zea mays
  unsure at all n locations
  Clone ID: LIB3118-007-Q1-K1-D4
ggaaaatgttaagagggagctacaggagactgttcaatatccagtggagcatccagagaaagttgaaaagtttggcatgtctgcttcaaagggtgttttgttttatggccctcctggctgtggcaagactttgttggccaaggcaattgccaatgaatgccaagctaacttcattagtgtgaagggtcctgaactgcttaccatgtggtttggtgagagtgaggccaatgtccgtgagatttttgacaaggctaggcagtctgctccatgtgtcctcttttttgatgagctcgactccattgctactcanagaagaagcagtgttggtgacgccggtggtgctgctgataaggtgttgaaccagctgcttactgagatggatggcatgaat

SEQ ID NO: 5065 - DNA, 369 bp, Zea mays
  Clone ID: LIB3118-007-Q1-K1-D5
cccacgcgtccgcagcaaatccccaattcctccgagttcgaacgaccatgtcggggcgtggcaagggcgggaagggtctgggcaaaagcggcgccaagcgtcaccgcaaggttctccgcgacaacatccagggcatcacgaagccggcgatccggatgctggcgaggaggggcggcatgaagcgcatctcggggctcatctacgaggagacccgcggcgtgctcaagatcttcctcgagaacgtcatccgcgacgccgtaacctacacggagcacgcccgccgcaagaccgtcaccgccatggacgtcgtctacgccctcaagcgccagggtcgcaccctctacggattcggcggctgaaaagcgctac

SEQ ID NO: 5066 - DNA, 441 bp, Zea mays
  unsure at all n locations
  Clone ID: LIB3118-007-Q1-K1-D6
tcggaaaaaggctatcaagaaagcaaaggccggtactaggaacaggaacaaggaagcgtggtnctggagaggctgaccgggttattcccactttaaaaccaaagcatttgttttctgggaaacgcactcttggaaagacaagcaggcgataagctcagtacctcactggatctggtagtaaaggactggcgcaattttggtgtgagcaatttgatgaaacgggagctgttatgtctagcacttatgtatgctacttatttatgaaatgacttgctgttgctgtatcatgggcctctttaagacagttttactagtttatacatgtattacttcgaattggttgggttactatatattaactctctggtgttagattctcttaatgggaccgaagtattcaactctcctacttaaaaatgtttgcaatgcatctgttggatc

SEQ ID NO: 5067 - DNA, 170 bp, Zea mays
  unsure at all n locations
  Clone ID: LIB3118-007-Q1-K1-D7
tntacacctgtccctgcgcccaatgcacctccataccttcatcaacaatattttcaacacggggtactgaataagactcatcgggttgtggcaaacactgctcgctactttgctcctgtgctatccttcatcccactgactatgttgaactcttgtgcggaccttccact

SEQ ID NO: 5068 - DNA, 345 bp, Zea mays
  Clone ID: LIB3118-007-Q1-K1-D8
ggaaaatgttaagacggagctacaggaaactgttcaattttcattggagcatccatacaaagtggaaaagtttggcatgtctggttcaaagggcgttttattttataaccctcctggctgtggcaagactttgttggccaacgcaattgccaatgaatgccaacctaacttcattattgtgaagggtcctgaactgcttaccatgtggtttggtgagagtgaagccaatgtacgtgagattattgacaaggctaggcagactgctccatagagcctcttttttgatgagctcgactccattgctactcataaaagaagcaatgttggtgacgccggcggtgctgc

SEQ ID NO: 5069 - DNA, 423 bp, Zea mays
  Clone ID: LIB3118-007-Q1-K1-E1
tctagcccgctcgctgtggccaatgcacctacatacctgcaacaacaattgttgcaacagatgtgtaccagctctgactcagctagttgtggcaaaccctgctgcctacttgcaacagctgcttccattcaaccaactgactatgtcgaactctgctgcgtacctacaacagcgacaacagttacttaatccactagcagtggctaacccattggtcgctgccttcctacagcagcaacaattgctgccatacaaccagttctctttgataaaccctgtcttgtcgaggcagcaacccatcgttggaggtgccatcttttagattacatatgagatgtactcgataatggtgccctcattccggcatgtgtttcctagaaataatcaatatatggattgagatttatctcaatatatttcgtg

SEQ ID NO: 5070 - DNA, 364 bp, Zea mays
  Clone ID: LIB3118-007-Q1-K1-E3
cccacgcgtccgcttcgagctctgcatttgtcagacacagacactaatccaagcaaaattggccgtttggtatatacaaataagggggttgcactcttggctcttggctccaatgctgttcataagttgtggaaatggcaacggagcgacagaaatcctagcggcaagtctactgcatctgttgcacctcacctgtggcaacctgcaaatgggattctgatgacaaatgacacgaatgatggcgacccagaagaagcaaccgcctgcattgcattgtccaaaaatgactcctatgttatgtctgcatctgggggcaagtctcgttgttcaatatgatgacatttaaggtcatgactactttcat

SEQ ID NO: 5071 - DNA, 375 bp, Zea mays
  unsure at all n locations
  Clone ID: LIB3118-007-Q1-K1-E4
ggtgggttggcttctcctccccctccggttcgggttcgggttcgtgagggtctccggggggggggttcgtgggtgagcggagggagatggcggcgtcngatgttgagtaccgctgcttcgtcggcggcctcgcctgggccacggacgaccactccctccacaacgccttcagcacctacggcgaggtcctcgagtccaagatcatcctcgatcgggagacgcagaggtcccgcggcttcggcttcgtcaccttctccacggaggaggcgatgcggaacgccatcgagggcatgaacggcaaggagctggacggccgcaacatcaccgtcaacgaggcccantccctcggcggccgtggaggcggcggcggtgggt

SEQ ID NO: 5072 - DNA, 330 bp, Zea mays
  Clone ID: LIB3118-007-Q1-K1-E5
tctaccccgctcgctgtggccaatgcaccttcatacctgcaacaacaattgatgcaacagggtgaccagctatgacgcagcgggttgtggcaaaccctgctgcctacttgcaacagctgcttacattcaaccaactgactatgtggaactctgctgcgtacctacaacagcgacaacagttacttaatccactagcagtggctaacccattggtcgctgtcttcctacagcagcaacaattgctgccatacaaccacatctctttgataaaccctgtcttagaaaagcagcaacccatctgtggaggtgccatcttttagattacatatg

SEQ ID NO: 5073 - DNA, 271 bp, Zea mays
  Clone ID: LIB3118-007-Q1-K1-E6
gtgtgtgttcccggtcctttccaatcaggatctggtgaagtttttgcctttcatatcgaagaaattaataattcatgtagagggaggattcttccaacaatttgttttggatggagacttacatctccaaacactcgtaactatcctactaggtggtgacatcagtccccaaaaacgtttatggtcatagagtctgcccttcgtttgtcagtcgggcaatttttcttgcatacaatgccttcgtttaagtatcggatgagttgctgcgact

SEQ ID NO: 5074 - DNA, 420 bp, Zea mays
  unsure at all n locations
  Clone ID: LIB3118-007-Q1-K1-E7
cccacgcgtncgggctggacaagagacccacgatgcctccacagagtttgacaggactgagaaggacatcactcccatgggtggcttcccccattatggtatcgngaagggtgactacctgatgatcaagggctgctgtgtgggtccaaagaagagggtggtgaccctccgccagtccctcctgaagcagacttcccggctggcgctggaggagatcaagctcaagttcatcgacacatcgtccaaatttgggcacggtcgcttccagactaccgatgagaagcagaggttctttggcaagctcaaggcgtaaggtgctgcggtgcagcgacaagtcccatttctcaaaatcatcaaactgtgatacttttgtttggaaccttgctgtactaagtttttgaacccgatggtttgggagca

SEQ ID NO: 5075 - DNA, 110 bp, Zea mays
  unsure at all n locations
  Clone ID: LIB3118-007-Q1-K1-E8
ccactccctccacaacaccttcatcacctacaaaaaagtccttgagtccaacatcaatcctcatctggagacacanaagtcccccggcttctgcttcttcaccttcttca

SEQ ID NO: 5076 - DNA, 354 bp, Zea mays
  Clone ID: LIB3118-007-Q1-K1-F1
cccacgcgtccgcccacgcgtacgctgccttgtgaagtctgttgtagaagatagattgtggcgcatatattagaacagtgatcccgaagcctatccagtatcccgtctcagagcatggatttgagttccagcagttgcttgtggagactctgtatggctatagcgtgtgggacaggttgcggtcccttgtgaatcttataaagatggttaccgagcagaattctgccccggcttcaaatgcgaccacgaagaaaaggcgatgagacgaatgcccggggggttcattgaatctggttatggtaagtctgatctctggacgctgtaaacctccccattccccaagctgctgtaatc

SEQ ID NO: 5077 - DNA, 417 bp, Zea mays
  unsure at all n locations
  Clone ID: LIB3118-007-Q1-K1-F2
gccgctgactagctacctatagctagttcactcgtttagcggcgatgagtaacggagtgtggcccatcaccatgggtggcagggtgagcaatgacctgaatgaaccattgaaatggaaaggaataatatatgggggaaaaaaaaaaaaaaaaaaaaaaaaaaaaaaaaaaaaaaaaaaaaaaaaaaaaaaaaaaaaaaaaaaaaaaaaaaaaaaaaaaaaaaaaaaaaaaaaaaaaaaaaaaaaaaaaaaaaataaaaaaaaaagggaaaaaaaaaaaaaaaaaaaaaaaaaaangggggggggcctttaaaaaaaaaaaattttttcttccgggtggggaaaaaaaaaaatttttttttgggggccaaaaaataaaattaatgggggggggtttaaaaacggggggggggggaaaa

SEQ ID NO: 5078 - DNA, 393 bp, Zea mays
  unsure at all n locations
  Clone ID: LIB3118-007-Q1-K1-F4
gttgagtaccgctgcttcgtcggcggcctcgcctgggccacggacgaccactccctccacagcgccttcagcacctacggcgaggtcctcgagtccaacatcatcctcgatcgggagacgcagaggtcccgcggcttcggcttcgtcaccttctccacggaggaggcgatgcggaacgccatcgagggcatgaacggcaaggagctggacggccgcaacatcaccgtcaacgaggcccantcccgcggcggccgtggaggcggcggcggtgggtacggtggtggccgtggaggcggcggctactgcggtggcgggcgccgtgatggcggtggcggctaccgcggtggcggcggctaccgtggcggcggcggctactgtggtggtggcggcggc

SEQ ID NO: 5079 - DNA, 287 bp, Zea mays
  Clone ID: LIB3118-007-Q1-K1-F5
ggaaaatgggagataacagctacctgtcatggaacagacccccttcacgtcgctgatgatgtgctttggaagttaaatgcgatacacaggcagcaccaaacagattcagattatggtcggaatgtatcttgtaccacagagaaattttatccgtgctcgtcggtgtagaatatatacggcacccttgcacatattgtacattacatcgaaacacatagctttgttttctacaaaattgtatactcaaaattgtatactcaaaagtttcagaagtggatgccagtagt

SEQ ID NO: 5080 - DNA, 265 bp, Zea mays
  Clone ID: LIB3118-007-Q1-K1-F6
gccgattactaattatttataagtagcctactctgtttctcggactaacactccctccacggggccttgacaacctacggcgggggcctcgagaccaacatcatcctccatcatgagacgcaaaaatacctcggcttaaacttcaacaccttctccacggaggaggcgatgcggaacgccatcgatggcatgaacggcaaggagctggacggccgcaacatcaccgtcaacgatgcccaatccctccgctgacgtggaggcggcg

SEQ ID NO: 5081 - DNA, 203 bp, Zea mays
  unsure at all n locations
  Clone ID: LIB3118-007-Q1-K1-F8
aatctgtatgtgatacacatntcacctgaacgccattgcttgtatcgacgactcactttatggagaaatgtaaatttacagttgggtagtgttgacctatattatcatttgtcaagatatgcagaggaacaacttttttaactatttgacctatttgtccgaggaagcgatgcggaacgccatctaaggggtgaacggtctag

SEQ ID NO: 5082 - DNA, 285 bp, Zea mays
  Clone ID: LIB3118-007-Q1-K1-G1
taccggtcgaccgcacacgacggcaaaaaaaaaaaaaaaaaaaaaaaaaaaattttaatacttttaaaaaaaaaaaaaaaaaacggggaaaagggaaaagaaaaaagggggggcctcttataaaaatcaaaattaactaccccttccttgcaaagaaaaacttttttatatgggcaccctaaaattaaattacttgccctcgttttaaaaaatgcgtaatgggaaaaacccgtgcgtaaccaaactaaaacgcttttaaaaaaaacccctttttacacaagggtt

SEQ ID NO: 5083 - DNA, 159 bp, Zea mays
  Clone ID: LIB3118-007-Q1-K1-G2
aatctgtttgtgaacacatctcacctgaacgcgattgcttgtatggccgtctcagcttcttgagaaatgtaacttagcagttgagtagagttgacctatgttaagagttgtcaagttttgaagtggaagaattttcttaaccatttggtttatgtgtcc

SEQ ID NO: 5084 - DNA, 152 bp, Zea mays
  Clone ID: LIB3118-007-Q1-K1-G3
gcaaaaaaaaaaaaaaaaaaaaaaaaaaaaaaaaaaaaaaaaaaaaaaaaaaaaaaaaaaaagggaaaaaaaaaaaaaaaaaaggggggggccgtttaaaagaaccaaacttacctaccccggccttccaacgaaaaacttttttattgggg

SEQ ID NO: 5085 - DNA, 367 bp, Zea mays
  unsure at all n locations
  Clone ID: LIB3118-007-Q1-K1-G4
gcgccggcggcttgtgttccctttaaagcttggctgctcgtctgctcctgctgctgtcttgcttctgctcttccatcgcgccagtgttttgagaagctggtcggcgctcctagatcccttcgcctctctcgcgttcgaggctaggtagccgccaccatgagccgctcggggcagcctccggatctcaagaagtacatggacaagaagcttcagattaagctgaatgcaaaccgcgttgttattggcacacttcggggattcgaccagttcatgaatctggtgatcgacaacactgtggaggtcaatggaaatgacaagacagatattggaatggtggttatcangggaaacagtgttgtcatgatcg

SEQ ID NO: 5086 - DNA, 265 bp, Zea mays
  Clone ID: LIB3118-007-Q1-K1-G5
gcaaaaaaaaaaaaaaaaaaaaaaaaaaaattttcaacattttaaaaaaaaaaaaaaaaaaaggggaaaaggaaaaaaaaaaaaagggggcccgttttaaagaaccaaacttacctaccccggccttccaaaaaataacttttttttttgggcccccaaaattaaattactggcccccggtttaaaaccgcgggaatgggaaaaaccctgcggtacccaaattaaatacctttgaaaaaaatccccttttgccaactgggggaat

SEQ ID NO: 5087 - DNA, 183 bp, Zea mays
  Clone ID: LIB3118-007-Q1-K1-G7
gcggaaataaaacgcctccttgaaacatctattttcaccatttgtatttaaacaaaaacagcgggggtaactgaactacaaagcggggggacttacttcttgatcaacatgccgtggccctcttatccaaatatgactctttttaaggcttgctctagagtcaataaaaaagcctacgttttt

SEQ ID NO: 5088 - DNA, 409 bp, Zea mays
  Clone ID: LIB3118-007-Q1-K1-G8
gtcacacaaagagagggaacaacaatacgtactgccatgaccattatgtcaattatttccgtggggataagaaggaagaacaatcctctgatttgtacagattctgccgtctcatgaccaaattccgcaaggaatgtgaatctcttggccttgaggatttcccgacttcagaacggttgcgatagcacgatcatcagcccgggaagcctgactggtcagaggcaagccgattcgttgccttcaccatgaaggacgaaaccaaagatgagatctacgtggccttcaacaccagtcacctgccggtggtcgtcgggtgtctagagcgctctacgttccgatgggaagccgtggtggacactcgcaggaggcaccatatgacttcctcaccgatggccctgcagatcgtgct

SEQ ID NO: 5089 - DNA, 402 bp, Zea mays
  Clone ID: LIB3118-007-Q1-K1-H1
gaaaatgaagtgcctcctgaagatattgttttccaccgtttctatttgaacaagaccggcactgttaagcgtaagacaaagcagaaggactcagttcttgatgaacatgcgggggaactcttagctgataatgacgctgatgaggctagtgacgagagtggagatgagatactggatctgggagatgggttggcagatgatggagaatatgactatgacgaccttgactgaaatgcatttgaagaggaaaaagatttacttaaagatgacagtgatgtggaatttgatgacgtttcacatgatactgcatctggggatgaagggtcagaaaatgacgatgacattcctattctcgcgggcgattcagatggcaacttacgtgatgacgagatgggtgatgct

SEQ ID NO: 5090 - DNA, 304 bp, Zea mays
  Clone ID: LIB3118-007-Q1-K1-H2
gtctcactaagagagggaacaacaatacgtactgccatgaccattatgtcaatgatttccggtgggataagaacgaagaacaggcctctgatttttacagattctgccgtcttatgaccaaattccgcacggaatgtgaatctcttggccttgaggatttcccgacttcacaacggttgcgatagcaccatcatcaacccgcgaagcctgactggtcatacgcaagccgattcttttccttcaccatgaaggacgaaaccaaagatgatatctacgtggccttcaacaccagtcacctgccggt

SEQ ID NO: 5091 - DNA, 443 bp, Zea mays
  unsure at all n locations
  Clone ID: LIB3118-007-Q1-K1-H3
gngcgacaacatgattgagaggtgcaccaaccttgactggtacaaaggaccaaccctgcttgggggtctgcgaccaccatacaccgggcgcaagaggactttggacaagctgttccgtctgcccttgcacaatgatgtcaagattatgacccttgagaaggggaacggctccaccgtgaacgtgtgcatccacccttccaaggtcatgggtacaaagctgaagcttgacaaggaccgcaaggcgctccttgacctcaaggcccggggccgcgccgtcgacaaggctaacggcaagtttactgccgacgacctcgccaccgctgttggtggcgccgccgacactggcgcgtcttttcatgacatcgactaggcgcttcgcggagatctgatggtggggctaccgcctattactccgtatcggtctaatttttgctatcaatgat

SEQ ID NO: 5092 - DNA, 345 bp, Zea mays
  Clone ID: LIB3118-007-Q1-K1-H5
gttcttaaacctcttctttgtagcagctatgtttgccatatgctctcatgctgatggagacggtgagaatgacctccaaagcgtgatgagtgactgcaagacatacgtgatgttcccagcttatccaaaggtccctccttcggatgcttgctgtggtgtcatcaaaaaggcaaacgtttcttgcttgtgctccaaggtcaccaaagaaactgagaagggtgtgtgcatggacaagggtgtgtatgttgctgaacagtgtaagacgccatttgagcatggctttcagtgcggaagctacaaggttccagcaaactgatgatatcgcaagaaggaagcgcttgacgt

SEQ ID NO: 5093 - DNA, 389 bp, Zea mays
  Clone ID: LIB3118-007-Q1-K1-H6
gaataaatgcagacatgcagcgtgaatttgcccaggaagtatatatcatgaggaaggtacgtcacaagaatgttgtgcaatttattggtgcttccactaaacccccaaatctatatatagtgacagaatttatgtccggtggaagtgtgtatgattacctccataaacataaaggtgttttcaaacttcctactttagttggagttgctatggatgtgtcaaaaggcatgagctacttacaccagaataatattattgatcgcgatttgaaaactgcgaaccttctgatggatgaaatgggactgtaaaagtgctgattttgtgtcgacgtgtaaagctatctgagcatgactgaaaactgtactaccgtgatgcccagagcataacat

SEQ ID NO: 5094 - DNA, 439 bp, Zea mays
  unsure at all n locations
  Clone ID: LIB3118-007-Q1-K1-H7
acgcgccacaagtacaatgtgcgttccatcccgatccgcaaggacgacgaggtgcacgtcgtgcgcggcacctacaagggccgtgagggcaaagtggtgcacgtgtaccgccgtcgctgggtcatccacgttgagcggatcacccgcgagaaggtgaacggctccaccgtgaacgtgggcatccacccttccaaggtcatggttacaaagctgaagcttgacaaggaccgcaaggcgctcctcgaccgcaaggcccggggccgcgccgccgacaaggctaaaggcaagtttactgccgacgacgtcgccgccgctgctggtggcgccgccgccactggcgcgtctcttcangagatcgactangcgcttcgcggggatctgatggtggtcctaccgcctattactccttatcgctctagtttttgctatcaatgattat

SEQ ID NO: 5095 - DNA, 429 bp, Zea mays
  Clone ID: LIB3118-008-Q1-K1-A1
ccttctcaaggaatttgtggacactttagagaaggagtttgggagtaccctcgatagcactcgcgtgtaatgagcttatgatagttgtatgctgtaatgaactgatgtaatgaataaagtaattggttgaaaaaaaattggcatgtgcatggtagtaactcttttcccctggcagatggcttcggataaaaccacgcctacctgatagtcgcctagagggggggtgaatagggcgaaactgaaatttacaaatataaacacaactacaagccgggttagtgttagaaatataaatgagtccgagagagagagggcgcaaaacaaatcccaagcgaataagcaagtgagacacggagatttgttttaccgaggttcggttcttgcaaacctactccccgttgaggaggccacaaaggccgggtctctttc

SEQ ID NO: 5096 - DNA, 369 bp, Zea mays
  Clone ID: LIB3118-008-Q1-K1-A10
cgcgaagaagcgaccatgagggccaagtggaagaagaagcgcatgaggaggctcaagaggaagcgcagaaagatgaggcagagatccaagtaggcacatcgagatggattgtggacgtgatgacatgcgtgggtacatacatttcttcggatgcgttggtgtgcctgtggagagatgtcaacctgccatggagtcagggtccgccatcagttgaacgtcttgcctgcacttcagtaggccacttttcatggttctagttgtatttgaatccagcgtttgccactaagataaatcagacagtcgttttgtgaacctattatgatggagctttatttgctgataatatctagctacctatttgagctgagt

SEQ ID NO: 5097 - DNA, 201 bp, Zea mays
  Clone ID: LIB3118-008-Q1-K1-A11
cacgacccctcttcggattcccagtacctctcttggccggacgcttggcgcggcccacagtgcgtaaaaatgcgccaggcgagagcatggataacatcatcagcctgatccttatcaccattgaacacttcaccatgtgccagcttaggattgtccttgactttacagcgccccacgcacagagagccctgagtaccactg

SEQ ID NO: 5098 - DNA, 361 bp, Zea mays
  Clone ID: LIB3118-008-Q1-K1-A2
gcgcggacgcgggggctgttttcgccccagagtgagaccaaaccagctgctttctgtgcctattggcgttcagggcatcattccgcccaccgcgtaatcgagatgaggcgttcatcgtaccatgacgttgggagggtgtccgagattgaagatatccttgatgtcagccgatgggcagacttatgtagtcaatagcgcacggatcggattcctgaatgaacgggcacagctgcgtgcttctagtgtccccacttgtatggcacccacatcatcaacacatagcgtgtgaaacattgaaccgtgtgctacttgatagcatttcgcttctgctctcttggatgcaatcctagaggctcaaata

SEQ ID NO: 5099 - DNA, 423 bp, Zea mays
  Clone ID: LIB3118-008-Q1-K1-A4
gggagcgttcgtgctagcgtggccgaccctgatgctgcattttttgttggcctcaccgcttcatccatgcggggggccaatgatgatgccaggggtgatgccaccgatgacaatgatgccgatgccgaatatgatgccatcgatgatggtgccgactatgatgtgaccaataacgatagctattatgatgccaccgatgataatgccaaacatggtttcaccaatgatgatgccgagtatgatgcctttgacgatgacgccgagtatgatgccaccgataatgatgccaagtatgaaaccaccgatgatgatgccgtacatggtgtcataaatgattatgctaaacatgatgacagtgtcacaatgttactcttgattcatctcgtacattatacaacaacaacattttccaatcatgttcag

SEQ ID NO: 5100 - DNA, 371 bp, Zea mays
  Clone ID: LIB3118-008-Q1-K1-A5
ttgagtgtcgcctgcggtccgtccgaattcccgtcgcccacgcgtcgtggattcatgataatgcttgagaactgaaattcccgtttcatgctaaaaaaaaaaggagggtaataaacaaataaaagggagaaagcaaaaaaaatcatgagaaaaaaaggaaagaacattggagggggaccaggtttgctgctcgtgcatgcaaccccattcctcttacatatggcatccttatgggggggcccctttttggggttccacctttcgggggcgtggattggcccttatgtttttttttttggggcccccaaatttactttccggggcggggttttaccatattcgggatggggaaaccccgggggggccctact

SEQ ID NO: 5101 - DNA, 429 bp, Zea mays
  Clone ID: LIB3118-008-Q1-K1-A6
cggacgcgtgggctattttgcacccagtgtgagaccaaaccagctgctttctgtaactattgtcgttcaagtgatcattccacccaccgtgtaatccagataaggcgttcatcgtaccatgacgttgtgagggtgtccgagattgaggatatccttgatgtcagcgatgtgcaaacttatgtaatcaatagtgcaaggattgtattcctgaatgagcggccacaactgcgtgcttctagtgtccccatttgtaaggcacccacatcatcaacacatagctgtgagacatgtagccgtgtgctacttgatgcatttcgcttctgctctcttggatgcaatcttagaggcttaaatatggaagctggtatgcaagctatggttggcaacaaccctcggtccaatggtatggatcatgtggctaggattgac

SEQ ID NO: 5102 - DNA, 417 bp, Zea mays
  Clone ID: LIB3118-008-Q1-K1-A7
cggacgcgtgggctattttgcacccagtgttagaccaaaccagctgctttctgtaactatgggcgttcaagtgatcattccagggcaccgcgtaatccagataaggcgttcatcgtaccatgacgttgtgagggtgtccgagattgaggatatccttgatgtcagcgatgtgcaaacttatgtaatcaatagtgcaaggattgtattcctgaatgagcggccacaactgcgtgcttctagtgtccccatttgtaaggcacccacatcatcaacacatagctgggagacatgtagccgtgtgctacttgatgcatttcgcttctgctctcttggatgcaatcttagaggcttaaatatggaagctggtatgcatgctatggttggcaacaaccctcgggccaatggtatggatcatgt

SEQ ID NO: 5103 - DNA, 434 bp, Zea mays
  Clone ID: LIB3118-008-Q1-K1-A8
tgctagcgtggccgaccctgatgctgcagcaactgttggcctcaccgcttcagccgtgccagatgccaatgatgatgccaggtatgatgccaccgatgacaatgatgccgatgccgaatatgatgccatcgatgatggtgccgactatgatgtcaccaataacgatagctagtatgatgccaccgatgatgatgccaaacatggtttcaccaatgatgatgccgagtatgatgccttcgacgatgacgccgagtatgatgccaccgataatgatgccaagtatgataccaccgatgatgatgccgagcatggtgtcatcaatgataatgccaaacatgatgacagtgccacaatgttactctgattccatctcgcacattatacaacaacaacaattaccattcatgttcagccccacagccgtggcgatctca

SEQ ID NO: 5104 - DNA, 199 bp, Zea mays
  Clone ID: LIB3118-008-Q1-K1-A9
cgtatgcttccatcggccggagctgctgccctttaacagcgcggttcgcacaaatattcactggtgatgcactaccacactgagagcgacgactaccttgaggcgtgatatacgggcaagcagctactactgggtctcatggtctagaagacttgcgcgccgatcatgctccgccttgcaagacactcctgagacacct

SEQ ID NO: 5105 - DNA, 219 bp, Zea mays
  Clone ID: LIB3118-008-Q1-K1-B1
cttcacacggaatttgtggacacttttgatattgtacttgggagttccctctatatcacatgggtgttctgagcacatgattggggtcttctcacatgcactcatgtaacgaataaagtcttttgtttaaaaaaaattggcatgtgcatcgtgacaactcttttcccctggcatatcgctatccataaaaccacccctacctgatagcctcctataggg

SEQ ID NO: 5106 - DNA, 361 bp, Zea mays
  Clone ID: LIB3118-008-Q1-K1-B10
cgcactcgttcgatattctagagtatattctcttgctaactacttattttattcatttacgggtcattattgagcaggcatgtggtccacaatactcatgcttgcagtatcatcaatgatcaattatccttatcaacaattgacattacatttgcttatacttacctgcataataatatttttgggggaagtttgttcttttataataagtgttttattgttagaaatcctaactcctttagttgggagatttatatatatacttatttataatataaaaataaaataagacatgacggtctggattatttaaacttacatacttcttgcattcggacagtataacttttttatttttttt

SEQ ID NO: 5107 - DNA, 439 bp, Zea mays
  Clone ID: LIB3118-008-Q1-K1-B11
ctcgggatttgagtgggcaaaaattgttgatgattggtctgattggaacaagtggatcagcaatcgtggtgggattggtgtgtcaccagacaagagctgggaatcttggtgggaagtggagcaggatcatctaaaatattcaggaacaataggacgctttgttgagataatcttggctatacgttttttcatataccagtatggccttgtttaccacttacatgtcacacataacaaaagcatcttggtatatttaatttcttggctcgtaattgtggcggttctgctcgttatgaagactgtgtcggtgggaaggcggacattcagtgcagatttccagctattcttccgtctgatcaagtttttgatatttggtgctttcattgctattttgattgtcttgatagtattacttcatatgacctttcgcgatatattt

SEQ ID NO: 5108 - DNA, 451 bp, Zea mays
  Clone ID: LIB3118-008-Q1-K1-B12
gatgactgcgctgcagctggtgatgaagaagtcaagtgctcatgatggacttgtgaagggtcttcgcgaggctgccaaggccattgagaagcatgctgctcagctttgcgttcttgctgaggactgtgaccagccagattatgtcaagctggtgaaggcgctctgtgctgaacacaatgttcaccttgtcactgttcctgctgctaagactcttggcgagtgggctgggctttgcaagattgactccgaaggcaaagcaaggaaggttgtaagctgctcctgtgtcggtgacaaggactacggtgaagaatctgagggccttaacatagtgcaggagtatgtcaagtcgcactagatgtaacacgtttcagtaatactctacatttggatctgggcttaatattatgcttgcgtcttgggcttgctaggagattaggacaatttactacaa

SEQ ID NO: 5109 - DNA, 401 bp, Zea mays
  Clone ID: LIB3118-008-Q1-K1-B2
ctagcgtaaccaaccctgatgctgaatttttcttttggcctgaccgattaaaccatatgagaggccattgatgatgccaggggtgatgccacctattacaattatgccgatgccgaatatgatgccatcgattatggtgcctactatgatgtcaccaataacgatagttattatgatgccaccgatgatgataccaaacatggttttaccatatatgatgccaaatatgattccttttactatgacgccaagtatgaagccaccgataatgatttcaagtatgataccacctatttatgatgtctaacatttgtgtcatcaatgataatgccaatacattattgacagtgccacaatgttactctgattttcattttttacattattcataaacaacaatt

SEQ ID NO: 5110 - DNA, 356 bp, Zea mays
  Clone ID: LIB3118-008-Q1-K1-B3
aaagctggctagcttcttagctagctttcatcatccgaagggaccttgggtgagagagaggcgtctttctctgactaatggagtaagctagagtgcgagttggacgcatgtgatgacccctttggtcgtggtgggggttggtgttcctgttggttttcccttgctttgtagttggataatctttgttggattaagtatagtttctggtgatagaaccaataaggatgtttgtagctagcttataatgagggcgtgaattgcagcttaatttgcttcactcccctcctattttttattaccttttctctttttgcaaagcaatattctccttacaatgtcattaatcgtgcaagctg

SEQ ID NO: 5111 - DNA, 423 bp, Zea mays
  unsure at all n locations
  Clone ID: LIB3118-008-Q1-K1-B4
catggatggtgctcacccaccagtttatcgaatactgcatatggggatgggacaatctcccaaggacagtcctgatgtactacgccaatttcctttcctcgccagagggctacttccacacggtcatctgcaacgtgccggagttccgcaacaccacagtcaaccatgacctgcatttcatttcctgggacaacccaccgaagcagcaccctcactacctcacgctcgctgacttcgacggcatggttaacagcaacgcgccctttgcaaggaagttcgggagagaagaccccgtgctggacaagatcgaccaggagctactgggccgncggcctgatgggtttgtgcccggtggatggacgtatctactgaatgcgacgactgangaagggagacccttcgccgttgagcgcgtgcaggatc

SEQ ID NO: 5112 - DNA, 427 bp, Zea mays
  Clone ID: LIB3118-008-Q1-K1-B5
cggacgcgtgggttttgaagcttgctgaaccggccattcatcgctagtcttttatttcataattctgcagcaggcaggggtgctggcattacacggccagccttgggacgagcaggagcttctgcttgcgacggcttgtgagtccgtacctgacagacatgtccacgtcctgtggcgtcatcccaggcgggagctcccagcgaaagcagtagagaaggttcgccagcatgagctcgacgacggccatcccgaagttgatcccggggcacatgctcctcccagccccgaacggcacgaacttgaaatccctgcccctgaagtcggcatccgcgctgctgccgccgtgcaggaacctctgcggcgcgaactcgtccggcttcttccacgcgctggcgttcctgacgagcgcccactcgttgacgataac

SEQ ID NO: 5113 - DNA, 302 bp, Zea mays
  Clone ID: LIB3118-008-Q1-K1-B7
ccgcccaacatgcaccaacaaaaccatcgagaggccttcgcaggggaaaaatggcacaacgggggctcaaccacgggcgcgggggctctcaacctccgaccagccctccgagctcgcggctgccaacgccagcgccgggaccacctgcgggccggggtgggccaacccgcacaacccgctcccgagcagccactggtacgtgaccagccggaccagcggcatcgggccgcgccccccgcggccggagctgaaaaagagaagctgccgggagcaggcggacatcccggcggacagcccgagca

SEQ ID NO: 5114 - DNA, 164 bp, Zea mays
  Clone ID: LIB3118-008-Q1-K1-B9
cccacgcgtccgcggacgcgtggggtttttccctgacgcatacttggctgatacctttgtgagtacatgactaccaggcgagtattggcaaagaaaaatgcttctgttcgtgatgcccagggtacagtgtaatgttcacgaactgcggctgtgcgttgtgttaa

SEQ ID NO: 5115 - DNA, 271 bp, Zea mays
  Clone ID: LIB3118-008-Q1-K1-C1
cgcaaattgcaccaagaaatccatcgagaggccgtcgacaggggaattaatggcgtcgtcgtctagcagcagccaccgccgcctcatcctcgcagccgccgtcctgctctccgtgctcgcggttgccagcgccagcgccgggacctcctgcgtgccggggtgggccatcccgaacaacccgttcccgagctgccgctggtacgtgacaagccgaccttgcggattgggcccggccttccgggggccgaacctaagaagaaaatcctgccgg

SEQ ID NO: 5116 - DNA, 325 bp, Zea mays
  Clone ID: LIB3118-008-Q1-K1-C10
cccacgcgttcgcggacgcgtggggaacagttccccgagtccccgactgctctctgtctctctattggcgacgactgggctaccgccgccacaagcgccctacgccaggtgtccaggtctcgggcccttctccggcaccgagcacccaccagcggaatataccatggaggtcaggcccatggtagctctgcgtgccgccctagttggtggggtagcggcatttgcgaagatcggtggggcgatgaaagccgcaggcggcgtcaagattggtgcagccgctgcagccgtcacggctgcaacatcagctgccatatcgggaaaagac

SEQ ID NO: 5117 - DNA, 399 bp, Zea mays
  Clone ID: LIB3118-008-Q1-K1-C11
ttttctgttccacatgttttttctcgcacgatactgcaagcttctggaggagaactcatttagaggaagaactgccgactttttttacatgctcttgtttggtgctactgtcctaactagcattgttctgattggagggatgataccttacatttccgagacatttgccagaattctgttcctgagcaattcattgacgtttatgatggtttatgtctggagcaagcacaatcctttcatccatatgagctttctgggcctgttcacctttacggctgcatacttaccatgggtcctattgggcttctctatcctggtgggaagcagcacatgggttgatctcttgggtatgattgctggacatgtgtactactttctggaagatgtatacccacggat

SEQ ID NO: 5118 - DNA, 362 bp, Zea mays
  Clone ID: LIB3118-008-Q1-K1-C12
gccaagaactcgctggagaactactcctacaacatgcgcaacacgatcaaggacgagaagattgcgtccaagctgccggccgatgacaagaagaagatcgaggacgccatcgacgcggccatcagctggctggacgccaaccagctcgccgaggcggacgagttcgaggacaagatgaaggagctggagagcctctgcaaccccatcatcgccaagatgtaccagggcgcgggtgaagacatgggcggcgctggcggcatggacgaggacgcccctgccggcagcggcggccctggccccaagatcgaggaggtggactaagcggtttgttgtcagtcttgagtgtgctgcacgtgctggct

SEQ ID NO: 5119 - DNA, 159 bp, Zea mays
  Clone ID: LIB3118-008-Q1-K1-C2
cggacgcgtgggcggacgcgtgggtggtactccaatcatcgtgtacaaaaccatattgtattacatgcaagtgcgagtgagatttaagcgtaaacagattgttgtagaattcgtacgaattttacagagcagaaacaatgggatgcagggattgccagt

SEQ ID NO: 5120 - DNA, 395 bp, Zea mays
  Clone ID: LIB3118-008-Q1-K1-C3
cggacgcgtgggcgaaggctaggggggcactctcatcatcaggctcaaaaccatattgtacgagggggcaaatacgggggagagtgcgcctgaaaggaatgtggaggcaatcaatcacagcagccccaaaagaggctcgcaaggggctgaattccttaataatcttggtggcctgggagttatggaagcaccgtaatgcttgtgtttttgagaaacataagcttaggattcaagatggtcttaattatagtagcttggagggaaacctgtggggtttggcaatgggacaccaaactcaaagtacttgggcgtaggtggacaacgtcttatactggaaaaacacatggcgggtacccaacttaaatccgttttgaaataataatgcccctttattg

SEQ ID NO: 5121 - DNA, 389 bp, Zea mays
  Clone ID: LIB3118-008-Q1-K1-C5
cccacgcgtccgcgacgcccatgatgctccatatgctcttctgccagtaccctggcttcaaggaggttcggatgatcgaggcgaagcctgggattgctttcgtggagtatggagacgagacccaggccactgctgccatgaacaaccttcaaagcttcaaaattacaaaagaaaaccagatggtcatcacatatgcgaagaagtaatgagctcccgagcaatgtttacctgatgtgtgagatgttgtattccgagttttacacaactggtaaatttccttcatgtgttaggtagacagcatcctgaacaacctgttaattgtacccactgggctgcagctatgtgcacttcaggaacggagatgaaatgcaaactgttattatttggtc

SEQ ID NO: 5122 - DNA, 368 bp, Zea mays
  Clone ID: LIB3118-008-Q1-K1-C6
tggattctcctgcccctacggttcgggttcgggttcgagaggatctacgctgttcggctccggggttgagcggatcgagatggcggcgtctgatgttgagtaccgctgcttcgccggcggcctcacctgggccactgacgaccacttcgtgcacaacgccttaagcacctacggcgaggtcctcgatgtccaacatcatcctcgatcgggagacgcacaggtccgagcgctcttgcttcatcaccttctccacggatgaggcgaggcacaacgccatcaacggcatgaacagcacggagcttgacgggcgtaacatcaccgtgaacgatgcccatgcccgcggcgtacggggaggtggttgcggtggg

SEQ ID NO: 5123 - DNA, 429 bp, Zea mays
  Clone ID: LIB3118-008-Q1-K1-C7
gtcgcctaggcgaggcctaggtgtccaggcgcccggccaggctcatcgtgatgcggcacctggcctgaagatggctaggcggaggcctgaagggatggtggaggcaagcaatcacagcagccccaaaggaggctcgcaaggggctgaattccttaataatcttggtggcctgggagttatggaagcaccgtaatgcttgtgtttttgagaagcataggcttaggattcaagatgttcttagttatgttagtttggagggagacctgtggtgtttggcaggggcctccaaactcaaggagctagtgtttaggtcgtcgacgttcttggcctaaggcataaggccgctctggtcgtgtcttgttttcttctgtggcgcttatgtaatggtgtgagtggtgccttcgttaagcacctaaggcggtctttcta

SEQ ID NO: 5124 - DNA, 173 bp, Zea mays
  Clone ID: LIB3118-008-Q1-K1-C8
tcggctgcttgggagctcttaatcagtatctgggtgcaaagctgtagaaaaacatgtatcaacaaggcgcctgagcgataaaatatatgataagttgtattaataaagtattgtcgtacttgagaggttgcagtatctgctctatttcccttgcatacactccgtacttgtat

SEQ ID NO: 5125 - DNA, 81 bp, Zea mays
  Clone ID: LIB3118-008-Q1-K1-D1
ctcaaattccgtctaggattgcattttcaagctagcccctagaggtactatggatccctctggggacttgtgacaacgttg

SEQ ID NO: 5126 - DNA, 380 bp, Zea mays
  unsure at all n locations
  Clone ID: LIB3118-008-Q1-K1-D11
ccaactagcaacatacatagtgaagtacactagcaacatcttagcaccaatggcagccaagatttttgccctccttgccctccttgctctttcagcaaacgttgctaccgcgactattattccacaatgctcacaacaatacctctctccggtgacagccgcgagatttgaatacccaactatacaatcctacaggctacaagaggccatcgcagcaagcatcttacggtcgttagcattgactgtccaacaaccatatgccctattgcaacaaccatccttagtgaatctatatctccaaagaatcgtagcacaacaactacaacaacaattgcttncaacaatcaaacaagtagttgcagcgaaccttgatgcttacc

SEQ ID NO: 5127 - DNA, 395 bp, Zea mays
  unsure at all n locations
  Clone ID: LIB3118-008-Q1-K1-D12
gcaaatcatgatgaccatagtcgacgatcttgtctctgtcgacactctcattgaggactatggtgggcgctgagccaggtgacgagtacgtccagagctgtgacatcattgccttcaacaagatctaggcgtgactttcgatcagtcctttccctggggtgctggcgatggtggtggctgggcaatgcaccagcctaatctttgcatagctatatgtctgctttgcgtggccagtgatattgccgggagtatttttggatcctattcgagtagaatgtaccagttccagagtgaataggctctaattcgaaacaccgctccggttggaattctgctaaaggacanaacaagcttgattatgttcttgccctcaccgctgagaactttctcgcaag

SEQ ID NO: 5128 - DNA, 169 bp, Zea mays
  Clone ID: LIB3118-008-Q1-K1-D2
gctgcttgggagctcttaatcagtatctgggtgcaaagctgtagaaaaacatgtatcaacaatgccctgagcgataaaatatatgataagttgtattaataaagtattgtcgtacttgagaggttgcagtatctgctctatttcccttgcatacactccgtacttgtat

SEQ ID NO: 5129 - DNA, 216 bp, Zea mays
  Clone ID: LIB3118-008-Q1-K1-D3
aaaaaaatatgggaattatattaattaaaaataacaaacataaaggtgcaaatctgataaataaacttactacacttcttactaataaaaaaaaaaaaaaaaagttaactaataaaaatcaatttataaactaaaactaaaaatctgatttattttttattattcaatcaaaacctttttttcaattttataaaaaaaaatttcataattaattat

SEQ ID NO: 5130 - DNA, 178 bp, Zea mays
  Clone ID: LIB3118-008-Q1-K1-D4
gtgcaggaggttgctgctgccgagtagtttgtttgctacttctatatctaggctgagtctggacatgaggttgcttatgacgtgaacttagagttgtctacttgttttcatccgcccctaagattttgtctggaaacaagtttaaaattaagattattctcaacaagtgtttaagatt

SEQ ID NO: 5131 - DNA, 104 bp, Zea mays
  Clone ID: LIB3118-008-Q1-K1-D5
cccacgcgtccgcccacgcgtccgcccacgcgtccgcccacgcgtccgcccacgcgtccgcggacgcgtgggagagttcactctagcatggaattggtttgaac

SEQ ID NO: 5132 - DNA, 327 bp, Zea mays
  Clone ID: LIB3118-008-Q1-K1-D6
cggacgcgtgggcggatttttttttttcagtgagtagtctggtgcctggtcatccaagaccgatgaataatctgtacttgtgggggactaaagattgccaatgaactttagcacgcaatggttatgtgcagctggtgtagtaaattcaatcgtgctctgctttccctgtttgtgttcattatagttgtatttatatttatttgcggggtgtgcgcggattgctgtactacacctactctgaagtcgagaccgatgtattatttgctgttggatatggcatgctattgaggttatagctcgctatatatatatttggcttcgttgctc

SEQ ID NO: 5133 - DNA, 331 bp, Zea mays
  Clone ID: LIB3118-008-Q1-K1-D9
ctgctgtacgcgcccggacttattggctcgaccgacgcgtccggcaccaactagcatcacatgaagcacaatactgtaccaacaatggctgtcaaaatattttggctggctatgctccttggtctttcggcgagcgctgctacaagcatccattttcccgcagtgctcacaagctagtatagcttcccttcttcctctgtgcctgtgaccattgttgtcatcaggatgtgactacccaattctttagccctacgggagccgactggcatttgcatcgagcgtgttacctttatgacgactgttcctacgacagtcgtcattcctaatacag

SEQ ID NO: 5134 - DNA, 207 bp, Zea mays
  Clone ID: LIB3118-008-Q1-K1-E1
cccacgcgtcgggacggagcgcactgcgaaggacgagtgcgggatcttaatgacctacactagggtgaactgacatcatcacatcatcctcctagtactgcactctggtcttcatacacgacggtggctcaccaacagccggcacctgcatcgtgccgactgtgccatccagcacaaccgcttccataactccactcctacctgacc

SEQ ID NO: 5135 - DNA, 383 bp, Zea mays
  Clone ID: LIB3118-008-Q1-K1-E10
cacacacaagcggcggcggcggagcaaactcttgcgaaggcgatggtgtgagggaaggaggggcatccatggtgcgcgtggcggtgtaccaaactatggtaagacgttcaagaaaccaaggcgtccttatgagaaggagcgtcttgatgctgaactgaagctggtcaactagtatgggctgaggtgcaagcattagctttggaaggtccagtctgcactgaacaagatccgcaatgctgcaaggcacttgctcacccttgactagaagaacccccgtcgtatctttgatggtgaggcgcttcttcgccgcatgaaccgctatggtctgcttgctgagggtcagaacaagcttgattatgttcttgccctcaccgttgagaact

SEQ ID NO: 5136 - DNA, 292 bp, Zea mays
  Clone ID: LIB3118-008-Q1-K1-E11
cccacgcgtccgagaaaggcgaaacgaggcctccagctcaccgccgagcggaagcggcggcgggcaaccaacccggggtctcgggcgccgccgtctccccggaccatggccatggtcgccgcctcctcccggctgctctgggcgtcccgcgccgccgcctacctcaggatcttcaccttccccagggccttcttcaccgggctgaaggatctgaagtatgctgacactcatgaatgggtgaaagttgagggtgattcagcaaccgtggggattactgaccatgcccagacca

SEQ ID NO: 5137 - DNA, 329 bp, Zea mays
  Clone ID: LIB3118-008-Q1-K1-E12
ccgacgcctcgtccgacgcctcggggccgtgttttcggaagcatatgggtactgatacttgccgtggaagctgaatctacggcggagggggacaccgatatagccgtggcggctacagccgaggcagcggctacagtggcgacgaccgctactgtggtggtggctgactctactgctgtagcaaccgtggcggccgctaccgcaactccgacgggaactggaggaactgaacggtggggcccgcgcggacaaattattctgttcgctaccgtgatgtttaccctattccaaagggtttatcttccttcgtgtcgtgttttggtgttgcc

SEQ ID NO: 5138 - DNA, 433 bp, Zea mays
  Clone ID: LIB3118-008-Q1-K1-E3
cccacgcgtccgcccacgcgtccgcgccgcttccttttctccgtcgtgctctcctccgcctgcggtcaccattaacctagccggcactctcctcggtgcggcggagcccgcctgcccggatcccggacaccggggcgacctcaagtgttccacatgcatcatgggacacgacgctcaccgctcgctatcgctggcggactacggacggctggagctggatttctgtggagaagtggattgctgactgctgtggagaatttcggactttgaagcctgaagtgtgaagtatgaaccatctgtgaagtccaaactgtatttttcttgtggatttgtgatgcaatgcaatggcacttggcggctgtcactggcaggcaacagcagcaccgcagcaggcttaatgccttgcagccttgcacttttgtatcttttgtcg

SEQ ID NO: 5139 - DNA, 440 bp, Zea mays
  Clone ID: LIB3118-008-Q1-K1-E4
cccacgcgtccgcggacgcgtgggtgggaattggagctggaattggattggcatctactgtgtgttcaacaactcaaggcaagttaattgcaggcccgttactttccgcagtgcatatatatggggtcatccaagagatgagagcaactcctgtaaacacactcaacccacaaagaacagcaatgatcgtggctgattttatcaagagtggaaaggtttctagccccgccgagctaaggtacaaggaagacctcctgtttcccaaccgagttatagaagaagccggcagtgtgaaaatcggtcagccacttcgcaaagtgttcagtccccggcttgttgagcagctgagggcgactttcccaggcgagaaatttctgctcagccagaaaagcaacaggacgtacatggttctggagcgaagcgcgagcggagaggacgcg

SEQ ID NO: 5140 - DNA, 226 bp, Zea mays
  Clone ID: LIB3118-008-Q1-K1-E6
cgcgccaaaaaaaaaaaagaagcaagagaggaaaaaattaacaggaaaaggaaaaggaaaataaaagggggggaaaaaaaaaaaagggaaggggaacggcgcccgttacaaaggacaaaggataaataaggggggaatgcaagagaagagagcaactacggggaacacaaacaacacacaaagaacagcaaggaaagaggctgataacagaaagagaggaaagggg

SEQ ID NO: 5141 - DNA, 366 bp, Zea mays
  Clone ID: LIB3118-008-Q1-K1-E7
ccgcacctcagaaaacaagacacagacttagagagaggttctactccggctcacctgtggacagcggggcaagaagtgggagacccggggaggatggatatcgcacaacgacacagagagagaggtctctttctgctaacggatgaaacagttatacgggctaaagattcaagatgagaatccgcgcatggagaccgacttgcaatgtaaaaccgaaccatatacgatctgaatagattatcatcccaagcaccagagaaaaatcgggagaatagtagcagtactttctagtcatgaagatacaaaaagggggcaccgattctctcaggagatgggctaatgaccactagctacttcagagccact

SEQ ID NO: 5142 - DNA, 293 bp, Zea mays
  Clone ID: LIB3118-008-Q1-K1-E9
cctcccacgcgtccgattttaagcacagacccacgcgatcctctaaccctaaagggcccaagccgggcgggccactggtccaggtcatgtacaatcttgtctagcacgacgagctaatgagcactacggaagaagtagatctagtcgctaacactgacgcattaggatccgacgactcttacgtaccagagcacctcgttaactatctcagcgagctagacatagctgccgacttagacaagctaggatcctggcttgactatgtcgacgatatgatatcatatgacatggcc

SEQ ID NO: 5143 - DNA, 433 bp, Zea mays
  Clone ID: LIB3118-008-Q1-K1-F1
cacctcagaatccaagacacagacttagagagaggtcctactccggctcacctgtggacagcagatcaagaagtgggagcccttatgaggatggatatcgcagatcgtcacggagagagaggtctctttctgttagtggatgaagcagttttacggtctagagctccttgctgtgaatctgcgcatggtggcctacttgctatgtctttctgaaccatatatgttctgtctagattatcattcccagtaccagtgaagtatcgtgagactgtttgctgtactttctagtcttgaggatacagaagggggtcaccgattctctcagtagatggactaatgaccactagctacgccagttccactgctttgtgtatttataggcagctttgtggtttgaataaaattatttgcatcgtgaaagctaattggtaaa

SEQ ID NO: 5144 - DNA, 361 bp, Zea mays
  Clone ID: LIB3118-008-Q1-K1-F10
cagcaatttcttccattcaaccaactggcagcattgaactctcctgcttatttacagcagcaacaactactaccattcagccagctagctggtgtgagccctgctaccttcttgacacaaccacagttgttgccgttctaccagcacgctgcgcctaacgctggcaccctcttacaactgcaacaattgctgccattcaaccaacttgctttgacaaacctagcagtgttctaccaacaacccatcattggtggtgccctcttttagatttcttatgagttatagttcaataataaagttttttgtctgatgtttgtggcttcccagaaataagaaagtacatttctaaaaaaaatcgcga

SEQ ID NO: 5145 - DNA, 321 bp, Zea mays
  Clone ID: LIB3118-008-Q1-K1-F11
aacaccgcaggaattgggacatcaggtggcccttatccgtcaagtcgctaacaaagttttcaccagtatgggtaaaactattgggtacaagatcgggacgatgattgagattcccagggcagctctagtggctgacgagatcgcggagcaggctgaattcttctcctttggaacgaacgacctcacgcagatgacctttggctacagcagggatgatgtggggaagttcatccccatttatctggctcagggcatcctccagcatgaccccttcgaggttctcgaccagagaggagtgggcgagctgcgtaagcttgctac

SEQ ID NO: 5146 - DNA, 101 bp, Zea mays
  Clone ID: LIB3118-008-Q1-K1-F12
ccctagtatttaatatcgacccgactggattttttgaattctagtggatatttacagcaagggcgggctactaccatggaggtcggggtgctgagtgtgag

SEQ ID NO: 5147 - DNA, 382 bp, Zea mays
  Clone ID: LIB3118-008-Q1-K1-F2
ccgaccggaaaaccgggtcgaccgggcgttcgcacctcagaatccaagacacagacttagagtttgttcctactccggctcacctgtggacaggggatcaagaagtgggagccctggatgaggatggatatcgcagatcgtcacggagagagaggtctctttctgttagtggatgaagcagttttacggtctagagctccttgctgtgaatctgcgcatggtggcctacttgctatgtctttctgaaccatatatgttctgtctagattatcattcccaggaccagtgaagtatctggagactgtttgctgtactttctagacttgaggaaacagaagggggtcaccgattctcctagtagatggactaatgaccactttgc

SEQ ID NO: 5148 - DNA, 185 bp, Zea mays
  Clone ID: LIB3118-008-Q1-K1-F3
cccacgcgttcggggttttctggtcctggtatgtgagctggggaagacgcaaggtactgcggcggcgcgcgaggggtcgtcggacgaccgacgaggacgagcggcatatgcgcgtgcatggcgctcacgaacttcatcctcacggtggtgggggtgggcgcagcggtgatgctgctgcggaaaga

SEQ ID NO: 5149 - DNA, 440 bp, Zea mays
  unsure at all n locations
  Clone ID: LIB3118-008-Q1-K1-F4
aaaaaaaaaanaaagggaggaggaaaaaanaaaaaaaanaaaaaaaaaagaaaaaatgtttttaaaaaaagaagaaaaaaaattatanagagagaaaaaaagaggaagaaggggattttttaatataataaaaaaaaaaaaaaaaaagaatataaaattatataaaaaaaaataaaaaaagataaaaaaaataaaaaaataaaaaaaaaaaaattaaataaaaaaataaaaaaaaaagtaaaaaaataattattaaaatagaaaaataaaaaaaatataaaaaggtgaaagtaaaataaaaaaaaaaaaaatataaaataaaatatattaaaataaaagataaaataaaaaaatattaaaattaaataaaataaaataaaaaaaaaaaaaattaatgaggaatgtaaaaaaataaaaaaaaaaaaaatgtatataattat

SEQ ID NO: 5150 - DNA, 424 bp, Zea mays
  Clone ID: LIB3118-008-Q1-K1-F5
ggaggcgttcgcacctcataattcaagacacagacttagagagtattttctactccggctcacctgtggacagcggggcaagaagtgggagccctggggaggatggatatcgcacatcgtcacggagagagaggtctttttctgttagtggatgaagcagttttacggtctatagctccttgctgagaatctgcgcatggtggcctacttgctatgtctttttgaaccatatatgttcttgctagattatcattcccagtaccagtgaagtatcgtgagactgtttgctgtactttttagtcttgaggatacagaagggggtcaccgtttttcttagtgatggactaatgaccactatctacgcctagttcactgtttcgtgtatttataggcagctttgtggtttgaataaaattatttgcat

SEQ ID NO: 5151 - DNA, 274 bp, Zea mays
  Clone ID: LIB3118-008-Q1-K1-F6
aaaaaaaataaaaaaaaataaaatcaccacaattattaaaaaaaaaaaaaaacataaaaaaaggggaattaaaaaatgaggggggcacaaaaaaactcaaaaaaaaaaaaaaaaaaaaaaaaaaaaaaaaaaaaaaaaaaaaaaaaaaaaagaaaattaaaaaaaaaaaaaaaaataaataaaaaaaaaaaaaataacaataataaaaaaaataaataaaaattcaatacaaaaaaaaaaaaaataaaaaataaaaaaaaaaaataaataaaat

SEQ ID NO: 5152 - DNA, 427 bp, Zea mays
  Clone ID: LIB3118-008-Q1-K1-F7
cggcggaaacgtcctgtgccgccttcatggcctttagggcgccgctcgagcagcagttcctaagcggcggctgcagccgccgtgccggtgccggtgctggacgtcgaggagcggcgacgcgcgaccatggatctcttgatgcaattccatgcgtgatgcgtatgaaggaacgaatggttttacaagccccatataataaatcataacagtgcgggagcattttttggatgtccttcacacagatgcaggcaatgaaagaaacagaaaatagacaatgttagcgcggagtgagacagataggaattgggatagaatcatccttgttctcagatcagctgtactgctttctttattatggtaggatatcatacctgtacgagtagactgacggttgcttgctctacattttatatcggtgtaattgcaa

SEQ ID NO: 5153 - DNA, 437 bp, Zea mays
  Clone ID: LIB3118-008-Q1-K1-F8
agaaggtcttgaacgaggacctacggcttgttcttggtcagcaagaacggatgatcaatggcgccaacgtctggaactggccggtatcatatgacaagctcggggtccggtaccggttgtggagagacaccgttgagaggggctctgaacggttgccattcagtaaccaagctgagagtggatcatagccggccggtgggtctcttaatttcctcctcgtcacatttattcgcgagacgacggccagaattagttacctaggcgtgcgtctctgtgctctgctccctgatgctgctgcgtctatctggaaggcgaaggttgatgggtaacatcatcgtgtctctctctcccctctggtgttggaatgtacactagcgtccgtatcatgagatgcaattgtaatctgaggttgatattttctttctttctttcttttt

SEQ ID NO: 5154 - DNA, 405 bp, Zea mays
  unsure at all n locations
  Clone ID: LIB3118-008-Q1-K1-F9
gtccgcagaggtcgggccggtggcggtggcggaggcgcggacgtgccagtcgcagagccacaggttccggggcccctgcctgcggcggtccaactgcgccaacgtctgcaggaccgaggggttccccggcggcaggtgccgcggcttccgccgccgctgcttctgcaccacgcactgccactgattcgctcgcccagcggccggctggcgtcgccgtcgatcgcgtcgcgaccagtccatggctccatgcatgaataacaagggtgtgcgcggtttgtgttgtgatgccaaattgtatcctcgtcgtgtgttgagcagcggcgtgctgttgtacgtacgtatgcctctgttacatgtttcgggattntccatagcaaatgcatgcgtcgatcgagatctactncg

SEQ ID NO: 5155 - DNA, 430 bp, Zea mays
  unsure at all n locations
  Clone ID: LIB3118-008-Q1-K1-G1
cggcggaaacgtcctgtgccgccttcatggcccctagggcgccgctcgagcagcagttccgaagcggcggcggcagccgccgcgccggtgccggtgctggacgtcgaggagcggcgacgcgcgaccatggatctcttgatgcaattccatgcgtgatgcgtaggaaggaacgaatgggtttacaagccccatataataaatcataacagtgcgggagcattttttggatgtccttcacacagatgcaggcaatgaaagaaacagaaaatagacaatgttagcgcggagtgagacagataggaattgggatagaatcatccttgttctcagatcagctgtactgctttctttattatggtagtatatcatacctgtacgagtagactgacggttgcttgctctacattttatatcngtgtaattgcaattg

SEQ ID NO: 5156 - DNA, 330 bp, Zea mays
  Clone ID: LIB3118-008-Q1-K1-G10
cggacgcgtgggtgaccgtccaacaaccatatgccctattgcaacaaccatccttaatgaagctatatctccaaagaatcgcagcacaacaactacaacaacagttgcttccaataatcaatcaagtagttgcagcgaaccttgctgcttacctccagcaacaacaatttcttccattcaatcaactagctggggtgaaccctgctgcttacttgcaggcacaacagctactaccattcaaccaacttgtcaggagccctgctggcttcttactgcagcaacagttgctttcattccatctacaagttggggcaaacattggtgcttttt

SEQ ID NO: 5157 - DNA, 364 bp, Zea mays
  Clone ID: LIB3118-008-Q1-K1-G11
ataatctttgttggattaagtatagtttctggtgatagaaccaataaggatgtttgtagctagctgcaattcacgccccccgcgacgggcgacgctaattaagtagagctgcaacacctgggttggaggctagagcttgcaaacaccaccagcgaaaacgtcgtggccagccatcccggtgtcgtcccgcgttctacagccaccgctgtcgtcgccgtcctagactcctagatccgtcagcttaacgagctccattccttcgaggccagccatcccggtgtctcagcagcggcggcggcggcgtcgagctcttgctttctgtgggaggacgcatggcgatgtctgcggggcgtgggctcttggt

SEQ ID NO: 5158 - DNA, 366 bp, Zea mays
  Clone ID: LIB3118-008-Q1-K1-G12
gaagaatcttggtcaagtcgacgtgtgttcttattcagatgagtacttattatgccatgaggatgatgatgatgtggtgggtggtgaaagtgaaaatccatatgacatcttagatgactgttctatttcagatgattctgacatggatttaggggatgcagatgcagatgaattttgcagagactgagttcgtggcctgtgtgtatcataaaagaacaaaaaaaaaagttgtgttaagtttgctatgaaaacaaagttcagcaataactgttcgtgactttaagctcaggatataatctgcgtactatactctagctgctcgcatctatggagttccaagtaacacttgaggcggactgtattctt

SEQ ID NO: 5159 - DNA, 434 bp, Zea mays
  Clone ID: LIB3118-008-Q1-K1-G2
cggcggaaacgtcctgtgccgccttcatggcccttagggcgccgctcgagcagcagttccgaagcggcggcggcagccgccgcgcgcggtcctgtgcttgacgtcgaggagcggcgacgcgcgaccattgatctcttgatgcaattccatgcgtgatgcgtatgaaggaacgaatgggtttacaagccccatattataaatcataacagtgcgggagcattttttggatgtccttcacacaaatgcaggctatgaaagaaacagaaaattgacaatgttagcgcggagtgagacagataggaattgggatagaatcattcttggtctcaaaacagctgtactgctttctttattatgggagtatatcatacccgtccgagtagactgacggttgcttgctctacattttatattggttgtaattgcaattggtt

SEQ ID NO: 5160 - DNA, 435 bp, Zea mays
  Clone ID: LIB3118-008-Q1-K1-G3
tgagcattcagaaacacacctagcgaagcgcactagcaacgacctaacaacaatggcttccaagacattatccctccttgcgcttcttgccctttttgtgagtgcaacaaatgcgttcattattccacaatgctcacttgctccgagtgccattattccacagttcctccctccagttacttcaatgggcttcgaacacccagctgtgcaagcctataggctacaacaagcgcttgcggcgagcgtcttagaacaaccaattgcccaattacaacaacaatccttggcacatctaaccatacaaaccatcgcaacgcagcagcaacaagcactgagccacctagccgtggtgaaccctatcgcctacttgcaacaacagctgcttgcatccaacccacttgctttggcaaacgtagctgcataccaacaacaaca

SEQ ID NO: 5161 - DNA, 366 bp, Zea mays
  Clone ID: LIB3118-008-Q1-K1-G4
cgtgtcaacattccagtcacgtttcctcttcaatcaagcgtttagtcgaggtctggagatctccctcatccttgcagggaacaaggcgaatcagcagatttgaaaggccctgccgcatccatcgtatttttctgttgtatattctgggaattactgagagctgcttagttagtttgaacaatttaatgagctcgatttgaatgacaaccttctacataattgcccctgtaatttgtacactaattatgcggagaggcagctaccgcagtagagatgagctgatgtatgtcgatttgatcttaaccaaacctctctttaaagctaccacgggtcagtaggcccgcactagtatgttgcacccatccc

SEQ ID NO: 5162 - DNA, 442 bp, Zea mays
  Clone ID: LIB3118-008-Q1-K1-G5
cacagagctcatgcttcaaccgaaggagttaccaagtatttgaagcctgctgttgctggcttcctcatgcagaaggaacttgactaccttgttggagctgttgccaacccaaagaagccatttgccgctattgttggtggatccaaggtctcaagtaagattggtgtcattgagtcgttgctggcgaaggtcgatatcctcatccttggtggtggtatgatctacacattttacaaggcacaaggatattctgttggaaaatctctcgtggaagaggataaacttgagctcgcaacttctcttattgagaaggcgaaggcaaagggggtttctcttttgcttcccactgatattgtagtagcggacaagtttgcagctgatgctgagagcaagattgtccctgccactgctatccctgatgactggatgggtcttgatgttg

SEQ ID NO: 5163 - DNA, 427 bp, Zea mays
  Clone ID: LIB3118-008-Q1-K1-G6
ttcttgaaccaaatgacttaccaagtatttgaattctgctgttgctggactacctcatgcaaaaggggctagtctaccttgttggggcgggcgcccaccaaaacaaacctttcgtccctattcttgcgacatccaaggtcttatataagattacctacattgaattcactggtcgcgaattgtccatatcctcatccttggaaaacctttgatctacacatcttacaaggcacaaagatcttcccctttaaaacctctgggggaatatcaaaaacttcagctcgcaacttcttttataaaaatagcgaacgcaaaaggggtttatgtactccccccgactgatatcataatacccgacaagtttgcagcttacgctcatagcaacattgtccctggcactgatattacagacgactggatgcgtttt

SEQ ID NO: 5164 - DNA, 298 bp, Zea mays
  Clone ID: LIB3118-008-Q1-K1-G7
acaagctgtacagccacccgtcacctctctttttgaatctattcaggatgctagaatggatgggatcattcacctagatactgaggactctattcatcaagctggtgcccgagagtactgtcctaaggcgattgcttttacatgtccctgacaaccttgacatggttatcttccccacttatcaaagcaacattgaccgtatgacattaatgatccacttactgaggcctttataattgcacctacaggaactcatgaagatatggggacccggtcacacccttagcccctcgtttac

SEQ ID NO: 5165 - DNA, 371 bp, Zea mays
  Clone ID: LIB3118-008-Q1-K1-G8
gcgttaaaatccctttggggatttgaggcttctatttctaccccttaagggtcttattttccctcgttgtatttggttcaactttcgggaagcataaggtgtcaaaaaagagggacaaacttgccgaggtcaccaaagagttgagcgagttgaaacaaaaagtaagcgagagtgttgaattggagaggaaggtgcaggaccttgagcagaagctgcagctagcttattccaagtctgacgaacaagcagtggatactgtggagtcgagatcccgtgaattcagcctggattcatcaacgagttcatgcaatcatcatgacaaaactcatgctgtctcaccaaacccaaccctgcaaggagtgcaagaacct

SEQ ID NO: 5166 - DNA, 424 bp, Zea mays
  unsure at all n locations
  Clone ID: LIB3118-006-Q1-K1-C3
gaccacagggcctaccttgctgaccatcctggagcgtcgacgatcacgacggcacagggcgaagaactgaggaggcagatcggcgctgcggcttacatcgagtgcagttcgaaaacgcagcagaatgtcaagtcggtcttcgacacagccatcaaagtggtccttcagcccccgcggaggagggaggcgacgcctgccatgaggaagaacaggtgtggctcggggtgctctatcatgaacctcatgtgtggcagcatgtgcgctgcttangagtctagaacactgatctggaaggatgtgaaggtgaaggcatgatgtgtatgtgctatggcgactggcaagtaaatggggccgcatggatgactgctgctcttgttttctttaactcgtctgcccgatgctttgttttttaggcttcaagact

SEQ ID NO: 5167 - DNA, 244 bp, Zea mays
  unsure at all n locations
  Clone ID: LIB3118-002-Q1-K1-G12
ctgggccgcggctgtggcctttgcgctgagacttgcaaggaacgccggcgagagggccgagcagacaggcaggcgcacagcacagacacagactccgacatccnagagaaccggccggacagcgctcccgatggcagagcaagtacaagatgcacagaaacgaatgagacgacgaccacccgcagaacaaggagaagaaagacctagccctcgagcggctgcaccacggaaggcgcctactgtc

SEQ ID NO: 5168 - DNA, 237 bp, Zea mays
  Clone ID: LIB3118-002-Q1-K1-G4
ccgattcccggtcgacccaggcggacgcacgcgttcgccacgcgtccgcccacgcgttcggccagtagcttcaggacgtgagctccgggtgccgttgcgaccatcatccggagcgtggtcaggggctacgatgaggccatgccgacgatcgaaaaaggctggtggccatgggggcgggaacatcatgcatcaacgtagacctgactagaaggacacgaaccctactactacttctgc

SEQ ID NO: 5169 - DNA, 245 bp, Zea mays
  Clone ID: LIB3118-002-Q1-K1-G5
gcgcgcacgcatccgcccactcttccgaacacttgcaataccacgacttagacggatcacaaagaacacagggcacaccacaaatgaaagcattgacacacatgactacaaaccatgtctctacccttaacttccttgacccttcttcttctccactgtatccatgctacacctgtttttcactcataaactaccttaatcctcttaactctcgatatataacctttactgtttcacctaaattc

SEQ ID NO: 5170 - DNA, 374 bp, Zea mays
  Clone ID: LIB3118-002-Q1-K1-G6
cgacccactcgtacgcccacgcatccgcccactcgtccgtccacttgttcgatcactcgttcgaccaatcatacagaagaccgtggatcattaatataaagggagtgacatagataactacaaatgatatcactacctcttatctccatgacaattcctcttcttcactctatgtatgatacaccacctttccagttaacaactaccttaattatctataactaacactgtttaacattaaatgattcagctaacattacaaaaatcctggataacaacatatctccaaccataactcatagtttaacaatataccgacctatataatattatcctataacaattccaactttttaactgcacaaatatatttt

SEQ ID NO: 5171 - DNA, 439 bp, Zea mays
  Clone ID: LIB3118-002-Q1-K1-H1
ggaagggcctccgcgtcaccgtcaagctcaccgtgcagaaccggcaggccaaggtctccgtcgtcccctccgccgcggcgctcgtcatcaaggcgctcaaggaacccgagagggacaggaagaaggtcaagaacatcaagcacagcggcaacatcagcctcgacgacgtcatcgagatcgccaagaccatgcggaacaggtccatggccaaggagttggccgggaccgtcaaggagatcctggggacctgcgtcagcgtcgggtgcaccgtcgatgggaaggaccccaaggacttgcagcaggagatcgatgatggtgaggtcgagatcccatcagcttaaaggctatacaactagaaatcatcggacactatcaaagtggtgttttgttccaaatgcagttcctgcacctcaatcgcctattattgtctgctttagtt

SEQ ID NO: 5172 - DNA, 379 bp, Zea mays
  Clone ID: LIB3118-002-Q1-K1-H11
cagaaacacaccaagcgaagcgcactagcaacaacctaacaacaatggctaccaagatattatccctccttgcgcttcttgcgctttttgcgagcgcaacatattcgtgtattattccacaatgctcacttgctcctagttccattaattcacagtttcttttatcagttacttgaatggccttcgaacacttaatttttcaagcctataggctacaacaagcgattgctgcgagcgtcttacaacatccaattgcccaattgcaacaacaatccttgtcacatctaactatacaaaccatcgcatctcaacagcttcaacagttcctaccagcactgagccacctagccatggtgaaccctgtcgcctacttgcaaca

SEQ ID NO: 5173 - DNA, 329 bp, Zea mays
  Clone ID: LIB3118-002-Q1-K1-H2
gatcaaccaagtagctctggcaaacctttctccctactctcagcaacaacaatttcttccattcaaccaactgtctacactgaaccctgctgcttatttgcagcaacaactattaccatttagccagctagctactgcctactctcagcaacaacaacttcttccatttaaccaattggccgcactgaaccccgctgcttatttgcagcagcaaatactactaccatttagccagctagctgcagcaaaccgtgcttccttcttgacacagcaacagttgctgcctttctaccagcagtttgcggctaaccccgcaaccctcttacaaa

SEQ ID NO: 5174 - DNA, 448 bp, Zea mays
  Clone ID: LIB3118-002-Q1-K1-H4
tgagcacgcgtccgcccacgcgtccggaggaagttcatccccatttatctggctcatggcatactgcagcatggggcattctaggatctcgaccagagaggagttgtctagctgtttaagctcgctacagagaggggccgaaaagttaggcctaacttgaaggtggacatatgtggagaacatggtggacagccttcatcggatgcttagttagccaatactgagatggattacgtaatcttgctccgctttcaggaaacccgatcgttatgctagctgcagctaatgtgcttgactgaggggctgcctgctagttggcaatctgctgttgtacaaatggagattaataatactactattacagaaccatatgctctgtgaagagtattataatcaaaatctcataaaaagctacagttccatctatttacttagattatgaaaaact

SEQ ID NO: 5175 - DNA, 369 bp, Zea mays
  Clone ID: LIB3118-002-Q1-K1-H7
gccagccgtgcaccatcgatgtcggcaagaacgagctcgtcctcacggagctggagctgctgagcgatgggcccaacgtatgcaacctgcatccaccgctgctggttcaacaagaccattctggaggccaaggccatcgacaagaatcgcatcgagtacatctacgatgagctgaaccggatggatcgtgcgctcaaagacttggatgaaatgctatacaacaagaaggaatccatattcaagatgcagcagaagatgcacgctgtacaagctaatgcttagacaaccgtctgtaggatgcaactagtccaaggccattcttcattttataccaattacctccatgacttttactcgcggcgaggaatc

SEQ ID NO: 5176 - DNA, 462 bp, Zea mays
  unsure at all n locations
  Clone ID: LIB3118-002-Q1-K1-H8
ggtgactcccatgatacctttgccaccaccagcactaactgcatcaagtggaacttcatatatcatcccgtcaatttccgtgccgacgaatcaaccgcggaatgtaactgttgtcgttgaaaacccaatgacagtagatgacaagggaaaattggtgagcaatgttgtagtaggggttacgagcggcgggaaaaagtgacggcatatcacaacccgtatagctttgtccaaactatctaaaaagggtttaagaatacataccttgtatcatactgctgtttggcgatcggctgctcgacggaggaatccccctccctggagagcgtagtggcaaggcagcgctgctttcgccactgcgatcgtgctagaacgagccanaaaaaaaacgaagtgcgggtgtgcatactcagagtatatctgtagcttgttacccctngattctttgtatgtaatatgggctct

SEQ ID NO: 5177 - DNA, 90 bp, Zea mays
  Clone ID: LIB3118-003-Q1-K1-A10
cagacacattagcggactccaggtggcgatatattcgtctcgtacaatactaataaataggggctgacgatctagaacacacacgcttac

SEQ ID NO: 5178 - DNA, 100 bp, Zea mays
  unsure at all n locations
  Clone ID: LIB3118-003-Q1-K1-A11
gccacacatnaggtcgacccaaggggccaggatgcacgctcatggccgaggacaagtacaacagggcgtggcgatctataaggcacacactaactacaac

SEQ ID NO: 5179 - DNA, 320 bp, Zea mays
  Clone ID: LIB3118-003-Q1-K1-A12
cccacgcgtccgatcgacgccaacggcatcctgaacgtgtctgccgaggacaagacaacggggcagaagaacaagatcacaatcaccaacgacaagggccgtctctccaaggaggagatcgagaagatggttcaggacgctgagaagtacaagtctgaggatgaggagcacaagaagaaggtggaggccaagaactcgctggagaactactcctacaacatgcgcaacacgatcaaggacgagaagattgcgtccaagctgccggccgatgacaagaagaagatcgaggacgccatcgacgcggccatcagctggctgga

SEQ ID NO: 5180 - DNA, 209 bp, Zea mays
  Clone ID: LIB3118-003-Q1-K1-A3
ccacttcttaccttaatctcgcgagaagcgaaaccggaggaggagggtgcgaggggatcgcgagcagccgaacccgaacccgaagccggaggcctagtagatgaagacgttcgatccgtggccggtcttcttccgccgggagtggaagcgcaattggcccttcttaacggggttcgccattacgggtttaatcataattaaaatgacgg

SEQ ID NO: 5181 - DNA, 436 bp, Zea mays
  Clone ID: LIB3118-003-Q1-K1-A4
cagatgcttacggtatttacgctagaagctatttctgtatgagatggtgtcacgacaattatacctcaacgatcactagctcatgtagcatgccttcttcaacaataccttcgatccgtggtaggtgcactatgagcaaaagaagatgctcaatcgtataagcctcaagacgcacgccgtctacggattaaacctttataacgatggtggtatgagcaacgacgaggactatatgaactgcaagtatttggacgaacgcacgaggctcagaagctgcagccactgctgctatcggcgatcaagacagacgctttagctaagctgcttccatgctgtcagcgacaactatttgttatatgcatccgactggccacagcgaaatctgttgttgatttggaggcaccagtattgccttctacactgctagctactgact

SEQ ID NO: 5182 - DNA, 74 bp, Zea mays
  Clone ID: LIB3118-003-Q1-K1-A5
aagatattttccctccttatgctccttgctctttctgcatgtgttgctaacacgacgaattttcctcaatgctc

SEQ ID NO: 5183 - DNA, 382 bp, Zea mays
  Clone ID: LIB3118-003-Q1-K1-A6
cggacgcgtgggccgccgtcgcccagcgcctcggcgtgtacaccggccgggactacgcggacatcgtcgagttccttgtcaagcggtggaagctggagacactggagagcgggctctccggcgagggccgcagggccagggacttcttctgcgggctcgcgccgaggatgcgccgggccgccgagcgcgccgaggacagggccaagaaggacgagcccaggatggtcaagatcagctggatctttgatagggaagccgatgtttaggcacttgttgctgactgtgatatgtgctcagatcatgtcgctagctgtcagtgtttttgtcacaatgtgtttatgtgtacgaaatgctgcaagagcgctactgtcctgctattatc

SEQ ID NO: 5184 - DNA, 367 bp, Zea mays
  Clone ID: LIB3118-003-Q1-K1-A7
cagacgcgtgtgctgactattggcagcgagtggtcttatacaccagccagcactacactgacatctctgagctccttgaccagcgtcggtagctgtagacactggaaagctgcctctctgattagttccgcatggccagacacttatcatgtagcctcttgcctagaatacgccgtgccgcctagcgcgcaaaggacaggaccatgaatgactagcacaggatggtcactatcagctggatcttctataggacagacgatgtgtaggcacttgttgctgactgtgatacgtactcagatcatgccgatagctgtcacagtttttgttacaaagtgtctatgagtgcgaaatgctggaagagcgctac

SEQ ID NO: 5185 - DNA, 326 bp, Zea mays
  Clone ID: LIB3118-003-Q1-K1-A8
cccacgcgtccgctgacgcttgggcgcgagcggtattatacttcatccagctcgatgctgacatctatgagctgctagaccgtcgtcgatagcagtaaacagtgcaaaggattctctttgataatttgctgaggcacagactcttatactgtagccatttagctggatacacaccgtgctacctatctaacacagcacaatgctcagacttactagacaaaaatagggactagcatatgaatctttgaaagaatagaagatgtgtaggcacttgttgaacttgcttatacagactcaagataagtctatagattacacataatttg

SEQ ID NO: 5186 - DNA, 140 bp, Zea mays
  Clone ID: LIB3118-003-Q1-K1-A9
cccacgcgtacgctgactcttggtcgcgagatttattactcttcaaacaccactataaagggatcgaggatctaacatgctatcacctcaagcatcctacttttatacccttacttcctgctaatttcctcatgcctatt

SEQ ID NO: 5187 - DNA, 339 bp, Zea mays
  Clone ID: LIB3118-003-Q1-K1-B1
ggcagcattgaactctgctgcttattcacaacagcagcagcttccaccattcagccagctaggtgatgtgagccctgttgccttcttgacacaacaacagttgttgccgatctacctgcacgctgcgcctaacgctggcacccttttacaactgcaacaattgctgccattcaaccaacttgctttgacaaacccatcatcgttctaccaacaacccatcattgggggagccctcttttagatttcttatgagttatcgttcaataataaagattcttgtctgatgtttgtggcttcccagaaataaaaaagtacatttctcttaaaaaatttagcttt

SEQ ID NO: 5188 - DNA, 239 bp, Zea mays
  Clone ID: LIB3118-003-Q1-K1-B11
gtcatatataatgataccccaatggctcttatactccttacctacaataataaaacaacagggcgggcgatttatattatacacacttaccatcacgatcctacccatgtacatacactttatcttgtcaggtactttatattaaatggacatatttttgcaacgtcaaataatgaaaaaacatgccattacctaactttaattattattaacacatacacatgttttcatttattgta

SEQ ID NO: 5189 - DNA, 193 bp, Zea mays
  Clone ID: LIB3118-003-Q1-K1-B12
ctaatcgtgagctgaccccttttttttttttttttatcacataaaagaataacactagcgggtaggtgcacttacacagtccaaacttcctctacaactcatcattctgtaataacatcggatgtaacatggcaccactttcaaagtcaaaaatattgaaatgtcactcaagcgatagcttaaagaatgtata

SEQ ID NO: 5190 - DNA, 425 bp, Zea mays
  Clone ID: LIB3118-003-Q1-K1-B2
cggacgcgtgggctccatcactgatgccggggatcactacgttctgagatccaatagtgggagcgaatacgagtgtatggtgacggtggtggcaaccccactcgacgagctgaacattacgtttagccctccaatctccattccgccgaggaagatgcagcacacacatgcgacctttgtgagaggcatattgaacccgggatattttggtctgaactcggcatcagatattccagagctgattggtaccctagagctccctgatatccctttctcctgcatctctgttctgaagaggtacagcgaaagcgacatggcggcgtacaagatgttttcacgggcaaagctggatgatggtttggtggatcagatcttcagggctcggatagagacgatccggatcaactgggcttgttacccgcact

SEQ ID NO: 5191 - DNA, 389 bp, Zea mays
  Clone ID: LIB3118-003-Q1-K1-B3
caattctaaatggtggtcagaacggaagtgccatgtctgcgcttggctctgaactagagaatgctgcagcagccatggacaatggccacgagccatcaggtagtggtgtttagccattgggtaaagccaccagcatcatcgcgcaatgatctttgtagtaggcggtcagttggagcctgcttagagatggaatcacgtgcctgtacgttttaagagctgccacaatgatttgtcccacgtaaataagtttgcagacggtgcggctatagcaagcttgtttctcgtcttgagtcaggactgttaagaactgaagaagttcattacttacttgcgtgtagatatacttagatatgagatgttctagccatgcagcaaccctttctattaat

SEQ ID NO: 5192 - DNA, 230 bp, Zea mays
  Clone ID: LIB3118-003-Q1-K1-B4
cacacgtatacgatatttaaatgggaagcgacttatgtatgctagggtctcaattggaaaatgccgcagctgccattgactattgctactagccatcatcgcccttaccttagacattggttaaacgcagcagcatgataggcgcatgctcattctggtaggctggaactcgaaccctgactagagctactatcacattcatgaactatgtaagagctcccacaatcatt

SEQ ID NO: 5193 - DNA, 184 bp, Zea mays
  Clone ID: LIB3118-003-Q1-K1-B5
cagacgcgttcgctccttatgcgccgagctttttctgcatgttttgctgactcgaggctgtcgcctcagagttcacaggctaatgctgctaccttgcttcccttaaacgttacgtccatgcttacttcatcatgtctaaacacagatattgatgcctactggctggaagacgccctgtttatat

SEQ ID NO: 5194 - DNA, 439 bp, Zea mays
  unsure at all n locations
  Clone ID: LIB3118-003-Q1-K1-B6
acgacgcgtccgcggggctccgggcctgcatgaaggccgacgtgcgcgcgctcttggacctcgccgacgacgccaagcgccggaacgccgacatcatttccggcagcagctacgtcacgccctgctccgccaacccgatatacgaggccttcgggctcctcgacgacgccgcgcccgtcgacgtagacgcattctgcgcgcgcctagacgcgccgaccaaagtcagggagaccgtcaagacctacgcggagaagatgcacgacgtgatcgtctgcgtctgcggcgagcaggccaccagccagtggctgggcctggaggagcactcgttccaggactggccgagccagttccgcatcaacaggtacaactacacgcatgagacggtgggctgctncggcgtgcagacccacacagactagggctttctcaccaggctcag

SEQ ID NO: 5195 - DNA, 423 bp, Zea mays
  Clone ID: LIB3118-003-Q1-K1-B7
cacagacgtctgctgcttatttgcagcaacaactattaccattcagccagctagctactgcctactctcagcaacaacaacttcttccatttaaccaattggccgcactgaacctcgctgcttatttgcagcagcaaatactactaccatttagccagctagctgcagcaaaccgtgcttccttcttgacacagcaacagttgctgcctttctaccaacagtttgcggctaaccccgcaaccctcttacaactacaacaattgttgccctttgtccaacttgctttgacagacccagcggactcctaccaacaacacatcattggtggtgccctcttttagattgcttattagttgtaattcactaataaacgtttttggatgatgtatgtggccaaccataaataagaagttacatttccag

SEQ ID NO: 5196 - DNA, 169 bp, Zea mays
  Clone ID: LIB3118-003-Q1-K1-B8
gataccctttgggatggcattatacctgcaaaggagcatgccaaatttttgatccatacgacaaacatgtacagatttattgaccagggaagcactctaaagggcaaggaattcaacttgacaatgcactggcacattatgccaaacactggcaaaatgtttgcagata

SEQ ID NO: 5197 - DNA, 239 bp, Zea mays
  Clone ID: LIB3118-003-Q1-K1-B9
cggacgcgtgggcgcgagcggccgcccgcgatctataactagtcaaacccaattcttcaagcctacaggatccaacatgcaattgcatcaggcatcttacctttatcacccttgttcctccaacaatcatcagccctattacagcagttacctttggtgcatttattggcacaaaacatcagggcacaacaactcgtgctagcaaaccttgctgcctactctcagcaacaacagttacc

SEQ ID NO: 5198 - DNA, 418 bp, Zea mays
  Clone ID: LIB3118-003-Q1-K1-C10
catcttttagattacatatgagatgtactcgataatggtgccctcataccgacgtgtgttggctagaaataatcaatatattgattgagatttatctcgataaaaaaaaaaaaaaaaaaaaaaaaataaaaaaaaaaaaaaaaaaaaaaacaaaaaaaaaaccaaaaaaaaatcagaaaaaaccgaaaaaaaaaaaacaaaataaaaagggggcccttttaaaagaaccaaacttacctgccgcgtccttccaagccaaaacctttcttatggtggaacctaaatacaatcaatggccggcggttaaaaaagctgggagtgggaaaaccccgcccttccccaaaataaacggctttgaaaaaaacccccttttcccaacatgtgtaaaaccaaaaaggcccccacccaacccccttcc

SEQ ID NO: 5199 - DNA, 241 bp, Zea mays
  Clone ID: LIB3118-003-Q1-K1-C11
catactcgtgagcacacatctgatactctctataatagcacccaaacaccgacctctacggggtagatgtaataactctcttgaatgcaacttatcttcccaaaaataaaaactaacaaattagtttccatcttctaagcttcatagacaaaataatggaaattttattacacggattgctcaaaaaatgaataccctctattttatgtgccaatactacattatctaacttaactacccc

SEQ ID NO: 5200 - DNA, 289 bp, Zea mays
  Clone ID: LIB3118-003-Q1-K1-C12
ctagatcgcgagcggaccccttttttttttttttttagcacataaacgattaacgctagcgggtacgtccatttacacagtccacaactgctctagaactcatcattatgtagtagcagtggatgtaacaaggtacaatattcagagtcagaaatatgggaatgtcgtcctggcgatagcttaaagaatgtatacaaatcttttgtgagcgaataccccattgtttcgattgaagatccttttgaccaggatgactgggttcactatgctaagatgactgaagaaattg

SEQ ID NO: 5201 - DNA, 301 bp, Zea mays
  Clone ID: LIB3118-003-Q1-K1-C2
gacacgaatacgaaatctaactggccctcgacttaggaagcctaaacccttcatggcgacggaccgtgggtgcctggcaatactgctccacggggcacgcaccctatgcgacgacccttcttgtgcggcgctagactgcgggcgcggcccgctgctggacgggtggaacccgaaccctgacgcgagcgagttgcacatacaggatctaggccggcgggcgctggggcaagccaaacaccaaaagctggccgccgaacggctgaggtttcgccacctgttgcgcggctagcagcacgtcgtg

SEQ ID NO: 5202 - DNA, 362 bp, Zea mays
  Clone ID: LIB3118-003-Q1-K1-C3
gtcacgtctcccagatctaactgccccccgactcacgaatcccaaagcctccatggcgacgcaccgccactgcctcccactcctcctcctcgtggccgccgccctcgccgccgtccctgctcgcgcggcgctgggcggcgggcgcggcccgctgctgggcgggtggaacccgatccctgacgtgagcgactcgcacatccaggagctaggcgggtgggcgctggggcaggcgaagcaccagaagctggccgccgacgggctgcggttccgccgcgtggtgcgcggcgagcagcaagtcgtgtccgggatgaactaaccgctctacgttgacgccgccgaccccgccggtcggaccgggccct

SEQ ID NO: 5203 - DNA, 242 bp, Zea mays
  Clone ID: LIB3118-003-Q1-K1-C4
cgcacgcgtacgagaactaactggcgcgcgactgatgaatcccaaaatctccatggcgacgcaccgcgggtggctctcactcctgctgcttgcgggcgtcagcctatgccagacggccctgctcgcacggcgcttacgcggcgggcgcggcccgatgctgggcgggtggaacacgatccctgacgtgagcgagtcgcacatacagaagctaggggggtgggctcagagacatgccaagcacc

SEQ ID NO: 5204 - DNA, 423 bp, Zea mays
  Clone ID: LIB3118-003-Q1-K1-C5
cggagacgttgaatcggtcgaggacgagcaggccctgcctgcaaggaagcctgtaggtcgtgggtagagactgctcactgtaaggctgcagtctggcatgctatgaaagttttggacaactcacaaatgttgtactctgccggcagttatagatgaggacttactgaggggcaccccctttatattctggtataaaaagggaacttagcgaggcgaaatcacttttgatattccttttttacaggccaaactttctctggtttagcactcttcatattccgctcttacatcgcaagttataacgctaaagaagcattgtttctttttgtgtcgacttaataaggctgtgcctatgcgctggtgctctttgtagtcagaatattatgttgagaaatgcagacaattaattgtaggattgcattt

SEQ ID NO: 5205 - DNA, 57 bp, Zea mays
  Clone ID: LIB3118-003-Q1-K1-C6
cgcacgcgttcgatcactcgttggcgagcgttgaatgattgctaggatcccaatggg

SEQ ID NO: 5206 - DNA, 125 bp, Zea mays
  Clone ID: LIB3118-003-Q1-K1-C7
agacgcgtgtgctgactcttgggagcgcgttttattatatttcaagcatcacggggcggggatctatgatctcattcactatctttggtagcagcagtcgcctaaacgtatcctccttgctgatt

SEQ ID NO: 5207 - DNA, 340 bp, Zea mays
  Clone ID: LIB3118-003-Q1-K1-C8
cggacgcgtgcgcacacactttgtatcaccaagtaatacattgacaggatcacaagtgggggatcaatgatctaccccactagcacctggaagacccaactgatcttcactaacttcgtaatgctatcctagcgcgctgttgcaacatctagcaccgatactttgtatgccccgtgtgatgccatgcaccaaaaccagatctctttctgctgctgaaacaaaaaccgacgtacatgagtgttctgaccatacctgccgctgtccattctctagaataacatgcgtctggagctggaagtcaaccttgcatacttcctttgtatggagctaagcattctga

SEQ ID NO: 5208 - DNA, 426 bp, Zea mays
  Clone ID: LIB3118-003-Q1-K1-C9
cggacgcgtgggcggacgcgtgggtgcaccaagaaatccatcgagaggccgtcgacaggggaattaatggcgtcgtcgtctagcagcagccaccgccgcctcatcctcgcagccgccgtcctgctctccgtgctcgcggctgccagcgccagcgccgggacctcctgcgtgccggggtgggccatcccgcacaacccgctcccgagctgccgctggtacgtgaccagccggacctgcggcatcgggccgcgcctcccgtggccggagctgaagaggagatgctgccgggagctggcggacatcccggcgtactgccggtgcacggggctgagcttcctaatggacgggccgaccccgccggccccgaccccccacttgaagggccgcttaaagaacctgccggcctgcccccggaagggccaaagg

SEQ ID NO: 5209 - DNA, 214 bp, Zea mays
  Clone ID: LIB3118-003-Q1-K1-D1
atcaattccagactatttccacatatctccagagtggcagaatgttgttttaggacttttggcgccgggccaattgccaagatcaccattcctgagataaggaaccatccatggtgtctgtataacctgccaggtgacctaatggatgtacagtacgatgtgcaagacagtccatgagcctgatcaaccgattcaaatcatggatgagattatg

SEQ ID NO: 5210 - DNA, 258 bp, Zea mays
  Clone ID: LIB3118-003-Q1-K1-D10
cttactcgtattcaaacaacttgcagcattgaactcttccgcctatgtacaacagctacggcggctaccattcagccagcttgctgctgtgagccctgctgtcttcttgacacagcaacaatggttgtcagtctacctgcactcagcgcctaacatttgcacccttttacaactgctacaattgctgacaattaaccaacttgctttgaccaatccatcatcgttctacctacaacccataattggtagggccctctt

SEQ ID NO: 5211 - DNA, 243 bp, Zea mays
  Clone ID: LIB3118-003-Q1-K1-D11
ctcaatcgtgagcggaccccttcttttgtttttttgatcccataaacaattaacgctaggatttatgcccatttacccagttcataactgctttacaactcattattatttccaatcaaagtgttttacatggttccatatacacattcataaatatgggaatgtcatactagcgatagcttaaaaaatgtataccaatcttttgttagcgaataccccaaagttttgactgaagatcctttt

SEQ ID NO: 5212 - DNA, 282 bp, Zea mays
  Clone ID: LIB3118-003-Q1-K1-D12
ctagatcgcgagcggaccccttttttttttttttttagcacataaacgattaacgctagcagctacctccatttacacagtccacaactgctctagaactcatcattatttcatatcggtggatgtaacaaggtacaatattcacagtcagaaatatgggaatgtcatcctggcgatagcttaaagaatgtatacaaatcttttgtgagcgaataccccaatgtttcgattgaagatccttttaaccagtgatgactgggttcactatgctaagatgactga

SEQ ID NO: 5213 - DNA, 442 bp, Zea mays
  Clone ID: LIB3118-003-Q1-K1-D3
gacacgcgtacgagatctaactggcccccgacttacgaatcccaaagcctccatggcgacggaccggcactgcctttcactcctgctcctcgagggcgtcgccctagccgccgtccctgctcgcgcggcgctgggcggcgggcgcggcccgctgctgggcgggtggaacccgaaccctgacgtgagcgactcgcacatacaggagctaggcgcggtgggcgctggggcatgcgaagcaccagaagctggccgccgacgggctgtgggtccgccccctggtgcgcggcgagcagcaggtcgtgtccgggatgaactaccgcctctacttggacgccggcgaccccaccgggcgtaccgggccctacggcgccgatttggacgagcaggttttgacccggaccccgcagcttggcttcttcaacccggtgacccgcgcccactg

SEQ ID NO: 5214 - DNA, 395 bp, Zea mays
  Clone ID: LIB3118-003-Q1-K1-D4
cccacgcgtccgaccacgcgttcgggtgggttggcttatcctcccactccggatcgggttcgggttcgtgaggctctccgtggttcggcttcgtgggtgagcggatcgagatggccgcgtcggatgttgagtaccgctgcttcctcggcggtcttgcctgggccacagacgaccactcccttcacaacgccttcaacacctacggctaggtcctcgagtccaagatcatcctcgatcgggagacgcagaggtcccgcggcttcggcttcgtcaccttctccacggaggaggcgatgcggaacgccatcgagggcatgaacggtaaggagctggacggacgcaacatcaccgtcaacgaggcccagtcccgctgcggacgaggaggcggcggccgt

SEQ ID NO: 5215 - DNA, 221 bp, Zea mays
  Clone ID: LIB3118-003-Q1-K1-D5
ggcacgcttctgctaactcaccggttcgggtttgattttttgaggaacttcgatgggcacgtacatggtaaagctctaactagatggcgtcgtaggatgttgcgtaccgatacttcattatcggactctgctgggccacggtcgaacactgattttacaacgcctacagcacataccgtgaggtactagagttcaaaatcatactctatcgtgtgacgcac

SEQ ID NO: 5216 - DNA, 349 bp, Zea mays
  Clone ID: LIB3118-003-Q1-K1-D6
cccacgcgtccgcccacgcgtccgcaacaatcaatcaagtagttgcagcgaaccttgctgcttacctacagcaacaacactttcttgcattcaatcaactagctgaggtgaaccctgctatctacttgcacgcacaacaggtactaccatttaaccaacttgtcgggagcccttatgccttcttactgcaacaacagattatgccatttcatctgcaagctgtggcaaacattgttgctttcttgagacaacaacatttgtagccattctacccacacgtcgtgggaaacattaatgccttcttgcaacagcaacacatgctaccattctacccacagaatgtgggcaa

SEQ ID NO: 5217 - DNA, 248 bp, Zea mays
  Clone ID: LIB3118-003-Q1-K1-D7
cggacgcgtgggacgactcttcggcgcgcgactcttaatagttcatgtctcacggtggtgtgagcgttgatggataacactagttctcatggcatgcaaattttttaacataatctccttgtaaacttgttgtagcaaatattcccaatctgttgttgagttgccagaagcccatatgctttcctagatcatcaaaaaaatatgctattgcatctggaacacgtagctaactacttgtgtaaattgac

SEQ ID NO: 5218 - DNA, 260 bp, Zea mays
  Clone ID: LIB3118-003-Q1-K1-D8
cggacgcgtgggctcaccctttggagcacaaattaatatatttagtgcagcacaggggggagattcatgatctaagcgactagttcgaggggctgctgactgatcatataagtcttcatcttgctgtgctgtcgcgcctgtgccaaccctcttgatgcgactacgtagctgccggcgtggtccttcaatgaaaaaactatctgctgctgtatctgcaacgggtagctacctacatgagtcatttggccgcgcttattgag

SEQ ID NO: 5219 - DNA, 390 bp, Zea mays
  Clone ID: LIB3118-003-Q1-K1-D9
cccacgcgtccgcacaccatgggccttagggatcttaaacaaatggagggcaatctggagggagccataatcaatattagagcttgaaagaatgagctgctatacactgaaattgactatatgcaaaaaagggagatggatctgcagactgacaacatgtacctgaggagcaagatctctgtgagtaatgaaacggggcactccgcgatgcacatgacgatgggagcgccgccgactagcgagtacgaccacatggcccctttcgactcgagaaactttctgcaagtgagcatgcctcagcactacttccatcagctgcaacctacaacccttcagctcggatgatgaaaccagcgctatacctggcggcgcccggccccaaatggatag

SEQ ID NO: 5220 - DNA, 371 bp, Zea mays
  Clone ID: LIB3118-003-Q1-K1-E10
atttcttccattcaaccaactagcagcattgaactctcctgcctatgtacagcagcaacagctactaccattcagccagctagctgctgtgagccctgctgccttcttgacacagcaacaattgttgtcgttctacctgcacgctgcgcctaacgttggcaccctcttacaactgcaacaattgctgccattcaaccaacttgctttgacaaacccagcagcgttctaccaacaacccatcattggtggtgccctcttttagattgcttatgagttatagttcaataataaagcttttttgatgatgtctggggcttcccaaaattaaaaaggacattttctagaaaaaaaaaaaaaaaaagggcggccgt

SEQ ID NO: 5221 - DNA, 176 bp, Zea mays
  Clone ID: LIB3118-003-Q1-K1-E11
cccacgcgtccgcgaagacaagctgctgctgttgtgctccgttagtgttgtataacttaggggaataccagctgcccgagatgatgcacgccttcttgctcaattacatcaccatggcaatttgtgcacatccaatgatcgacggatggatgatggttgtatcttaacacacttga

SEQ ID NO: 5222 - DNA, 325 bp, Zea mays
  Clone ID: LIB3118-003-Q1-K1-E12
cccacgcgtccgttgagcagatggcgagactggtggttaccataacaattccaggggagaaaagaagcaagcaatgcagcatgattactggcaagcaggcgggtgtacatgcaaattgatgtggatttgatcagctcaataaacacctgaggctgggtggtaagtacagccagttttgccattaggagtagctagcattaagcaaaaccagcaaattttagatttttggcaatgtgggtgtcccagggctgtagatgttgctccctcccttgtaattacacagtactgttgcttttacactggaatatacattggcattgctttc

SEQ ID NO: 5223 - DNA, 391 bp, Zea mays
  Clone ID: LIB3118-003-Q1-K1-E2
caagggcggggagggcgccatctacctctgggcaaagctaccggacagctgctcggacgacttcgaggctgtcaggtggctcgcgaacaagcacggcgtcgccgtgatccccgggagcgccagcggaggacccgggtacatccgcgtctccttcggagggctcaaggaagaggacaccaggctggctgctgagaggctcaggcgcggcctgcaggagctggtgaccgatggaatggtaaagtgacggctccatgggtgtaagtaaaagctccagttttccaacggtgtaattccgccgtgattaattcgggagaagaaaaggaacttgttttcaagaatgcactgcgttgctcggacgagagacgggacggaataaaatgcgtctggtctg

SEQ ID NO: 5224 - DNA, 281 bp, Zea mays
  Clone ID: LIB3118-003-Q1-K1-E3
tcgcacaggcgtggggggagccaattgactattgggcaaagttgccgaaaaattctttgacaacctaccaggctgtaaaatggtcttccaacaagcacggggtgcccttcatccccggaagttctagcggaggacccgggtacattcccgtctcctttggagggctcaaggaaacaaacaccaccctggctgctgtaaagctcaagcgcggtctgcatgagctcgtgaccgatgcaatggtaaagtgaccgttccatgggtgtaagtaaaatctccatttt

SEQ ID NO: 5225 - DNA, 399 bp, Zea mays
  Clone ID: LIB3118-003-Q1-K1-E4
ctcacgcgtagcacatctaacatgtggcggcagacaaagatttgtgagggcgatccgcgctgagaagagatggctatgatcgccgcggcggcaggggcggccctttgcttcctggccctggtggccgaggccgactggcaaggccaggtcgatcggcagaggctgagggaccagcactgctgtcaggaggtccaggagagcgcgctcgacgcgtgccgccaggtcctagaccgtcagctaaccgccggcggctgcggcggcggcgttggtccgtttctgtggcggaccggactccgcatgcggtgcttccagcaactacaggacgtgagccgctagagccgcttgcgccgcatcccgagcatgcacagcggctacgaagaggccatgccggcgctggag

SEQ ID NO: 5226 - DNA, 242 bp, Zea mays
  Clone ID: LIB3118-003-Q1-K1-E5
aaagcgcgttggctcttttgacgggacaaagattctttctcctcgaccatatatgggtgcctggacgataaaactaacagttttgtggatccatgaagttcgctaaacaaaagtacagtgatgtccagagctatcacgcgttctcagataccgttagcctggttgagatcccatccatgatgtgagttagttgagaaaaaatgtgttgtgtagggactgaccaacttatctcgataaataaa

SEQ ID NO: 5227 - DNA, 408 bp, Zea mays
  Clone ID: LIB3118-003-Q1-K1-E6
cggacgcgtgggcagcagctgcagcaactcgtgctacctgtgatcaaccaagtagctctggcaaacctttctccctactctcagcaacaacaatttcttccattcaaccaactgtctacactgaaccctgctgcttatttgcagcaacaactattaccattcagccagctcgctactgcctactctcagcaacaacaacttcttccatttaaccaattggccgcactgaaccccgctgcttatttgcagcagcaaatactactaccatttagccagctagctgcagcaaaccgtgcttccttcttgacacagcaacagttgctgcctttctaccaacagcttgcggctaaccccgcaaccctcttacaactacaacaattgttgccctttgccaacttgctttgacag

SEQ ID NO: 5228 - DNA, 122 bp, Zea mays
  Clone ID: LIB3118-003-Q1-K1-E8
cgcacgcgtgcgccaaccctttggcgaacacttaaattcatctacagccccactggcgagggatatactattaatcacactatctctccgcgcagccgcttcctaatctaaccctccttatt

SEQ ID NO: 5229 - DNA, 260 bp, Zea mays
  Clone ID: LIB3118-003-Q1-K1-E9
ctcacgcgtaggacaacacataggagtacagggaaatatatttacaaggctcatgcccgcggaaaagatatgactaacactggctcggcggccaaaaactctcttatcttcccatccattgtggtcttcgctaatgttcaagtcaaggcctatctaaagacgctgtaagtcacgcagtgctttgagaatgttcaacatagacccttctacccgtgcagccagtgatctatacaatttactaaactggtctgccttgggtg

SEQ ID NO: 5230 - DNA, 276 bp, Zea mays
  Clone ID: LIB3118-003-Q1-K1-F1
cggacgcgtgggcggacccatgtggtcgcggcgtacccggcgctcatggtcgactacctacggcagggcgtgcacaccggtggcgcggcgcgcacgggcgcggtggccggcctgacggtgctgctgtcgatggggaactttaccgggctgagcgtcagggggtggggagccgaggagctgggtgctcggtgcctggcgcacgccgtgctcatgacggctatggcggagccccatgtgcgcccgcggtggcggacggtgacggaggagggctatttt

SEQ ID NO: 5231 - DNA, 266 bp, Zea mays
  Clone ID: LIB3118-003-Q1-K1-F10
ctactttgagaaacagcattccccggaacaggagaattccttagcttctctatagacgaatggttgttttgcaggcattcttcatgtatgatcaaaaactgttcagcaacctcctcaatactattatcctcaaagtaggcattaaaagattcagaaattttgtcatacatcatatcgaccaagtcttcgaaataatatggacccttagtgcggcagaaccagaataggatggactcgcccaactggtcggccttggcgcgggagtc

SEQ ID NO: 5232 - DNA, 194 bp, Zea mays
  Clone ID: LIB3118-003-Q1-K1-F11
gtgttgtcttatacatacccctccggttcctgttcagtttcttaaggttcttctagactcggagtcgtttttcagccgatctaaatttcgaccaaaaatctttaatacccctgcttcatactatgactctcctggtccactgacaaccactccctacacaacgccttcatcacctacagcgaggtcctcaaata

SEQ ID NO: 5233 - DNA, 348 bp, Zea mays
  Clone ID: LIB3118-003-Q1-K1-F2
cggacgcgtgggcggacgcgtggggtcgcggcgtacccggcgctcatcgccgactacctcggccaggccgtgcccaccggcggcgcggcgcgcacgggcgcggtggccggcctgacggtgctgctgtcgctggtgaacttcaccgggctgagcgtcgtcgggtggggcgccgtggcgctggggctcgtgtccctcgcgccgtccgtgctcatgacggggatggcggtgccccaggtgcgcccgcggcggtggacggtgacggtggagggcggcatcatggactggcggcttttcatgaacacggtatgttggaacctcaactactggtacagcgccagcaccatggtc

SEQ ID NO: 5234 - DNA, 441 bp, Zea mays
  Clone ID: LIB3118-003-Q1-K1-F3
cccacgcgtccgcagagtcaattgagaaatgggaaaagtggaaacagaaccactgccaaccaaacttctggaaaaatgttgatcctgtcggtaagtgtggtccataccatcctatcaatttagcctcagttgaagttgagggttctgtaaagaatgaggtagtggggagtcaaggtggtctctgccaggggtattttgaaagtgataatttactggagccaataaagtccaatttgaaggttgttaatcgccacaaccatgacacaatttctatggctgtgattgacaagatgggccacatagcagttgggacatcaaccaatggtgctacatttaaaattccaggaagggtgggcgatggaccaataccaggatcttcttcatatggtgatgatgaagttggggcttgtggagcaactggtgatggtgatattatgatgc

SEQ ID NO: 5235 - DNA, 314 bp, Zea mays
  Clone ID: LIB3118-003-Q1-K1-F4
cccacgcgttcgcagagtcaattgagaaatgggaaaagtggaaacagaaccactgccaaccaaacttgtggaaaaatgttgatcctggcggtaagtgtggtccataccatcctatcaatttatccttatttgaagttgagggttctgtaatgaatgaggtagtggggagtcaaggtggtctttgctagggttattttgaaagtgataatttactggagccaataaagtacaatttgaaggttgttaatttccacaaccatgacacaatttctatggctgtgattgacaagattggccacatagcactttggaca

SEQ ID NO: 5236 - DNA, 441 bp, Zea mays
  Clone ID: LIB3118-003-Q1-K1-F5
cttccaccgcgtactccctccctccctcgtctcgtcttcgtctccaggtttcgcgggggccaaggtttctgccggagcagtcgcggtctgcgctgcggcacggcgacgaggtggggatggagtaccgcgacaagctcgtgctggcgcccatggtccgcgtgggcaccttgccatttaggctactggctgctgaatatggtgctgatattacttatggagaagaaattattgatcacaaattcttgaagtgtgagcgtgttacaaatgaatctcttgggactactgattttgtggagaaagggactgacagtgtagttttccgtacatgcccacaagaaaggggcagggttgtattccaaatgggcacatcaaatgctgtgagggcacttaaagctgctcagatcgtgtgccgtgatgtttctgctatagatatcaacatgg

SEQ ID NO: 5237 - DNA, 412 bp, Zea mays
  Clone ID: LIB3118-003-Q1-K1-F6
cggacgcgtgggtgcgacttttgcagcaatagaggaaggtattgctccaggaggcggtgcagcatatgttcatctatcgacattcgtaccggctatcaaggagacgttggatgatcctgaggagcgcctacgtgctgatatcattcagaaggctttggtggcacctgcagcgctgatagcccataatgctggggtggaaggtgaggtgattgtggataaaatccgggaaagcgagtgggagttcggttacaacgccatggcggacaagcacgagaacctggtggaggctggtgtgatcgaccctgccaaagtgactaggtgcgccctgcagaacgctgcctccgtggctggaatggtgctgactacccaagcaatcggtgtggagaagcccaagaaggctccagcagcagct

SEQ ID NO: 5238 - DNA, 232 bp, Zea mays
  unsure at all n locations
  Clone ID: LIB3118-003-Q1-K1-F7
cccacgcgttcgnccacgcgttcgtccacgcgttcggtcttgaaaagatatgctgaggaacaacgttgagccttcaccacatgatgaagagtggacaaattctgaggcaattggaaagttcctggcggcttttggggaatctccaaaagcattttcagcacatagaaggccaacatctcatttgtttttgcataaggggctatgtatccatcaggctttaaaaaatgaaaat

SEQ ID NO: 5239 - DNA, 220 bp, Zea mays
  Clone ID: LIB3118-003-Q1-K1-F9
ctcacgcgtccgccaacacatccgagaacagggaaatttattaactgtactactgccaacgggacttctttcaagcatactatctttttgatcaaaaactgccaaaccatcctatcaatactagttttctcatagtagacattcaaagactcaaaaatgttgtcataaatcacatcgaccaatgctaaggaaaaatataaacccttcattctctggaacc

SEQ ID NO: 5240 - DNA, 375 bp, Zea mays
  Clone ID: LIB3118-003-Q1-K1-G1
aattgttgcaacagattgtaccagctctgactcagctagttgtggcaaaccctgctgcctacttgcaacagctgcttccattcaaccaactgactatgtcgaactctgctgcgtacctacaacagcgacaacagttacttaatccactagcagtggctaacccattggtcgctgccttcctacagcagcaacaattgctgccatacaaccagttctctttgataaaccctgtcttgtcgaggcagcaacccatcgttggaggtgccatcttttagattacatatgagatgtactcgataatggtgccctcattccggcatgtgtttcctagaaataatcaatatattgattgagatttatctcaatatatttctg

SEQ ID NO: 5241 - DNA, 278 bp, Zea mays
  Clone ID: LIB3118-003-Q1-K1-G11
ggcgacgacgcgtccgacacagcttactcaactccaacaaatgcgtttcattttcactgctgataacattcaaacagtgctggttaccatcattaatgaacattcttcaaaaaaacttcttctccctaaccttttgcagtatcctaaactagcgcgccacacacctcctttaaatcttaatatatcacacatatccaggattgttattctaaacgacctttaatccctagaaattaaaagtggttgcacttataattcctaaaacaaatataatcaaa

SEQ ID NO: 5242 - DNA, 398 bp, Zea mays
  Clone ID: LIB3118-003-Q1-K1-G12
cacacagcttactcagctccaagaaatgggtttcattgacactgcggagaacattcaagcactgctcgctaccgctgggaatgtacatgctgcggtggagcgtcttctcgggaaccttgggcagtagctaaaacgagcgagccacacaccgccagtaaatcttaaaatgtcgcgcatctgcaggagtgttcggcttaacgttcttcaagcccttgaatttgaagggggtggcgttcataatcccgaaaacaaaataatcaaaaagtcaagcagccattaactttttttatacattggggtcatgtctttgttttacagtggtggatttgcaattttgaatggggtacatacattatgggcggatattaacctaataaaaggatgaagttttgtggttg

SEQ ID NO: 5243 - DNA, 457 bp, Zea mays
  unsure at all n locations
  Clone ID: LIB3118-003-Q1-K1-G3
agcttcagtatgtgaaaacccagctcttcagccctataggctccaacaagcaatcgcagcaagcaacatacctttatcacccttgttgtttcaacaatcgccagccctatctttggtgcagtcattggtacaaaccatcagggcacagcagctgcagcaactcgtgctacctgtgatcaaccaagtagctctggcaaacctttctccctactctcagcaacaacaatttcttccattcaaccaactgtctacactgaacccctcttcttattttgcagcaacaaactattaaccatncaagccaagttagctactggcctacttttaaggaaacaacaaactttctttccattttaaccatattggccgcacctgaaccccgctgtttatttgcagcagcaaatactactaccatttagccagctagctgcagcaaaccgtgcttccttcttgacac

SEQ ID NO: 5244 - DNA, 444 bp, Zea mays
  Clone ID: LIB3118-003-Q1-K1-G4
agcacgcgtatgtgaaaacacaggtgtacaggcctataggctccaacaagcaatggcaacgagcaacatacctttatcacccttgttcggtcaacaatcgtccgccctatctttgcagcagccattggtacaaaccatcagggctcagcatctagaccaactatggctaccacggagcaaccaactaggtgtcacaaacaagcatccctactctgcagaacaacaatttcttatcattcaaacaactgtctacactgaactctgctgcttatttgcaggaacaactattaccattcacccagctagctactggctactctcagcagcagcaacttcttacatttaaccaattggccgcactgaacaccgctgcttatttgcagcaccaaatactactaccatatagccagctagctgcagtagaccgtgctttcttcttgacac

SEQ ID NO: 5245 - DNA, 256 bp, Zea mays
  Clone ID: LIB3118-003-Q1-K1-G5
cgggcgacccagcgttcgccaccgtacgaccatcttttgtgacacgtggttgcaagactacccctcgggacaggcttataaatttaccacatcctcagtttagaatcctcaccgttccaaacaagatcaataaataatggtcggtctaacatcaaaactgttatcgcaaaacggtctgttgctagtgatacgaaagaacatcttacgtgagaacactgagcacgatgtgctaccgttctcgccctgaactcacttc

SEQ ID NO: 5246 - DNA, 237 bp, Zea mays
  Clone ID: LIB3118-003-Q1-K1-G7
cccactcgtacgagcacatttcgcagcaactgaatgctatgtgcggcctgcattaggcgactgcatgccattactctgctgccggcggtgtacaccaccgcacaaactatgggcatgattatagccgttgactagctagcttgtctagtaaaagaacggcgaagattgagtaataatgtgtcacgcatcaccatgggtggcagtgttagtgtgagcaatgacctctttgatcaattg

SEQ ID NO: 5247 - DNA, 261 bp, Zea mays
  Clone ID: LIB3118-003-Q1-K1-G9
cccacgcgtccgcctacacatacctcgaccccaccatcgagcttatctcctcccgtctaggggacgactaccacgaagcagctggtggagcataaaagccgccgatccatatcatacgaacgagttgtccactaatactccggctcatgccgtagatccctacgtacgccgtccgacagacatggtccggttctcctagcagtcgtacgtactctgatggcgctggcgcccgcgcctgcgcgcgcccgtccaccctggggc

SEQ ID NO: 5248 - DNA, 135 bp, Zea mays
  Clone ID: LIB3118-003-Q1-K1-H12
cacaatgattgcacaagcctgaaagaagaggagaggtgtttatataagcactgaattgggaggctgggatgaagtaatattggctgtatgcgtttgaagtgtgagaactgatatatatctgaagcttaacacact

SEQ ID NO: 5249 - DNA, 303 bp, Zea mays
  unsure at all n locations
  Clone ID: LIB3118-003-Q1-K1-H2
aggttttcctgtgtctgcaattttaatctggccttttgaataaaatgtttcctctaacaagtgaagggcactgtttttattgtctcgtgggccacaaattcctgctgaacaatttatgttcatttcttcttttcttaaagaagcatgcactaagaacatgaaagatgcatgccatggaaaggttttgaaaggcattgaaacgtatgagcttctcctgccngagaaaaaagggaaaaaaagagaaaataaaattccccttttngaaaaaaaaacatataaaaaaaatgaaaagttaatgataat

SEQ ID NO: 5250 - DNA, 185 bp, Zea mays
  Clone ID: LIB3118-003-Q1-K1-H3
cggacgcgtgggatccagaatatcatgtcatgataaacttgaatatagtttcatggttgttatttcagactgaaaataaaatcagtcttctgttccggttatactgatttctgaaagaattctagacctccgttcttgaatatttgttgtctgttttaaaaaaaaaaaaaaccataaaaaagaat

SEQ ID NO: 5251 - DNA, 355 bp, Zea mays
  Clone ID: LIB3118-003-Q1-K1-H4
cgctgtaccccaccacctaggcgccccgcatgtcgctacagtcattaccgtcttccgtgtccgccgtgtcggtccgcacgttccccacggtcaccgtaaccaccaccaccttcactccattcctgacaacgttcggatgcaccgccccgatctcccgcaccccgccgcggggccccaggagcgcgccagggacatcttctgggtcgtcatcgggctcctctttggcgtcgcctgcggagcgctcaccgctgcttacgtgtacctcgactggtccatggtcgactgagctgctgcggtctccgagtacgacgagctctacgacgacaaggacgaggcgtacgacatcgagagcccc

SEQ ID NO: 5252 - DNA, 378 bp, Zea mays
  Clone ID: LIB3118-003-Q1-K1-H6
cccacgcgtgcgcccacgcgtccgcccacgcgtccgttgacaagaaatgcccattcactggaactgtttctatcagaggcagaattattgctgggacatgccacagtgctaagatgaacagaactatcattgttcgcaggaactacctccactttgtaaagaaataccagaggtatgagaagaggcactccaacattcctgctcacatctctccatgcttccgtgtgaaggaaggtgaccatgtcatcattggccagtgcaggcccctgtcaaaaactgtgaggttcaatgtcgttaaagtcattccagctggatccgcagctgctggaaaagaggccttcacagcagcctgagtttatagactatgttccatgagta

SEQ ID NO: 5253 - DNA, 371 bp, Zea mays
  Clone ID: LIB3118-003-Q1-K1-H7
cggacgcgtgggtgcaacttttgcagcaatagaggaaggtattgttccaggaggcggtgcaggatatgttcatctatcgacattcgtaccggctatcaaggagacgttggatgatcctgaggagcgcctaggtgctgatatcattcagaaggctttggtggcacctgcagcgctgatagcccataatgctggcgtggaaggtgacgtgattgcggataaaatccgggaaagcgagggggagttcggttacaacgccatgggggacaagcacgagaacctggtggaggctggtgtgatcgaccctgccaaagtgactaggtgcgccctgcagaacgctgccttcgtggctggaatggtgctgactacccaag

SEQ ID NO: 5254 - DNA, 285 bp, Zea mays
  Clone ID: LIB3118-003-Q1-K1-H8
caggtccagcgcgcaccgcgcggagcgttgctctcctgtgtttcctggtttcctgcgctgcgctcgtggacagccgtggcggagccagccggccgagccggcaggacctcgatgtcggcctcggcggcgggggcgtcggcatcggcatcggcatcggcggcggcagcccttcgtcgccttctccgacgccgccgtcgtcgcagccgcagccgtgcgacttcgagaacgagcggctgtacagggcgtacctcgtgatccagcagttccggagcacggtgacgtgcg

SEQ ID NO: 5255 - DNA, 224 bp, Zea mays
  Clone ID: LIB3118-003-Q1-K1-H9
cgctgtaccccaccacctatgctcccctcatgttgcttcagtcattaccgtcttccgtgtgcgtcgggtcggtccatacgttccccacgtccaccgtaaccaccaccaccttcactccattcctgccaacgtcctgatccatcttcctcatctccttcaccccgccgcggtgccccatgagcgcgccagggacatcttcatggtcttcatcgtgctcctctttg

SEQ ID NO: 5256 - DNA, 320 bp, Zea mays
  Clone ID: LIB3118-005-Q1-K1-A10
gcggcggcggctacggtggtggccgtggaggcggcggctacggcggtggcgggcgccgtgatggcggcggcggctacggcggtggcggcggcggctacggtggcggcggtggctacagtggtggtggtggcggctacagcggtggcaaccgtggcggcggctacggcaactccgacgggaactggaggaactgagcggtggggcccgcgcggccaacttatcctgttcgctaccgtgatgtttaccctagtccagagggtttatcttcgttcgtctcgtttgttgttgcccatctgtgtttttgattgcaaggtcgctct

SEQ ID NO: 5257 - DNA, 270 bp, Zea mays
  Clone ID: LIB3118-005-Q1-K1-A11
ccctttcccatctcatgggatcagcatttggaatgtatgatcgtgccaatatcgaggtcttttgctatgcactcagtcaaaacgatggtactgagtggaggcagcgtattcggtctgaggcaaaacattttgtcgatgtttctgccatgactagcgataatatcggcgagcttatcaatcaagacaaaatacagattgtgatacatcttaatggctacacaaaggatttcgactcttatgaagtgactcctacacctcacgatgactttg

SEQ ID NO: 5258 - DNA, 260 bp, Zea mays
  Clone ID: LIB3118-005-Q1-K1-A12
gcgatctgatagcaatagcggccaacaaaaggagtagctagctcgtgtccttgcgaagtgcaaggagcggagggggcgttatttcctgatcaaataattttgcctatggcacattctgtggaaactttgacggatctttgcctgcttttctatgtgatgtaagctgctgaaacctgcactcatcaaatgtcgtgtatgcagatgggaccatgcatttgttttcctgaatggcttcaaatgaaaagaatgttttttttatc

SEQ ID NO: 5259 - DNA, 234 bp, Zea mays
  Clone ID: LIB3118-005-Q1-K1-A2
gggaaataggaagctgaatcgacctcgcaagcggggaatgtatccttttttgctgcaacataaaaaatgctacccaggcatagctgggtaccttttaacttctgtttgtgggatttgctagagtgatggtttcgatatatagggggacttgaatgtctggaatgctacggtataacgcacatttgggtgcaatgtctgttgcattgctgtctgaatgacatcgttggtacattt

SEQ ID NO: 5260 - DNA, 358 bp, Zea mays
  Clone ID: LIB3118-005-Q1-K1-A3
atttgcaacaacaactaccattcagccagctagctgctgcctacccccaacaatttcttccattcaaccaactggcatcattgaactctcctgcttatttacagcagcaacaactactaccattcagccagctagctggtgtgagccctgctgccttcttgacacaacaacagttattgccgttctacctgcacgctgcgcctaacgctggcaccctcttacaactgcaacaattgctgccattcaaccaacttgctttgacaaacccagcagcgttctaccaacaacccatcattggtggtgccctcttttagatttcttatgagttatagttcaataataaagttttttgtctgat

SEQ ID NO: 5261 - DNA, 396 bp, Zea mays
  unsure at all n locations
  Clone ID: LIB3118-005-Q1-K1-A4
cttacgtacaagaaaaaaaaactcgttcagtctcccaacaccttactcatggatgntaagtgccacgggtgcttcagcataaccactgtcttcagccactcccagactgatgatgtgtgccctggctggcaaactgtcctttgccaacccacatgaagcaaggcaaggctcactgagggctgctctcttcgcatgaagggagactacagcggtcgtggtcttcaatgtttgctctatgccagatactatcgtcatgaacttgccttagctaagattttccattaggtgttttcgagcagctatttgttgcatagtagctacttccaaacttaaatcttgtttggcttggaatgttgacaactaatgactccttgaatttatttcatgatggtgacc

SEQ ID NO: 5262 - DNA, 414 bp, Zea mays
  Clone ID: LIB3118-005-Q1-K1-A5
gcctgtagcgaccggtgcaccattcccgggttgaccgatgcacccacacttccagaggcgatggggcactccaacgtgtggtactggcaccccaagaactactgtcccggatcccgcgtttgccgggtgtgtgcgaaccctcatggactgatcaggaagtacgggctgatgtgctgcaggcagtgcttccgcagcaacgccaaggacattggcttcatcaagtaccgctgaagtcagctgggcgggctatctgaatgccatctcttggacagtgtagtagaggcgatgccacaattttaattactgtcatttagatgttcccttcagaactctgctatttaagtccgccatgtttgtgatggagaacttaagctttgtttgttatactgattatgagttacctgtgctttgctt

SEQ ID NO: 5263 - DNA, 249 bp, Zea mays
  Clone ID: LIB3118-005-Q1-K1-A6
aagacatgggaattgtaacaccaattccgatcagtgtgaagctgatagatttgaacaacattttctgcagaatagtacatgctgcgcaactgccccatttgagcattccagagactgaagctggaaaaacacgccggcaatatcggcaacttctaaaccgttcgctaatggttgtctctgttggagctgctgctgcagttgttggactagctgcttaccgtgtttatgcagatcggaaaaactctttct

SEQ ID NO: 5264 - DNA, 219 bp, Zea mays
  Clone ID: LIB3118-005-Q1-K1-A7
tcgaagacatcgttattggatcacctcttgctatgagtgtccatcaaatacattcgtacaacaatttttgctgaatggggcatgctcctcaaatgccccatctgagcataccatatactggacctcaaagaacacgccggctatatcggccacgactatgcccaacactagtgaacttccatgaacaagctcttacttcaaaagagctactagctgcct

SEQ ID NO: 5265 - DNA, 289 bp, Zea mays
  Clone ID: LIB3118-005-Q1-K1-A8
accacgcgtccgaggacgcgtgggataaacacacgaagcgaagcgcactagactggacctaacaacaatggctaccaagatattagccctacttgcgcttattgccctctgtgtgagcgcaacacatgcgctcattatttcacaacgctcacttgctcctagtgccataagtttagagtatgtccgaccagctacattgatgggcttcgaacacctagctgtgcaagccaacatgcaacaacaagcgcttgcagcgagcgtcttacaacaaccaattgcccaattgcac

SEQ ID NO: 5266 - DNA, 432 bp, Zea mays
  unsure at all n locations
  Clone ID: LIB3118-005-Q1-K1-B1
tgcccttcctcatgccattcttcgtttggatcttgctggtcgggacctcacagactccctcatgaaaattctcactgagaggggttactccttcacaacctcagccgagcgagaaattgtaagggacatcaaggagaagctagcatatatagcccttgactatgagcaagagttggaaactgccaagaacagctcttcagttgaaaagagctatgagctacctgatggacaagtaatcaccattggtgcagagagattcaggtgccctgaggtcctcttccagccgtcgatgattggtatggaagctgcttgaatccatgagacaacatacaattcaatcatgaagtgtgacgtggatatcaggaaggacctctatggtaacattgtgctcagtggtggttcgactatgttcnccggtatcgctgatcgtat

SEQ ID NO: 5267 - DNA, 279 bp, Zea mays
  Clone ID: LIB3118-005-Q1-K1-B10
gagaaccccagcgggcaaacgcctccctccccctgcctccaggccccacatccgtccatccgggtagctccagaccttctccaatggcggtcaaggtctacgtcgtgttttactccacctacgggcacgttgccaagcttgctgaggagatgaagaaaggcgccgcttcacttgaaggcgtggaggtcaaagtatggcaggtcccggagattctgtccgaggaggtgctcggcaagatgggcgcgccacccaagaccgacgcgccggtcatcaccccgc

SEQ ID NO: 5268 - DNA, 331 bp, Zea mays
  Clone ID: LIB3118-005-Q1-K1-B11
cggacgcgtgggcggacgcgtgggcggacgcgtggggcggaggcggctaccgcggtcggcgcgagggtggcggtggcggctacggcggcggtggcggcggcagctggagggactgatgtgtgggcccatcctggcttcggccgagttatcttatctatctatagtatcgagttaccgtgcgcttctgtcaccgtgttagtgtccgatctacctttggattacgtgatggtaccctgttgttcgctttggttgctcccgctatgaaacgagacgagagaagaatgagcaaggttgttgttcgcctcaaatcttgaaaacttaaatgatctac

SEQ ID NO: 5269 - DNA, 379 bp, Zea mays
  unsure at all n locations
  Clone ID: LIB3118-005-Q1-K1-B3
gccgcactgaaccccgctgcttatttgcagcagcaaatactactaccatttagccagctagctgcagcaagccgtgctttcttcttgacacagcaacagttgctgcctttctaccagcagtttgcggctaaccccgcaaccctcttacaactacaacaattgttgccctttgtccaacttgctttgacaaacccagcagcctcctaccaacaacacatcattggtggtgccctcttttagattgcttattagttgtaattcaataataaagttttttggatgatgtatgtggccaaccagaaataagaagttacatttccagattctaatgtgaaaaaattaaaatntattnncnnaaattaanaantaactttttttt

SEQ ID NO: 5270 - DNA, 399 bp, Zea mays
  Clone ID: LIB3118-005-Q1-K1-B4
tcgctcaagcacaagaaaaagagactcgtgcagtcgcccaactccttcttcatggatgttaagtgccaggggtgcttcagcataaccactgttttcagccactcccagactgttgttgtgtgccctggctgccaaactgtcctctgccaacccacaggaggaaaggcaaggctcactgagggctgctctttccgcaggaagggagactagagcggatgtggtcttcaagttttgctctatgccagatactagcgtcatgaactgcctttagctaagattttccataagttgttctcgagcagctatgtgttgcatgttggctacttccaaacttatatctggtttggtttggattgtgatgaactaatggctctttgaatttatattatgatgttgacg

SEQ ID NO: 5271 - DNA, 330 bp, Zea mays
  Clone ID: LIB3118-005-Q1-K1-B5
gcggacgcactgaaccccgctgcttatttgcagcatcaaatactactaccatttaaccatctagctgcagcaagccgtgcttagttcttgacacagcaacagttgctgcctttttaccaacagtttgcggctaaccccgcaaccctcttacaactacaacaattgttgccctttgtccaacttgctttgacaaacccagcaacctcctaccaacaacacattattggtggggccctctttcacattgcttattagtcgtaattcaataataaaattttttggatgaagtatgtggccaaccacaaaaaagaaggtacattttcagaattc

SEQ ID NO: 5272 - DNA, 158 bp, Zea mays
  Clone ID: LIB3118-005-Q1-K1-B6
agaaatgtactttcttatttctgggaagccacaaacatcatccaaaaaacttcattattgaactataactcatatgcaatctaaaagagggcaccaccaatgatgggttgttggtagaacgctgttgagtttgtcaaagcaagttggctagatcgcga

SEQ ID NO: 5273 - DNA, 262 bp, Zea mays
  Clone ID: LIB3118-005-Q1-K1-B7
ttccggaattgaccgcatcgatccacccatgcgttacagaaaagtccgaatggcacaatgcttcttgcctatcttatgcttagagagggctttactcttgcgaaaggctgcaacttactgaacaaagtgcaccctgcagcgcagacaaacgacggctttggaaaggctctcctggcccttgacaagaagctgcatggctaggtatttatggactggcaacacaagcggccagaaatgaaggtgtgtaccatcttcaacaaga

SEQ ID NO: 5274 - DNA, 202 bp, Zea mays
  unsure at all n locations
  Clone ID: LIB3118-005-Q1-K1-C1
cccacgcgtncgggaaaagtcggagtgccacagtcgtacttgcctatcttatgcttagagagggctttactcttgcaaaagcctggaacttactgaagaaagtacaccgtcgagcgcagccaaacgacggcttcgcaaaggctctcctggcccttgacaagaggctgcatggcaaggtatctatggactggcaacacaagcg

SEQ ID NO: 5275 - DNA, 364 bp, Zea mays
  unsure at all n locations
  Clone ID: LIB3118-005-Q1-K1-C10
cggacgcgtgggcggacgcgtgggcggacgcgtgggggttaatctccacacgaatcacggacacggagacttgccttccttttggtgcggaaaaagaaagagaagagaagcgaaggaggttctcagttggagcggctccctcttcccgcgcgcgccaccgcctncgatccgagcagccgcctacaattaacccattcaacctcaaatgttccttgtgaggtatcatgacagaacagcaggaacgtgttagcaagagctcttcctcaagtattagcagcagcactcaggaaagtgaggaggaactgaccatcggtacccttataaccgaagcaacaaacacaacaaacagtgccaaaagtcttgg

SEQ ID NO: 5276 - DNA, 300 bp, Zea mays
  Clone ID: LIB3118-005-Q1-K1-C2
cccacgcgtccgggaaaagtcggagtgccacagtcgtacttgcctatcttatgcttagagagggctttactactgcaaaagcgcgtggaacttactgaagaaagtacaccgtcgagcgcagccaaacgacggcttcgcaaaggctctcctggcccttgacaagaggctgcatggcaaggtatctatggactggcaacacaagcggccagaaatgaaggtgtgtccaatctgcagcaaaaatgttggtctaagtacgagttcactcaatctgcacctgcagaaggcacacaagcgtttatc

SEQ ID NO: 5277 - DNA, 204 bp, Zea mays
  unsure at all n locations
  Clone ID: LIB3118-005-Q1-K1-C3
attcgtaacaattgcttccattcaaccaactcgctttgtcaaacccatcagctttctaccaacagcccatcattggtggcgccctcctttatatntcttatgagttatagttcaataataaagttttttgtctgatgtttgtggcttcccacaaataataaagtccatttctaaggaatatatggactggcaacacaaacatac

SEQ ID NO: 5278 - DNA, 212 bp, Zea mays
  Clone ID: LIB3118-005-Q1-K1-C5
cccacgcgtccgcccacgcgtccggcatgctgcagcctgggacgcggtttaaacaggacagctatacaagttgccagatctgagctagattgggcagagaagatttgaaccattttatttgctctccgcggagcgcgaatgtaagaggttgtgttgtgttgtgaaatactgaattcgttataggtatttgtgcaataaattaagttttgctt

SEQ ID NO: 5279 - DNA, 212 bp, Zea mays; identical to SEQ ID NO: 5278
  Clone ID: LIB3118-005-Q1-K1-C6

SEQ ID NO: 5280 - DNA, 167 bp, Zea mays
  Clone ID: LIB3118-005-Q1-K1-C7
caacaattgctgccattcaaccaacttgctttgacaaacccagcagcgttctaccaacaacccatcattggtggtgccctcttttagatttcttatgagttatagttcaataataaagttttttgtctgatgtttgtggcttcccagaaataataaagtccatttct

SEQ ID NO: 5281 - DNA, 292 bp, Zea mays
  Clone ID: LIB3118-005-Q1-K1-C8
ggccatcaaagatttatttccacacgactcaaatccgttttatgctggatttggaaatagagacacagacgagcttagctacctcaagggtggtattcctatgggcaagatcttcataataaaccccaagggtgaagtcgcagtgaaccgacgggtcgatacaaagtcgtacacatccttgcatgctcttgtccacgggaatgttccttcaataatgtcgtcatctgaacaagaggactacaatgcttggaaatactgaaagaagccaattgccctgatgttgaatttgtga

SEQ ID NO: 5282 - DNA, 57 bp, Zea mays
  Clone ID: LIB3118-005-Q1-K1-C9
cggagctgagtctattataaacatcttggtctgaacaacatttctgtaatagactag

SEQ ID NO: 5283 - DNA, 96 bp, Zea mays
  Clone ID: LIB3118-005-Q1-K1-D1
ttatgagttatacttcaataataaagttttttgtctgatgtttgtgcttcctcaaaaataataaagttcatttctattttgattatttatttaatt

SEQ ID NO: 5284 - DNA, 323 bp, Zea mays
  Clone ID: LIB3118-005-Q1-K1-D11
ctggtgctcatgacatactcgccggacttcttcaaggtgtcccttgacattgccaaggagacttggatcgtcggcggtgatgacgcggtcctgcgctgccggagctggaagagatgatcgcagtgactgttcaacaaggaatgtatgtgccttttgtttaccttttactcctccgcttgctttttttcttctttttttccgacactcttgatgattactactactcttgcataaggctcgtgtgaagggtacgatcagcacacagcagaattggtttagccaaagccactgtatgtctgtattggcctcaccctgcaaaacat

SEQ ID NO: 5285 - DNA, 410 bp, Zea mays
  Clone ID: LIB3118-005-Q1-K1-D2
ggccatcaaagatttatttccacacgactcaaatccgttttatgctggatttggaaatagagacacagacgagcttagctacctcaaggttggtattcctatgggcaagatcttcataataaaccccaagggtgaagtcgcagtgaaccgacgggtcgatacaaagtcgtacacatccttgcatgctcttgtccacgggatgttccctccaatattgtcgtcatctgagcaggaggactacaatgcttggaattactggaagatgccattgcctgatgttgatttgtgaggtacaagtcgagtctgcacaacagcactgcactaattttatgatgtgccgtagtgatcatgagaaggccattactttggtggctacatgtggatgctcctgctcctgatatacgttcctg

SEQ ID NO: 5286 - DNA, 432 bp, Zea mays
  unsure at all n locations
  Clone ID: LIB3118-005-Q1-K1-D5
cttgattctgcagattttactgaagtgcagcgtatcagtcaaagcaaggatgctgtacagagtcctttgcagattcaggatgggaagcctgttgattcagagacagcagattcaatatttattgaagacttgatattgcagttttgtgatgatcatcagatgcaatggcgctgtccaaattgtaccaaggatcatgaggagccaagtgccagtgaaagtaaaaatggtgagcagatggtgggaagcggcaaagaagacacaacagttgttggggaccagattgaacaatcagacaggaaagcaaggcacagtaaagaatctgaatgtcacggaggtaatctttcagctgcaaaacagactgagctgttgggaaccaaccaaactgcagatgacagcaaacaacttatgatgcatcncgagaacgtgaaggaa

SEQ ID NO: 5287 - DNA, 343 bp, Zea mays
  unsure at all n locations
  Clone ID: LIB3118-005-Q1-K1-D6
tcgacggacgcaggcaggccatcaaagatttatttccacactactcaaatgcagtgtatgctggatgtggaaataggggcacagacaagcttagcgggggcaaggctgggnttcctatgggcaagaccgtcaaaataaaccccaagggagaaggggcagtgaaccgacgggtcgatgcaaagacgaacacatcctagcatgctcgtgtccacgggaaggaagctccaatatcgacgtganctgaacaggaagacgacaacgcctggaattacagaaagaagccaacgcctgatgtggatttgagagggacaagacaaggctgcacaacaacactgcactaatt

SEQ ID NO: 5288 - DNA, 189 bp, Zea mays
  Clone ID: LIB3118-005-Q1-K1-D7
gtcgtggacgtgctgttgcaatgcgtgctcgggctgctgctggtcgtggtggtggtcctgttggacagaggtagcgcgcctcctgtgaggaggcagattctaaatggcggtttttctcggcttgctgaggctgctgtctgagctctagacgctgtttcggagaaaagctgtgctaactgaacatttatc

SEQ ID NO: 5289 - DNA, 364 bp, Zea mays
  Clone ID: LIB3118-005-Q1-K1-D8
gctccgaccctagggtttccattcggctctttcgtaagcttcctaaaatggccaccgacgggttcgtccatgccggggtccccgcccctgccgggggcgaccactccccggccttctcgttcagcatctggccgccgacgcatctcacgcgggacgcggtggtgcggcgcctcgtggagacgctcgcgggggacaccatcctttgcaagcgctactgctcggtgccgttcgtcgactccgagccctcttgcagcgcgccatcgaggccgaggtcttcgacgccgcggtctccactggaggcgccgctgccgccttctttgatgagggcattgaggcgcttgctctctactccaaagatgtgagc

SEQ ID NO: 5290 - DNA, 330 bp, Zea mays
  Clone ID: LIB3118-005-Q1-K1-E1
ggaagcaggggctagacgcggatcggcgagcatgaggggcggcggcggcggcgggatgatggacgatgaagagagggtgggccatgcggagatcccgaccagtttcggtcccgagctgcgcgcctgcctccgatgccgcctcgtcaagacctacgaccagttcagggagaacggctgcgaaaactgcccgcttctagagatggacagagagcacgacaacgtcgtcaactgcaccacccccaacttcactggaattatctctctgatggaccccagtaggagctgggcagccccgtggtttaaaaatggcaaggttcattcttgggggct

SEQ ID NO: 5291 - DNA, 149 bp, Zea mays
  Clone ID: LIB3118-005-Q1-K1-E10
tcggggagcttctgtactcgcagttctacttgctgtgaggcaacgtacggcaaagcttaagcttgggtttacattggttataaattattagattagatgttgactgtaagactatcctggtattttctgcttttacattgtttgtttcc

SEQ ID NO: 5292 - DNA, 310 bp, Zea mays
  unsure at all n locations
  Clone ID: LIB3118-005-Q1-K1-E2
gggcacagcagctgcagcaactcgtgctacctgtgatcaaccaagtagctctggcaaacctttctccctactctcagcaacaacaatttcttccattcaaccaactgtctacattgaaccgtgctgcttatttgcagcaacaactattaccattcagccagctagctactgcctactctcagcaacaacaacttcttccatttaaccaattggccgcactgaaccccgctgcttatttgcagcagcaaatactactaccatttagccagctagctgcagcaagccgtgcttncttcttgacacagcaaca

SEQ ID NO: 5293 - DNA, 332 bp, Zea mays
  Clone ID: LIB3118-005-Q1-K1-E3
gcggggcacaccagctgcagcaactcgtgctacctgtgatcaaccaagtagctatggcaaaccggtctaggtactctcagcaagagcaatcgtgtttcattcaaccaactggctacattgaaccgtgctgcttattggtagcaacaactattaccattcagccagttagcgtactgcctactatgagaacgacaacttttgacatttaaccaattggccgcactgaaccccactgctgaattgccgcaggaaattctactatcatttagccagatagctgtaggaagccgtgcttacttcttgacacaacatcgggggctatctttgtacca

SEQ ID NO: 5294 - DNA, 93 bp, Zea mays
  Clone ID: LIB3118-005-Q1-K1-E4
tcgcccacgcgtccgtccacgcgttcgggcagtttcagtgtgagcaatgacctgaatgaacaattgaaatgaaaagaaaaaagtattgttccc

SEQ ID NO: 5295 - DNA, 306 bp, Zea mays
  Clone ID: LIB3118-005-Q1-K1-E5
cacacctagcgaagcgcactagcaacgacctaacaacaatggcttccaagacattatccctccttgcgcttcttgccctttttgtgagtgcaacaaatgcgttcattattccacaatgctcacttgctccgagtgccattattccacagttcctccctccagttacttcaatgggcttcgaacacccagctgtgcaagcctataggctacaacaagcgcttgcggcgagcgtcttagaacaaccaattgcccatatacaacaacaatccttggcacatctaaccatacaaaccatcgcaacgcagc

SEQ ID NO: 5296 - DNA, 439 bp, Zea mays
  Clone ID: LIB3118-005-Q1-K1-E6
cacacctagcgaagcgcactattttcgacctaacaacaatggctttcaagacatgtatccctccttgcgcttcttggcctttttgtgagttcaacaaatgcgttcattattccacaatgctcacttgctccgagtgccattattccacagttcctccctccagttacttcaatgggcttcgaacacccagctgtgcaagcctataggctacaactagcgcttgcggcgagcgtcttagaacaaccaattgcccaattacaacaacaatccttggcacatctaaccatacaaaccatcgcaacgcagcagcaacaagcactgagccacctagccgtggtgaaccctatcgcctacttgcaacaacagctgcttgcatccaacccacttgctttggcaaacgtagcttgataccaacaacaacatcatttgcaacagtttc

SEQ ID NO: 5297 - DNA, 238 bp, Zea mays
  Clone ID: LIB3118-005-Q1-K1-E7
cttttaaaccgattagcaacatgctgagcacgttaagccaccaacagatggcgctaaaagatgacaccccattgtgctatattggcctttctgcatgaaacgttcccgatgccatgcatcactggtgctaccactcacgtataacttggaacagttctccgtacctataacgatgagtgtctgttgtttatgctaacgcaattgtttgaccctcttggttccacccggcaagaagctc

SEQ ID NO: 5298 - DNA, 273 bp, Zea mays
  Clone ID: LIB3118-005-Q1-K1-E9
tccattccattccatctcaaaggatagaataatgggcggtctctccaccaagcttttcgtggtcctcttcctgctcgtttgctacaccgggacgcaaggcgggccggtgactatggcgtcggcgaggaagtgcgagtcgcagagcttccgcttcaagggaccttgctcgagggacgccaactgcgcaaacgtctgcctgaccgaaagtttcacgggcggcgtgtgcaaaggcctacgccaccgcttgcttttgcaccaaggactgctagtact

SEQ ID NO: 5299 - DNA, 69 bp, Zea mays
  unsure at all n locations
  Clone ID: LIB3118-005-Q1-K1-F1
atgctcgagcgggcgtcaatgtgatggatatatgcacacttccancacactggcggtcgtaactattgg

SEQ ID NO: 5300 - DNA, 183 bp, Zea mays
  Clone ID: LIB3118-005-Q1-K1-F12
gcgggcgcccaccatccgaaaagacttacatattttttggaagtcacaaacatcatccaaataacttgggtattgaactttaacttataagcaatctaaaagagggcaccaccaatgatggcgctgtggtagaacgcttttggcgttgtcaaaacaagttggttgattggcacaaattgttgc

SEQ ID NO: 5301 - DNA, 382 bp, Zea mays
  unsure at all n locations
  Clone ID: LIB3118-005-Q1-K1-F4
cccacgcgtccggcagtctcttcctccccggcaagccgcggcggtcgttgccccggcccctcatataatatagtcgccgcctccttgtcaccgccgattcgattaggttgatacagggaggagtcgcgaggggacgtanatgccgacgctgacaaagctgtacagcatgaaggaggctgccctccacaacacgcccgacgactgctgggtcgtcgtcgacggcaagatttatgatgtgaccaagtatttggaggaccatcctgggggcgccaatgttctgctcgaagcaaccggtaaggatgctacggaagaattttactatgcagggcacaccaggagtgccaaggagctaatgcaggactacttccttggggagttggac

SEQ ID NO: 5302 - DNA, 283 bp, Zea mays
  Clone ID: LIB3118-005-Q1-K1-F5
gcaaatcgcaccactaaatccctctagaggtcgatcacaggggaattaatggcgtcgtcgtctagcagcagccaccggcggctcatcctcgcagccgccgtcctgctctccgtgctcgcggctgccagcgccagcgccgggacctcctgcgtgccggggggggccatcccgcacaacccgctcccgagctgccgctggtacgtgaccagccggacctgcggcatcgggccgcgcctcccgtggccggagctgaagaggagatgctgcctggagctggcggaca

SEQ ID NO: 5303 - DNA, 344 bp, Zea mays
  Clone ID: LIB3118-005-Q1-K1-F6
tcttgagaccacctttcaacatagaaagctcaatagtgtaccaacaatggcgggcaaaagattttgcctacttgaggctccgtggactttctgcaagtgctgctaccgcgaccatttttccggaatgctcacaagctcctatagcttaccttcttccgccggacctctcaccagcggcgtcttccgtatgtgaaaacccaattcttcaaccctatatgatccaacaggcaatcgcagctggcatcttaactttatcacccttggttcttcaacaattaatagccctattacagcagttacctttggtgcctttattggcacaaaacaagagggcacaacaacta

SEQ ID NO: 5304 - DNA, 396 bp, Zea mays
  Clone ID: LIB3118-005-Q1-K1-F8
cggacgcgtgggccgtcctggtggtgggcgcggcggcggtgtgcgacatgagcaacgagcggttcatgtcgtgccagcccgcggcggccaagacgacggacccgccggccgcgccgtcgcaggcgtgctgcgacgcgctggcgggggcggacctcaagtgcctgtgcggctacaagaactcgccgtggatgggcgtctacaacatcgaccccaagcgcgccatggagctttcggccaagtgcggtctggccacgcctgccgactgctagcagtgtgctagccaagccaagccaagcatgaaagcccccggcattgctagctgtacgtgtctgtgtgtgcatctgcagcagggtgcatgcatgggcccggacgtacgtgtctctttctttttttaat

SEQ ID NO: 5305 - DNA, 220 bp, Zea mays
  Clone ID: LIB3118-005-Q1-K1-F9
gcggtggaccctcatacaaaacttgcgtcgactgtcgagacctgacactaatcgaaatcagaatgggcatcatgatgcgttatgactaatttataggaggcatgctgctcggcaggtctatggatgatgtatcccatacacggatgacgcgccaaaaggctttcgtctgacctgcagctgcttgaggaatctgcatctgtacaaatgaaccaatgctacc

SEQ ID NO: 5306 - DNA, 282 bp, Zea mays
  Clone ID: LIB3118-005-Q1-K1-G3
cgccgtccagatcgaagctaagagcgccgccgctggccacggcggttcgtgctgcggtgaagccgcctggtacgatcttcctcgccggagtccctgggaaggccatggtgtctgtgtgtttgtggctcgaccggagacaaccacttgcgtgaggggtgagggtgacaatggcaaccgagaattactacttaataaggagtatatatgtacgaaacgacgcaacgcaatcaccggctaattaaggggccgcttagttgcacttttggaccgattttattttat

SEQ ID NO: 5307 - DNA, 270 bp, Zea mays
  Clone ID: LIB3118-005-Q1-K1-G4
acctgacccgccgcagccaaaccctctccagcagccgtcgtcgccaccgctgcagcgcggaggcgacccccatcgccgccaagatgcagatcttcgtgaagaccctgacggggaaaaccatcacgttggaggtggagtcctcggacaccatcgacaacgtgaaggccaagatacaggacaaggagggcatcccgccggaccagcagcggctcatcttcgccggcaagcagctcgaggacgggcgcaccctcgccgactacaacatccaga

SEQ ID NO: 5308 - DNA, 424 bp, Zea mays
  Clone ID: LIB3118-005-Q1-K1-G5
caccaatgctgtgaggtcatggtgcagtatctattaacattggaacataacagtgatatgtagatcgttgataggggcgctacggatgtggaagctagaaagaaactggagtttcatatggaaggcgtaagcttagcaagaccagataaggccaagcctaagggaagaacaatcaatagtagtgagcaacaagttcttaaattgggtgcgaaaggacctaagaagatgagcaggaagtgccagaaatgtggcatatttgatggtcacaacagtcgtacgtgtttaactgtggaggataatagggttcgattagctgacttatctggacgtaagcgaggacggactcctgcttcaaggaacaaaatcatagctgcagcaccacatcggaatgagacattaacgtcgaaaaaacaaacggtggatg

SEQ ID NO: 5309 - DNA, 286 bp, Zea mays
  Clone ID: LIB3118-005-Q1-K1-G7
cgccgtgctccgattgaactgatcgtgctccgtatccgccgctcccactccttcgccgtcgccttcctctactggtgctacgtcttctcatgaacgcatcgcccctctccaactgctgatccttcgccgtctctccctctctctttctctctgagatagtctttcgaatccatctctagggctcctgtttctacccatcctgcccccaccccacccgctcccaaacatattcaatcctgcaagacaagcattcatgtcttcgtcacgccaaatctcgagccccgac

SEQ ID NO: 5310 - DNA, 330 bp, Zea mays
  Clone ID: LIB3118-005-Q1-K1-G9
cccacgcgtccgcccacgcgttcgcggacgcttgggcggcgactttggtggcgataagagtggagctcctgctgaggtccagccatctttcatgagttctggcgcgaggcctggctttggccgaggaggtggcagcggctttggcgctggcccgacctcttctttcatggagtgaacagtgaagctgcccttagtttggacatgatggttcccctcccgtggaggcggtaattttgaagaacgggtattaatgactagtaatggtttccggttcggctaggctgacatgcaaaaaacaggggccataattaaacattgggggccactttc

SEQ ID NO: 5311 - DNA, 412 bp, Zea mays
  Clone ID: LIB3118-005-Q1-K1-H5
caccgttccggggttgccggatgcgtccaggcatgcgtggcgttagaatatcgagggtgagcggatcgagatggcggcgtcagatgttgagtacccgcgcttcatcggcggccttgcctgggccacggacgaccactccctccacaacgccttcagcacctacggcgaggtcctcgagtacaagatcatcctcgatcgggagacgcagaggtgccgcggcttcggcttcgtcaccttctccacggaggaagcgatgcggaacgccatcgaggtcatgaacggcaaggagctggacggccgcaacatcaccgtcaacgaggcccagtcccgcggcggccgtggaggcggcggcggtgggtacggacgtggccgtggaggcggcggctacggccgtggcggtcgccgtgatggc

SEQ ID NO: 5312 - DNA, 220 bp, Zea mays
  Clone ID: LIB3118-005-Q1-K1-H9
aaaaaaaaaaataaaatatttatagaaattattgattataaaaaaaaaaaaaatattaatgggaaaggggaaataaataaagtaaaatataaaaataaaaattgtaaaaaaaaatttaaaaaaaaaaaaaaaaaagggggggctgtttaaaaggatcaaagctaattaacgcgggtttgcaatgaaatagtcttgtaaaaggggaacataaattaaatta

SEQ ID NO: 5313 - DNA, 395 bp, Zea mays
  unsure at all n locations
  Clone ID: LIB3118-006-Q1-K1-A1
gctggctacatattagttgggaatacaacagatatctgatcgatcagtatgcagaaggaatgtagaagcattctatcaactcatgattggaggaactctgggattgtaacttgtgattccatgttctgtggcagagttattagttttggctgcctgctgatgtccagtagcataacaatgggtccttgggcttgaagtcgtgggattttgaggcactatttttaccgacgagaatttcctcttctgtattttatcgacttgcttcatccttaaaacatgcctttggtacattgttaacccatttcttcactggtgatcttcatatattatgcagngaccgctgttctgattttattgctgatgctggcccgacatccattgcattagaagctcat

SEQ ID NO: 5314 - DNA, 318 bp, Zea mays
  Clone ID: LIB3118-006-Q1-K1-A10
cccacacgttcgtctacatcgcgagcggcgccctttttttttttttttttttttttgtttggggtttttttttttgtgtgttgggttttttttttttttttttttttttttttttttttttttttttttatttttttttttaacgtttttgttttttctgttacttcaacaaaaaaaaaagaaatgagcggtggaaccccaccgcccagtttttctttttgctatcgtgatcttaacccaaaaacaagagggttataatttttggtgtcgtttttttttttcaatttgtgttttttgaataaaaggtcttttttaaaa

SEQ ID NO: 5315 - DNA, 467 bp, Zea mays
  Clone ID: LIB3118-006-Q1-K1-A11
cgtcaggtcagcctccctctccggatcccccacctgctccgccgccggccaacgcatcgctccccttggcagccaggatgacagaagcaccatttctgccacgtgagaggctcttcaagctgcaacatcatttccagaacatgaccaagcacacctacctgaaagggcgctacgatgtgatcacctccgttgccatccctcttgcacttgctgcctccagcatgttcatgattgggcgtggagtttacaacatgtctcatggaattgggaaaaaggagtgatctaccacgggttaactagtttttctacttggcatggaagtaccatccaaactatgaaggcttctttgcttgctaaataatactggcaaagaacaaggcgactacctttttgcatcatatttctggttggatttggggatatgaaatgccatcaacttggagaacaacattggtactaatttgggt

SEQ ID NO: 5316 - DNA, 429 bp, Zea mays
  Clone ID: LIB3118-006-Q1-K1-A2
cccacgcgtacgaacaacttgtgctagcaaacctttctccctactctcagcaacagcagttgcttccattcaaccaactagctgcattgaactctgcttcttatttgcaacaacaacaactaccattcagccagctacctgctgcctacccccagcaatttcttccattcaaccaactggcagcattgaactctcctgcttatttacagcagcaacaactactaccattcaaccagctagctggtgtgagccctgctaccttcttgatacaaccacagttgttgccgttctaccagcacgctgcgcctaacgctggcaccctcttacaactgcaacaattgctgccattcaaccaacttgctttgacaaacccagcagcgttttaccaacaacccatcattggtggtgccctcttttagatttcttatg

SEQ ID NO: 5317 - DNA, 375 bp, Zea mays
  unsure at all n locations
  Clone ID: LIB3118-006-Q1-K1-A3
cccacgcgtccgcccacgcgttcggatcaggagcgtgccgcggagggttcgtgtgaggatcgcccgcaagaggaacgacgaggaggatgccaaggaggagctctactcccttgtcaccgtcgcggagatccccgccgagggcttgaaagggctggggaccaaggtcgttgacgataccgattaagctgtcgcgttatctacatctttagagagatcctagtttgtatttgcaacagcaaaaccttttgtattcacaaagttgtctatttccgcaacagaattgcatggctagttttcttttcattgctgctgnccaaaaacacacatggacttttagggatatgcttgtcaccccatttggttggatgaaccgag

SEQ ID NO: 5318 - DNA, 308 bp, Zea mays
  Clone ID: LIB3118-006-Q1-K1-A4
gacgcgcaagccagtgccgcgcccagatctccgcgacagatcagtcgttcgtccagctaactgcactgcacgcaatggccaccacggcgaccgaggcgaccaagacgactgcaccggcgcaggagcagcaggccaacggcaacggcaacggcgagcagaagacgcgccactccgaggtcggccacaagagcctgctcaagagcgacgacctctaccagtacatcctggacacgagcgtgtacccgcgggagccggagagcatgaaagaactgcgcgagatcaccgccaagcacccatggaacctgatg

SEQ ID NO: 5319 - DNA, 473 bp, Zea mays
  Clone ID: LIB3118-006-Q1-K1-A5
tgttctgggacgtgcacccgggctcgtcggcgatcctggaccacgtcgacgccgtgctcaagctcaagcctgagaagctggcggcgagcagacgtgtcctcagcgagtacgggaacatgttcggcgtcacggtgatcttcgtgctcgacgagctgcgccgccggatgacgaatggggaagaggagggggcgcctgcagagtggggggtcatggtggcgtttggacccgggctcaccgtcgagacgatggtgctccaccgatcaggcaccccagccgagacgaaactaggtgaggcatgaaaaggtggacgtgaccaatttgtgttggaacttggatcacgattgcatcattgcatgcatgttacttggtcaacatattccgactatgtcactattcttgacttcagcctataataaattcaactacataaacaactgttaaacttgaaaaaaaaaaaaaaaaaaagggcgggc

SEQ ID NO: 5320 - DNA, 310 bp, Zea mays
  Clone ID: LIB3118-006-Q1-K1-A6
cgtacggacccgcaagccaatgccgcgcccaaatcttcgtgacagatcaatcgttcgagcaagtaacgtggctggacgcaatgggcaccggggggaaccgagcgaccaatacgactggaccggcgcaagaacatgaggccaacggcaacggcaacggcgaacaaaaaacgcgccacttcgaggtcgggcacaagagcctggttaagagcgacgacctttaccagtacattctggacacgaacgggtacccgcgggagcccgagagcatgaatgagcttggcgagaacaccggcgagcacacatggaacct

SEQ ID NO: 5321 - DNA, 314 bp, Zea mays
  Clone ID: LIB3118-006-Q1-K1-A8
gacgcgcaagccaatgccgagcccagatctgcgcgacatatcagtcgttcgtccaactaactgcactggacgcaatggccaccggggcgaccgaagctaccaagacgactgcaccggcgcatgagcagcaggccaacggcaacggcaacggcgagcagaagacgcgctactccgagggtggtcacaagagcctgctcaagagcgacgacctttaccaggacattctggacacgagcgtgtacccggggagccggaaagcatggaagagctgcgccagatcacctgcaagcacccatggaacctgatgaccacct

SEQ ID NO: 5322 - DNA, 360 bp, Zea mays
  unsure at all n locations
  Clone ID: LIB3118-006-Q1-K1-B1
cggacgcgtgggcggacgcgtggggcgccttgcaatggtcctttttgacattccagatattcgactcttctggtcgaatgataaacggttcacgtcccagttctcagaaggcaagcttggtgtcaagttcaagccattttcaaagtttcctccttgttacaaggatatgagtttctggatcaatgatgcatttacagagaacaacttatgtgaggttgtcagaggaattgctggtgatcttgttgaggaggtaaaacttattgataatttcacgaacaagaaaggcatgacgagccattgctatagaatagcctataagtcgatggaacgctcgctcacagacgangagattaacaatct

SEQ ID NO: 5323 - DNA, 298 bp, Zea mays
  Clone ID: LIB3118-006-Q1-K1-B10
acgatttgttctgggcgagggaaatactttcaagtttcttttcttttcttttcctcacgtgtactgggggcacgttcttcgcttcggatgagaggattaaggctgtgaggcacatgattatggctcccacacttgatctgaggcagcaggcgctggatcgccttttgccttaccagaggtctgacttcgaatgcattttccgtgctatggatggactttcagtgactattcaacttgtggaccctcccctacacgagttccttgcaaaaaggaacgtcgaggaaatcgtgcgtgaact

SEQ ID NO: 5324 - DNA, 350 bp, Zea mays
  Clone ID: LIB3118-006-Q1-K1-B11
ggatgaagttccaattctaactatgacgtgccccgcatcacatattgagaggtataaatctggtgagctgcgtttagcacctccatcagagacgtatgcggccactctgataaagggactagtggaaggcaagcaaatggatgcggacggagctgtcagctacatcaacgctgctgctgcaagagccttgtgaaggctgcttcaacgtgtgcttttgtacagccagtaaggagtagtaaggatacactatctgttagcgtggcgacaccaggaaacctttattgtccgcaaatggagaacttggatccaatttgaattgggcagcatgattcgagctcgccctaacttga

SEQ ID NO: 5325 - DNA, 276 bp, Zea mays
  Clone ID: LIB3118-006-Q1-K1-B2
cccacgcgtccgtgttcgactacatccagggcaagaacgcgtacaacgagacgatcgagatgacggcgccggtgctgacgcgggtgtcgcccaacgacgggcccttctgcgcctccgccttcgccgtgagcttctacgtgccggccaagaaccaggcggacccgccgccggccgagggcctgcgcgtggaccgctgggccggggccaggtacgcggccgtgcgccgcttcgggggcttcgtggcggacgtcgacgtcggggagcaagcggcgcgcc

SEQ ID NO: 5326 - DNA, 383 bp, Zea mays
  Clone ID: LIB3118-006-Q1-K1-B7
ccaacctgccgccttcggacgcgtcgctgccggcgctgctgtccgcgttcggcgccaaggggctggacgcgcgggacctgacggcgctgtcgggcgcgcacaccgtggggcgcgcccgctgcgcggtgttccgcgcccacatctacaacgacaccggcaccaccgacgccagcttcgcggcgggcctccggggcgccgtctgcccctacacgggcggcgacgccaacctggcgccgctggagccgcaggcgcccgacgccttcgacaacggctactttcgggacctggtcgcgcgccgcgtgctgcttcgctcggaccaagcgctgtacggcagcggcggagacggtggcaacaccacggacgcgctcgtgcgcgcgtacgcc

SEQ ID NO: 5327 - DNA, 318 bp, Zea mays
  Clone ID: LIB3118-001-Q1-K1-C12
accaacacattactcctcttcctcacataaatttctcttaccttttaagtctttcaatcttaattctatctatcatatactttatttacatttttccatcattctattttataaaatatcttcctctttatctttcgacatactattcatcaatcatacttaattcaattcttactacataccatctatcattgatcattactattattttaaccctattctaaactatccaaaatctatcccttcaatcacattatcttttatctcattcttaacatttaacattttttcttatactactttttacatctatatact

SEQ ID NO: 5328 - DNA, 269 bp, Zea mays
  Clone ID: LIB3118-001-Q1-K1-E10
atggaactaactcttcttcaaaagtgatcactcatcatcctatcattatcattagtatctcaaaaccatgctgttatctctacatgtgcacacgctcaattcctcctcaattcatcttttaaaatattacgctaaatacatgccactcacattgtattatctgtatgttcacactctcacatccactacagtgtctttgtcttgacaccaacaacttcttctacaaacctttcaagtccatatatgactataaaaactaatatctctct

SEQ ID NO: 5329 - DNA, 453 bp, Zea mays
  Clone ID: LIB3118-001-Q1-K1-E11
ctctcaaagattcagattctcagtaccctgttacatatttaaatggctgtcgggactttcacatctcaatctgctttcacatatatacataattacaatctttacaacttacttcactaacagtgtgcatccacacaccttatcatatcaatccacctcatcttaaaatcttctttctcattcaaaacttcttctcatcaaatcatacacaatcatgcaatccttccacctatcacgctacgcaattttaataacaaatccaaaacctctctgtaaactctcatatgcacctcagaatccatcaataccttcaccttccaataacttaattatcttcaacttgtttactctttctcatctccttaactgtatacacaatctccccccactttgcaacccatctataaatacccttcttatctttcttcaccccacaaactcatcttttccata

SEQ ID NO: 5330 - DNA, 311 bp, Zea mays
  Clone ID: LIB3118-001-Q1-K1-F12
cttatcctctttacatctccactcattcaactcatcttcctcaaaacttatcagtcatcaaactattataataattattattcaaaaccatactattatctctacattcccacactctcaattcctcctcaattcatctcacaatatattactcttaattcataccactcatattctaatatctatatattcacactctcacatccaacacatttctcctctctctacaccaactacttctcctacaaaccttacaccttcatacatcactacaaacactactaactctctcatatctactaatccccttt

SEQ ID NO: 5331 - DNA, 84 bp, Zea mays
  Clone ID: LIB3118-001-Q1-K1-G11
aatactccttctataatactacataatctcatatataacaaaacacaatcataaaaaaaaaaaaaaaaactacctctctatata

SEQ ID NO: 5332 - DNA, 219 bp, Zea mays
  Clone ID: LIB3118-001-Q1-K1-H10
cttcaccacctcatacctaccttcacccatcactgatttcccactcaataatcaactcaaccctcttgaaaatattaccacatattatatcttgacacacatcacaacatttactttaataagatcactcccaacataaaattaaatatgccctctcactcctccacaatctctcaataacccctacatacagattacaacaatcatctcatccccata

SEQ ID NO: 5333 - DNA, 140 bp, Zea mays
  Clone ID: LIB3118-001-Q1-K1-H12
catcttctttgcgctctttctaaattgagccttcaccatctcatacctacctatcaccatcactgatttcccactcaataatgaacgtaaccctcttgaatatagtaccacatattatatcttgtcagacatcacaacat

SEQ ID NO: 5334 - DNA, 331 bp, Zea mays
  Clone ID: LIB3118-002-Q1-K1-A1
cgaccacgcgtgcgatggcctaaaatcaactggacgaaaaggcggcttatcctcgaatcaacgatttcaccactggggcgctggaagatccatcgatatgaatctgctgtgaaggaactgaaggtatgcaccaagcctgcctggtgcctacacgtggttgccccggatctgtcaatagatcatcgtctgcagcgattgagttcaccccttgcactagtgtttaagatcaatgcaagcaattgaatcgaaaacatcacctgtgttctacctgtacatgatgtagatgacatgtttgaaacctttttaagttagtgaaatgttggattttttt

SEQ ID NO: 5335 - DNA, 70 bp, Zea mays
  unsure at all n locations
  Clone ID: LIB3118-002-Q1-K1-A10
aaccccgggcgaccacgcgtccganggagcccacgctgaggcgaaccagcagggagcggcagcccaggct

SEQ ID NO: 5336 - DNA, 95 bp, Zea mays
  unsure at all n locations
  Clone ID: LIB3118-002-Q1-K1-A11
nngagagcccaancggngcagccgaccaaccggcttagggcggggtaatacgcagacaaagaagagaccaaagagaggggggagaggcctatgga

SEQ ID NO: 5337 - DNA, 417 bp, Zea mays
  Clone ID: LIB3118-002-Q1-K1-A2
tggacgacccacgcggacggaaagcagcgcaccatccaggtcggcgagaacgagctattcctcaaggagctggagctgcggagcgatggggccaacgtgtacaagctcatcagaccggtgctggtcaagcaggacctatcggaggccaaggccaacgtcaagaagcgcatcgagtacatcttcgcagagctgaaacggatggatcggtcgctcaaagacttggaggaaaagcagaacagccagaaagaatcgatattcaagttgcagcagatgatgcatgctgtacaagctaaggcttagacaactgtttgttggttgcaactagtccaaggccatgcttcatttcatgccaattacctccaagttttttttggcggggaggaatcaggtgtctgatgttctcgactcacaacgaat

SEQ ID NO: 5338 - DNA, 440 bp, Zea mays
  unsure at all n locations
  Clone ID: LIB3118-002-Q1-K1-A3
ttgacggacgcgtccgggacaatcagctctctaattgcggcatcaacgaggcactatcttctccgctgaatcatcagggaccattccacacttctgagcttggtactgacagatgccgatggccaaggcacattgtgcatgggagcagagcagctgaaggagttcagagagaaccagttgtcggcctcagcatgttccaacaggactcaggtcccagcctgcaacatgaagctcaagtatgctccatatcttgaactgcctggtggtatggcgttgcaaggcgccactttggtggctatcaaaccctcacctgacggaagcaatggaagccaccctaaccgtanagaagccgacgcatntgtctntggagcatttgatgggccatttaaggctgctgtgaaggttttgatgaagaggcgcacttaccttctggagatgaa

SEQ ID NO: 5339 - DNA, 433 bp, Zea mays
  Clone ID: LIB3118-002-Q1-K1-A4
gtaactgccgcatctcaagtctcaaccctcgcctccaatcgcaacgctcccgaggagagccaggaggaggtgacggcggcgccgcgaggaaggagggatcgatcgaggatggtggacgtctcgcgcgtgcagaaggagctcaccgagtgcaaccgcgaccgggaggtatcgggcgtctccatcgcgctccacgacggcgccaacatctcccacctcaccggcaccatcgccgggcccgccgacagcccctacgagggcggcacgttcgtcatcgatatccgcctgcccggtggatatccctttgagccgccgaagatgcagttcatcaccaaagtatggcaccctaacatcagcagccaaaatggagcaatttgcttggacattctgaaagatcagtggagcccagcccttaccttgaagactgcgctccttt

SEQ ID NO: 5340 - DNA, 318 bp, Zea mays
  Clone ID: LIB3118-002-Q1-K1-A5
atggacccaaaatcaactggacgaaaaggcggcttatcctcgaatcaacgatttcaccactgccgcgctggaagatccatcgatatgaatctgctgtgaaggaactgagggtatgcaccaagcctgcctggtgcctacacgtggttgccccggatctgtcaatagatcatcgtctgcagcgattgagttcaccccttgcactagtgtttaagatcaatgcaagcaattgatccgaaaacatcacctgtgttctacctgtacatgatgtagaagacatgtttgaaacctttttaagttagtgaaatgttggattttttt

SEQ ID NO: 5341 - DNA, 250 bp, Zea mays
  Clone ID: LIB3118-002-Q1-K1-A7
gctgcgtcgtcccaggcgtgacggcaagactgttctaggtggctttgtctgatgttcatttggtggctttggctcagcagtttttgctgggtgctaattgagcggtgtttttgggttagtcgtctttatttgtgtccattgaatccttgctggtctagcttggcgtaattcagttggggacgttattttgtcttttaagtgctgatattgtctgccttcagtaaagtaaagtggaaaccatgaaccaaag

SEQ ID NO: 5342 - DNA, 365 bp, Zea mays
  Clone ID: LIB3118-002-Q1-K1-A8
acggcaaactgtactacgtgcatttctctgattatcatctcgtacttaaggctcatcagctgcgtctctatgctaatctcagctaccatctcatttaactcattctattcaagcacaacctataccaagctcaactacacatttcaataatcccattgagtacatcatctcatatcttaagcgcatatatcggccgctcaaagacttgtaagaaaagcaaccctgcaccaaagaatcgatattcaagcttcagcataagaagctccactgttcaatctaacgcttatacaactgttttttgtttacaactagaccaaaaccatgcttcatttcatcccaattacatccatgttactttttaatcc

SEQ ID NO: 5343 - DNA, 134 bp, Zea mays
  Clone ID: LIB3118-002-Q1-K1-A9
gcgatctgaagcgactagtcgaaggcggcggcggctgcgatggggagcgacctggagacgtgatggaagaagaccccggtggctctgatgcccatcgcgaagtgtgttggtggaaagaagctctgcaagcggac

SEQ ID NO: 5344 - DNA, 334 bp, Zea mays
  Clone ID: LIB3118-002-Q1-K1-B11
gccctggccccatccagttcagtggccctggaagtaatgactcgaaccatactttgatgctggaactgggtgctgcgctatatagatgcgtcctttactttgttcttacagtttttgggagtggagactggccaatggatcggcatataggtctgcatgtggtgtgtgaattggtttaataagaggttagattgtgatttattgtgtagccgactggatgtagtagcaaaataagaacagggttattgagttacttgtttgtatgatgtacgcaccaactgactggtgttgtagcttcgattgtggcccccgctagttggctggttgcaatctc

SEQ ID NO: 5345 - DNA, 383 bp, Zea mays
  Clone ID: LIB3118-002-Q1-K1-B12
agaagatccaggccgccctgcctcagggcccctacgccgtcaacctcatccactcgccttttgacagcggcctcgagaagggcaacgtcgatctcttcctcgagaaggtcgtcactgtggtggaggcctcggcattcatgacccttatattgcatgtcgtgcgctaccgcgctcgcggcctctcgcgcaacgtcatctgttcggtcaacatccgcaaccgcatcatcggcaaggtctcgcgcaccgagctcgcctagatgttcatccgaccggccccggagcacctgctttagaagctcatcgcctttggcgagatcacccaggaacaggccgagctcgcgcgccgcgttcccgtcgccgacgatatcgctgtcgaggctgac

SEQ ID NO: 5346 - DNA, 449 bp, Zea mays
  Clone ID: LIB3118-002-Q1-K1-B3
gtcccacaaaatcaatattataatagaaaaaactctactaccagacgtccagactccagacccaccggtcaccaccgcgtcgccgccgcccttctccgcccccaccttatattataaatacggcaggaacggaaagcgccagagatgggaatcacctcctcaacctccagcccaacctccagcccggaatcgagagcaatggcgctcgccaaggccaaggagatcgttgcctccgctcccctcgtcgtcttcagcaaaacttcctgccctttctgcgtccgtgtgaagcagttgttcgagaagctcggagcaagctacaaggccattgagttggataaggaaagtgatggagctgagctccagaatgccctgaaggagtggactggacagaggactgtcccaaatgtcttcatcaatgggaagcatattggcggctgtgatgatactat

SEQ ID NO: 5347 - DNA, 310 bp, Zea mays
  Clone ID: LIB3118-002-Q1-K1-B4
catagacagtgtcaatcatattctacaatataccatcatatggcgaccaagggatttacgggcattatgctccatgctgtttctacatgtcttgttaacgcgacaattatattatcaatgctcacaagcatcctatagctctacatacttgaatcatactttccatcaattatagcttctatatgccaaaacccagatctataaccatatacgctgcaacaagcaatcgtagctagcatcatatctttatcgtccttgaagttcatacaatttcagccctatcttaaggcagtcattgagacaaaccatc

SEQ ID NO: 5348 - DNA, 366 bp, Zea mays
  Clone ID: LIB3118-002-Q1-K1-B5
gcaaaggctgcgaagcaagcgcgacttgagaagtttgagataccagtcaaaatcaagctgagaccagagccatggacccccgagtcgggactcgtcactgctgccctcaaactcaagagggaggtgatcaggaagacgtacgagaacgatctggctgagttgtacgcatgatggttctactctttttgatacgtttagtgtggaaaatgtgtagagtgtcaatgtcacgctgagatctatggtaatttgataccgattatcgttctgggattattattattattttgttcagttagaggagatatataaaccttgaagttttgagttatatggcttctcttgatgccgagaagctatattgcgatg

SEQ ID NO: 5349 - DNA, 443 bp, Zea mays
  Clone ID: LIB3118-002-Q1-K1-B6
caacaagcaacatagaaagtggaatccagtagcaacaatagagcaacaatggcgaccaagagattttccctccttatgctccttgctctttctacatgtgttgctaacgcgacaattttccctcaatgctcacaagctcctatagcttcccttcttcccccataccttccatcaattatagcttcaatatgtgaaaacccagctcttcaaccatataggcttcaacaagcaatcgcagcaagcaacatacctttatcgcccttgttgtttcaacaatcgccagccctatctttggtgcagtcattggtacaaaccatcagggcacaacagctgcagcaactcgtgctacctctgatcaaccaagtagctctggcaaacctttctccctactctcagcaacaacaatttcttccattcaaccaactgtctacactgaaccctgc

SEQ ID NO: 5350 - DNA, 451 bp, Zea mays
  Clone ID: LIB3118-002-Q1-K1-B7
cccacgcgtccgcccacgcgtccgcccacgcgtccgccaccattcctcctccggatttcggagtcagcggtggtgaaggtagcgggcgcggaggaagatggggctcgcgttcgggaagctcttcagccggctcttcgccaagaaggagatgcggattcttatggtcggtctcgacgccgccggtaaaaccaccatcctctacaagctcaagctcggcgagatcgtcacaaccatccccaccatcggtttcaatgttgaaactgttgagtacaagaacattagcttcacggtctgggatgtcgggggtcaggacaagatcagacctctctggaggcattacttccagaacacacagggtcttatctttgttgtggatagcaatgaccgtgaccgtgttgttgaagccagagatgagctgcacaggatgctgaacgaggatgagctacgtgat

SEQ ID NO: 5351 - DNA, 438 bp, Zea mays
  unsure at all n locations
  Clone ID: LIB3118-002-Q1-K1-B8
acgcaacaagcaacatagaaagtgtaatccattttcaacaatatagcatcaatgtctaccaatgtattatcggtcattatgctcgttgctgtttctacatgtgttgctaacgcgacaattttccctcaatgctcacatgcttctatagcttaccttgttnctgcatacctttcatcaattatagcttcaatatgtgaaaacccagctcttcaaccatataggctttatcaagcaatcgcagcacgcaacatacctttatcgcccttgttgtttcaacaatctccagccctatctttggtgcagtcattgttacaaaccatcaaggcacaacatcttgaacaacttctgctacctctgatcaaccaagtaactctggcatacctttctccctactctcagcaactacaatttcttccattcaaccaactgtctacactg

SEQ ID NO: 5352 - DNA, 432 bp, Zea mays
  Clone ID: LIB3118-002-Q1-K1-C1
ctacggtcccacacaatcaatattataatagaaaaaactctactaccagacttccggactccatagcgacctatcaacaccgggtggacgacgaccttcttcgcccccaccttatattataaatacggtatgaaccgaaaacgccatacatgggaatcacctccttaacctccaacccaaccttcagcccggaatctacaaccatggccctcgccaaggccaaagaaatcgttgcctccgctcccctcgtcgtcttcatcaaaacttcctgccctttctgcgtacgtgttaagcaagtgttcgagaagctcagatcaagctacaaggccattgagttggataaggcacgtgatggaactgagctccagaatgccctgaaggagtggactggacagaggactgtcccaaatgtcttcatcaattgcaagcata

SEQ ID NO: 5353 - DNA, 365 bp, Zea mays
  Clone ID: LIB3118-002-Q1-K1-C11
gatgcttacaacgtaattccagagtcagcatccttcggcgggaccttcaggagcttgacaacagaaggcttttcgtatctcatgaagaggatcaaagagatcatagaaggtcatgccgccgtccaccgctgcaccgccgccgtcaacttcatgcaggagaagctccgcccgtacccagccaccgtgaacgacgaatggatgtaccgtcacgccagagaagtggcagaggccatgcttgggcaggacaaggtgagtgtaggcgcccagatgatgggatccgaggatttctccttctacgcggagaagtttgcaggggcgttcttcatgatcggagtccgcaacaagagcatggaggaggcgatgca

SEQ ID NO: 5354 - DNA, 338 bp, Zea mays
  Clone ID: LIB3118-002-Q1-K1-C12
cggacgcgcgggcggacgcgtgggcagacgcgtgggctccagtcatacagaatccgggtcgccctcagcttcgagggggttcagtatcaactgggtgatatctgcctgaggataggaaaatgtgttcccaataattctgatgcactggtaggaatcatgatgtaggtagagtattatcccctaacttccattgcaatatgcaaggcagtcatggaggacttctttgacatatggcagggaacaatttcgaagaagtcattacctgggcaaattattcatggagaactcaacttttcacaatatggtcgttcagatcaatattcatttccacatactgc

SEQ ID NO: 5355 - DNA, 400 bp, Zea mays
  Clone ID: LIB3118-002-Q1-K1-C2
ccggccctctctagtttctaccccggcccccaacattggcctgatgctgctgccatgtagcccagcgctcccccctcggcttcaccggcggcggcggcaacgacggtgaaaactacatcgggtgctagctccgacggtggtgcgtgccctgttgacgatagggcacgcggggcgcgggcagcttgtaagcgttcgatcggccatgtagggcaactatacatctttggcaggtctccaactctccatcatcctccgtgggagagaagatggtaatggagtgcgtgtgtatgtatgtgtatgcccagggcgcgcgcgcgcggctctgggcgagtcacagtagagatgcaatatcatgtatccagtatctttcttacaacacaaacagtgagaaattattagt

SEQ ID NO: 5356 - DNA, 293 bp, Zea mays
  Clone ID: LIB3118-002-Q1-K1-C3
gacgtcgtcaaggccatcgagaaggtgggcacccgcaacggctccacctccaaggtggtcaaggtcgctgactgcggacagctctcctagatctctctgatctggtctgttcggccgccctccctccgtcatcgtcgactccccctgcgtccgttcctttggatctgaataagatggtggtgatctgagtggtggtcttagtttatcatgtatcgctcgcagtttaatttagcggtttaggtgtggatctgtgaaccccatggcgcctctgcttgattcgtgtttcacctgtt

SEQ ID NO: 5357 - DNA, 450 bp, Zea mays
  Clone ID: LIB3118-002-Q1-K1-C5
gcttgacgtcactcctctctctctgggtctggagactgccggaggagtgatgaccgtccttatcccgaggaacaccaccatccccaccaagaaggagcaggtgttctccacctactcggacaaccagcctggtgtgttgatccaggtgtacgagggcgagaggacccggacccgcgacaacaacctgcttgggaagttcgagctctccggcatcccaccggctccccgtggtgtcccccagatcacggtctgcttcgacatcgacgccaacggcatcctgaacgtgtctgccgaggacaagacgacggggcagaagaacaagattaccatcaccaacgacaagggccgtctgtccaaggaggagatcgagaagatggtgcaggacgcggagaagtacaagtccgaggacgaggagcacaagaagaaggtggagtccaagaactcgctgga

SEQ ID NO: 5358 - DNA, 417 bp, Zea mays
  unsure at all n locations
  Clone ID: LIB3118-002-Q1-K1-C6
agaaaaccctagccgccgccaccgaagcggcctcccaggtaagcaggagcgtccaccccggcgccgtcatgaagcgcaatccccgcgtcacgagctcccgccggaagtgccgcaaggcgcactttacggccccgtcctccgtccgccgcgttctcatgtccgccgggctgtcgacggagctccgccacaagtacaacgtgcgctccatcccgatccgcaaggacgacgaggtgcaggtcgtgcgcggcacctacaagggccgcgaggggaaggtggtgcaggtctaccgccgccgctgggtcatccacgtcgagcggatcacccgcgagaaggtgaacggctccaccgtgaacgtgggcatccacccctncaaggtgatcgtcactaagctgaagctcgacaaggaccgcaaggcgc

SEQ ID NO: 5359 - DNA, 426 bp, Zea mays
  Clone ID: LIB3118-002-Q1-K1-C7
agaagaccctagccgccgccaccgaagcggtctcccaggtaagcaggagcgtccacccctgcgccgtcgtgaagcgcagtccccgcgtcacgagctcccgccggaagtgccgcaaggcgcactttacggccccgtcctccgtccgccgcgttctcatgtccgccgggctgtcgacggagctccgccacaagtacaacgtgcgctccatcccgatccgcaaggacgacgaggtgcaggtcgtgcgcggcacctacaagggccgcgaggggaaggtggtgcaagtctaccgccgccgctgggtcatccacgtcgagcggatcacccgcgagaaggtgaacggctccaccgtgaacgtgggcatccacccctccaaggtgatcgtcactaagctgaagctcgacaaggaccgcatggcgctcctggacc

SEQ ID NO: 5360 - DNA, 435 bp, Zea mays
  Clone ID: LIB3118-002-Q1-K1-C8
acgagaaaaccctagccggccgccaccgaagcgttctcccaggtaagcaggagcgtccaccccggggacgtgaggaagcgcaatccccgcgtcacgagctcccgccggaagtgccgcaaggcgcactttacggccccgtcctccgtccgccgcgttctcatgtccgccgggctgtcgacggagctccgccacaagtacaacgtgcgctccatcccgatccgcaaggacgacgaggtgcacgtcgtgcgcggcacctacaagggccgcgaggagaaggtggtgcaagtctaccgccgccgctgggtcatccacgtcgagcggatcacccgcgagaaggtgaacggctccaccgtgaacgtggacatccacccctccaaggtgatcgtcactaagctgaagctcgacaaggaccgcaaggcgctcctggaccgcaag

SEQ ID NO: 5361 - DNA, 233 bp, Zea mays
  Clone ID: LIB3118-002-Q1-K1-D1
tcgacacgcgttcggccacacatacggttctatatctcaaacattcaatctagggaatcttagagtactttcacttgcatccgatttcataaatcttttataaactaacttaaattcaatccactgaccaatattaataaatgctgttactttaaaaaacttggatctacataacataattgacttccaacacatacaactatcgcaagatgtcttaataacaatcaaactta

SEQ ID NO: 5362 - DNA, 358 bp, Zea mays
  Clone ID: LIB3118-002-Q1-K1-D11
cgggttcgtgaggttctccggggttcgggttcgtgggtgagcggatcgagatggcggcgtcagatgtggagtaccgcggcttcgtcggcggcctcgcctgggccacgtacgaccactccctccacaacgccttcggcacctacggtgaggtccttgagtgcaggatcatcctggatcgggagacgcagagatcgcgctggttgggcttcgtcaccttctccacggaggaggcgatgcggaacgccagaggagggcatgaacggcaaggagctggacggccgcgtcgataccgtcaacgaggcccggtgccgcggctggcggggaggcggcggcggtgggtacggtggtggccgtggag

SEQ ID NO: 5363 - DNA, 443 bp, Zea mays
  unsure at all n locations
  Clone ID: LIB3118-002-Q1-K1-D3
cccacgcgtccgctccaaacgcagcagagcccctagcgccgccggtctcttcagcctcgcgagcacaccgccgccagcccgagtgaccgctgcagcctagggtttccggcggcgatggcgggtaagggagggaagggtctgctggcggccaagacgacggcggccaagagcaccgacaaggacaaggacaggaagaaggcccccgtgtcgcgctcctcccgcgccggcctccagttcccggtgggtcgcatccaccgccagctcaagtcgcgtgcctccgcgcacggccgcgtcggcgccaccgccgccgtctattccgccgccatcctcgagtacctcaccgccgaggtcctcgagctggccggcaacgccagcaaggacctcaaggtcaagcgcatcaccccgcgccacctgcagctcgccatccgcggngacgaggagct

SEQ ID NO: 5364 - DNA, 351 bp, Zea mays
  Clone ID: LIB3118-002-Q1-K1-D4
cccacgcgtccgctccaaacgcagcagagcccctagcgccgccggtctcttgagcctcgcagcacaccgccgtcagcccgagtgaccgctgcagcctacggtttccggcggctatggcgggtaagggagggaagggtcttcttgcggccaagacgacggcggccaaaagcaccgacagggacaaggacaggaagaaggcccccgtgtcgcgctcctaccgcacctgccttcagttctcggtggatcgcatacaccgccagttcaggtcgcgtgcctacgtgcacggacgcgacggcaccaccgtcgacgtctattccgccgtcatcctggagtaccttaccgccgaggtcc

SEQ ID NO: 5365 - DNA, 260 bp, Zea mays
  Clone ID: LIB3118-002-Q1-K1-D5
gcgcccacgcgtccgaacacgcgtccgcttgcttctagtgccattattccacagatccttccaggaattactgtaataggcttggaacacctagatgtgcaagccaacatgcgataacacgcgcttgcggcgagctcttacaacaacctattttcctattgcaacaacaatatttgtgacatctaacaatacaagcgattacaacacagcagcttcaacaggttctaccagcactgagccacctatccatggtgaaccct

SEQ ID NO: 5366 - DNA, 449 bp, Zea mays
  unsure at all n locations
  Clone ID: LIB3118-002-Q1-K1-D6
gccgctgcggtcgccggacctgtcgcgcgtcgtcaactccaaccacttcaacaggctcatggcgctcatggacgactactcggtctccggcaatgtcgcgttcggcggccagatcgacgagcggcggctaaggatcgccccgacgctgctgctggacgtcccgctcgactccgcgatgatgaaggaggagatcttcgggccgctgcttcccataatcacggtggacaagatcggcgagagcttcgctgtgatcaactccatgcccaagccgctggcagcttacctcttcagcaacgacgggcagctcaagcagcagttcgagaggaccgtctcggcgggagggatcatgttcaacgacaccggcatccacctgacaaacccgaacctgccgttcggaggagtcggngagagcggcatgggcgcctaccacggcgccttcagcttcgacg

SEQ ID NO: 5367 - DNA, 444 bp, Zea mays
  Clone ID: LIB3118-002-Q1-K1-D7
gtggaggcttaaaagtgcagtgctctctatggcctccggcgcaaatgcagtggaatcatgcgacacaaggtcaatcgtgtgaggaattggtccccaaccggcatcccacaagttaaacagagaaggggattctttgggttttggttcagaactcccgtgtagatgatttcccagttattacgggtttctgtccatatttcgggaatattttaaactctgttgacattctattgtgtaacactaacactgtgtggcgcactctggttgccgcaagctgccggcatactacaggctctagcccgtcaacgccatgttctaggcatccacggcgtctggcgcggccacgacggccaatggcatcgattgtcatgcgtggagcaacaactgacgggtgttgtgtttccagtgcgacgcgtgcaaggaccgatggtttagttcatagat

SEQ ID NO: 5368 - DNA, 328 bp, Zea mays
  Clone ID: LIB3118-002-Q1-K1-D8
gccacgccttcgaacacgcgtgctctctatcgtctgcggacccgatgcattgcaataactgaagactagggagaggccgtgacgaattggatgtcagccatggtgacagacgttaaaccgacaacgggattcttagccttctagggatcatctgcggtctagatgatctcctaattattacggatgcctagaccatatcttcgagatcattaaaacgtacgctcgacatctgctcttgtgtaacagataacactcgtgtgagaacactctgcatttgccgaagctacctgattgctacatgcattaagtgcgaaacgaactgtgctag

SEQ ID NO: 5369 - DNA, 224 bp, Zea mays
  Clone ID: LIB3118-002-Q1-K1-E1
cccacgcgtccgctccaaacgcaggagagcctctagcgccgccggtctctggagcctcggagcacaccggcgccggcgctagtgaccgatgcagcctacggattccggcggcgatggcatgtaagggagggaagggtctgctggcagccaagacgacggcggccaagagcaccgacttggacaaggacaggaagaaggccctcgtgtcacgctcctgccgaacc

SEQ ID NO: 5370 - DNA, 96 bp, Zea mays
  unsure at all n locations
  Clone ID: LIB3118-002-Q1-K1-E10
cccacgccggncgctgaaccctgctgcggagncgcagctacaaccactaccaaagacccagctagctacggcctactctggacaacaacaacttct

SEQ ID NO: 5371 - DNA, 372 bp, Zea mays
  Clone ID: LIB3118-002-Q1-K1-E11
caagcaatgctagtggcatcatacgtgagacttgcgggtgggacccgcctgctagtgcatgatgtagatggttggcgcgagatggtcagttgggcccagggtcgcgcacttaatgggccgaggcaggatggggttactagggccgcgtagaagcgaagccgttccaagagcaggtccgctgcatcggaagctgtcttggaccagtagaatccttgtctaaaaactttgcgaaggagtggcatggatgcaaggtgggctccacatattcctaagtgtatttccatcatcaattcttgacctttggctctggatagacactttagtaatggggagtatactccttgcttgaacaattcaacttcagactgtgtc

SEQ ID NO: 5372 - DNA, 428 bp, Zea mays
  Clone ID: LIB3118-002-Q1-K1-E2
cggacgcgtgggtccggagcagccgcagtcccaccgaccccgccgccggtcgccctccatctcctcgccgctgcctctcgtttctctttccaataatcaagatgagccgtggtggtagtgccggtggtggtcaaagttctctgggttatctttttggaagcggtgagccccccaaaccagcagtggcaccagctgcaagtgctccacctgttgagaaaccatctgctgcaaagactgatgcgaccaagcaggttgctgctggggttaccagccaaaccaataactaccacagggctgatggtcagaacactggcaacttccttacggaccgtccttcaaccaaggtccacgctgctcctggcggtggctcttccctgggctacctgttcggtggcaactgatgcccgtgctggtgctcaccaaagtta

SEQ ID NO: 5373 - DNA, 436 bp, Zea mays
  Clone ID: LIB3118-002-Q1-K1-E3
caagaagaagcgtagtcgtcgccggaaggaaaggcgcggagcaagatgtcgtggcaggcgtacgtcgacgagcacctgatgtgcgagatcgaaggacagcatctcagcgccgccgccatcgtcggtcacgacggcagcgtttgggcgcagtccgagagcttccccgagttaaagcctgaggaggttgctggtatcataaaggactttgatgaacctggtactcttgcaccaactggtcttttcgttggaggtacaaagtacatggtgatccaaggtgaacctggagttgtcatccgaggaaagaagggcactgggggcattactatcaagaaaaccggcatgtccttgattattggtgtctacgacgagccaatgactccagggcaatgcaacatggtggtggagaggctcggcgattacctgatcgagcagggct

SEQ ID NO: 5374 - DNA, 368 bp, Zea mays
  Clone ID: LIB3118-002-Q1-K1-E4
aaaaaaaaaaaaaaaaaaaaaaaaaaaaataaaaaaaaaaaaaaaaaaaaaagaaaaaaaggtaaaaaaaaaaaaaaaaaaaaaaaaaaaaaaaaaaaaaaaaaaaaaaaaaaaaaaaaaaataaaaaaaaaaaaaaaaaaaaaaaaaaaaaaaaaagggggggcttttttaaggtttcaaagtttacataccggtgatttcatattaaaatttttttaatggggtcctttaatttaaattaattgccctttttttaaaaactttgtacttggaaaaacctggggtttcccaaattaaaaccctttgaaaaaaatcccctttttgcaagtttgttaataaccaaaaggtccccaacaatttgcttttc

SEQ ID NO: 5375 - DNA, 446 bp, Zea mays
  Clone ID: LIB3118-002-Q1-K1-E5
cccacgcgtccggacttccccagctatattgaatgccaagaaaaagttgatgaggcgtaccgagatcagaagttatggacaaggatgtctatcctcaacacggctggctcatccaagttcagcagcgataggacgattcatgagtacgccaaggatatctgggatatcagccctgccatccttccctagaccaggtggatatcaggttctttcgcctatatttctgtgaaccctcaggatcaaggaacagttggtgacgacattaatttgcctcagccccttagcaggaagcgctggtcacctcagttttgtgtagacaaaatctaggcatcgataaatgatgggggactatgcatggtgttttggcagcactgttcagtaccttgccttctaaatctggtttttggtgtgtgtgtgtaagctaataaatgtcgaggcaggattgt

SEQ ID NO: 5376 - DNA, 260 bp, Zea mays
  Clone ID: LIB3118-002-Q1-K1-E6
gcgcccacgcgtccgaactttcccaactatatttaatgcctataaaacgttgatgatgcttacggagatcagaatatatgggcatgtatgtcgatcctccacacggatgtcttatccaagttcaacaccgatatgtctaatcactattacaccactgatatctggtatatcatcccttccatccatccctataccagtttgatatcaggttctatcacctatatttctgagaactatcatgatcaaggatcaattggtta

SEQ ID NO: 5377 - DNA, 443 bp, Zea mays
  Clone ID: LIB3118-002-Q1-K1-E7
ccaactagcaacatagaaagcacaatagtgtaccaacaatggcagccaaaatattttgcttgcttatgctccttggtctttctgcaagtgctgctaccgcgaccattttcccgcaatgctcacaagctcctatagcttcccttcttcccccatacctctcatcagcggtgtcttcagtatgtgaaaacccaattcttcaaccctacaggatccaacaggcaatcgcagcaggcatcttacctttatcacccttgttcctccaacaaccgtcatccctattacagcagttacctttggtgcatttgttggcacaaaacatcagggcacaacaactacaacaacttgtgctagcaaaccttgctgcctactctcagcaacagcagtttcttccattcaaccaactggctgcattgaactctgctgcttatttgcaacaacaacta

SEQ ID NO: 5378 - DNA, 453 bp, Zea mays
  Clone ID: LIB3118-002-Q1-K1-E8
gcgccaactagcaacatagaaagcacaatagtgtaccaacaatggcagccaaaatattttgctgccttatgcgccttgatctttctgcaagtgctgctaccgcgaccattttcccgcaatgctcacaagctcctatagcttcccttcttcccccatacctctcatcagcggtgtcttcagtatgtgaaaacccaattcttcaaccctacaggatccaacaggcaatcgcagcaggcatcttacctttatcacccttgttcctccaacaaccgtcatccctattacagcagttacctttggtgcatttgttggcacaaaacatcagggcacaacaactacaacaacttgtgctagcaaaccttgctgcctactctcagcaacagcagtttcttccattcaaccaactggctgcattgaactctgctgcttatttgcaacaacaactaccattca

SEQ ID NO: 5379 - DNA, 76 bp, Zea mays
  Clone ID: LIB3118-002-Q1-K1-E9
ccgcccacgccgtgctcgctgaactcctgggctgcttaaatttgcagcaacaacctattatccatttagctcagct

SEQ ID NO: 5380 - DNA, 343 bp, Zea mays
  Clone ID: LIB3118-002-Q1-K1-F1
aaagaataatcgtagtcatctttcagaaggtatcacacagaacacgatatcaggggtacacgggcgtctacaaacagcgtggtgagctaaatctaaggaacattatctcatatataatctacctcaactatcaccactatagccttttatactcattgggagagctttcctaaattaaaatacttaaaaggtcgttcgtttcataaagatccaatcatcaaatacgctactatagtaccaacttaattattttattttaacaactaaatacatggtaatgcacggcgaatcccaacttttcatctgattaaacaatttctcttcgcacattaatatcaataaa

SEQ ID NO: 5381 - DNA, 54 bp, Zea mays
  Clone ID: LIB3118-002-Q1-K1-F10
cccacgcgtccggatcacactcgtacagagaaggacaaacatccccaaacccta

SEQ ID NO: 5382 - DNA, 435 bp, Zea mays
  Clone ID: LIB3118-002-Q1-K1-F11
cgaaactgaggcaaagatctttgccaaagtcagaggatgggagactgagaatattgaggagattgctgtgaagatctctcaacttcctttggcttcaggcaagcaaaataggattgctgtgattactcaaggtgctgatccagtggtagttgctgaggatggtaaggtgaaaacgttccctgtgatcctattgtccaaggagaagcttgttgacaccaacggcgcaagtgatgctttcgttggaggcttcctctcacagttggttctaggcaagggcattgaagactgcgtgagggcaggttgctatgccgcaaacgttatcatccagcgcccgggctgtacttacccggagaagcctgactttaactagtgcaaaactgaggcacgttatgagagggactgttatatgcacacttaatttgtaaccagtgcgtg

SEQ ID NO: 5383 - DNA, 381 bp, Zea mays
  Clone ID: LIB3118-002-Q1-K1-F12
cccacgcgtccgccagagtgtcatctttgtcaacacccgccgcaaggtggactggctcactgacaagaggaggagcagggaccacaccgtttctgccactcatggtggcatggaccagaacactagagacatcatcatgagggagttccggtctggctgacttcgtgtgctcatcaccactgacctgctagctcgtggtattgatgttcagcaggtgtccctggtcatcaactatgatcttcccacccagccagagaactacctgcatcgtattggtcgtagaggtcggtttggtaggaagggtgttgccatcaactttgtgacccgcgacgacgaacgtatgctgcttgacattcagaagttctacaacgtgttgattga

SEQ ID NO: 5384 - DNA, 160 bp, Zea mays
  Clone ID: LIB3118-002-Q1-K1-F3
cggacgcgtggggcacaagcatacgtctctaccatctgaaatccatcccataaatacacaaggccagtgtacaatgtgatactaggtgctacgtgcctttctttttttaatctgtgctgcactcttgcctgtatgggctgttttgttgttgggttccggt

SEQ ID NO: 5385 - DNA, 419 bp, Zea mays
  Clone ID: LIB3118-002-Q1-K1-F6
ccacgcgtacgaacagatgcaagacgacctgacacagggcctggacacggtctaccttatgcagtctcctggtgatatcggaccactcttggtcaacgaagcacgtttgcctcataaggctgtcactgcctacgacaccgccaccttcatcacacagcacgagcatgacatgcgctacctctccaacatccgatagctcaacgccgacagatctgacatctgacttaaccgattcaacatctgagatttgcgcaccacactgccactgtgcctcagtcaactacatacttgtccaccagaccacaacttcttcaccgacgactgatacaaccacttcctctccagctgagaccgccgctgctcgttctccaccttctcgctgacgacaactactactgccaccaccaccaccactacca

SEQ ID NO: 5386 - DNA, 389 bp, Zea mays
  Clone ID: LIB3118-002-Q1-K1-F7
agaagatccaggccgccctgcctcagggcctctacgccgtcaacctcatccactcgccttgtgacagcagcctcgagaagggcaacgtcgatctcttcctcgagaagggcgtcactgtggtggaggcctcggcattcatgaccctcaccccgcatgtcgtgcgctaccgcgccgtcggcctctcgcgcaacgccgacggttcggtcaacatccgcaaccgcatcatcggcaaggtctcgcgcaccgagctcgccgagatgttcatccgcccggccccggagcaccttctcgagaagctcatcgcctcgggcgagatcacccaggagcaagccgagctcgcgcgccgcgttcccgtcgccgacgatatcgctgtcgaggctgactcgggc

SEQ ID NO: 5387 - DNA, 456 bp, Zea mays
  Clone ID: LIB3118-002-Q1-K1-F8
cgaaaaacggtgactattgaggaccatcctcacttattggctgggaagcatgcatcagtgcacccatgcaaacatgcagctgtgatgaaaaagatcatcgacgttccaatgtcggtgggagtggaaccagaagttgacaagtaccttttcatatttttgaaattcatagcgacagtcataccgactattgagtacgattatacaatggacgtcgaccttggcagtacaagctgattattggttggcttgaagcttgtcacttgtctcgggaaaaggaagcaccctaccagaaggcgcaggaagaaggctgaattgcgtgtttgtggttgaacatttgtgcatatgtgcttgttccttggatcggtttgcatttgtgaacaaactctgaaaagctcaaaggcaagacccatcttgtacattctgtgacgctgtcagcttgtgaaatccattcgtaat

SEQ ID NO: 5388 - DNA, 201 bp, Zea mays
  Clone ID: LIB3118-002-Q1-K1-G1
aattaaacttgtgtcataaacatacatcttttctcatctataaaccatcccataaatacacagcgtcaatattcaactgcgataatatgttctatctacaataacttcatcttaatctgaactacacatcattaatgaccctcacgttctacttcttagcttctaccataccgacatccaaattcacaacaccgaccgttc

SEQ ID NO: 5389 - DNA, 291 bp, Zea mays
  Clone ID: LIB3118-001-Q1-K1-A11
gtaggctgcgagaagacgacagaagggtaccggtgcaagaggacgacagaagggtacggctgcaagaagacggacagaagggtacggctgcgagaagacgacagaagggtacggctgcgagaagacgacagaagggtacggctgcgagaagacacagaaggacactctctgaaacacttaaacaaatccctgtgtccgcaataagataaattcaataattaaattataaataaattcttctaaatagccaaaaaaaaaaaaaaaaaaaaaaaaaaaaagggggccgtttta

SEQ ID NO: 5390 - DNA, 242 bp, Zea mays
  Clone ID: LIB3118-001-Q1-K1-A9
taggctgcgagaagacgacagaagggtactgctgcgagaagacgacagaagggtacggctgcgggaagacgacagacgggtactgctgcgagaagacgacagaagggtacggctgcgagaagacgacagaagggtacggctgcgagaagacgacagaagggacactctctgaaacacttatacaaatacctgtgtacgcaataagataaattcaataaataaattataaataaattcctcta

SEQ ID NO: 5391 - DNA, 381 bp, Zea mays
  Clone ID: LIB3118-001-Q1-K1-C11
gctgcgagaagactacagatgggttctgctgctttaagacgacagaagggtacggctagggagaagtggacagattgggacggctgcgaggagacgacagaagggtacggctgctagaagacgacagaagggtacggctgcgagaagacgacagaagggtacggctgcgagaagactacagaagggtacggctgcgagaagacgacagaagggtactgctgcgagaagacgacagaagggtacggctgctagaagacgacagaagggtacggctgcgagaagacgacagaagggtacggctgctagaagacgacagaagggtactgctgcgagaagacgacagaatggtactgctgctataagacgacagaagggtacggc

SEQ ID NO: 5392 - DNA, 115 bp, Zea mays
  Clone ID: LIB3118-001-Q1-K1-D11
gaccgacacgtccgtacagctgcgagaagacgaataatgggttcgagagtgttgtccaaaaagtattcttatggagggtgtgctgtaaagatcaaatatgatagtgggtatatac

SEQ ID NO: 5393 - DNA, 271 bp, Zea mays
  Clone ID: LIB3118-002-Q1-K1-H3
tacacgcgtacgtacggttgttaaaacgacttatgcagaaccttctcaattggggctatcgtgcactaacaaaaggaatctgatcaaaccatttatcttgctgtactatctatatgcagtgatcctcatcgctgcgatggtcgctgatgagccatcgaacgatcaggaaaaatgaacacatcgaatccacgacgagcttagtgaatgcgatgacgtgcagcgaagccttttaagcgaaacgaaattccaactaaatcatgatacccatcac

SEQ ID NO: 5394 - DNA, 395 bp, Zea mays
  Clone ID: LIB3118-002-Q1-K1-H5
tacgggtgcgcactagagacagaggccgcttctatctccaagttgtccatcgcttcttcgagagagaggagctgcgatcatgcactgacgacaacgttcacgaagaacaagcagaacagagtacacgtgagagccttacacgctcgtgtctgcaaggacctgctgcatccacctggtcactttaatgcatttgtcttgcaccagcaccgcatgctcttcaacaagtaccatctcgggttattcggataggtgggtatgcactacttccacatactccgtaacagattctactggcccatgctcagtattgatgagctatggtccatcctaccacactaggtcaaggacaaggacaccggctgcaaagtgccattgctcgatgtcacccaggtcgg

SEQ ID NO: 5395 - DNA, 443 bp, Zea mays
  unsure at all n locations
  Clone ID: LIB3118-005-Q1-K1-F7
tattgagaccaactagcaacatagaaagcacaatagtgtaccaacaatggcagccaaaatattttgcctccttatgctccttggtctttctgcaagtgctgctaccgcgaccattttcccgcaatgctcacaagctcctatagcttcccttcttcccccgtacctctcaccagcggtgtcttcggtatgtgaaaacccaattcttcaaccctataggatccaacaggcaatcgcagctggcatcttacctttatcacccttgttcctccaacaatcatcagccctattacagcagttacctttggtgcatttattggcacanaacatcatggcacaacaactacaacaacttgtgctagcaaaccttgctgcctactctcagcaacagcagtttcttccattcaaccaactagctgcattgaactctgctgcttatttgcaac

SEQ ID NO: 5396 - DNA, 354 bp, Zea mays
  unsure at all n locations
  Clone ID: LIB3118-006-Q1-K1-D7
cagcaatggtcacgactgccgtcgcggcggtcgccggcgccgtgccgccagctcggaaagcgcaagcggtaactgtggccacaaccacagcactacctcccaccctcactagaaggcagctcctcgccgcggtcgccaccggctccacccttcccacggccggcggctnaactgcggcccccaggttcgccgagattccgggatccggcggcgtgaaagccctggacctccgggaaggttcgggagagatcccggccgttggcgaccaggttggcgttcactattatgggagattagcagcgaagcaaggatggcgctttgattcgacgtatgatcacaaggacgagaccggcg

SEQ ID NO: 5397 - DNA, 348 bp, Zea mays
  unsure at all n locations
  Clone ID: LIB3118-006-Q1-K1-H7
tagctttatctactccagagcgcagaagaacccgatcgacaccatgagggtgttgctcgttgccctcgctctcctggctctcgctgcgagcgccacctccacgcatacaagcggcggctgcggctgccagccaccgccgccggttcatctaccgccgccggtgcatctgccacctccggttcacctgccacctccggtgcatctcccaccgccggtccacctgccgccgccggtccacctgccaccgccggtccatgtgccgccgccggttcatctgccgccgccaccatgccactaccctactcaaccgccccggcctcagcctcatncccagccacacccatgccc

SEQ ID NO: 5398 - DNA, 139 bp, Zea mays
  Clone ID: LIB3118-007-Q1-K1-H4
cccacgcgtccgccattccacagtcaccaaagcattatagcaaagcaacaactgacaagagcagagcgagatcgtcgtcagcgagctcagcatagagccatatactaaagagaggatggcggacatcgcgttgctggtg

SEQ ID NO: 5399 - DNA, 261 bp, Zea mays
  unsure at all n locations
  Clone ID: LIB3118-007-Q1-K1-H8
cccacgcgtncgccattccacagtcaccagagcactagagcagagcaacaactgacaagagcagagcgagatcgtcgtcagcgagctcagcagagagccagatacgagagagaggatggcggacatcgcgttgctggtggcggagcagttcgagaagacggcaaggcgaggcgcccccggcggggacggcggcagcggcagcgggaccggcggcgagacgaggaacttcggggcgcgggccaaagtgtggagctcgtgggt

SEQ ID NO: 5400 - DNA, 447 bp, Zea mays
  Clone ID: LIB3118-010-Q1-K1-B6
taaccctacaaaccattgcaacgcaacaacaacaacaacagtttctgccatcactgagccacctagccgtggtgaaccctgtcacctacttgcaacagcagctgcttgcatccaacccacttgctctggcgaacgtagctgcataccagcaacaacaacagctgcaacagtttatgccagtgctcagtcaactagccatggtgaaccctgccgtctacctacaactactttcatctagcccgctcgcggtgggcaatgcacctacgtacctacaacaacagttgctgcaacaaattgtaccagctctgactcagctagctgtggcaaaccctgctgcctacttacaacagttgcttccattcaaccaactggctgtgtcaaactctgctgcgtacctacaacagcgacaacagttacttaatccattggcagtggctaacccattgg

SEQ ID NO: 5401 - DNA, 380 bp, Zea mays
  Clone ID: LIB3118-010-Q1-K1-D10
tatacttggacaaattcgacagccagtaccacttctcttgccagttcacagctgaccttattggcatgaaccacaccgatttcatcatcaccagcacattccaagaaatcgcgggaagcaaggacaccgtggggcagtacgagtcccacatcgcgttcactcttcctgggctctaccgtggcgtccatggcatcgatgttttcgatcccaacttcaacattgtctcccctggagcagacatgagtgtttactacccgtatacggaaaccgacaagagactcactgccttccatcctgaaatcgaggagctcatctacagcgacgttgagaactccgagcacaagttcgtgctgaaggacaagaagaagccgatcatcttc

SEQ ID NO: 5402 - DNA, 232 bp, Zea mays
  Clone ID: LIB3118-011-Q1-K1-A1
aaaggccccaagggttttttttaaaaaaggaaacattttgggcaaacattttttaacttttgggaaaccaacattaaaattttttgggaataggtggtttaaaaaccaaaaccctcccggggaacgtaaaaattattaagttttttcgaaatcctaacgaggaaacccccttttgggggggaaattcttgaaactttgcgggggaaaaaaagccaaaaaaggttttttttcc

SEQ ID NO: 5403 - DNA, 381 bp, Zea mays
  Clone ID: LIB3118-011-Q1-K1-B12
tagtactcagccgccgcaatcaggggggcaggtagctcgagcgcgcgctccacctgcgccgacgcgatgcgggccaagtggaagaagaagaggatgcggaggctcaagaggaagcgccggaaaatgaggcagagatctaagtaggcgcatcttgtgaccgaggatggcgagcttctcctgcaccatggctgtgacgcgttgggatgattgtctccctttgtagacgtgctttgctgtagacgtaggcgatgtaaaccgtcctttttgattaattctagtatgttctgagactgggtttatattgtaatttgaggataattatatgatgctctaagtttattgatattcctgtcactcgaatatgttagatgtcctttcttc

SEQ ID NO: 5404 - DNA, 221 bp, Zea mays
  Clone ID: LIB3118-014-Q1-K1-E10
taaacacatctaatgtcatcctttactttctcacacatgcattgaactttacggtgaacgggcacttcttgtgcatgtgtaactttaataaggacattgattcttactcgaattcgtttcccttatatctcctttctcattgaactgatggcgctagctctctattctttgtctattcttcttactacccccttactcttttttccatattattccaattc

SEQ ID NO: 5405 - DNA, 601 bp, Zea mays
  Clone ID: LIB3118-011-B1-F1B
gagcaccatatttggcacatatccataaatcataatgttaaaccatatattgtaacaacgaaaagaaagcaaaacaaaatggttcagtctcataaatggctctcataaagagatagctaaaatagggaacaggtcgataaccaagtagtttcagaatgcaacttctgcatctctgagctagacacgagcaaatgctacccccaaggtgccaagcaggtgcttcccaatctcccccggtctttattcccctagtccctatgtacatactcctatgaccaagcttcaaaatcctcaaaagaaatcgccgacgatgggcatgtcgtcgaagctccagaggtccatgtcgctaccaacatcctgcgatccatcaaggttcagaaggctatcaactgaatcacttggaccaccatccagaagaaacctcatataggattctaaatctgtcagcccatcagtgagatcaacagcactgttctccagggcaggaagcacaaatgagctgtttgaattgctgtcgacaaatgcagactcgtcgccttccgcaatagtggaaatgggagcaatggaagtgatgtctggagtcttggtatcattctcccag

SEQ ID NO: 5406 - DNA, 291 bp, Zea mays
  Clone ID: LIB3118-001-Q1-K1-C9
tacagctgcgagaagacgacagaagggtactgctgctttaagacgacagaagggtacggcttggagaagagcgacagatggggactgctgctagaagacgacagaagggtacggctgcgagaagactacagaagggtacggctgcgagaagacgacagaagggtacggctgcgagaagacgacagaagggtacggctgctagaagacgacagaagggtacggctgctagaagacgacagaagggtacggctgctagaagacgacagaagggtacggctgctagaagactac

SEQ ID NO: 5407 - DNA, 502 bp, Zea mays
  Clone ID: LIB3118-001-Q1-K1-D12
tcgtcggctgcgagaagacgacagaagggggaatattatatcagttactgtagcttggatcaaaggagaaggggggttttactactagatattgaggcaacaaacacagtagggctgttgtttacataaatttgtcttaccttgtaggtctttcaatctggtttctatctatcatatactttatttccggtgttccagcatcctatgtgatgtggtatcgtcctctttatcgtgcgacaaggtagttttcaatttgattgaattcaattcttatggtatggcatggataattgatattcaagatgatttcagccttttcctaaactataaaaaattgttaatgtcatccacattggctttattgccattgtgaagcattaaacattttctgtagcaacagtatgtacatctggggactctgtgagcagaatgtaagtcaattaatgacaacgttgtcattttgaaactgaaaagcttgtgggtgcaaagtttacattattaa

SEQ ID NO: 5408 - DNA, 104 bp, Zea mays
  Clone ID: LIB3118-001-Q1-K1-D9
ccgtacagctgcgagaagacgaagaattggttctagagttttgtccaaaaagtattcttatggagggtgtgcgagaaagatcaggtatgatagtgggtatatac

SEQ ID NO: 5409 - DNA, 408 bp, Zea mays
  unsure at all n locations
  Clone ID: LIB3118-002-Q1-K1-A6
gcaagcagtacaccatccaggtcggcgagaacgagctcgtcctcaaggagctggagctgctcagcgatggggccaacgtgtacaagctcatcggaccggtgctggtcaagcaggacctcgcggaggccaaggccaacgtcaagaagcgcatcgagtacatctccgcagagctgaagcggatggatcgggcgctcaaagacttggaggaaaagcaaaacagcaagaaggaatcgatattcaagttgcagcagaggatgcaggctgtacaagctaaggcttagacaactgtttgttggttgcaactagtccaaggccatgcttcatttcatcccaattccctccaggtttttttttggtggngaggaatcaggtgtctgatgttctcgtctccacaacgaanaanaaaaa

SEQ ID NO: 5410 - DNA, 229 bp, Zea mays
  Clone ID: LIB3118-002-Q1-K1-B2
tgtttcggtttggtggaccgcatgttgccttaattgcctgttaatattcagagcagcaaggtgcttcatactaacaggcaattaaggcaaggtgctgtttcggtttggtggaccgcatgttgcagataataaattagttgttttgtcaaaaaatacaaaaaataaaaaatagaaaaaaaaataaaaaaacacaacatataaaacataaaaagctaaaacaagcaataaa

SEQ ID NO: 5411 - DNA, 121 bp, Zea mays
  Clone ID: LIB3118-002-Q1-K1-C4
ggacacgcactgcagcggctcattaaactccacctacgtacgctgctacacgcatcgctaccgctgaacttgccagctctgtatcacctagttgtttcgctttctgctgtctacttgtagc

SEQ ID NO: 5412 - DNA, 325 bp, Zea mays
  Clone ID: LIB3118-002-Q1-K1-F5
acgaacagatgcaagaagacgtgagacaggggatgcacacgctctagcttatgcagtgtcctggtgatctcggaccactcttcgtcagcgaagcacgttcgactcacagcactgtcgctgactacgacaacgccacctccatcacagagcacgaccatgacatgagagtcctctgcaaaatctgagagctcagcgctgtcagatctgacatctgagtcttacctatatcatatctgagatctgcacagcaccctgcgagtcaccctcagccaactacatgctcgtccaccagaccacaagttattcagcgaagactagaacaacc

SEQ ID NO: 5413 - DNA, 262 bp, Zea mays
  Clone ID: LIB3118-002-Q1-K1-G11
aagaaacgcttgcgtgggcgtgcctgcaggcacgcgtgtagtagctgcggtattagtatatatgcttagatgttcagtcactttctttaagtacaatttggctctggtcgtgtaccttattttactatgtatccgggacaacagctagagtgtctgctgcgggtattttcttgtctttgcttcaaaaaaatggcatgtgacattgcgagtttgtactttgtagacaatatatatatgtgtgtgtatgggcttggtttggttc

SEQ ID NO: 5414 - DNA, 438 bp, Zea mays
  unsure at all n locations
  Clone ID: LIB3118-002-Q1-K1-G8
gcgcccacgcgtccgcccacgcgtccgcccacgcgtccgcccacgcgtccgcccacgcgtccggaagcacttgcaacatgaagagatgtggagccccgaggccaactccgggaggtaacacgagctcatctcgcaaggacaacagcaataaggaagcccctgaaggaagctggacctgcccagagtgcaacaacctgaactacccattccgcacggtgtgtaacaggaaaggatgctcgtacagcaagccagccccggcgaacaactgaacccaaccttcgcgcatcgtcgagctattgttgtacccgtagattgtatcctagtcgtgtgcaatctttgaactgcacaaagatgtttttgtgcctggagacgagagattcgattcgttacgcttaatttactattatacatttntattaaatgatgaaanaaagaaaa

SEQ ID NO: 5415 - DNA, 441 bp, Zea mays
  Clone ID: LIB3118-003-B3-F1A
taatttttttttttttttttttgtgccaaacgctcgctccctaattgctggcattgatagaaaacgttgctgcatggctagaacatctcatatctaagtataactacacgcaagtaagtaatgaacttcatcagttcttaacagtcacgactcaagacaagaaacaaacttgctatagccgcaacggctgcaaacttgattacacgggacaaaacattgtcgcagctcttaaaacctacaggcacaggattccatatctaagcaggctccaactgaccgcctactgcagagatcattgcgcgatgatgctcgtggctttaccccatggctaaacaccactacctgatggctcgtggccattggccatggctgctgcagcattctctagctcagagccaagcgcagacatggcacttccgttctgaccaccatttagaattg

SEQ ID NO: 5416 - DNA, 419 bp, Zea mays
  Clone ID: LIB3118-003-B3-F2A
gtgccaaacgctcgctccctaattgctggcattgatagaaaacgttgctgcatggctagaacatctcatatctaagtataactacacgcaagtaagtaatgaacttcatcagttcttaacagtcacgactcaagacaagaaacaaacttgctatagccgcaacggctgcaaacttgattacacgggacaaaacattgtcgcagctcttaaaacctacaggcacaggattccatatctaagcaggctccaactgaccgcctactgcagagatcattgcgcgatgatgctcgtggctttaccccatggctaaacaccactacctgatggctcgtggccattggccatggctgctgcagcattctctagctcagagccaagcgcagacatggcacttccgttctgaccaccatttagaattg

SEQ ID NO: 5417 - DNA, 425 bp, Zea mays
  unsure at all n locations
  Clone ID: LIB3118-003-B3-R2A
caattctaaatggtggtcagaacggaagtgccatgtctgcgcttggctctgagctagagaatgctgcagcagccatggccaatggccacgagccatcaggtagtggtgtttagccatggggtaaagccacgagcatcatcgcgcaatgatctctgcagtaggcggtcagttggagcctgcttagatatggaatcctgtgcctgtaggttttaagagctgcgacaatgttttgtcccgtgtaatcaagtttgcagccgttgcggctatagcaagtttgtttcttgtcttgagtcgtgactgttaagaactgatgaagttcattacttacttgcgtgtagttatacttagatatgagatgttctagccatgcagcaacgttttctatcaatgccagcaattagggagcgagcgtttggcacanaana

SEQ ID NO: 5418 - DNA, 256 bp, Zea mays
  Clone ID: LIB3118-003-Q1-K1-E1
gacggtgctcaacagatcaaaggagaccaagatcactggtgccaatgctttcatgaaatcagatgcccctcttgtgcacctgttcgcgcttccagaaggcaccgtcgtggactcgagatagcgacctctactcggaatctactttcagctcttgcatgtttgtggatgtggccatcatgtactgattttcccttatcaacagttgtcgtgaggctgtatcgtctggagtaaaaaaaaaaagctaaaagccggcact

SEQ ID NO: 5419 - DNA, 316 bp, Zea mays
  Clone ID: LIB3118-003-Q1-K1-E7
cgcgcgcctgggacctacaccgagcacgcgcgccgtatgaccgtcaccgccatgggcgtcgggtacgcgcttaatcgccatggccgaaccctctacggcttatgcggctaggcgtgccgagcggagattggtcggcattgggggtctcgtgttgctgcagttagcaagctggctgcgtggtccgaaaaatgctaaatactgttgaactgtaacgcggtgtgagcacatggtgtgtttgcttatagaaatgttgtcaatgctggcttgttttggactcaaacatgctccattctgggttcaaataagaaaaagaaac

SEQ ID NO: 5420 - DNA, 252 bp, Zea mays
  unsure at all n locations
  Clone ID: LIB3118-005-Q1-K1-D10
gcgtgcttctccctgttcctatggacctatagtagtatactagtatgttgcgagggagcgagtagaccgcgtgtttcgctatcgtgggactagaataagccatgtcaatgaacatgagccgaatagaggctacgtactgttattgtatcagtactagtaccatatatatatatgggcgcactacagtctgtgatgtaatggattgtgctagtatttgacttananaaaaaaaatttatatatataataaaaa

SEQ ID NO: 5421 - DNA, 263 bp, Zea mays
  unsure at all n locations
  Clone ID: LIB3118-005-Q1-K1-E8
attctagatcgcaggcagccgctctagattttttaagtttacgtactccttcattgcgcggcttanaatgttagaggagaggcaggctatcctcaatncactggccgtcgatttacaacgacaagactggggtaacccttgcgatacccaacttaattgccttgcctcacatgcccatttctccttttgacgtgatctcaaataagatagtacccatcgtgttttccaacaattgctcagtcaaaatagcgaattggactctc

SEQ ID NO: 5422 - DNA, 287 bp, Zea mays
  Clone ID: LIB3118-006-Q1-K1-B5
caagatatcatatcatatattatgatctgtagctttaagctgcgacattacaaacaatatactcaataacatacacaatgtcacgtcttcaaaatccagggaaagaacggacaacaaatttaaacaatatattggaatctaaaatgtatctcttttcctgggaagtacaaacagcgctaccttttaagcattctgaatgatggcatgtcttgaatgcgagaaatacctccgaatagtaagcttttgttttaactgaccccgggtaaacttaaaaacctcattgaatt

SEQ ID NO: 5423 - DNA, 71 bp, Zea mays
  Clone ID: LIB3118-006-Q1-K1-C10
gcagattcaagtttggtacaatattatcggtttctctatatattatatataaaaaagaaaaagggtagcat

SEQ ID NO: 5424 - DNA, 327 bp, Zea mays
  Clone ID: LIB3118-006-Q1-K1-H3.F2
gatagaaccgagggctttccattgataatagctgggaaaatattacaccaaatgggctagaaactggaacacctcgaaacgaagatacagaacaaactacagtagaccggccaactagacacacaaccgaccacggccgtcatatcaaagcatcaaaaggggaggcggcctagccgccgaagccgtaaagcgtgcggccctggcgcttgagcgcgtagacgacatccatggcggtgacggtcttgcggcgagcgtgctcggtgtaggtgacggcgtcgcggatgacgttctcgaggaagatcttgagcacgccgcgggtctcctcgt

SEQ ID NO: 5425 - DNA, 441 bp, Zea mays
  Clone ID: LIB3118-006-Q1-K1-H3.R2
ccccgcgtccgcccagcgtccgcgggcgcgtgggcggacgcgtgggcccgcacagaggcacgattctcctcctccgtccgcgtagctctcggtttcggcgatgtcggggcgcggcaagggcggcaaggggctgggcaagggcggtgccaagcgccaccgatggtgctgcgcgacaacatccagggcatcacgaagccggcgatccgtaggctggccaggaggggcggcgtcaagcgcatttctgggctcatctacgaggagacccgcggcgtgctcaagatcttcctcgagaacgtcatccgcgacgccgtcacctacaccgagcacgctcgccgcaagaccgtcaccgccatggatgtcgtctacgcgctcaagcgccagggccgaacgctctaccgcttcggcggttaggccgcctacccttctgatgctttgatatga

SEQ ID NO: 5426 - DNA, 282 bp, Zea mays
  Clone ID: LIB3118-008-Q1-K1-A12
gccactatatgcttaatccagcgacctttatctcattcagcactaggattctcatatggcgggtcatttataagcgtgccatgtgcccactaaacttgttcatcattttagatcaattctgttcccttttgtccgactatgagcttgcttttgcttatactcacccacacaataatgcttgtctgagaagtggggccttctgtaataagtgattaattttttaaatcctaaccctttaggttttcaaatttatctttcgccttaattcgaaaaaaaaaatat

SEQ ID NO: 5427 - DNA, 197 bp, Zea mays
  Clone ID: LIB3118-008-Q1-K1-B6
cccacgcgtccgcaacttgctttgacaaacccatcagcgttctaccaacaacccatcattgggggtgccctcttttagattgcttatgagttatagttcaataataaagtctttcgtctgatgttcgtggcttcccagaaataataaagcccatttctaaaacaaaaccagcataacataaactcagacaacaaaac

SEQ ID NO: 5428 - DNA, 293 bp, Zea mays
  Clone ID: LIB3118-008-Q1-K1-B8
aggatctgcttcaactaagcccaagcactactctccagacctccaccaaggagatggaccccatccttctcaggaacttgaagcactaactgaatgtcattatcaggagctgccaagctgagccacacgattgatatcttgcgctcgcttgctgcgacaaattcatctatagcatcgctcgcgtctcatgtgtgatcttaatatacacatccgtgctattcaaggacatccattaactgctgctgaactggtcttatcttgtctgtgcccctatatggacctttttacactat

SEQ ID NO: 5429 - DNA, 180 bp, Zea mays
  Clone ID: LIB3118-008-Q1-K1-C9
gggcctacgacccaggggctgcggtcttacataacctaaattctattcactgcacgtccttatcaacactgtccactgaaaaaccctaacgctacccaacttaatccccttataatacattctcatttttccacatagtgcaattatataataggcccgcacccatcttcctttcaaaca

SEQ ID NO: 5430 - DNA, 196 bp, Zea mays
  Clone ID: LIB3118-008-Q1-K1-D10
cccacgcgtccgcaacttgctttgacaaaccctgcagcgttctaccaacaacccatcattgggggggccctctcttagacgtcttatgagttatacctcaataataacctttttcggctgacgtttgtggcttaccaaacataatatactccctttctgaacctgtatgatgaggatggagatgctgcttcataca

SEQ ID NO: 5431 - DNA, 151 bp, Zea mays
  Clone ID: LIB3118-008-Q1-K1-D8
ggacaagcaaagacataacacttcgataagggcaaacaaaaacagaaaaagggccggcggttaacaacgccaagaaagggaaaacccaggccgtaccaaacaaaagcgccaagcagcaacaaccccctagagccagccagcggaaaagcga

SEQ ID NO: 5432 - DNA, 87 bp, Zea mays
  Clone ID: LIB3118-008-Q1-K1-E5
aaaaaaaaaaaaaaaaaaaaaaaaaaaaaaaaaaaaaaaaaaaaaaaaaaaaaaaaaaaaaaaaaaaaaaaaaaaaaaaaaaaaaaa

SEQ ID NO: 5433 - DNA, 307 bp, Zea mays
  unsure at all n locations
  Clone ID: LIB3118-008-Q1-K1-E8
accacgcggccgcggacgcgagggngggaatttgaacaggaataggaatggcatctactgggggggcaacaacggagggcaaggggattgcaagccctttacttgccgcagtgcatatatagggggtcatccaagagatgagagcaactactggaaacacactcaacccacaaagaacagcaaagaacgaggctaaaataaacaagagaggaaaggaatctagccccgccgagctaaggcacaaggaagacctgcttgttcccagccgaggtaaaaaagaagccggcagtgggaaaaatggacagac

SEQ ID NO: 5434 - DNA, 170 bp, Zea mays
  Clone ID: LIB3118-009-Q1-K1-B6
accgatgcacaattcccgaatcgacgcacgcatccacgcgtgcgtatagcttaaaattggagcttcatagaaacaaacttagacacttgaactaataagggtgctgtcaacaattataggacccctcccctttttgactgctaaataaaggctttaacaatgtgcagaca

SEQ ID NO: 5435 - DNA, 280 bp, Zea mays
  Clone ID: LIB3118-009-Q1-K1-F8
cggacgcgtgggttgcttctgaaagcgcaactataaataatgcttatcctgctggggtacgggacaccagagggtgggtgaggcagtatagagagcgacgtcaaagcatgatctctatgcatcaagatttgtcttctaagctattcggaagtacgcttaaaccctgcattagtggacgggggaacgaaataacgggatttaacgacttgtttcatttcaaagcacattgagttattgtctcaaaaacaaacgttggcgcaataactacaacaatattttt

SEQ ID NO: 5436 - DNA, 407 bp, Zea mays
  Clone ID: LIB3118-010-Q1-K1-A2
tcgcccacgcgtacgtaacaacataaaaagcgacattagtgtaccaacaatggcagccaaaatatggggcctccttatgctccttgggctttctgtaaatgctgctaccgagaccattttcccgcaatgcttacaagcttctatagctttcgttattgccccgtacctctcaccagcgagtgtttttcggtattgtgaaaacccattctcttcaaccctatatgatccaacagtcgaaaggatctggcatcttaccttaatgacccttgtttctccaacaaacatcatctctatttcaggatttacctttggtgcatttattggcatacaatatctgggaactactgctacttcaacttgggctaacttactttgaagctaatttttagtaacagtagttatttttt

SEQ ID NO: 5437 - DNA, 108 bp, Zea mays
  Clone ID: LIB3118-010-Q1-K1-E4.F2
gagaatataccatcctcgtcatgtttgggtgtgttaatgctcaattaaccgagtagcacaccacaacgatgatttatacttgattactggtaatcttagagcgaaaaa

SEQ ID NO: 5438 - DNA, 373 bp, Zea mays
  Clone ID: LIB3118-010-Q1-K1-E4.R2
cggacgcgtgggccagcacgctgcgcctaacgctggcaccctcttacaactgcaacaattgctgccattcaaccaacttgctttgacaaacccaacagcattctaccaacaacccatcattggtggtgccctcttttagatttcttatgagttatagttcaataataaagttttttgggtgatgtttggggcttcccagaaataagaaagtacatttctagattcttatgtgcttctagtctccaaatgtggttgatagttattttgctctaagattagcagtaatgaagtataaatcatcgttgtggggtgctactcgggtaattgagcattaacacacacaaacatgacgaggatggtataatctcaaaaa

SEQ ID NO: 5439 - DNA, 632 bp, Zea mays
  Clone ID: LIB3118-010-Q1-K1-F7.F2
acatagaactggggccattcattcattcttttatttatttcattcattcatttcacccatgacaaatattatctcttcttatttcccacaacatttactggacattggcatgatgttcagattagaagaatggcgcacggtggggaattcccttgcgtctgtgacgagcaaccctttttggtggtggttcttcgtagttcttgtcattgcagctgttttggtcatttgtagtacttgaaccaacattgtcaatcctagccacatgatccataccattggaccgagggttgttgccaaccatagcttgcataccagcttccatatttaagcctctaagattgcatccaagagagcagaagcgaaatgcatcaagtagcacacggctacatgtctcacagctatgtgttgatgatgtgggtgccttacaaatggggacactagaagcacgcagttgtggccgctcattcaggaatacaatccttgcactattgattacataagtttgcacatcgctgacatcaaggatatcctcaatctcggacaccctcacaacgtcatggtacgatgaacgccttatctggattacacgggtgggtgggaatgagtcacttgaacgacaatagttacagaaa

SEQ ID NO: 5440 - DNA, 632 bp, Zea mays
  Clone ID: LIB3118-010-Q1-K1-F7.R2
cccacgcgtccgcaaagaacacaatagaccactgatttcacaatgaaaagggagacaatgccttcatggctagaactgttgcttgcaacacaattctttacgacttgtgctaaccatcttcttgctagtcgcaatgaatgtaacctattttgcacccagtgtgagaccaaaccagctgctttctgtaactattggcgttcaagtgatcattccacccaccgtgtaatccagataaggcgttcatcgtaccatgacgttgtgagggtgtccgagattgaggatatccttgatgtcagcgatgtgcaaacttatgtaatcaatagtgcaaggattgtattcctgaatgagcggccacaactgcgtgcttctagtgtccccatttgtaaggcacccacatcatcaacacatagctgtgagacatgtagccgtgtgctacttgatgcatttcgcttctgctctcttggatgcaatcttagaggcttaaatatggaagctggtatgcaagctatggttggcaacaaccctcggtccaatggtatggatcatgtggctaggattgacaatgttgggtcaagtactacaaatgaccaaaacagctgccatgacaagaactacgaagaaccaccaccaaa

SEQ ID NO: 5441 - DNA, 299 bp, Zea mays
  unsure at all n locations
  Clone ID: LIB3118-010-Q1-K1-G4.F2
gggtcaaaaaaaggggggtgggaaaaaacccggnttccaaaaaaaaatgggaaaaaaaaaaaagaaaaggggaaaaaattcaattttttgaaaaaaaaaatttaaaggggtgaaataattcccggaaaaaaattttagagaaaaacctttttttaaaaaattaaaaaaggggaaaaaaaaaaaaaaataaaaattggggggtgaaaaaaaaaaaaaaaaaaatttgtttccaaaataaaaaaaaaaatataacgggcggggggggggacccggaaaatttgaagcggggcctgaagggg

SEQ ID NO: 5442 - DNA, 406 bp, Zea mays
  unsure at all n locations
  Clone ID: LIB3118-010-Q1-K1-G4.R2
gttagtttttggtttcatgttggatcagcaatttgttttgagtgttgtcaaagccagaattagtgatatgtttcctgtgtacccgtttcaaacttcatcaagaatgggtgtgctctggatattttgtcgggaatgatatggaacacttaaaagttagctgtcgacaaatgtgcattggttgggcatttgagttttgtttattgccagtgtttttaggaaaccaggttattggcataaactattttgtgatccaaaaaaanaaanaaaaaaaaaaaaaaaaaaaaaaaaaaaaaaaaaaaaacaagnaaaaaaaaaccaaaaaaaataaaaaaaaaaagaaaaaaaataaaaggaaaaaaacaaagaaaaaaatnaaacaataaaaaaataaggggggggccttttt

SEQ ID NO: 5443 - DNA, 472 bp, Zea mays
  Clone ID: LIB3118-011-B1-F2A
gagcaccatatttggcacatatccataaatcataatgttaaaccatatattgtaacaacgaaaagaaagcaaaacaaaatggttcagtctcataaatggctctcataaagagatagctaaaatagggaacaggtcgataaccaagtagttgcagaatgcaacttctgcatctctgagctagacacgagcaaatgctacccccaaggtgccaagcaggtgcttcccaatctcccccggtctttattcccctagtccctatgtacatactcctatgaccaagcttcaaaatcctcaaaagaaatcgccgacgatgggcatgtcgtcgaagctacagaggtccatgtcgctaccaacatcctgcgatccatcaaggttcagaaagctatcaactgaatcacttggaccaccatccagaagaaacctcatataggattctaaatctgtcagcccatcagtgagatcaacagcactg

SEQ ID NO: 5444 - DNA, 510 bp, Zea mays
  Clone ID: LIB3118-011-B1-F3A
caattaaacagctcatttgtgcttcctgccctggagaacagtgctgttgatctcactgatgggctgacagatttagaatcctatatgaggtttcttctggatggtggtccaagtgattcagttgatagccttctgaaccttgatggatcgcaggatgttggtagcgacatggacctctggagcttcgacgacatgcccatcgtcggcgatttcttttgaggattttgaagcttggtcataggagtatgtacatagggactaggggaataaagaccgggggagattgggaagcacctgcttggcaccttgggggtagcatttgctcgtgtctagctcagagatgcagaagttgcattctgaaactacttggttatcgacctgttccctattttagctatctctttatgagagccatttatgagactgaaccattttgttttgctttcttttcgttgttacaatatatggtttaacattatgatttatggatatgtgccaaatatggtgctc

SEQ ID NO: 5445 - DNA, 463 bp, Zea mays
  Clone ID: LIB3118-011-B1-R2A
tccacgcgtgcgcaccatgactagtgctgtagcaaggtcagccaagaggaagagaaagaatctatacaggggtatccgccagcggccttggggcaagtgggctgctgagatcagagatcctcagaagggtgttcgtgtttggcttggtactttcaatagtcctgaggaagctgcaagagcttatgatgccgaagcgcgcaggattcgtggcaagaaggccaaggttaactttcctgatgcaccagcagttggtcagaagcaccgttctggctcagcttctgctaaagcatccaagtcaagttttggacagaagcctatcgtcaaaggaagtaactcctttggctgctcagacttgggctgggagaatgataccaagacaccagacatcacttgcattgctcccatttccactattgcggaaagcgacgagtctgcatttgtcgacagcaattcaaacagctta

SEQ ID NO: 5446 - DNA, 663 bp, Zea mays
  Clone ID: LIB3118-011-B1-R3A
aagaaatcgccgacgatgggcatgtcgtcgaagctccagaggtccatgtcgctaccaacatcctgcgatccatcaaggttcagaaggctatcaactgaatcacttggaccaccatccagaagaaacctcatataggattctaaatctgtcagcccatcagtgagatcaacagcactgttctccagggcaggaagcacaaatgagctgtttgaattgctgtcgacaaatgcagactcgtcgccttccgcaatagtggaaatgggagcaatggaagtgatgtctggtgtcttggtatcattctcccagcccaagtctgagcagccaaaggagttacttcctttgacgataggcttctgtccaaaacttgacttggatgctttagcagaagctgagccagaacggtgcttctgaccaactgctggtgcatcaggaaagttaaccttggccttcttgccacgaatcctgcgcgcttcggcatcataagctcttgcagcttcctcaggactattgaaagtaccaagccaaacacgaacacccttctgaggatctctgatctcagcagcccacttgccccaaggccgctggcggatacccctgtatagattctttctcttactcttggctgaccttgctacagcactagtcatggtgcggacgcgtggg

SEQ ID NO: 5447 - DNA, 115 bp, Zea mays
  unsure at all n locations
  Clone ID: LIB3118-011-Q1-K1-E7
cggacgcgtggggtgaaataagcttttactttctctctgctgtgggtgaagagactgnaatgggggaatttgtaactaacagagggccccgtggatttgtnttaaaaaaaaataa

SEQ ID NO: 5448 - DNA, 265 bp, Zea mays
  Clone ID: LIB3118-011-Q1-K1-E8
cacaattgttgccgttctaccagcacgctgctcctaacgctggcaccctcttacaactgcaacaattgctgccattcaaccaacttgctttgacaaacccaacagcattctaccaacaacccatcattggtggtgccctcttttagatttcttatgagttatagttcaataataaagttttttgtctgatgtttgtggcttcccagaaataagaaagtacatttcttataaaaaaaaaaaaaaaaaaaataaaaaaattattaat

SEQ ID NO: 5449 - DNA, 53 bp, Zea mays
  Clone ID: LIB3118-012-Q1-K1-E2.F1
gcaagatctgacacatcgacagggaacagacccattgatagacttgttcattc

SEQ ID NO: 5450 - DNA, 449 bp, Zea mays
  Clone ID: LIB3118-012-Q1-K1-E2.F2
gcaagatctgacacatggacagggaacagacccattttagactgtgcattcagcctagaagaatccaagcactctatgatctgagcacaacgatctccaagctctaaaaagccattaagtcgacacatgtgtcggggggttttcccatacctcaatgcttggttccacaggcatccgttccacgaattcataagcctcgacaatgtagccagactgtccaagcatagtaacaatgcttgcataatgctctgtagtgggatgtatgccaaaatctttctgcatggattcaaaatgcaacattccttcattaacagatcccaaaattccacatgccaagaaaacatgtctgaacatgccatgatctggcttgtcccctgtctgcttaaaccgttcaaaaaaatctattgcttcttcaccaagaacattgtgcacaaaacctgagatcatag

SEQ ID NO: 5451 - DNA, 448 bp, Zea mays
  Clone ID: LIB3118-012-Q1-K1-E2.R2
ctatgatctcaggttttgtgcacaatgttcttggtgaagaagcaatagatttttttgaacggtttaagcagacaggggacaagccagatcatggcatgttcagacatgttttcttggcatgtggaattttgggatctgttaatgaaggaatgttgcattttgaatccatgcagaaagattttggcatacatcccactacagagcattatgcaagcattgttactatgcttggacagtctggctacattgtcgaggcttatgaattcgtggaacggatgcctgtggaaccaagcattgaggtatgggaaaatttgatgaacatgtgtcgacttaatggctttttagagcttggagatcgttgtgctcagatcatagagtgcttggattcttctaggctgaatgaacagtctaaaatgggtctgttccctgtcgatgtgtcagatcttgc

SEQ ID NO: 5452 - DNA, 201 bp, Zea mays
  Clone ID: LIB3118-013-Q1-K1-G11.F1
ttatttttttttttaatacaacagtcaaacatttcaaaatattcagaatattccaggacattcgcatcatcaccgggcaaatttcaaaacagaacagaaaaaacagcagcatagtgttcagctcgtgttccatcaataccaaagtccagaacattcaggaccgcacattgtgggcatcttattgggaccaaatcagaggca

SEQ ID NO: 5453 - DNA, 601 bp, Zea mays
  unsure at all n locations
  Clone ID: LIB3118-013-Q1-K1-G11.F2
aatacaacagtcaaacatttcaaaatattcagaatattcaggacattcgccatcatcaccgggcaaatttcaaaacagaacagaaaaaacagcagcatagtgttcagctcgtgttccatcaataccagaagtccagaacattcaggaccgcacattgtggccatcttattggaaccaaatcagaggcagccgagagttcgagaggacctgagacgcgcggatcactcggcctgggtgtcggcagcggcgagctcctgctgctggaggcgctcgagcgccttctggtgcgcccacgtctcgattgtaaggtcgggcttcgcgttgaggccgacgccgaggatgacgacggtgaggaaggaggtcacgtagcagggcagctcccaatcctcccacttgcgagattccccggagggcgggcgggcggccggttgaaagaggtaccccttggggcgctcctcgtgacctggggtcgtccaccggccggccccctcgccgcccgncggcgggaaagcgcgctgccccgcgcagccgtgcccccagcataccattaaccgccgacgacatcgcccgcatcggtgcgcgtcgagatcggagagggggg

SEQ ID NO: 5454 - DNA, 604 bp, Zea mays
  Clone ID: LIB3118-013-Q1-K1-G11.R2
aattcttcccccctctccgatctcgacgcgcaccgatgcgggcgatgtcgtcggcggttaatggtatgctgcgggcacggctgcgcggggcagcgcgcgttcgcggcggcggcggcgagggggccgggcggtggacgaccccaggtcacgaggagcgccccaaggggtacctcttcaaccggccgccgccgcctccgggggaatctcgcaagtgggaggattgggagctgccctgctacgtgacctccttcctcaccgtcgtcatcctcggcgtcggcctcaacgcgaagcccgaccttacaatcgagacgtgggcgcaccagaaggcgctcgagcgcctccagcagcaggagctcgccgctgccgacacccaggccgagtgatccgcgcgtctcaggtcctctcgaactctcggctgcctctgatttggttccaataagatggccacaatgtgcggtcctgaatgttctggacttctggtattgatggaacacgagctgaacactatgctgctgttttttctgttctggtttgaaatttgcccggtgatgatggcgaatgtcctgaatattctgaatattttgaaatgtttgactgttgtatt

SEQ ID NO: 5455 - DNA, 264 bp, Zea mays
  Clone ID: LIB3118-014-Q1-K1-D10
cggacgcgtgggtgacacagcaacagttgctgcctttctaccagcagtttgcgggtaaccgggcaaccctcttacaactacagcaattgttgccctttgtccaacttgctttgacagacccagcggccttctaccaacaacacatcattggtggtgccctcttttagattgcttattagttgtaattcaataataaagttttttggatgatgtatgtggccaaccagaaataagaagttacattttcaaaaaaaaaaaaaaata

SEQ ID NO: 5456 - DNA, 434 bp, Zea mays
  unsure at all n locations
  Clone ID: LIB3118-014-Q1-K1-E1.F1
gcgntctagaaccggcgttcgcgcgcagagcgccaggcctgcccgtcggccgacgcggancgcgctcggccgctcgactcgctcacccccgaccagttcgacaacggctactaccggagcctcatggccggcgccggcttgctgcactcggaccaggagctcttcagcaacggcgcactcgactcgctcgtgcgcctctacggcaccaacgccgacgccttctcgtcggacttcgccgcgtccatggtcaagctcggcaacatcggcccgctcacgggttccgcggggggaggtcaggctcaactgcaggacggtgaattcgaattcgtggattcaggacggtgaatgcaccattttggattgatactgctctttttcccccaaaaggaattgtagattttgcattccttgaaggatttcgaatttcgaatatg

SEQ ID NO: 5457 - DNA, 516 bp, Zea mays
  Clone ID: LIB3118-014-Q1-K1-E1.F2
gcgatctagaaccggcgttcgccgcgcagcagcgccaggcctgcccgtcggccgacgccgacgacgcgctcgcgccgctcgactcgctcacccccgaccagttcgacaacggctactaccggagcctcatggccggcgccggcctgctgcactcggaccaggagctcttcagcaacggcgcactcgactcgctcgtgcgcctctacggcaccaacgccgacgccttctcgtcggacttcgccgcgtccatggtcaagctcggcaacatcggcccgctcacgggttccgcgggggaggtcaggctcaactgcaggacggtgaattcgaattcgtgagttcaggacggtgaatgccaccattttgaattgatactgctctttttcccccacaagagttgtagattttgcattccttcaacgatttcgaatttcgaatatgctgtgagtcagctgaagtgatatcgcctcttgtccaaaaaaaaaaaaaaaagggggccgctcgcgatctagaactagt

SEQ ID NO: 5458 - DNA, 517 bp, Zea mays
  Clone ID: LIB3118-014-Q1-K1-E1.R2
actagttctagatcgcgagcggcccccttttttttttttttttggacaagaggcgatatcacttcagctgactcacagcatattcgaaattcgaaatcgttgaaggaatgcaaaatctacaactccttgtgggggaaaaagagcagtatcaattcaaaatggtggcattcaccgtcctgaactcacgaattcgaattcaccgtcctgcagttgagcctgacctcccccgcggaacccgtgagcgggccgatgttgccgagcttgaccatggacgcggcgaagtccgacgagaaggcgtcggcgttggtgccgtagaggcgcacgagcgagtcgagtgcgccgttgctgaagagctcctggtccgagtgcagcaggccggcgccggccatgaggctccggtagtagccgttgtcgaactggtcgggggtgagcgagtcgagcggcgcgagcgcgtcgtcggcgtcggccgacgggcaggcctggcgctgctgcgcggcgaacgccggttctagatcgc

SEQ ID NO: 5459 - DNA, 79 bp, Zea mays
  Clone ID: LIB3118-014-Q1-K1-G1.F1
gaggaaaattagcttcatatgacttatcatatcgacatacaggccacaactcaatgatttaaacatagaacctaaaaag

SEQ ID NO: 5460 - DNA, 454 bp, Zea mays
  Clone ID: LIB3118-014-Q1-K1-G1.F2
gaggaaaattagctgcatatgacttatcagatctacatacagaccacaactcaatgaatgaaacatagaacctaaaaagctagaccaaaagcaacctttcatccagatgacttgcccatccttgaatcacattgattggagtgagcatcacattattatctacatacaactactcaacagcagttcgatatgaacggtatacacatacccatccgtctacatatggaagtccaaggctagtggcccagattgagatttcacctcccaccaacgtacttgtcgatgcaggtgaccagggtgctctctggcacggctccaatcaccgcgtccttcttctcaccattcttgaatatcatcatggtggggatgctccggatgccgaattgggtcgcgatgtcagggttctcgtcagtgtttagcttgtaacacttcagctttccttcggacgcgtggg

SEQ ID NO: 5461 - DNA, 454 bp, Zea mays
  Clone ID: LIB3118-014-Q1-K1-G1.R2
cccacgcgtccgaaggaaagctgaagtgttacaagctaaacactgacgagaaccctgacatcgcgacccaattcggcatccggagcatccccaccatgatgatattcaagaatggtgagaagaaggacgcggtgattggagccgtgccagagagcaccctggtcacctgcatcgacaagtacgttggtgggaggtgaaatctcaatctgggccactagccttggacttccatatgtagacggatgggtatgtgtataccgttcatatcgaactgctgttgagtagttgtatgtagataataatgtgatgctcactccaataaatgtgattcaaggatgggcaagtcatctggatgaaaggttgcttttggtctagctttttaggttctatgtttcattcattgagttgtggtctgtatgtagatctgataagtcatatgcagctaattttcctc

SEQ ID NO: 5462 - DNA, 198 bp, Zea mays
  Clone ID: LIB3118-014-Q1-K1-G8
cggacgcgtggggaagaaactatgtgctgtagtatagccgctggctagctagctagttgagggatttagcggcgatgattgagtaataatgtgtcacgcatcaccatgggtggcagcgtcagtatgagcaatgacctgaatgaacaattgaaatgaaaagaaaaaagtattgttcccaaaaaaaaaaataaaaataaa

SEQ ID NO: 5463 - DNA, 417 bp, Zea mays
  Clone ID: LIB3118-019-P1-K1-A10
attcctaccagcactgagccacctagccatggtgaaccctgccgcctacttgcaacagcagttgcttgcatcaaacccacttgctctggcaaacgtagttgcaaaccagccacaacaacagctgcaacagtttctgccagcgctcagtcaactagccatggtgaaccctgccgcctacctacaacagcaacaactgctttcatctagcccgctcgctgtggccaatgcacctacatacctgcaacaacaattgttgcaacagattgtaccagctctgactcagctagttgtggcaaaccctgctgcctacttgcaacagctgcttccattcaaccaactgactatgtcgaactctgctgcgtacctacaacagcgacaacagttacttaatccactagcagtggctaacccattggt

SEQ ID NO: 5464 - DNA, 418 bp, Zea mays
  Clone ID: LIB3118-019-P1-K1-A11
tccgaagggctaacgactgagcgagtgccactatccctttgcttgccctggagaggagagggtgcgctatgggcgatacagggagcagctccattctggtgcacattctggtggtcgccctatgcctgaccgcctttggcttcgccgtcgccgccgagcgccgccgcagcacgggttcaatagtcacagacagctccaatgccacattttgtgtttatgactccgatattgctactggctacggtgttggtgctttcctgtttcttctctcaggccactcactgctcatgggtgttacaagatgcatgtgcttcggtgcaccacttgcaccaggtggaagcagagcatggtccatcatatacttcgcatcgtcatggatcacatttgcagttgctgaggcctgcctaattgccggagc

SEQ ID NO: 5465 - DNA, 401 bp, Zea mays
  Clone ID: LIB3118-019-P1-K1-A12
gtcaggaacagcagtataaggggccttaagtcaagggtcatcgacttaaaggggggccacagatgattcagctgagcttggatggcaagaggatatacgtgacaaactcacttttcagccgatgggatgagcagtttttcggtgatgatcttgtcaagaagggctcccacatgttgcagatcgatgtcgacaccgagaaaggaggcctggctgtcaaccccaacttcttctgcgtttttggcaccgagcctgatggttctgccctggcccacgagatgagatattctggtggggactgcacctctgatatatggatctgaggtcaaggagtcggcgtaattaacaggctgctggagaatccctgttgttgtatgcactgtaattaacatggtttccgtgcg

SEQ ID NO: 5466 - DNA, 367 bp, Zea mays
  Clone ID: LIB3118-019-P1-K1-A2
aatggcgtcgtcgtctagcagcagccaccgccgcctcatcctcgcagccgccgtcctgctctccgtgctcgcggctgccagcgccagcgccgggacctcctgcgtgccggggtgggccatcccgcacaacccgctcccgagctgccgctggtacgtgaccagccggacctgcggcatcgggccgcgcctcccgtggccggagctgaagaggagatgctgccgggagctggcggacatcccggcgtactgccggtgcacggcgctgagcatcctcatggacggcgcgatcccgccgggcccggacgcgcagctggagggccgcctagaggacctgccgggctgcccgcgggaggtgcagaggggattc

SEQ ID NO: 5467 - DNA, 278 bp, Zea mays
  Clone ID: LIB3118-019-P1-K1-A3
acgcgtccttccacacgttcgccgactctttatctaacccggacataatggcggggggttctatcatcagccaccgtcgcttcatcctcttagacagttcatcatctccgtgctagcggcatgccaccgccagggccgggaccttcttttttctggggaggaccatctacggataagtcgccttctccgacgacatcgacatgctcaaaggctcatgcggcaagtcgctcgcgccgttcccgcaaggctgcttctactacaacgccctcggagggctc

SEQ ID NO: 5468 - DNA, 316 bp, Zea mays
  Clone ID: LIB3118-019-P1-K1-A4
tccaagcgtaagtggacgcgtgggcggacgcgtgtgcaaaagctgacgagatagccgaggagctattgatgcaggcacgattaggtatacagacatagtttaggtagaaatcacaatgtgagttgctgtcgtatgagaacttggggtgctaatatccaggatcttcatctaatacgatctatttctgtatcggaaagtgttatctgcttattatgtaccgtgttttacggtactgctgaagcttgataacttgctatgaaggatctttcccgagtgatatcgaatgaatgcagccattaaaaaaaaaaaaacaagg

SEQ ID NO: 5469 - DNA, 344 bp, Zea mays
  Clone ID: LIB3118-019-P1-K1-A5
cccacgcgtccgcccacgcgtccgccgcctccgttctatatgccgcctccgttctatctgccgccgcagcagcagccgcagccatggcaataccccactcaaccaccgcagctaagcccgtgccagcagttcggatcctgcggcgtcggcagcgtcggcagcccgttcctgggccagtgcgtcgagttcctgaggcaccagtgcagcccggcggcgacgccctacggctcgccacagtgccaggcgctgcagcagcagtgctgccaccagatcaggcaggtggttgagtgggggattggccatggctgcggctgctgctgcggcggctgatagaacggaggcgg

SEQ ID NO: 5470 - DNA, 419 bp, Zea mays
  Clone ID: LIB3118-019-P1-K1-A6
gcacccgccgggcgccgaccagctggaccacgccaaggcgaggctggcgtccaaggcccgcgacatcaaggatgcagcacagcaccgcatcgaccaggcgcaggggtcttgagagaagaaccacactcgagcggaccgcgcgcgcgacctccttgaaccactgccggcgcggcggcatatggcccttaaaggcggtggctgctgctacgtacgctgccgtagagtctcggtcgccgcgatagctctagctagtcgtttatgtgttgtgctttgtgtgtgcatgcttgtgtctgggggcatgcagtgcagtgcagtactatatgctgtatgcgtctctctttgatcggagaggcggatgtacagcatgctcgatatgtctaggttggatgtcatgtttatgatgaggaataaaatgcagt

SEQ ID NO: 5471 - DNA, 379 bp, Zea mays
  unsure at all n locations
  Clone ID: LIB3118-019-P1-K1-A7
gttggcttctcctccccctccggttcgggttcgggttcgtgaggttctccggggttcgggttcgtgggtgagcggatcgagatggcggcgtcggatgttgagtaccgctgcttcgtcggcggcctcgcctgggccacggacgaccactccctccacaacgccttcagcacctacggcgaggtcctcgagtccaagatcatcctcgatcgggagacgcanaagnnntnnnnnnnnnnnnnnnnnnnnnnnnnnnnnnnnnnnnnnnnnnagacgccatcgagggcatgaacggcaaggagctggacggccgcaacatcaccgtcaacgaggcccagtcccgcggcggccgtggaggcggcggcggtgggtacggtggtgg

SEQ ID NO: 5472 - DNA, 427 bp, Zea mays
  Clone ID: LIB3118-019-P1-K1-A8
cgaggcctacaagacgctgcgcgaccgcgcgccctacccggccagcttcatgctcgcccagctcaccggctcctacgccttcgtcctcttcgacaagtccaccaactccctgctagtcgcatccgaccccgagggcagggtgccgctcttctgggggatcaccgccgacggctgcgtcgccttctccgacgacatcgacatgctcaaaggctcatgcggcaagtcgctcgcgccgttcccgcaaggctgcttctactccaacgccctcggagggctcaagtgctacgagaaccccaagcacaaggtcaccgctgtccccgccgacgaagaagagatctgcggtgccactttcaaggtggtggaagggtctactgtcctgacggcgctgcactgatctatcatcatcaggcggaggcgatgcgatgat

SEQ ID NO: 5473 - DNA, 143 bp, Zea mays
  Clone ID: LIB3118-019-P1-K1-A9
actttcgtgaggtctacaagacgctgcgcgacctttcgccctacccggccagcttcatgctggtgcagctcaccgactcctactccttcattctcttcgacaagtccaccaactccttgctagtcgcatacgaccccgagggc

SEQ ID NO: 5474 - DNA, 104 bp, Zea mays
  Clone ID: LIB3118-019-P1-K1-B1
cggtacgcgtgggctttaatagatgctggaaagcccatgcatcacgctgctgtgtccgtctctatatatttaaggaccttcaaggagtatatattaaacataga

SEQ ID NO: 5475 - DNA, 191 bp, Zea mays
  Clone ID: LIB3118-019-P1-K1-B10
tcgtgcatatttgggacacaaacacaatacatttgctatctgctgactttttgaagtgacatattacaactgttgtccttgatttacattttattgaataagagtatgtagagataaaattcaagcaatttgattcttttatggtatacagatactgatattataaaagaaatgatgaaaaattgtaaggt

SEQ ID NO: 5476 - DNA, 78 bp, Zea mays
  Clone ID: LIB3118-019-P1-K1-B11
tcgctcacacttgcataccaagcacattattgttgcctatctggcaatagtacggaggtgtgcttataaatgctacct

SEQ ID NO: 5477 - DNA, 417 bp, Zea mays
  Clone ID: LIB3118-019-P1-K1-B12
ggttttgctgctctccgaccccgagctccgaaggccgcagcatcaggcgcggcccccctcgcgtgtgaccgagatggcgctgccgaatcaggggaccgttgattaccccagcttcaagctcgtcatcgtcggcgatggtggaactggtaaaactacatttgtgaagaggcatctcactggagagtttgagaagaaatatgaaccaaccattggtgtggaagttcatccgttggatttcaccactaactgtggtaagatcaggttctactgctgggataccgcagggcaagagaagtttggtggcctcagggatggatactatatccatggccagtgtgcgatcatcatgtttgatgtaacctcaaggcttacttacaagaatgttcctacgtggcatagggacctgtgcagggtctg

SEQ ID NO: 5478 - DNA, 313 bp, Zea mays
  unsure at all n locations
  Clone ID: LIB3118-019-P1-K1-B3
accacgcgtccgcaaaattaaattaaataaataacaataataatataaatataatgtaggggagggtaataaaatgaggggcgggcgataaatttttgtagaagagcctggggagatgaaatccaaacaactggagtcttcagtggagactgagactgaagtccgaaaagaaaagaagaaaaagagttaggcaattacagaggatgagactgaggcacaaatccgaaaagaaaagaagagtagaacaattgaagaggaagaacaagctggattggtcgaccatagcgatattaatgntgaagtatattgcccg

SEQ ID NO: 5479 - DNA, 57 bp, Zea mays
  Clone ID: LIB3118-019-P1-K1-B4
cacatgcaaacaaaaaaaaaaggaaatataattaaaaaagcaaaaagtataaagggg

SEQ ID NO: 5480 - DNA, 418 bp, Zea mays
  Clone ID: LIB3118-019-P1-K1-B5
cacaggctcaccccaccaacagcaagcgaaaatctcccgatcccctctggtctccgcggcgaagatgtcggggcgcggcaagggcgggaagggcctgggcaagggcggcgcgaagcgccaccggaaggtgctccgcgataacatccaggggatcacgaagccggcgatccggcggctggcgcgcaggggcggcgtgaagcgcatctccgggctcatctacgaggagagccgcggcgtcctcaagatcttcctggagaacgtgatccgcgacgccgtcacttacaccgagcacgcgcgccgcaagaccgtcacagccatggacgtcgtctacgcgctcaagcgccagggccgcaccctctatggcttcggcggctaggctaggccggccgcgcctcgctgtcgtcgctgcggttctatt

SEQ ID NO: 5481 - DNA, 337 bp, Zea mays
  unsure at all n locations
  Clone ID: LIB3118-019-P1-K1-B6
cggacgcgtgggcggacgcgtgggcggacgcgtgggctgtcatcctatgcggaggcgaggtacgactgctacgccccgtgcaaggactgcccgaactgcagcagctggtgcaaggggaaagggtaccccaagggcgggcggtgccacccgaaggacggcggcggcgacatcgtgttctgctgctgcgacagggcagacgtcaggaagctgctagtttcagcagatgcgaatgcgattctctgatggactggcaaacaaataaacggggctggacgcattgngaaaaaaaaaaaaaaaaaaaaaaaaaaaaaaaaaaaaaaaaaataaatacttgtac

SEQ ID NO: 5482 - DNA, 188 bp, Zea mays
  Clone ID: LIB3118-019-P1-K1-B7
cgtaggtgtgcctgtggagagatgtcaacctgccatggtgtcacggtccgccatcagttgaacgtcttgcctgcacttcagtaggccacttttcatggttctagttgtatttgaatccagcgtttgccactaagataaatcagacagtcgttttgtgaacctattatgatggagctttatttgctgat

SEQ ID NO: 5483 - DNA, 307 bp, Zea mays
  Clone ID: LIB3118-019-P1-K1-B9
tgcgtatttgggacacaaacacaagacagttgctatctgctgtctttctgaagcaacatcttacaactgtggtccttgattcacatttttctgttgaagagcctggagagatgaaatccaagcaactggagtcttcagtggagactgagactgaagtccgaaaagaaaagaagaaaaagagtaaggcaattacagaggatgagactgaggcacaaatccgaaaagaaaagaagagtagaacaattgaagaggaagaacaagctggattggtcgaccatagcgatattaatgatgaagtatatgccag

SEQ ID NO: 5484 - DNA, 239 bp, Zea mays
  Clone ID: LIB3118-019-P1-K1-C10
cccggttcccactgacagcactcgcagaaagggtggtaggaggggaaggaggctgtaggcgtgtatccttgctatttgccatcactttgcactggcctctgggtagcgttgctgtttattagcttgccaaaaggagttttaattttgctcattttgctctatgtcgaggatcatttactgttagccgaatctatgatgtgcattgataatgttttggttgaggaattgacaattatgct

SEQ ID NO: 5485 - DNA, 145 bp, Zea mays
  Clone ID: LIB3118-019-P1-K1-C11
tagatatgtctagattcaccatcatctattttaatatggacatagatataaagagctaaaacgaatactattttggaacgaagggagtatctatagtagatagtgtgggtgctctggagagaaaaaaaatctgagctttcttttg

SEQ ID NO: 5486 - DNA, 399 bp, Zea mays
  Clone ID: LIB3118-019-P1-K1-C12
gagaccaactagcaacatagaaagcacaatagtgtaccaacaatggcagccaaaatattttgcttccttatgctccttggtctttctgcaagtgttgctaccgcaaccattttcccacaatgctcacaagctcctatagcttcccttcttcccccatacctctcaccagcggtgtcttcaatgtgtgaaaacccaattgttcaaccctacaggatccaacaggcaatcgcaacaggcatcttaccattatcacccttgttcctccaacaaccgtcagccctattacagcagttacctttggtccatttggtggcacaaaacatcagggcacaacaactacaacaacttgtgctagcaaaccttgctgcatactctcagcaacatcagtttcttccattc

SEQ ID NO: 5487 - DNA, 410 bp, Zea mays
  unsure at all n locations
  Clone ID: LIB3118-019-P1-K1-C2
aaattgcaccaagaaatccatcgagaggccgtcgacaggggaattaatggcgtcgtcgtctagcagcagccaccgccgcctcattctcgcagccgccgtcctgctctccgtgctcgcggctgccagcgccagcgccgggacctcctgcgtgccggngtgggccatcccgcacaacccgctcccgagctgccgctggtacgtgaccagccggacctgcggcatcgggccgcgccttccgtggccggagctgaagaggagatgctgccgggagctggcggacatcccggcgtactgccggtgcacggcgctgagcatcctcatggacggcgcgatcccgccgggcccggacgcgcagctggagggccgcctagaggacctgccgggctgcccgcgggaggtgcagaggggat

SEQ ID NO: 5488 - DNA, 311 bp, Zea mays
  Clone ID: LIB3118-019-P1-K1-C3
cgtccccggcccgcaccaagcacaggtgcatcatcgtctccagcaagctcttattagtctgacgcgatgagtggcacaccgtgccgtgcaacgttataccatgccggaaatggcatgcaccacagacttctggtcgggtgtctgtgcgacttaactagacaaccctcacccatcgtaaatcgcgttacaatgtcatgcctgaaaagcaagtgctggcaaatgctggctaaccaacaaccgtactgtctgaacacgcagcttgcaatacactaaattaaaagggatcggcacgtttccagacacacaaaaag

SEQ ID NO: 5489 - DNA, 393 bp, Zea mays
  Clone ID: LIB3118-019-P1-K1-C5
cccacgcgtccgcggacgcgtgggtggtaaaccaccctgtgaattagggcccgcagctggcactctcaactcttgtagctggaatgttgtgcatatacataaactatgattgagaccgtcagcgccaagaatttcgacggtcgaacgggaaatgctcggtctggggcaaggcttcatctaagattgttgcctattatcagactacaaagggagaaactaacaccagtcttctctgcgacatagaggaggtgacgtgacaagccccagtgctgttacagcagacctttgatggtgctgcattctagatataagcatttgtgttgtacccaataatgaagtcggcatgccatagcatgcgactcattgtttatgaataaaacacgctaataatga

SEQ ID NO: 5490 - DNA, 414 bp, Zea mays
  Clone ID: LIB3118-019-P1-K1-C6
cggacgcgtgggtgctggtggacaaggagaagggtatactgaagattgctgatctgggactcggtagggctttcactgtgcccatgaaaagctacacccatgagattgtgaccctttggtacagagctcctgaagttttgcttggagcaacacattactcaactggcgttgatatgtggtctgttggatgcatctttgctgaaatggcccgacggcaggctctctttcctggtgactcggagttgcaacagttgcttcacatcttcaggttgctgggaacacctactgaggaacagtggcctggagtgagtgatttaagggactggcatgagtttccacagtggaagccccagggtttggcacgtgtcgtcccaacactggaacctgaaggagttgaccttctatcgaaaatgc

SEQ ID NO: 5491 - DNA, 121 bp, Zea mays
  Clone ID: LIB3118-019-P1-K1-C7
gcgaaaaaatcgatgtagtatgaagcaccttgctgctctgaatattaacaggcaattaaggcaaggtgctgtttcggtttggtggaccgcatgttgcagataataaattagttgttttgtc

SEQ ID NO: 5492 - DNA, 425 bp, Zea mays
  Clone ID: LIB3118-019-P1-K1-C8
cggacgcgtggggagagagaggagtgggagacccgcgagaggctgccgtgtagggaccaccgtagactcagcgtctcagctactgcgaaggagggataaggggatggccgggatcggaccgatcaggcaggactgggagccggtcgttgtgcggaagaaggcacccaccgccgccgccaagaaggatgagaaggccgtcaacgccgcgcgccgcgccggtgcggagatcgataccatgaagaagtacaacgctggtacgaacaaggcggcatccagcggtacatccctcaacaccaaacgcctcgacgacgacaccgagaacctcgcccatgagcgagttccaagtgatctgaagaagaatctcatgcaagcaaggctcgataagaagctgacacaggcacaacttgctcagatgataaatgaga

SEQ ID NO: 5493 - DNA, 345 bp, Zea mays
  Clone ID: LIB3118-019-P1-K1-C9
gccggcttggagaacggggttctcaccgtcgttgtgcccaaggaagtcgccccggcccggcccaagcccaggtccatcgccgtctccagcaagctctgatgagtctgaggcgatgagtggcagagtgtacggtgcagtgttaaaccatgccgcaaatggcgggtacgtctgaattctggtcgtgtgtgtgtccgtgtcacctagaaaacgcgcaccccgtgtaaattgtgatacaatttcatgcaagtaatccgagtgagtgaaaatggctgctagccaaaaacggtcgattctgaatatgcagtttgcaataaactaaattaaaaggaaaaggcatgtttgaat

SEQ ID NO: 5494 - DNA, 419 bp, Zea mays
  Clone ID: LIB3118-019-P1-K1-D1
agatcagcaaagcggcagtgcgtagagaggatcgtcgaacagaacagcatgaagatggtcatcgttctcgtcgtgtgcctggctctgtcagctgccagcgcctctgcaatgcagatgccctgcccctgcgcggggctgcagggcttgtacggcgctggcgccggcctgacgacgatgatgggcgccggcgggctgtacccctacgcggagtacctgaggcagccgcagtgcagcccgctggcggcggcgccctactacgccgggtgtgggcagacgagcgccatgtaccagccgctccggcaacagtgctgccagcagcagatgaggatgatggacgtgcagtccgtcgcgcagcagctgcagatgatgatgcagcttgagcgtgccgctgccgccagcagcagcctgtacgagccagc

SEQ ID NO: 5495 - DNA, 296 bp, Zea mays
  Clone ID: LIB3118-019-P1-K1-D10
catggtacgtcaggcgttaccggctcattgtgaaccaatacatgaactgccatgatacggttataagcagaaataacagtagcactggctccaattcctgaagatgagtctggtgcgccctgctgtatgaaatggatcccactcgtatattcgtcaccgcgccgcactggtgtaacgtgttgcctcagagtttgtttttagctggttccttttttaaaaataagtactgtttttggttggctaccagtcattctgaacttcagttgcaaattattttagttaatgcttgctttttc

SEQ ID NO: 5496 - DNA, 417 bp, Zea mays
  Clone ID: LIB3118-019-P1-K1-D11
ttggaaatgtaacttcttatttctggttggccacatacatcatccaaaaaactttattattgaattacaactaataagcaatctaaaagagggcaccaccaatgatgtgttgttggtaggaggccgctgggtctgtcaaagcaagttggacaaagggcaacaattgttgtagttgtaagagggttgcggggttagccgcaaactgctggtagaaaggcagcaactgttgctgtgtcaagaaggaagcacggtttgctgcagctagctggctaaatggtagtagtatttgctgctgcaaataagcagcggggttcagtgcggccaattggttaaatggaagaagttgttgttgctgagagtaggcagtagctagctggctaaatggtaatagttgttgctgcaaataagcagcagggt

SEQ ID NO: 5497 - DNA, 458 bp, Zea mays
  Clone ID: LIB3118-019-P1-K1-D12
ccggtaactgtcctgggtcggacccacgcgatcgcgtccaggcagtgacgctgtatacaaatgtgcagtcagactccgaccatttataagggccggcgttacgccagaaagcctcctgtgctcgcagctctgcacgatacggatgagatggatagcccattgcaaagagttaatcgagtgatcctgacactaagagcataaggcctctaacagtagatacacaggactgaggctaaaccgcattacgtccgtcagatgacctgtactatcaagcacgagagatggacttggtcaggggtgcaccctaaacgcaactagactccgagctgctgacatttgtcctgaaaagctgcaagcggttaacgctccggcattctcaataaacatcgaccacttttgtgcttgaaaaggccacaaatgctttttagcttggttggagttgtaggccttttgttgct

SEQ ID NO: 5498 - DNA, 280 bp, Zea mays
  Clone ID: LIB3118-019-P1-K1-D3
gccgggtcactgtgaagaaaagcaagaatatgctttttgtcatctcgaaaccagatgtgttcaagagcccaaacttcgacacctatgttatattcggggaggcgaagatcggggacctcagctcccagctgcagacccaagctgcagagcagttcaaggctcctgacctgagccaaatgatcccgaagcctgagacatctggcctgggcctggaggacaacgaggaggaggaggttgacgaaactggtgtcgaggccaaggatgtcgagctggtgatgac

SEQ ID NO: 5499 - DNA, 404 bp, Zea mays
  Clone ID: LIB3118-019-P1-K1-D4
tacctttatcgcccttgttgtttcaacaatcgccagccctatctttggtgcagtcattggtacaaaccatcagggcacaacagctgcagcaactcgtgctacctctgatcaaccaagtagctctggcaaacctttctccctactctcagcaacaacaatttcttccattcaaccaactgtctacactgaaccctgctgcttatttgcagcaacaactattaccatttagccagctagctactgcctactctcagcaacaacaacttcttccatttaaccaattggccgcactgaacccccgctgcttatttgcagcagcaaatactactaccatttagccagctagctgcagcaaaccgtgcttccttcttgacacagcaacagttgctgcctttctaccagca

SEQ ID NO: 5500 - DNA, 420 bp, Zea mays
  Clone ID: LIB3118-019-P1-K1-D5
cccacgcgtccggcagctgcagcaactcgtgctacctgtgatcaaccaagtagctctggcaaacctttctccctactctcagcaacaacaatttcttccattcaaccaactgtctacattgaaccgtgctgcttatttgcagcaacaactattaccattcagccagctagctactgcctactctcagcaacaacaacttcttccatttaaccaattggccgcactgaaccccgctgcttatttgcagcagcaaatactactaccatttagccagctagctgcagcaagccgtgcttccttcttgacacagcaacagttgctgcctttctaccagcagtttgcggctaaccccgcaaccctcttacaactacaacaattgttgccctttgtccaacttgctttgacaaacccagcagcctc

SEQ ID NO: 5501 - DNA, 359 bp, Zea mays
  Clone ID: LIB3118-019-P1-K1-D6
tactctttttttcttttacaaccaagtagcggtggggtaacttttacattactctcatcaacaacaatttctatcattcaaccaactgtctacattgaaccgtgctgcttatttgcagcatcaactattaccaatcatccagctagctactgcctactctcagcaacatcaactttttacatttaaccaattagcctcactgaaccccactgttttatttgcagcaacaaatactactaccatttatccagctatctgcagcatgccgtgctttcttctttacacaacaacagttgctgcctttctaccatcagtttgcatctaatccctcaacctttttacatctacaacaatagttg

SEQ ID NO: 5502 - DNA, 421 bp, Zea mays
  Clone ID: LIB3118-019-P1-K1-D8
ggcctcagcctcatccccagccacacccatgcccgtgccaacagccgcatccaagcccgtgccagctgcagggaacctgcggcgttggcagcaccccgatcctgggccagtgcgtcgagtttctgaggcatcagtgcagcccgacggcgacgccctactgctcgcctcagtgccagtcgttgcggcagcagtgttgccagcagctcaggcaggtggagccgcagcaccggtaccaggcgatcttcggcttggtcctccagtccatcctgcagcagcagccgcaaagcggccaggtcgcggggctgttggcggcgcagatagcgcagcaactgacggcgatgtgcggcctgcagcagccgactccatgcccctacgctgctgccggcggtgtcccccactgaagaaactatgtgctgtagta

SEQ ID NO: 5503 - DNA, 298 bp, Zea mays
  Clone ID: LIB3118-019-P1-K1-D9
catggtacgtcaggcgttaccggctcattgtgaaccaatacatgaactgccatgataaggttataagcagaaataacagtagcactggctccaattcctgaagatgagtctggtgcgccctgctgtatgaaatggatcccactcgtatattcgtcaccgcgccgcactggtgtaacgtgttgcctcagagtttgcttttagctggttccttttttaaaaataagtactgtttttggttggctaccagtcattttgaacttcagtagcaaattatcttatttaatgcttgctttttcat

SEQ ID NO: 5504 - DNA, 119 bp, Zea mays
  Clone ID: LIB3118-019-P1-K1-E1
gcttcagcttacttgtatcagttgccacgatttggtctccaagacattatctccaacgatacagttggctactgcactggcctcttgatggctccacttgtgcttaatacccgtggttc

SEQ ID NO: 5505 - DNA, 241 bp, Zea mays
  unsure at all n locations
  Clone ID: LIB3118-019-P1-K1-E10
cggacgcanagagggcaaaacaataataaagcgaaagggacgaggcaagagggcggcgagaaacaagaaggcacattcccagaaaaaaaaagcaaacgaaaaaaaacgacagacaggggaggccgccaaagaggacccaagcagacagacgcaggcaagcaacaaaaaaggaacaaaaaaggggaaccaaaaaacaagagacagggcgccactaaaaaacgataggactgggaaaaccctg

SEQ ID NO: 5506 - DNA, 238 bp, Zea mays
  Clone ID: LIB3118-019-P1-K1-E11
cggacgcgtgggcggacgcgtagtgatgaggccgtctgggtgcgcgatgccgagcgccagacacacgaggagtcatttcccgcccatatatttgagctattattagtagatgttttgggctgccgctctagttgacccaggcagattactccttgatgcaacgcaataagtattataaagcgttacctaaatagaattgactggccgtcgttaaaaagctctactacagggaaaaccc

SEQ ID NO: 5507 - DNA, 264 bp, Zea mays
  Clone ID: LIB3118-019-P1-K1-E12
aggacgcgttggctgccactttggcatccttctatgcgctaacaaataggggaagggggtaacataccttttttactcttgtctcaacaagttccagccctattttgaaagctggcaactggatctacactaggtctgcatgatccgtacccacatttgctacctgcgaatcagcaattcgctctcttacaccaagggaggcatgccccggtaggtaaaagtctgcttttaacctactatatgcattgaactcttgctgcttac

SEQ ID NO: 5508 - DNA, 316 bp, Zea mays
  Clone ID: LIB3118-019-P1-K1-E3
ccgtacgaactcgcagatcagagagaccgaggcgcccgcggttctgctttccttccttgccccgttcacgagagaagtttctggagtcttcgactcgagcagggttccgatggcgctgcaatggatgatcctggcgtgcgtggtggcggtggaagctgcggtggctgcgctggtcacgctcccggtgccccgcgctgtgcggggccagatcgtcgcgctcacgtccttgttcctgcagcccctgtccagtgtgatacccttcgccgccttccagatcctcgatctctactggaagaaggagcacagactgatgtgc

SEQ ID NO: 5509 - DNA, 422 bp, Zea mays
  Clone ID: LIB3118-019-P1-K1-E6
aaaaaaacccaaaaaaaaaaaaaaaaaaagaaaagaaaaaaaaaaaaaaaaaaaaaaaaaagaaaaaaaaaaaaaaagaagaaaaaaaaaaaaaagaaaaaaaaagaaaaaaaaaaaaaaagaaaaaaagaaaaaagaaaaaaacaaaaaaaaaaaagaaaaaaaaaaaaaaaaaaaaaaaaaaaaagaaaaaaaaaataaaaaaaaaaaaaaaaaaaaaaaaaaaaaaaacaagaagaaaaaaaaaaaaaaaaaaaagaaaagaaagaaaaagaaaaaaaaaaaaagacaaaaaaaaaagaagaaaaaaaaagaacaaacaaaaaaggaaaaaaaaaagaaaagaaaaaaacaaaaaaagaaaaaagaaaaaaaaaaggaaaaaagaaaaaaaaaaaaaaaaaaaagaaaaagacaggaag

SEQ ID NO: 5510 - DNA, 114 bp, Zea mays
  Clone ID: LIB3118-019-P1-K1-E9
cggacgcgtgggttgtaaatcaataataaagtttttgggatgatgtatgtggccaaccagaaataagaagttacatttgccgactagaaatgcaagcgctacttacacaaccgg

SEQ ID NO: 5511 - DNA, 420 bp, Zea mays
  unsure at all n locations
  Clone ID: LIB3118-019-P1-K1-F1
ggcttaccaaggagggggcaatagcttcaattgactgcccctgcaaccatctatcaaaccaaaaaagggttttagcaccatcacccacaatggaaagcactgaagcttctgtaagggaaaagaaataacttgttttgtcattttgcagctttgatttcccattcaccccgacaaagtatattccattctatggaggagcagaataccatgactatcatcattatgtaggaggccagagccaaagcaattttgcttctgttttcacttactgtgattacttatatggcactgacaaaggttacagattccacaaaacatacctagcaaagctgaaggatctggggcataatgatggccagaaaggagacggcagcggacccagctatgtgaaactggaataagatngcaagatatagtgca

SEQ ID NO: 5512 - DNA, 421 bp, Zea mays
  Clone ID: LIB3118-019-P1-K1-F11
aagaagggaagctataggagcttgtgagcattgtgggaaaacccaattgttcaaccctacaggatccaacaggcaatcgcaacaggcatcttaccattatcacccttgttcctccaacaaccgtcagccctattacagcagttacctttggtccatttggtggcacaaaacatcagggcacaacaactacaacaacttgtgctagcaaaccttgctgcatactctcagcaacatcagtttcttccattcaaccaactggctgcattgaactctgctgcttatttgcaacaacaattaccattcagccagctagttgctgcctacccccagcaatttcttccattcaaccaactagcagcattgaactctgctgcttatttacagcagcaacaactactaccattcagccagctagctgatg

SEQ ID NO: 5513 - DNA, 413 bp, Zea mays
  Clone ID: LIB3118-019-P1-K1-F12
cggacgcgtgggcggacgcgtgggcaaccctataggctccaacaagcaatcgcagcaagcaacatacctttatcacccttgtttcaacaatcgccagccctatctttggtgcagtcattggtacaaaccatcagggcacagcagctgcagcaactcgtgctacctgtgatcaaccaagtagctctggcaaacctttctccctactctcagcaacaacaatttcttccattcaaccaactgtctacattgaaccgtgctgcttatttgcagcaacaactattaccattcagccagctagctactgcctactctcagcaacaacaacttcttccatttaaccaattggccgcactgaaccccgctgcttatttgcagcagcaaatactactaccatttagccagctagctgcagc

SEQ ID NO: 5514 - DNA, 406 bp, Zea mays
  Clone ID: LIB3118-019-P1-K1-F2
ggatgttccgtgtggtaacactgttgctatggttggtctggatcagttcatcacgaagaatgctacactcactaatgagaaggagactgacgcttgcccaatcagagcaatgaagttctccgtctctcctgttgtgcgtgttgctgttcagtgcaaggttgcctctgaccttcccaagctagtcgaaggtttgaagcgtctagcaaagtccgatcctatggttctctgtacaatggaagaatctggtgagcatatcattgctggagctggtgagcttcatcttgagatttgcctgaaggatctgcaggaggacttcatgggtggtgctgaaattattgtttcccctcccgtcgtctcctttcgtgaaacgggtcttgagaagtcctgccgtactgtcatgagcaag

SEQ ID NO: 5515 - DNA, 307 bp, Zea mays
  Clone ID: LIB3118-019-P1-K1-F3
ggccaccagggaggaattcaaggatgcggtggagtctcacaggacaagcagggcacaggaactgccgctgaagacgcccgaaaactctccgaaggcagcaaaagtctgaagccgcacccgagtcacgcttgctcgtgtcttttgtacgtgtccaggaaggaaggaactgagagagtttctgttgttgcggagtttttaagaatgtcgcgtcatgacatatgatgtcctgagttgtattttgcgtacgggttccctggtgctgtttttgggaacttaccattactacaggcgcataatcttgggatcc

SEQ ID NO: 5516 - DNA, 417 bp, Zea mays
  Clone ID: LIB3118-019-P1-K1-F4
gcttcaagtgcggcacgatcgtcagagacttcccagcggggcaaggcgcaacccgtgcttgaggttgcctttgttgttgaccccaacagcgccgaattccgtgctgggtggaaagctggcgactggatctgcacgaggcctggttgcaccgtccacaactttgcaagcaggatggagtgctttaggtgcaatgcaccaggggaggcaggcaccggaaggtaagaggcgactggggtgataccaaaacctgagatatgaccagcctgcccagcacaggaacctaatgtcgtgacacacattccattaggcattcaggaaggatgagtctactacgtacacgactatattgctgattgccgcgcgtagtgccgctgctgtggtttgcgtgggtggagaagtacccaagcgcaacacctg

SEQ ID NO: 5517 - DNA, 440 bp, Zea mays
  Clone ID: LIB3118-019-P1-K1-F6
cagggcacaacaactacaacaactcgtgctagcaaaccttgctgcctactctcagcaacagcagtttctgccattcaaccaactagctgcattgaactctgctgcttatttgcaacaacaacaactactaccattcagccagctagctgctgcctaccaccagcaatttcttccattcaaccaactggcagcattgaactctcctgcttatgtacaacaacaactactaccattcagccagctagctgctgtgagccctgctgccttcttgacacagcaacagttgttgccgttctacctgcacgctgcgcctaacgttggcaccctcttacaactgcaacaattgctgccattcaaccaacatgctttgacaaacccaacagcgttctaccaacaacccatcattggtggtgccctcttttagattgcttatgagttat

SEQ ID NO: 5518 - DNA, 418 bp, Zea mays
  Clone ID: LIB3118-019-P1-K1-F7
gcttgggctccgtatgaggttggcctctgccttgcctgtgcatcttctggtggaagaatatccatcttgacgatgcaagctgatgggggttgggatactgcaaccattgagcgagcacatcctgtcggtgcgactgccatatcctgggcccctgcaacagcgtcactagctggtgcaggggagcttgtttacaagcttgtctcaggagggtttgactctgttgttaaggtctggggattcaacaatggtagttggaagctggagagtgctcttatctctgacatgcacacagattgtgtgagggatgtcgcctgggcaccagttttgggattgtccaagtcgaccattgccagtggttcacaagacggggaaggttgtcatctggaccaagggaaaggatggagacaagtgggaggga

SEQ ID NO: 5519 - DNA, 357 bp, Zea mays
  Clone ID: LIB3118-019-P1-K1-F8
gttagggttccttagggttttgtggaggggcgatggcggcggctgatgtggagtaccgttgcttcgtcggcgggcttgcctgggccaccagcaacgagtcgctggagaatgccttcgcctcctacggcgagatcctcgactccaaggtcatcaccgaccgggagacggggaggtctcgcggcttcggcttcgttaccttctcctccgagaactccatgctcgacgctatcgagaacatgaacggcaaggagctcgacggccgtaacatcaccgttaaccaggcccagtcccgtggcggtggccggtggctggcgttggctacagcggctggtcgcggcggcggcggctatggtggcg

SEQ ID NO: 5520 - DNA, 65 bp, Zea mays
  Clone ID: LIB3118-019-P1-K1-F9
attagggtttaataagggattctggaggatcatatacaagacaagtgaggtggaggaactgaaat

SEQ ID NO: 5521 - DNA, 418 bp, Zea mays
  Clone ID: LIB3118-019-P1-K1-G11
ggaaggtttacacttagaactgaagggaagacggtagccgtaggcaaggttgttgatgttccgcctgctggcagcccaacattctgagcttaagccaattttgaacaggatggataatcatgaagcagtgcgttgtcttgagatacttttctttgggagaagtgagattagttgagcataggttttttccgagcccggcttgagaatggtctatgccttaatggtttaggcaacaagcctgtttagattggttccataatgttacatctctggttacatgtgaggtataatcagtatggatgagtgttccaaccttaatgcactgccaaattgtggtggcatttttgcgtacaatgctgtaactgtacagttgtgtgtgaagtcaaatgggcaggctgcattactcggatgtgcagcg

SEQ ID NO: 5522 - DNA, 201 bp, Zea mays
  Clone ID: LIB3118-019-P1-K1-G12
gaagttcttcgccaccccgccggtgcacggctcgctggcgaaccaggtggtgcacccggccgacctgtgcttcaagctccccgacggggtgagcctggaggagggagccatgtgcgagccgctgagcgtgggcgtgcacgcatgccgccgtgcggaggtggggcccgagacggacagtgctcgtggaaggcgccatcccca

SEQ ID NO: 5523 - DNA, 365 bp, Zea mays
  Clone ID: LIB3118-019-P1-K1-G5
cggacgcgtgggcggacgcgtgggtgggttggcttctcctccccctccggttcgggttcgggttcgtgaggttctccggggttcggtttcgtgggtgagcggatcgagatggcggcgtcggatgttgagtaccgctgcttcgtcggcggcctcgcctgggccacggacgaccactccctccacaacgccttcagcacctacggcgaggtcctcgagtccaagatcatcctcgatcgggagacgcagaggtcccgcggcttcggcttcgtcaccttctccacggaggaggcgatgcggaacgccatcgagggcatgaacggcaaggagctggacggccgcaacatcaccgtcaacgaggcccagtc

SEQ ID NO: 5524 - DNA, 418 bp, Zea mays
  Clone ID: LIB3118-019-P1-K1-G6
gctaatatgtggaaagaagcccttaacaaacgggttggaactaaaggtcttgacctttctgaaattgtactggaatcagagaaacgtggggtgacatttggcaggttactatctgttcctgagaacgatagctgggtctatgaacatgggcacgcagcatcttgtgtggctttcgtccttatgatgtacaaggaggctggactctttgaccctattaccagctctattgaagttactgaattcacaataaaagatgcttatatcctcaacttttttgaggacaactcgacccgactttcggagtggtgcaacaaggatgacgatgtgaagctttccttttgccagatcaagggcaagtaccggatggagctgcctggatacaacaccatgaaaccctatgcccacattaacgagagat

SEQ ID NO: 5525 - DNA, 218 bp, Zea mays
  Clone ID: LIB3118-019-P1-K1-G8
cggacgcgtgggcggacgcgtggggtgaaccaccgagatcgagtgcaagcagacttggttgatttacaatttgcccggtggttgctaatgatattggatgaaacggttgccggtttggctgctattaaggttgtgtaatctgatgggcaatttcagcattctaatgccctaatgatgaatctttggccatttgctgttctgccttgtctttgatcgtc

SEQ ID NO: 5526 - DNA, 419 bp, Zea mays
  unsure at all n locations
  Clone ID: LIB3118-019-P1-K1-H1
atcgacgcggccatcagctggctggacgccaaccagctcgccgaggcggacgagttcgaggacaagatgaaggagctggagagcctctgcaaccccatcatcgccaagatgtaccagggcgcgggtgaagacatgggcggcgctggcggcatggacgaggacgcccctgccggcagcggcggccctggccccaagatcgaggaggtggactaagcggtttgttgtcagtcttgagtgtgctgcagttgctggctggcccagttgctgccgagagttatcgtcagttggtgcggtgtgtccgcttaaactntatttgtggttggttggtacttttgtggtggttatttttttggacctcgtgatagtcggtcggttcaatgttatcgcggctactggcaaaccttaagtgatacggtatt

SEQ ID NO: 5527 - DNA, 239 bp, Zea mays
  Clone ID: LIB3118-019-P1-K1-H10
aacgaccgtagcgtgactgcgtgattgacgtggaaatatgtcagagttggacgatgagcgttctatgcaagctgcattcggtatacagacatgatgtggggagtcctccgattctgagttgccctggcatgagagcttgtggctccaatagcctgcagatgcagataaaacgatactatcttggtagcgggatgcggcatgggctaaatgaggacacggccattcgcctctgcggagcg

SEQ ID NO: 5528 - DNA, 417 bp, Zea mays
  Clone ID: LIB3118-019-P1-K1-H11
cccacgcgtccggtggatcccctccgcgacttcgccaaggacagcgtccgcctcgtcaagcgctgccacaagcccgaccgcaaggagttcaccaaggtggcggcgcggacggcgatcgggttcgtcgtcatgggcttcgtcggcttcttcgttaagctcatcttcatccccatcaacaacatcatcgtcggttccggctaggcttacaggagtacagggcgactagcatgggagtagtgcaatacttttgggagcaatagataacgaggatcctggtctttcgaatagtattgttaatgaaatttttcgttcggttgtgtttctgatgtaatcgttgtactgagtagaccttctggataccggattctgagtagacctttgaatccttgatggatcagccaatctcggaaaggaagt

SEQ ID NO: 5529 - DNA, 415 bp, Zea mays
  unsure at all n locations
  Clone ID: LIB3118-019-P1-K1-H12
cagccgccgccgcgcgtagcaagcaggagcagcaaggatgccggctggccacgggctgcgctcgcggacgcgcgacctgttcgcgcgccccttccgcaagaagggctacatnccgctcaccacctacctccgcacctacaagatcggcgactacgtcgacgtcaaggtgaacggcgccgtccacaaggggatgccgcacaagttctaccacggccgcaccggtcgcgtctggaacgtcaccaagcgcgccatcggcgtcgagataaacaagcaggtgaatggtcgcatcatcaggaagcgtatccatgtccgcgtggagcatgtgcagccgtcccgctgcacagaagagttccgcctgaggaaggtgaagaatgatcagctgaaggcngatgcaaaggagcgcggcgaggtcatc

SEQ ID NO: 5530 - DNA, 341 bp, Zea mays
  Clone ID: LIB3118-019-P1-K1-H2
cttctcctccccctccggttcgggttcgggttcgtgaggttctccggggttcggtttcgtgggtgagcggatcgagatggcggcgtcggatgttgagtaccgctgcttcgtcggcggcctcgcctgggccacggacgaccactccctgcacaacgccttcagcacctacggcgaggtcctcgagtccaagatcattctcgatcgggagacgcagaggtcccgcggcttcggcttcgtcaccttctccacggaggaagcgatgcggaacgccatcgagggcatgaacggcatggagctggacggccgcaacatcaccgttaacgaggcccagtcccgcgggt

SEQ ID NO: 5531 - DNA, 408 bp, Zea mays
  unsure at all n locations
  Clone ID: LIB3118-019-P1-K1-H3
tgttggtgtcaccccagaagctcaaaatatattcgatgcgctgtccaagacgcttccggtgcagtgggacaagactgacattgttgtaatgaaggaggttcgtgtacgcagcccgtacctgcctgaaaatgttagtggaggaacagctgcagcanacgaacgcgttaagaaagtgattgactttgaaaggaaaagattacattcacgtgcacctgggccaattctcttaacctaaaagtattgattntttttttacattagcatgtgtttctgatactgcggcccgttttattattctcatcggtggggttttccataaaatatttcaacaaaaattgtggtaataatcacatcaactagcttgtttatgaactgtttgatagatgacttgttgtaattgaattgatt

SEQ ID NO: 5532 - DNA, 352 bp, Zea mays
  Clone ID: LIB3118-019-P1-K1-H5
cccacgcgtccgctgaaccgcacggggcacgcgcggttccggcgtggccccgtggcggcgcggtcgcagtcgcagggacctgcctcctccgagcccgtgcaatcggcgccgactcccgccgcgaggcccctgacgctggacttcaccaagtcggtgtccgggtacagcagggactccgggttcagcgtgtccggcgcgagctcgtcgttcctgtcgtcggtgacgaccggggacgggagcgtgtcgaacgggcgcgcgggaggctcgtcgttcctcatgctcccaccggcgcccggcgcggccagctgcgcgaaagccgccgcccggccggcgcgggtgcagaaagcgcaag

SEQ ID NO: 5533 - DNA, 367 bp, Zea mays
  Clone ID: LIB3118-019-P1-K1-H6
cggacgcgtgggcggacgcgtgggcggacgcgtgggcggacgcgtgggcgagtacagtcggctaggtaatctgctggtacgacgacatggcggccaccagcagcaagtcgtcgtcgtccttcagctcggcgcagcgggcagctgccgcactgctcgtggccgccgccgtggcggtgtccgtcctggtggtgggcgcggcggcagtgtgcgacatgagcaacgagcagttcatgtcgtgccagcccgcggcggccaagacgacggacccgccggccgcgccgtcgcaggcgtgctgcgacgcgctggcggtggcggacgctaagtgcctgtgcggctacaagaactcgccgtggatgggcgtatacaa

SEQ ID NO: 5534 - DNA, 402 bp, Zea mays
  unsure at all n locations
  Clone ID: LIB3118-019-P1-K1-H7
gccacttaaagatatatccttggctactggtgtggcagaaggcaccatcagaaattcgtacaaggatctgtatccctacgcctcaaggctcatcccgaatacctacgccaaggaagaagacctgaagaatctctgcacaccttaggaagctttactttttttcccttctgttatataaatcggaattagatttgtcaaagaggagtgagtgaagttgttcctgttgtgaccgactgtactgagcaatgtgtcgtcgccggcgcgcttaactttgtggatggaccaatgagaacataagttgtcatcaaaaaaaaaaaaaaaaaaaaaaaaaaaaaaaaaaaaannnnnntaaaaaaaaaaaaaaaaaaaaaaaaaaaaaaaaaaaaaaaaaaaaagggcggc

SEQ ID NO: 5535 - DNA, 294 bp, Zea mays
  Clone ID: LIB3118-019-P1-K1-H9
aatgacagtagcgtcactgggtgattgacgtggaaatatttatgagttgtaagatgagcttcggatgcaagctggattaggtatacagacatgattttcgtagtactcagattctgagttgccctcgtatcagagcttgtggtcccaatagcctgcagctgcagctaaaacgatctattttggtagcggaatgttttatctgcttattttgtaccgtgtcttccgctactgcggagccttgataacttgctatgttggatttttcccgagtgttatcgcatgaatgttgtcatt

SEQ ID NO: 5536 - DNA, 256 bp, Zea mays
  Clone ID: LIB3118-020-P1-K1-A10
cccaattcggcatccggagcatccccaccatgatgatattcaagaacggtgagaagaaggactcggtgattggagccgtgccagaaagcaccctcgtcacctgcattgataagtatgttggtgggaggtgaaatatcaatctgaggcaactagcatgggtgggtatgggtataccgttcttattgaactgctgttgagtagctgtatgtagataataatatgattttcactccaataaatgcgatttaaggatggc

SEQ ID NO: 5537 - DNA, 394 bp, Zea mays
  Clone ID: LIB3118-020-P1-K1-A4
cgcgaaggtcttgtccatgccgacagctagttcccgacggactttctcggaggcggtcagcaccgacgacgaggaggctgcgcggggaggcaaggtcggacgaccctcgccgcctcgctgctcgtcgcgcaggggaactgatgtgagcatagaaaacatgcatcaagggttcacgcacgtcttcgagtccacgtttgaaagcacggaaggaatcaaggagtacattgagcaccctgcacacgtcgaattcgcaagtgtgttcttgcctgtgctggagaaggtcctcataatcgactacaaaccgacgtcggccaattagcggtagaacatgctctgtactggttcctcggaggatccagtttgattctactctttattttgctaaataaactcg

SEQ ID NO: 5538 - DNA, 399 bp, Zea mays
  unsure at all n locations
  Clone ID: LIB3118-020-P1-K1-A7
cggacgcgtgggtctacactgaaccctgctgcttatttgcagcaacaactattaccatttagccagctagctactgcctactctcagcaacaacaacttcttccatttaaccaattggccgcactgaaccccgctgcttatttgcagcagcaaatactactaccatttagccagctagctgcagcaaaccgtgcttccttcttgacacagcaacagttgctgcctttctaccagcagtttgcggctaaccccgcaaccctcttacaactacaacaattgttgccctttgtccaacttgctttgacagacccagcggcctcctaccaacaacacatnattggtggtgccctcttttagattgcttattagttgtaattcaataataaagttttttggatg

SEQ ID NO: 5539 - DNA, 240 bp, Zea mays
  Clone ID: LIB3118-020-P1-K1-A9
acatccgtcaatgctgcgccgcaacccaacccgcatcgagctcacctgctccgaccgcgacgagctcgaagaccaccttcgcgccgtcgtggcgagcttcgcggcagccaccaccaccaaggatccttccggttacaccactccgtttacagttcttggcccgcagacctttaatcccctgctccaattcctccaccctaagcccggtgccgtgccatacaagttccaacgcattggtat

SEQ ID NO: 5540 - DNA, 395 bp, Zea mays
  Clone ID: LIB3118-020-P1-K1-B10
gaacatcaacagcaacggcagcatttgccttgacattcttaaggaacagtggagccctgctttaactatctcaaaggttctcctgtcaatctgctcactgctcacggacccaaaccctgatgatcctcttgtccctgagattgctcacatgtacaagaccgacagggccaagtatgagtccaccgcacgctcctggacacagaagtatgccatgggctagaagcaaggctaaaagctggccaaactggtgaatgtgccggaccccaaatcgttatcacctaaataaccagtcaagtcacaagtatgaatggacttttgaggaccattgtgccctgttgaactcatgtattaccttgtgaagtccgttgtgtctggtttctacctgaccgtttcgt

SEQ ID NO: 5541 - DNA, 301 bp, Zea mays
  Clone ID: LIB3118-020-P1-K1-B11
cccacgcgtccgggggcgtcggatgttgagtaccgctgcttcgtcggcggcctctcctgggccacggactaccactccctgcacaacgccttcagcacctacggcgaggtcctcgagtccaagatcatgctcgatcgggagacgcagaggtcccgcggcttcggtttggccaccttcttcacggaggaggcgatgcggaacgccatctagggcatgaacggcacggagctggacggtcgtaacatcatcccaaacgaagaccaacacccatgatgccgtcgatgcatattcattacgaaca

SEQ ID NO: 5542 - DNA, 413 bp, Zea mays
  Clone ID: LIB3118-020-P1-K1-B2
cccacgcgtccgtgcagatttctgttttctaaaaaaaaaaaaaaaaaaaaaaaaaaaaaaaaaaaaaaaaaaaaaaaaaaaaaaaaaaaaaaaaaaaaaaaaaaaaaaaaaaaaaaaaaaaaaaaaaaaaaaaaaaaaaaaaaaaaaaaaaaaaggggggggccgttttaaaggatcaaagtttatttacgcgtgcttgcaaagtaataatttttttttgggggcacctaaattaaattcattggccgtggttttaaaacgttgggattggaaaaaccctggggttaccaaattaaatcgctttggagaaaattccctttttgccaggtggggtaaaaacaaaaaggcccgaaccaatcgccttttcaaaaaattgcccaccttgaatggaaaatgggaccccccctttatcg

SEQ ID NO: 5543 - DNA, 382 bp, Zea mays
  Clone ID: LIB3118-020-P1-K1-B6
tttgtgatctgttagggtttcggatctggaggattagttctcccaagttccgagtcagaccatgaatgagcagctgatgcgaccaccggcgccgctgccgttccaccagatgtgggcggcggtgccggcgatggagcctcctttcaagccggtgcgggcggcgtggaagcgggcggcgcggacgccctggaagcgcaaggcccagcctccggcgtcgggcggcgcgaggtggggcggtgcggcggcccctcgcaacacgacgtcgttcctgatccgcgcgaagcgggcggggggcgtggcgtcgctggtgtccccgtgccccgtgacgccggcggtgctcccgacgcccgtgctgtcccctgcgcgggaggtgctggtggag

SEQ ID NO: 5544 - DNA, 395 bp, Zea mays
  Clone ID: LIB3118-020-P1-K1-B7
cggacgcgtgggttcagctgcgcctcgactcgtagcccgaaccctagccaccaagccggaggcgagagagcagccatggcgcggtgcctcgcgctcgtcgccctcctcgtactcggcctcgccgccgccgcctccgcggccgacgcgcccttcgtcgtcgcgcacaagaaaatttcgctctcccgccccaagccgggcgtcgagcgcgtcgctgtctccctcgacctctacaaccagggatccgcgactgcctatgatgtgtccattaatgacgactcttggccaacagaagtgtttgagcttgtcactggagagaaatcgaagacattggaaaggcttgaccctggtgccactgcttcacacacatatgtcctggagaccaaaacacagggcag

SEQ ID NO: 5545 - DNA, 397 bp, Zea mays
  Clone ID: LIB3118-020-P1-K1-B8
cggacgcgtgggcggacgcgtgggtacgtgtcgaagctcgagaggcgggagacgaggcgctaccttgagatgttctacatactgaagttccgcgagctggcgaagaccgtgccgcttgcaattgaccaaccgcagtagcttgcgcaactgcgactgcgtagcacttggtacaagactgaaacctgaaggaccttcagtaatttaggcgcggcagacggtagccaataaaatgtgccggagctgaactggtttttattatgtacataatggcagtataacaaaattactgaaggcaggtgggttgcagttgtgtgttcgttactgtttactgtaatatgtcaagctgtcggctgcaatttctttgctggcaagccgcaggcactggtgaagtgctgat

SEQ ID NO: 5546 - DNA, 114 bp, Zea mays
  Clone ID: LIB3118-020-P1-K1-B9
accacgcgtatggatggacagacgaaacatcaccgacaacgaggcccataacagcagtggctgcgaaggcattagccgtggttacggtggttgccgttgaggcgagcgctacag

SEQ ID NO: 5547 - DNA, 383 bp, Zea mays
  unsure at all n locations
  Clone ID: LIB3118-020-P1-K1-C10
ggccaccagggaggaattcaaggatgcggtggagtctcacaagacaagcaaggcacaggaactgccgctgaagacgcccgagaactctccgaaggcagcagaagtctgaagccgcacccgagtcacgcttgctcgtgtcttttgtacgtgtccaggaaggaaggaactgagagagtttctgttgttgcggagtttttaagaatgtcgcgtcatgacatatgatgtcctgagttgtattttgcgtacgggttccctggtgctgtttttgggaacttaccattactacaggcgcataatcttgggatcccaanaaaaaaaaaaattttataataaaactataaccgnttaattaatttatttaactaaaatttttaacaaaaagg

SEQ ID NO: 5548 - DNA, 374 bp, Zea mays
  Clone ID: LIB3118-020-P1-K1-C11
atcttcgttttaaaccaaccttggcaatttgccgtagcctttcacccttgtgagtcccgacctttcgctgtcgccgcacagattgtacccaaggctgagaagaagcctgtggccaataagccctcggaggaggagcccgctacagataaggtggagaaggcttctgctgggaagaagcccaaggccgttaagcgtcttctggcggtcaagtccaaggatggcggcttgggcaatgattgggaaaaagaaggtttataagtttcgtggtgactctacaagatcttcatctttaaggtgctttagcatgtgctcccctacttttgcatcttgttcaaggccatgttcattattaacttcttttttatctacatttt

SEQ ID NO: 5549 - DNA, 391 bp, Zea mays
  Clone ID: LIB3118-020-P1-K1-C12
ccgcgcttcgcccactcgctccagccgcttcaccgcgccgccaccgccaccgcgaggatgccgttcaagaggttcgtggagatcgggcgcgtggccctggtgaactacggggaggactatggccgtctcgttgtcatcgtcgatgtggtcgaccagaacagggcacttgtggatgcccctgatatggtcaggtgccaggtgaacttcaagcggctctcacttactgacatcaagattgacatcaaacgtgtccccaagaagacagccctgatcaaggcgatggaggaagctgatgtgaagaccaagtgggagaacagctcatggggcaagaagctgattgtccagaagaggagagcatcgctcaatgactttgataggttcaaagtcatgc

SEQ ID NO: 5550 - DNA, 311 bp, Zea mays
  Clone ID: LIB3118-020-P1-K1-C2
cagaaagctatgtcacgctgcagtggctgtccgaccccatcagcgatatggtgtctgattctgtggtggctatgatcttgaacgtcggtcgtgaaggtcccaaagttgttccggtggaaggagcagtgaagaccaaagaggagacggctcaaaaggtggtgtatgctcttatggcttcacttttcggtgatgttaaagttgtggaggaagggagacttgtcatatctgtggatggaaatgtggcacacttggacgggaggagtggctatgtggaatgtgagaatgctacacttgaagaacggatcaagact

SEQ ID NO: 5551 - DNA, 388 bp, Zea mays
  Clone ID: LIB3118-020-P1-K1-C3
cccacgcgtccgcccacgcgtccggccagagaccaaccatctgcggcggcgatggggatcggtgagcacttcgagggcgtgaagcagcactgggcgagcaacttcgccttcctcgactattacaagaaggtctacggccgcgccgagcccctccccaagtggtccgacgccgacgtcgacgagttcatcgcctccgacccggtctacgggccccagctcaaggccctgcgggagtcgaggaagttcgcgcttgtcggggccttcgccggcgccgcccacctcggcggcgtcgcgctcaagtactccaaggcgccgcacggcgtcgtgctggcgaccgggttcggggcgatcacgggcgccgtgctggggtccgaggtggcggagcact

SEQ ID NO: 5552 - DNA, 397 bp, Zea mays
  Clone ID: LIB3118-020-P1-K1-C5
ggaaatcttccgttctcaaaccaacctaggcaattcgccgcagcctctcaccctcgcgagtcccgacctcccgcagccgccgcacagatggcacccaaggcggagaagaagccggcggccaagaagcccgcggaggaggagcccgcgacagagaaggtggagaaggctccggcggggaagaagcccaaggccgagaagcgcctcccggcgggcaagtccaaggagggcggcgagggcaagaaggggaaaaagaaggcgaagaagtccgtggagacctacaagatctacatcttcaaggtgctgaagcaggtgcaccccgacatcggcatctcgtccaaggccatgtccatcatgaactccttcatcaacgacatcttcgagaagctcgcggccgagt

SEQ ID NO: 5553 - DNA, 399 bp, Zea mays
  Clone ID: LIB3118-020-P1-K1-C6
cccacgcgtccgcccacgcgtccgtttctccctactctcagcaacaacaatttcttccattcaaccaactgtctacactgaaccctgctgcttatttgcagcaacaactattaccattcagccagctagctactgcctactctcagcaacaacaacttcttccatttaaccaattggccgcactgaaccccgctgcttatttgcagcagcaaatactactaccatttagccagctagctgcagcaaaccgtgcttccttcttgacacagcaacagttgctgcctttctaccagcagtttgcggctaaccccgcaaccctcttacaactacaacaattgttgccctttgtccaacttgctttgacagacccagcgggcttctaccaacaacacatcattg

SEQ ID NO: 5554 - DNA, 327 bp, Zea mays
  Clone ID: LIB3118-020-P1-K1-C7
cgcatcaccatgggtggcagtgtcagtgtgagcaatgacctgaatgaacaattgaaatgaaaagaaaaaagtattgttccaaattaaaaaaaaaaaaaaaaaaaaaaaaaaaaaaaaaaaaaaaaaaaaaaaaaaaaaaaaaaaaaaaaaaaaaaaaaaaaaaaaaaaaaaaaaaaaaaaataaaaaaaaaaaaaaaaaaaaaaaaaaaaaaaagggggggccccttttaaagaatcaaattttacttaccctggcatgcaagataaaatttttttaataggggaaccaaaaaaaaataaactggccgctttttaaaaaccctgggc

SEQ ID NO: 5555 - DNA, 382 bp, Zea mays
  unsure at all n locations
  Clone ID: LIB3118-020-P1-K1-C8
ggagcttgagggcatctgcaaccccatcatcgccaagatgtaccaaggcgctggcgcgggcatgggcgaatgcggcttgcattgaacagggatcccccttttggtggaagcggtgctggtcccaagatcgaagaggtcgattaaattggttagcatcgggcggtttgttttggtgtggtctgaagtactcctgaactctgaaggttgtctgtgagatggggtggtgtccacagtctgtgggctgtggtcgaactttttaataaaaataagttttagttcctaatttggtttcggncaaaaaaaaaaaaatattctcctttctattttagaggtgggggtggaagaaaaaaaaaattattttttttttttttttttgtgatga

SEQ ID NO: 5556 - DNA, 377 bp, Zea mays
  Clone ID: LIB3118-020-P1-K1-C9
cccacgcgtccgcccacgcgtccgcccacgcgtccgattgagaccaactagcaacatagaaagcacaatagtgtaccaacaatggcagccaaaatattttgcctccttatgctccttggtctttctgcaagtgctgctaccgcgaccattttcccgcaatgctcacaagctcctatagcttcccttcttcccccgtacctctcaccagcggtgtcttcggtatgtgaaaacccaattcttcaaccctataggatccaacaggcaatcgcagctggcatcttacctttatcacccttgttcctccaacaatcatcagccctattacagcagttacctttggtgcatttattggcacaaaacattagggcacaacaact

SEQ ID NO: 5557 - DNA, 346 bp, Zea mays
  Clone ID: LIB3118-020-P1-K1-D10
cccacgcgtccgcggacgcgtgggcgcgagggaggcgatccagtcgtatgagtgaagtaaagaagagtactccagtcgtactataggttgatgttcgccgataccacaccacacagcagccggtcaaagggagtgaaaactgattttttgtttacggggttttgtcagcaaggttattaggttttgtgtttgtgctgtagcctgtaagatgtaagctactactagcacgggtctcttgttcggtgctgctgctctgctctggcctctgggtgcccctgtattgtagatataaatcagcacccagttcgggcggtccgccagcgttccgttttcttttaattgacga

SEQ ID NO: 5558 - DNA, 393 bp, Zea mays
  Clone ID: LIB3118-020-P1-K1-D11
cgcacccttgcggattacaacattcagaaggagagcaccctccacctggtgctgcgcctcaggggaggaatgcagatcttcgtgaagacattgaccggcaagaccatcaccttggaggttgagagctccgacaccattgataatgtgaaggccaagatccaggacaaggagggtatccccccggaccagcagcggctgatcttcgccggcaagcagctggaggatggtcgcaccttggctgactacaacatccagaaggagagcaccctccatctggtgctccgcctgaggggcggtatgcagatctttgtgaagaccttgactggcaagaccataaccctggaggttgagagctctgacaccatcgacaacgtgaaggctaagatccaggac

SEQ ID NO: 5559 - DNA, 388 bp, Zea mays
  Clone ID: LIB3118-020-P1-K1-D12
cccacgcgtccgcacttcataattttattagagaaaattcaacgacagatgatgattttgatttatgtgatgatgatgagaactatgttcccattacctctgaaggaccatctacgcagggaacaaatgagttgacaaccacaacagttgatgaagacataaatatgaaccattttagagattcgatagctgatgggttgtttgctagacaatagttttttctttaagttgttgtaagagaaatagtttgtttgctgtgctcgacaattggatctgttccaggcaattgtttgttcccattagattgtgatgagaaatcagtttgcgttgtaatacaaactttgattgttgagaaaacaatttgaaataatataaaactgtttttttg

SEQ ID NO: 5560 - DNA, 141 bp, Zea mays
  Clone ID: LIB3118-020-P1-K1-D2
accctgtcttgtcgaggcagcaacccatcgttggaggtgccatcttttagattacatatgagatgtactcgataatggtgccctcattccggcatgtgtttcctagaaataatcaatatattgattgagatttatctcaat

SEQ ID NO: 5561 - DNA, 211 bp, Zea mays
  Clone ID: LIB3118-020-P1-K1-D3
cccgcggcttcggcttcgtcaccttctccacggaggaggcgatgcggaacgccatcgagggcatgaacggcaaggagctggacggccgcaacatcaccgtcaacgaggcccagtcccgcggcggccgtggaggcggcggcggcggctactgtggtggccgtggaggcggcggctacggcggaggcgggcgccgtgatggcggcggccgcta

SEQ ID NO: 5562 - DNA, 394 bp, Zea mays
  Clone ID: LIB3118-020-P1-K1-D4
gaagaaactgcaagcaagttagttgagtccaggaaaagcaaggtaaaagctttagttggcgcttttgaaacagtgatttctctccaggatggcaaacccacatcatcgacagcgcaagctggtaattcacaagatttaattcctgatgacgggggaaatgcacctgaggaaactggatagaatttgcatgcctctgaaatgttgcaatctttgcactcatgtttgggtctcctcctttatttggttccagaatcggatctgattggaagcattttgttcagtgtatacaacagatttcttctgtagaacgacagttgcggaagtggttttttcagacagtatatagtaatgtgttcaatggaacgagtgctttgaagtctacttcactgtaaat

SEQ ID NO: 5563 - DNA, 363 bp, Zea mays
  Clone ID: LIB3118-020-P1-K1-D5
cagaaaaagaaaaagaaaagccaaaggcaaaggcaaaggaatcccaatcaggcaagcaaaaggaagaaccagctgctgcggccggagatgtcgtcgcagctgatcgaggagcaccggtcgggcgcggaggtgcacgtcgggcacgagctgtgcgagcgcaagtcgcgcgagttcatggtggagctgggcctccccgacgggctcctcccgctgcccagcctggacgaggtgggctacaaccggtcgacggggttcgtgtggctgcggcaggccgccggcctgacccacaccttcggctccatcggcaagcaggtgtggtacgacagggaggtgacggcgttcgtggagcccgggcggatgcac

SEQ ID NO: 5564 - DNA, 388 bp, Zea mays
  Clone ID: LIB3118-020-P1-K1-D6
gattccttgaataaagcatacgagttgaatggaaccgaccttggtggctacagcttgtatgtcgatgaagccaagccgagacctgataacagcggtggcttcagtggcggcttcagtggtggcagagggaggagtggcggcttcagtggtggcagaggagggaggagtgacagggggcgtggtggtagccgtgggcgtggatttggaggccgtggtggaaggggtgacagaggccgtggtggaaggggtactcctttcaaacagaccgctggtacagctagtacaggaaagaagaccacctttggtgatgacgattgaagatccatggctggctattatagtgaaaaacgcaaactatattgtaccgttcagacttattgttatctga

SEQ ID NO: 5565 - DNA, 368 bp, Zea mays
  Clone ID: LIB3118-020-P1-K1-D8
cccacgcgtccggagaccaactagcaacatagaaagcacaatagtgtaccaacaatggcagccaaaatattttgcttccttatgctccttggtctttctgcaagtgctgctaccgcaaccattttcccacaatgctcacaagctcctatagcttcctttcttcccccatacctctcaccagcggtgtcttcagtatgtgaaaacccaattcttcaaccctacaggatccaacaggcaattgcagcaggcatcttacctttatcacccttgttcctccaacaaccgtcagccctattacagcagttacctttggtgcatttgttggcacaaaacattaaagcacaacaactacaacaacttgtgctagg

SEQ ID NO: 5566 - DNA, 192 bp, Zea mays
  Clone ID: LIB3118-020-P1-K1-D9
gaatcgcatcacatactggcgtcgttgttcgtgtcgaagagcatccagatctcggggcactgaggcgtttagggaaggacgcgcatgcacctgtgcagtgcagctgtgctaccatgaagtatttcgtgctcttgtgcgctagcttcgtttactttcgacttttcgagtaaggaataaggtgcctcttgttgc

SEQ ID NO: 5567 - DNA, 210 bp, Zea mays
  Clone ID: LIB3118-020-P1-K1-E10
cccacgcgttcggaacacgatgaaattgaggtgaaggttttcgaagagagagggggtctagaagctaagtatcagaagttggatgaaccactttactcaaagcgttatgaaattgtcaatggtgtggtcgagattgagggtcttacaaaagaaagggcgggtggaacccccgaggagcaaaaaagaggtgaggtgacctctgttgtgcac

SEQ ID NO: 5568 - DNA, 310 bp, Zea mays
  Clone ID: LIB3118-020-P1-K1-E12
cccacgcgtccgcccacgcgtccgcccacgcgtccgcccacgcgtccgcccacgcgtccgggaacgcctcaagcagcaggagctagccgccgtctccggaggcggtgacgccgatgccgacgccgagtgatccgctggtcagatcacccgcaactctagagatattgttttttcttttcttttctttctggtttcctgcttgtgtcgcgcggttcaataaggctgtctgtactgagatgcatgtcatgagattccagaaatggatggacatcagactgaacactgtatcaaaataaaaaaacaaaaatac

SEQ ID NO: 5569 - DNA, 181 bp, Zea mays
  unsure at all n locations
  Clone ID: LIB3118-020-P1-K1-E2
aaaaaaaaaaaaaaaaaaaaaaaaaacaaagaaaaaaaaaaaaaaaaagaaagggaaaaaaaaaaacaaagaaaaaaaaaaaaaaaaaaaaaaaaaaaaaaaaaaaaaanaaaaaaaagaggaaaaaaaaaaaaaaaaaaaaaaaaaaaaaaaaaaacaaaaaaaaaaaaaaannnncaac

SEQ ID NO: 5570 - DNA, 208 bp, Zea mays
  Clone ID: LIB3118-020-P1-K1-E4
cccacgcgtccggaacacgatgaacttgaggcgaagtttttcgaagagagagctgctctagaagctaagtatcagaagttgtatgaaccactttactcaaagcgttatgaaattgtcaatggtgtggtcgagattgagggtatcacaaaagaaagtgcagctgaaaccccagaggagcaaaaaagtggagatgagacctctgctgagc

SEQ ID NO: 5571 - DNA, 388 bp, Zea mays
  Clone ID: LIB3118-020-P1-K1-E6
cccacgcgttcgtggacgcgtgggcggacgcgtgggagatcatgttattgttgcccagcctaccagagtcgacaaggcctataatgaaaagacctgtattgctcttctctagaaggtgaaccaaatctggtttgtgaccgagagtttctaatctgctatgatgttcaagcacgcctgatggggagtgttggcaagtcacaggagtgttgtaacataggacacctttattgctgtccttttattttgcctgttttctgtccaaataaaaacttgatgcttcttgcatgttttgatgcgcttgttcaaatacaatcttttttttattatttttgtggtgtttagtttatgccgtcgttctttcagtgtatgctaaggttaattttttcta

SEQ ID NO: 5572 - DNA, 346 bp, Zea mays
  Clone ID: LIB3118-020-P1-K1-F1
cccacgcgtccggttctagatcgcgagcggcctcatctttttttatgtttaccttgagaatcccgtggaaaaaaaaaaaaaaaaaaataaaaaaaaataaaaaaaaaataaaagaaaaaaaaaaaaaaaaaaaaaaaaaaaaaaaaaataaaaaaaatacaaaaaataaaccgtttaaattaaaaaaaaaaaaaaaacaaggggggggccgttttaagagagtcaaattttacttaccttgttttgcaacaaaaaaatttttttatgggggcgccaaaattaaatttatgggccggggtttaacaacctggagctgggaaaaacctgggggttcccaaaataaatt

SEQ ID NO: 5573 - DNA, 311 bp, Zea mays
  Clone ID: LIB3118-020-P1-K1-F10
caacagcgacaacagttacttaatccactagcggtggctaacccattggtcgctgccttcctacagcagcaacaattgctgccatacaaccagttctctttgatgaaccctgccttgtcgtggcagcaacccatcgttggtggtgccatcttttagattacatatgagatgtactcgataatggtgccctcatagcggcatgtgtttcctaaaaataatcaatatattgattgagatttatctcgatatattaaaaaaaaaaaaaaaaaaaaaaaaaaagtaattatattaaaaaaaaaaaaattataaaa

SEQ ID NO: 5574 - DNA, 215 bp, Zea mays
  Clone ID: LIB3118-020-P1-K1-F12
tggacttactgatacccatttgagttgaactgatcttgacagggatcccagaaaacgatgaccttaattgaaaattttgctgattctctgatgcaacacttaaggtctactattggtattgggggagccaagggattgcaacttggaaaaaaggtagcaaatcccctcatattattttttttgctaaactacatatgtgccacagcaaaatttta

SEQ ID NO: 5575 - DNA, 113 bp, Zea mays
  Clone ID: LIB3118-020-P1-K1-F2
gctcgctcctttttttttattgttttgttgcagaggatctgattatggttgtcggtttaatttcgttgtgagcatcattgtgttaatatgttttattgcgatgattggtttgg

SEQ ID NO: 5576 - DNA, 391 bp, Zea mays
  Clone ID: LIB3118-020-P1-K1-F4
agacactcatggctcgtgcatgtgctgcacagacgaatgcaacgtttcttaaattagctggtccacaacttgtgcagatgtttattggtgatggagcaaagcttgtccgggatgcattccagcttgccaaagagaaagctccttgtattatatttattgatgagatagatgccattggcaccaaacgttttgatagtgaagttagcggtgatagagaagttcagcggacaatgttggaattattgaatcaactggatggattcagcagcgatgagagaataaaggtcatagctgcaactaaccgtgctgacatccttgaccctgctctgatgcgatctggacggttggaccgaaagattgagttccctcacccatccgaagaagcaagagc

SEQ ID NO: 5577 - DNA, 243 bp, Zea mays
  Clone ID: LIB3118-020-P1-K1-F6
tggacttactgatacccatttgagtagaactgatcttgacaggtatccgagaaaacgatgaccttaattgaaaattttgctgatacgctgatgcagcacttagggtctactattgttattggtgtagccaagggattgcaactgggaaaaatggtgtaaaaacgctgcatatttttttttgcctaagctacagctgtgctacagcaaattttgattacggttgtttttttaaaatgcccaatc

SEQ ID NO: 5578 - DNA, 155 bp, Zea mays
  Clone ID: LIB3118-020-P1-K1-F7
aacgcgtcgctactttttttttatagaaatgttgcagaggaactgattatgggtgggggggaaataaggtgggagcaataatgtgttaataaaaattattgcgatgattggggtggaataaataaaataatatatatatagaaattataaaaata

SEQ ID NO: 5579 - DNA, 183 bp, Zea mays
  Clone ID: LIB3118-020-P1-K1-F8
cggacgcgtgggcggacgcgtgggattcgatagacttcgcataatttctttcggagtagatctcgagcgacgcatgcatttgctatggaaaatcccgaaacatggaacagaggcagacgtacgtacaacagcacgccgttgctcaacacacgacgaggatgcaggttggcatagaaaatgcat

SEQ ID NO: 5580 - DNA, 353 bp, Zea mays
  Clone ID: LIB3118-020-P1-K1-F9
gaagattgcaagatccatgggatacggcgaggatgatctccctctagtatcatttcagtctgtctccaaaggatactatggagagtgtggtaaaagaggaggttacatggagattactggcttcagtgctccggtaagagagcagatctacaaggtagcttcagtgaacctgtgctccaatatcactggtcaaatccttgcgagcctcgtcatgaatccaccaaaggttggggacgaatcatatgcttcctacaaggcaaagaaagatggaatccttcagtctttagctcgccgtgcaaaggcactggaagatgcattcaacacgcttgagggattttcatgtaacaaggctg

SEQ ID NO: 5581 - DNA, 389 bp, Zea mays
  Clone ID: LIB3118-020-P1-K1-G1
acgcccacgcgtacgcccacgcgtacgcccacgcgttcgcggacgcgtgggtttttttttttttaaacgggaatttcagttctcatagcattatcatgaatctcagaacataacaggtgaaacacgaatcaagcagaggcgccatggggttcacagatccacacctaaaccgctaaattaaactgcgagcgatacatgataaactaagaccaccactcagatcaccaccatcttattcagatccaaaggaacggacgcagggggagtcgacgatgacggagggagggcggccgaacagaccagatcagagagatctaggagagctgtccgcagtcagcgaccttgaccaccttggaggtggagccgttgcgggtgcccaccttctcgat

SEQ ID NO: 5582 - DNA, 394 bp, Zea mays
  Clone ID: LIB3118-020-P1-K1-G10
cccacgcgtccggttctagatcgcgagcgggctcatctttttttatgtttaccttgagaatcccgcttaaaaaaaacaaataggacgcactgaaccccaaaaaaaataaaaaaaaaaaaaaaaataataaaataaaaaacaaatagaatgaaaaaaagaaaaacattactaaaagacacaaaaacaaaaaaaaaactatatgggggggccgttttaggggacccaagtttccctccgggggcttccacaataaaagcttttttttggggccccctaaaacaaatccaggggccggggtttaacaacacattaacggggaaaaccctggcttaaccaaaataaagggggtgggagaaaaatacacttttgtcggtgggggtaatggccaaagggc

SEQ ID NO: 5583 - DNA, 386 bp, Zea mays
  Clone ID: LIB3118-020-P1-K1-G11
cccacgcgtccgggtcattcggtcattccacttccaccaatctgtctcccaatctttcttgctgctccaattcgctctctttactcggccagcggaaggggagaggagggcgagatgacggtggagaaggtggacgcggggctttccgacttcgacgcccacttcgatcgcctcttcgcttccccggacgccgcctccgacggcaaggtgaagctgctgctcttcctggccgaccgcaagcctggctcctccctctcctggtgccccgactgcaacgtggcggagccggtgatctacgagcggctggaggcactggagggcaaggacgcggtgcttctgcgcgcctacgtcggggacaagcccacttggcgcgacccggcgcaccc

SEQ ID NO: 5584 - DNA, 398 bp, Zea mays
  Clone ID: LIB3118-020-P1-K1-G12
ggttagccgatcgattgttcaggtcctcggatcttgactgtatggatgcgttcttgtcatgcctggacgacggcccgacggcttcgccgccgcgcgccgccccgccgtcatccccggcgctcagcgcgcgggacctctacagtttcatatgcagcggtccactggtggacaggatcggctataccaaagagaaggtcgccgactccatcggccggtggcttcgctgcggggttgacgtggcgcgcctcctccgcctcgacgagctccagctgtcggaggccgagaaggcccgggtataccagttctacatccccgtcttcctctggtgcgaggaccaggtcatagagcatagagccaagtacagcgagggcgacgacatcccgccattggtgatcggg

SEQ ID NO: 5585 - DNA, 63 bp, Zea mays
  Clone ID: LIB3118-020-P1-K1-G2
caaaaaaaaaaaaaaaaaaaaaacaaacacacaaaaaaaaaaacaaaaaaaaaatatatttat

SEQ ID NO: 5586 - DNA, 241 bp, Zea mays
  Clone ID: LIB3118-020-P1-K1-G3
gccaggctcaccgaggggtgctccttccgtcgcaagggcgattaggtcctgcttctcttaacgtgagaagagataaatttggtgttttgcaactttctcaggatatgtactcggtgaggattttgttaattattatggctgttagcgtggcctgacaatgcttgtgtaaacctgcactttgtttgagcgtagtgacagctaatatggtgctgtttggcttttgctgagggagtggcaatgc

SEQ ID NO: 5587 - DNA, 362 bp, Zea mays
  Clone ID: LIB3118-020-P1-K1-G4
gtggatctcaacaagctactcaaagtgcggtggcaatcttgacagcagcacaatacctaccatcaatgtgcggcttgtaccactcatactaccaaaataatccatgcagcagcaatgacattagtggtgtttgcaattgaagaattgtgtctacctagccgttatactcctataacggtgttaagcaataaagtaccatacattaaaaaaaaaaaaaaaaaaaaaataaaaaaaaaaaaaatataaaaaaaaaaaaaaaaaaaaaaaaattttaaaaacccaaaaaaaatttaggggtaaaaaaaaatttaaaaaaaattttttataaaaaaaaaaaaaaaaaaaagggggggcccttttaa

SEQ ID NO: 5588 - DNA, 422 bp, Zea mays
  Clone ID: LIB3118-020-P1-K1-G5
ctacattgaaccgtgctgcttatttgcagcaacaactattaccattcagccagctagctactgcctactctcagcaacaacaacttcttccatttaaccaattggccgcactgaaccccgctgcttatttgcagcagcaaatactactaccatttagccagctagctgcagcaagccgtgcttccttcttgacacagcaacagttgctgcctttctaccagcagtttgcggctaaccccgcaaccctcttacaactacaacaattgttgccctttgtccaacttgctttgacaaacccagcagcctcctaccaacaacacatcattggtggtgccctcttttagattgcttattagttgtaattcaataataaagttttttggatgatgtatgtggccaaccagaaataagaagttacattt

SEQ ID NO: 5589 - DNA, 346 bp, Zea mays
  Clone ID: LIB3118-020-P1-K1-G6
agaagatggagagggagcggcaggagaagctcaagaagaggctcgagcaggagaaggccgactctgacaaggccaagcccgccgacaccgacaagaaggccgagggatctacctagctaggattggcatggcgctgtcggaaggcaatcacgtttcgcatgtatccgaatccgatggtcagctttgtgaatgaataaattctgtaaaacgtcaacagcactggatatgctgttgcttcggttgcttgcatgttgaagttgaagacgacattcatattttgatactgctgctctttgtggactcgcggtagattggtctttgtggtgttacctgctgttttgagttt

SEQ ID NO: 5590 - DNA, 86 bp, Zea mays
  Clone ID: LIB3118-020-P1-K1-G9
aaaaaaaaaaaaaaaaaaaaaaaaaaaaaaaaaaaaaaaaaaaaaaaaaaaaaaaaaaaaaaaaaaaaaaaaaaaaaaaaaaaagg

SEQ ID NO: 5591 - DNA, 391 bp, Zea mays
  Clone ID: LIB3118-020-P1-K1-H10
aaaccttgttatgtcgataggaattgctgtcgagttctgtgttcatatcacgcatgcctttatgattggcactggggacaaagaaactcgtgcaaggcaggctctatccacgatgggtgcgtctgtattcagtggaatcaccttgaccaaacttgtgggagttattgtcctacgttttgcgaaatctgaagttttcgtggtttattacttccaaatgtatttggcacttgtcatcattggattcctgcatgggcttatcttcctaccggtccttttgagtttatgtggccctcctacaaaatgggcgaagccaaaagaacaaagtcagccaccttcagcttcaagtgagcggacttgacaggattttatttgagttggacggttacatact

SEQ ID NO: 5592 - DNA, 169 bp, Zea mays
  Clone ID: LIB3118-020-P1-K1-H11
cccacgcgtccgcccacgcgttcgtccacgcgttcgaaaaaaaaaaaaaaaaaaaaaaaaaaataaaaaaaaaaaaaaaaaaaaaaaaaaaaaaaaaaaaaaaaaaaaaataaaaaaaaaaaaaaatataaaaaaaaaaaaaaaaaaaaaaaaaaaaaaaaaagggggg

SEQ ID NO: 5593 - DNA, 330 bp, Zea mays
  Clone ID: LIB3118-020-P1-K1-H2
ggttggcttctcctccccctccggttcgggttcgggttcgtgaggttctccggggttcgggttcgtgggtgagcggatcgagatggcggcgtcggatgttgagtaccgctgcttcgtcggcggcctcgcctgggccacggacgaccactccctccacaacgccttcagcacctacggcgaggtcctcgagtccaagatcatcctcgatcgggagacgcagaggtcccgcggcttctgcttcgtcaccttctccacggaggaggcgatgcggaacgccatcgagggcatgaacggcaaggagctggacggtcgcaacatcaccgttaacga

SEQ ID NO: 5594 - DNA, 384 bp, Zea mays
  Clone ID: LIB3118-020-P1-K1-H4
gttggcttctcctccccctccggttcgggttcgggttcgtgaggttctccggggttcggtttcgtgggtgagcggatcgagatggcggcgtcggatgttgagtaccgctgcttcgtcggcggcctcgcctgggccacggacgaccactccctccacaacgccttcagcacctacggcgaggtcctcgagtccaagatcatcctcgatcgggagacgcagaggtcccgcggcttcggcttcgtcaccttctccacggaggaggcgatgcggaacgccatcgagggcatgaacggcaaggagctggacggccgcaacatcaccgtcaacgaggcccagtcccgcggcggccgtggaggcggcggcggtgggtacggtggtggccgt

SEQ ID NO: 5595 - DNA, 403 bp, Zea mays
  Clone ID: LIB3118-020-P1-K1-H5
cttgttcgatcgcacacatggcacactattgcattccagatagccaaacatgggatatgataccgttatctgctacctacgattcaacaacggatgcaactgatcctagaaatgagaatgaaatccttctcctgtccgttttttgtggcagcttgtgcaagtatctcacaattgcttccgggagagcctcggtttttgtccttcaagcactgccgacaactcagatcaagtcttgggatcacgctgttggggtaatctgcgtgcaggaggccggtggtcagaccagtgactggagtggagaaccgttggatcttgcagctgacctaacatcgcgcagaatcatctaccctcggggcggtgttctggtgacaaatggtgcgctgcatgacaagcttgtcgaaat

SEQ ID NO: 5596 - DNA, 374 bp, Zea mays
  Clone ID: LIB3118-020-P1-K1-H6
cccacgcgtccgccgaaatgtcacaatcaaaaaaaaaaaaaaaaaaaaaaaaaggaaatggaaaattattaatttaatataaaaatggtagatatgtttaagaggggtgtggattttttttgtgggtggttgttgatttattttattttttgtgggggtgttttattatataaatattgtataattttttttgattgggggttgttttttaattttgttggagtttaaaaaagttgggttttttttattatattttattttttttcgtagttttgtggtttttttgattgttttttttttttggtttggtttttgaaatttttgttcgccttctttttttttatttttctgttctttttgggggttagttgggg

SEQ ID NO: 5597 - DNA, 244 bp, Zea mays
  Clone ID: LIB3118-020-P1-K1-H8
cgacaccgttgctggtctaaactaacggaggagtcttaatactaataatatatatgttatagcatggtagtttgctctccaatgccacagttgtagctgtattgggtatgggcatgacagttttgcgagttttacccgtcatcgttgatttcagtaattaccgaattgaataaaaatcgttctggtgtatcgtgatgttacaattataataatataaaacaaggcaaataaagtctcatgattt

SEQ ID NO: 5598 - DNA, 351 bp, Zea mays
  Clone ID: LIB3118-021-P1-K1-A1
acagtcccatatgcaagagagtccggagcggaggccgggcgggaccgcgggagggggcggccggggtccggtccggggaggcggggaccagggcaatgcacaacgcgccggcagtgaccagtagcccactatggcaccagctcctcgcatcgcatctcccctgctaggcctcctcgtcccggcgaagtgttgaagatggctttggtgacggaaatgtcttgttagcatcaagtaagtggcgacatcacaacccctacaagcttgtgccttaaaacaagaggatacaagaagttggagtgcttttatgaaggcttttgcgaatcacttgaagcgttagtacttttgtgaatg

SEQ ID NO: 5599 - DNA, 255 bp, Zea mays
  Clone ID: LIB3118-021-P1-K1-A10
gttggcttctcctccccctccggttcgggttcgggttcgtgaggttctccggggttcgggttcgtgggtgagcggatcgagatggcggcgtcggatgttgagtaccgctgcttcgtcggcggcctcgcctgggccacggacgaccactcccttcacaacgccttcagcacctacggcgaggtcctcgagttcaagatcatcctccatcgggagacgcacaggtcccgcggcttccgcttcgtcaccttctacacg

SEQ ID NO: 5600 - DNA, 329 bp, Zea mays
  unsure at all n locations
  Clone ID: LIB3118-021-P1-K1-A11
cgcaggnaccggacccggaagcccggggcgacccacgcgnccggaagccaacannaaaaaaagagcagacacgcccggggcaaaacaccagcggcgggacccggcgnggaacacccccancaaccaggacnncaacaacaaccanagggggaaggcagaannggcaggcccctcggcgaaanacacccaggaacnggcgccgagcggagcnccgcaccacanacggggcaggaagaacaccaacccgaaccggcagggcggcaagaagaaggcccccaaggcgaaaacaaaccagggcggctaaaaaagcggccccccccaggcggggg

SEQ ID NO: 5601 - DNA, 351 bp, Zea mays
  Clone ID: LIB3118-021-P1-K1-A12
gctggaggtgtgcggccgggaccgggtgggcttgctgtcggacgtgacgagggtgctccgggagcacgggctcacggtgagccgcgccgacgtgacgacggcgggcgggcaggccacaaacgtcttctacgtccggaacccctcgggccagccagtggacatgaagaccgtcgaggggctcaggggccagtttggccagaccgccatgctcaacgtcaagagcgtgggcgtgcctgctgcggtggccaaagcggcggagccaagctccggcagcatggtcaggagcagcttcttctccttcggcagcctcttcgcgaagctccgggcctgacaactggtcaggcgaattcg

SEQ ID NO: 5602 - DNA, 291 bp, Zea mays
  Clone ID: LIB3118-021-P1-K1-A2
acagtcccatatgcaagagagtccggagcggatgccgggcgggaccgcgggagggggcggccggggtccggtccggggaggcggtgaccagggcaatgcacaacgcgccggcagtgaccagtagcccactatggcaccagttcctcgcatcgaattttccctgctaggccttcttgttccggtgaagtgttgaagaaggttttggtgacggaaatggtttgttagcataaaagtaagtggtgacatcacaacccctacaagcttgtgccttaaaacaagaggatacaagaa

SEQ ID NO: 5603 - DNA, 358 bp, Zea mays
  Clone ID: LIB3118-021-P1-K1-A3
cttcttcagtgagactggtgctgggaagcacgtgccccgtgctgtttttgttgaccttgaacccactgtcatcgatgaggtgagaactggcacctaccgccagctcttccaccctgagcagctcatcagtgggaaggaggatgcagccaacaactttgcccgtggtcactacaccattggcaaggagattgttgacctgtgccttgatcgcatcaggaagcttgccgacaactgcactggtctccagggcttcctcgtcttcaacgctgttggtggaggaacgggctctggccttggttccctcctcctagagcgcctgtctgttgactacggcaagaaatccaagcttgggttcact

SEQ ID NO: 5604 - DNA, 419 bp, Zea mays
  unsure at all n locations
  Clone ID: LIB3118-021-P1-K1-A4
cggacccgaagggcggggcaggcccacgcccacgcgaacgctagcaacaaaaaaaggacaaaaacgaaccaacaaaggcagggaaaggagccaggcagcgaaggcccccaggaccaacagcaagggcagcaacggcgaccaaaaacccgcaaggcacacaagccccgagaggaacacacagaccaccgagccgaacaacagaggagacggcaggaggggaaaacccaaacccacaaccccacagganccaacaagcaaaaggaacaggcaggagacctacaacacccgcgggccaccaacaaacaacaaccaaaagagagggagaaccgacgaagcacaaaaaggaacaaaacaaaagggaacaacagcaagggcaagcaaacgcagggggctagttttaaaaacaaaaagaaaccttg

SEQ ID NO: 5605 - DNA, 409 bp, Zea mays
  Clone ID: LIB3118-021-P1-K1-A5
gaagcctcctttttattttgagcagctctctcggtgcttatctcctgctgctgtaccttgctttgatcactcctatcatccatgacttctacaactacgatatggagaaggcagaatttgcaggcctctttgcgaagttcacccaggatttggcgctgatcggagctctgctcttctttctgggcatgaagaactccatcccgaagcggcagggcggcaagaagaaggcccccaaggcgaagacgaactagggctgcttagatagctgcacgcctcaggcggggtgtatcaggccacaggtctatttcgaagcaggcccagcgcgatgcagcgaatgccatcgagctgcgcttttacatgtttatcatcagattccattttgcggggcacggcccggacaaaggtgtga

SEQ ID NO: 5606 - DNA, 416 bp, Zea mays
  Clone ID: LIB3118-021-P1-K1-A7
cgcgtttgacagtcccatatgcaagagagttcggagcggaggccggtctgtaccgtgggagggggcggtcgtggtccggtccggggaggcggtgaccagggcaatgcacaacgcgccggcagtgaccagtagcccactatggcaccagctcctcgcatcgcatctcccctgctaggcctcctcgttcttgcgaagagttgaagatggctttggtgacggaaatgtttagttagcattaagtaagtggtgacatcacaactcctacaagcttgtgccttaaaacaagaggatacatgaagttggagtgcttttatgaaggcttattgcgaattacttgaagcgttagtaccttttgagaatgattcttgtaaagttgttaggctaattttgttgaaaaacataattacattgtgtag

SEQ ID NO: 5607 - DNA, 379 bp, Zea mays
  Clone ID: LIB3118-021-P1-K1-A9
cccacgcgtccgcggacgcgtgggtagaaagcacaatagtgtaccaacaatggcagccaaaatattttgcctccttatgctccttggtctttctgcaagtgctgctaccgcgaccattttcccgcaatgctcacaagctcctatagcttcccttcttcccccgtacctctcaccagcggtgtcttcggtatgtgaaaacccaattcttcaaccctataggatccaacaggcaatcgcagctggcatcttacctttatcacccttgttcctccaacaatcatcagccctattacagcagttacctttggtgcatttattggcacaaaacatcagggcacaacaactacaacaacttgtgctagcaaaccttgcttgctac

SEQ ID NO: 5608 - DNA, 398 bp, Zea mays
  Clone ID: LIB3118-021-P1-K1-B1
tgagaagtctacctccagcatcttcccactttaaaacgtcttcatccgcaaggtgaagatactcaaggcccccaagttcgatcttgggaagctcatggaggttcacggcgactacaaagaggatgttggtgtgaagcttgagaggcctgtcgagggagatgaggctgggcaggaggttgctgctgccgagtagtttgtttgctagttctatatctaggcgagtcttgacatgaggttgcttatgacgtgaacttatagagttgtcttggctatgtgttttcgtctagccctaagattttgtcttgaaacaagtttaaaattaacattatttgtaacaagtgtataggattacttggggtgatattctgagttcgattactgctgtactaagttccatc

SEQ ID NO: 5609 - DNA, 407 bp, Zea mays
  Clone ID: LIB3118-021-P1-K1-B10
attaacacttttttgacttttcagacaatgttgatcttggcactgcctgcggcaagtactacagggtgtgctgcctcagtatcatcgacccaggttcgttcctgttgaattgccattatcttgtttctgtccgaactgtcactgcacaattcttaggccggcactgcacaattcttaggccctatttgtttcggattataatctggtcaaactatataatctaggtcaaataatttagggggtaaacaaacacctagattataggttcaaattatacaatctaaatcccggatcatgataatctcataatatcctcaaaagtagcttatttgagattatttttgtccaaagacccactacccatgtttatgtacatcaaaatcacgaaatttgtcatcactatattt

SEQ ID NO: 5610 - DNA, 412 bp, Zea mays
  Clone ID: LIB3118-021-P1-K1-B11
tcgcggacgcgtgggcggacgcgtgggccgacgcgtgggcggacgcgtgggctcatccacagctcgcagccgtattcctgtctcgtatcctctctcgccgctccgatggcccgcacgaagcaaacagcaaggaagtcgaccggcggcaaggccccccggaagcagctggccactaaggctgcgcgcaagtcggccccggccaccggcggcgtgaagaagccccaccgcttccgccccggcaccgtcgcgctccgcgagatccgcaagtaccagaagagcactgagctgctcatccgcaagcttcccttccagcgcctcgtccgcgagatcgcgcaggacttcaagactgaactgaggttccagtcctccgacgtcgcggcgctgcaagaggccgtcgaggcgtacctggtgg

SEQ ID NO: 5611 - DNA, 413 bp, Zea mays
  Clone ID: LIB3118-021-P1-K1-B12
ttcatttaaccaattggccgcactgaaccccgctgcttatttgcagcagcaaatactactaccatttagccagctagctgcagcaaaccgtgcttccttcttgacacagcaacagttgctgcctttctaccagcagtttgcggctaaccccgcaaccctgttacaactacaacaattggtggccttcgtgcaacttgctttgacagacccagtggactactaccaacaacacatcattggtggtgccctcttttagatgagcttattagtcgaaattcaatcataacggtttatggatgaggtatgttgccaaccacaaatacgaagttacattcccggcttctagactgatctgaggttccagtcctccgccgtcgcggcgctgcaagaggccgccgaggcgtacctggtgg

SEQ ID NO: 5612 - DNA, 411 bp, Zea mays
  Clone ID: LIB3118-021-P1-K1-B2
ggcgaagaagtcgcgcgtcaagtgcttcatcaagctcgtcaacttcacccacctcatgcccacccgctacaccctcgacgtcgacttcaaggacgtggccaccggcgggcccgacgcgctctccacccgcgacaagaaggtcgccgcatgcaaggccgccaaggcgcgcctcgaggagaggttcaagaccggcaagaacaggtggttctttaccaagctccgcttctagatggtcggcgtcccgaatggtgaccgtcggtttcttgtatgggacacactccaagccatgtctcttttcgtattgccatgaagacttcttcgtgtttagtcctggggctctcaggtatattgtgcgtgtgtacttcgaatgtttgggcttggagtcctactgaattgatgaatgttcaattt

SEQ ID NO: 5613 - DNA, 339 bp, Zea mays
  Clone ID: LIB3118-021-P1-K1-B3
cccacgcgtccgcggacgcgtgggttgaactctcatgcttatgtacaacaacaacaactactaccattcagccagctagctgctgtgagccctgctgccttcttgacacagcaacatttgttgccgttctacctgcacactgcgcctaacgttggcaccctcttacaactgcaacaattgctgccattcgaccaacttgctttgacaaacccagcagtgttctaccaacaacccatcattggtggtgccctcttttagattgcttatgagttatagttcaataataaagttttttttgctgatatttgtggcttcccagaaataagaaagtacatttct

SEQ ID NO: 5614 - DNA, 346 bp, Zea mays
  Clone ID: LIB3118-021-P1-K1-B6
cggacgcgtgggcggacgcgtgggcggacgcgtgggcggacgcgtgggctcatccacagctcgcagccgtattcctgtctcgtatcctctctcgccgctccgatggcccgcacgaagcaaacagcaaggaagtcgaccggcggcaaggccccccggaagcagctggccactaaggctgcgcgcaagtcggccccggccaccggcggcgtgaagaagccccaccgctttcgccccggcaccgtcgcgctccgcgagatccgcaagtaccagaagagcactgagctgctcattcgcaagctcccctttcagcgcctcgtccgcgagatcgcgcaggacttcaagactg

SEQ ID NO: 5615 - DNA, 300 bp, Zea mays
  Clone ID: LIB3118-021-P1-K1-B7
cgagaagtttaccttcagcatcttcttacttcaaaacgtcttcatccgcaaggggaagatactcaaggcctccatgttcgatcttgggaagctcatggaggttcacggcgactacaaacaggatgttggtgtgaagcttgagaggcctgtcgagggagatgaggctgttcaggaggttgctgctgccgagtagtttgtttgctagttctatatctaggcgagtctggacatgaggttgtttatgacgtgaacctatagagttgtcttgtttattagttttcgcctatgcctagtattttt

SEQ ID NO: 5616 - DNA, 396 bp, Zea mays
  Clone ID: LIB3118-021-P1-K1-B8
acgcggacgcgtgggcgcaaccatttttccacaatgctcacacgctcctagcgcttactttctttccccatacctgttaccagcggggtcttcagtatgtgaaaacccaattcttcaaccctacaggatccaacaggcagtggctgaaggcatcttacctttataacccttgctactgcaacaaccggcagacctattacagccgttacctttggtgcatttgttggcacaaaacatcaagggacaacaactacaacaacttgtgctaggaaaccttgctgcctactctcagtaacaggagtttcttgcattcaaccaactggctgcattgaactctgctgcttatttgcaacaacaactaccattcagtcagctagctgctgcctacccccagca

SEQ ID NO: 5617 - DNA, 413 bp, Zea mays
  Clone ID: LIB3118-021-P1-K1-B9
cggacgcgtgggcgcttccagccgccgccgcgtccgcctcgccaagcgcagcagccgccgcagcacatctctctctcgatctcagccatggcggaggtggagcagcaacaggacacgccgaagctgttcaaccgctggaccttcgatgatgtccaggtgaacgacatctcgctgaacgactacctcgctgtgaacgcgacgaaacacgcgatgtacctgccgcacaccgcggggcgttactccaagaagcggttccgcaaggcgcagtgcccgatcgtcgagcgcctcacaaactccctcatgatgcacgggcgcaacaacggcaagaaggtcatggctgtccgcatcatcaagcataccctggagatcattcacctgctcaccgatgccaaccccatccaggtcgtcgtcga

SEQ ID NO: 5618 - DNA, 381 bp, Zea mays
  Clone ID: LIB3118-021-P1-K1-C1
aatggaatggcacaaaacctgaacctgaggtcggcgcaaagagaaaagaactagagcattccgtggagagaaggctgtggcagctcctgtgggagatgtcaatcctgtgcgatacgagcgcggcttggtgatggctgtttacgccgactcctgactcgaagcccctatttttcaccttcgcggcgctgtgccgcttcgcgccgtagcctaatgcagtacgagttgatgcagctgaccggctccccctactagcacggttgaggcccagcttggctccacggcccgttccgagaccaccatgatctggcaagtgaacagggagaggctggcggagtttcttggcgagctgcaacggaaagaggacaccaacgacaggttcct

SEQ ID NO: 5619 - DNA, 79 bp, Zea mays
  Clone ID: LIB3118-021-P1-K1-C10
cccacgcgtccgcccacgcgtacgcccacgcgttcgtccacgcgtacgcagacgcgtgggcggttgcgttggcgttcgc

SEQ ID NO: 5620 - DNA, 410 bp, Zea mays
  Clone ID: LIB3118-021-P1-K1-C11
tgcattctctgtgacgtgcattatccggtcagagttgttcttgaaggttatgaagcaaaacacagaggccatcacaagctacgaaatgcttgatgcggttcgtgttgctcttggtatcctgctgcaaatggtggttatagctacaactaccagactcctgcagaatatgtctcctcccaagagagcttcatgaatgctatgacattttagctttgtttcaagtagtaagggatacaaacttcgagttaaaaatattggccaagtgcgatagtcttgtaccgaagatgctactggtgtacaactgtcaggaaatcgtggtttacttgtttcctcttttgtttttgttttacttcttcccttttctggatctggaaaattcgtagtcgttggcgagctttgcaagctaaagg

SEQ ID NO: 5621 - DNA, 270 bp, Zea mays
  Clone ID: LIB3118-021-P1-K1-C2
gcccacccattcgatggggtttgatgctgatcataaattcgacagcacatgtataaaacgagaggggtccatgaagagaaggcaatgggcagctccttttagaagatccaaatttatcttcaacacgcatctcgacgggttaattattctataatgtcaactaaacacaattagctgttcatttttttgctaggcgtgctgtgggaaaaccttgccgttacctaacaaaatcgttttgtaaaacattcccttttctcctactggctttat

SEQ ID NO: 5622 - DNA, 417 bp, Zea mays
  Clone ID: LIB3118-021-P1-K1-C3
attctggcgagcagcttcctttcaaccccaatatgagtggcaatggtttttgatgccaccctcctacgttacaagacggccaaccagattggttatggaaccagccaaatgtgcagcaagcacaccttattcaagtttgttggcaccaatagatatatgttatttctagttaaattctttgtagcgctgcgccgatgaagcctaacatggtgcgagttttgttgtttcgccttttgtacagtatatatccagtcatttcgtcatgatatgatatcaagtgatgggtatagttttgttcggacccagggaaagcaatggaaaaaaaaatctactaggcgtgtagcagtacccagcgtctgagtcactgttacggatttgccttgcaaaatagacatggctggtatggcggcggcaaaa

SEQ ID NO: 5623 - DNA, 406 bp, Zea mays
  Clone ID: LIB3118-021-P1-K1-C4
atatcaacaagtgggtcaagcattcgtgttctccaaaatgttgtcaaggaagattcatatttttctggcttgccaatctccattatcgaatcatggtaccaacgtgatggctatgtgaaatcaatggctgacctaattgaaaaagagctatctgccttttccaatcctgaagaggtaatgatattcttcagtgcacatggtgtgccacttacctatgttcaggatgctggagatccttacagagatcagatggaggattgtatttctttgatcatgggggagctgagatccagaggaatcttaaatggtcacactttggcgtatcagagtcgggtgggaccagttcaatggctgaagccatatactgatgaagttttagtagaacttggtcagaacggtgtgaaga

SEQ ID NO: 5624 - DNA, 412 bp, Zea mays
  Clone ID: LIB3118-021-P1-K1-C8
cgagatcgtgaaggagatgagagacgtcctagagaacatgatcgtacagcagaaatgcataatgtggattcagataatgacaaagataaggaacatgtatcaagaaaaagccgcccaaaaggtcgtgatagcagagatttatcaagttccagtgatggtcttcaaaatgatggaaaacatcagttggataaaactattcagatgcgcgaggaccttgaaaatgagattaaccagattaaggataaaatatctgggaaagaacagcacattgcagatttgcagaagaaagctcataaactagaggatgaactggttgccgcacggaaagtctcttcagaacgacagttggcggttacagacctgtacaaacattttcttcaacttcaggactacaatgatagggtcaaaacag

SEQ ID NO: 5625 - DNA, 273 bp, Zea mays
  Clone ID: LIB3118-021-P1-K1-C9
attctggcgagcagcttcctttcaaccccaatatgagtggcaatggtttttgatgccaccctcctactttacaagacggccaaccagattggttatggaaccagccaaatgtgcagcaagcacaccttatttaagtttgttggcaccaatagaaatatgttatttttaaataaattctatggagcgccagcgcctgatgaagcctaacatggggcgagttttgttgtttcgccttttgtacaatatatattcagacattttgtcatgaaatta

SEQ ID NO: 5626 - DNA, 362 bp, Zea mays
  Clone ID: LIB3118-021-P1-K1-D1
atcatgccaaaggacattcaactggcaaggaggatccccggggagagggcctaatccccacctcaaacatcgtgacaaaaacatgaagtcctggggttattgctaatctggtgccattgtaaggacatatgagtagggtttgttttgtggatcgcaagtttttcttctgctactagtgctgctacctctgctgatgaaatagctgggggcgaatactacttaaaactattatcctctagcatggtgtaccagagttatgagcgctgctgctccttccgcgcaatgctgtggacgattaattcgttaatgtcaataattatgttacagtccgcgttcgcatacatacaacataatatcttttc

SEQ ID NO: 5627 - DNA, 225 bp, Zea mays
  Clone ID: LIB3118-021-P1-K1-D10
caggaacatctgatgctgaaagctcagcaatccatggcggggcagcacagacagttggcggaacaagaggagggctggatcggcacgatgtgcagcgacgggacttgctctccctgggtggtggtcttgctgggtctagggatcaccacgatcctagttttggccacattagctgtaacgacgagaaaaagaacgtctaaacttaaggtttaaccagaacttttc

SEQ ID NO: 5628 - DNA, 401 bp, Zea mays
  Clone ID: LIB3118-021-P1-K1-D12
ggcaatcgcagctggcatgttacctttatcacccttgttgctgcaacaatcatcagtcctattacaacagttacctggggcgcattgattggcacaaaacataatggcacagcaactacaacaacttgagctagcaaaccttgctggctactcttagaaacagcagactattccattcaaccaacttgggtcatggaactctgcttgttatgtgcaacaacaacaactaccattcagccagatacctgctggctaccgccagcaatttacttccatcaaaccaaatagcaggattgaactttcctgcttatatacagcagcagcagctactaccattcagccagctagctggtgtgagccatgatgccttcttgacacaaccacaggtggtgccgtgctac

SEQ ID NO: 5629 - DNA, 297 bp, Zea mays
  Clone ID: LIB3118-021-P1-K1-D2
ctgcagccgggcaggagagggataccaaacgcagatgtatccaccgtgtcgtcccggcaccaccgggccaaggatcggccgcgtgaggcttacgaaggcccgggagtacgccgcggggttgccgatgatgtgccggctgtcggagccccaggagtgcagcatcttctccggcggcgaccagtactagctaccaaggttaaaaaaaaaagagtgagtcggcgcgacctgcaaggcgcaacatgtgtacttggcgcgtgcaaatccagaatgacgtagctctgacgtgggcctcgcaat

SEQ ID NO: 5630 - DNA, 411 bp, Zea mays
  Clone ID: LIB3118-021-P1-K1-D4
gcgcatcaagccatcaacatcacataacgatgaggatgacctgtggggttcaatagcggcacctcctccaaaatcatttggaaagcctttgaagccagctgcagcgaatagtgacgacctatggggtgccattgcagcacctacaccaggaaccaaagccaggcccttagcctcatcaggtaagggccgaggaacaaagcctgcgcaaccaaaacttggtgctcaaagaataagaagaacatcctcaactggaatgtgatggcttatgatatcaaatgtggtacacgagagcgaagattttctttttgtgccccatactctgagtctgaccaggatgtcattctttgtaaactcgcaaaaggtatcaatatatggacacaattttgacaaatgtattaatattgtttcacc

SEQ ID NO: 5631 - DNA, 399 bp, Zea mays
  Clone ID: LIB3118-021-P1-K1-D6
tcgtaccaacttcacagttacctcaaaggcatctgatgaggatggcgactttgctgagctatatgtgttcaagtggaccagtttgctcatccctccgaccactgttcttgtcattaacctggtcggaatggtggcaggaatttcgtatgccattaacagcggctaccaatcctggggtccgctctttggaaagctgttcttctcgatctgggtgatcctccatctctaccccttcctcaagggtctcatgggcaggcagaaccgcacgccaacaatcgacatcgtttggtccatcctccttgcgtctatcttctccttgctgggggtgaagatcgatcctttcatctccccgacacagaaagctgccgccttggggcaatgtggtgtgaactgctgatc

SEQ ID NO: 5632 - DNA, 332 bp, Zea mays
  Clone ID: LIB3118-021-P1-K1-D7
atcatgccaaaggacattcagctggcaaggaggatccgcggcgagagggcctaatcgccacctcaaacatcgtgacaaaaacatgaagtcctggggttattgttaatctggtgccattgtaaggacatatgagtagggtttgttttgtggatcgcaagtttctcttctgctactgttgctgctacctttgctggtgttattgctagggtcgaatacttaagttaactatgcgctgacagtctggactagcagtgttatgtgcgctgctggaccttgcgcgcaatgctgtggccgatttgttcggtaatgtcaagaatggtgttacagtgcgt

SEQ ID NO: 5633 - DNA, 296 bp, Zea mays
  Clone ID: LIB3118-021-P1-K1-D8
ctgcagccgggcaggagagggataccaaacgcagatgtatccaccgtgtcgtcccggcaccaccgggccaaggatcggccgcgtgaggcttacgaaggcccgggagtacgccgcggggttgccgatgatgtgccggctgtcggagccccaggagtgcagcatcttctccggcggcgaccagtactagctaccagggttaaaaaaaaaagagtgagtcggcgcgacgtgcaaggcgcagcatgtgtactgtgcgcgtgcaaatccagaatgacgtagctctgacgtgggctcgcaat

SEQ ID NO: 5634 - DNA, 420 bp, Zea mays
  Clone ID: LIB3118-021-P1-K1-D9
cggacgcgtgggtgaaaacccaactcttcagccctataggcttcaacaaggcagggggcagcaagcaacatacctttatcacccttggtggttcaacaatcgccagccctatctttggtgcagtcattggtacaaaccatcagggcacagcagctgcagcaacttgtgctacctgtgatcaaccaagtagctctggcaaacctttctccctactctcagcaacaacaatttctttcattcaaccaactgtctacactgaaccctgctgcttatttgcaggaacaactattaccattcagccagctagctactgcctactctcagcaacaacaacttctttcatttaaccaattggccgcactgaacccccttgcttatttgcagcggcgaatactactaccatttagccagctagctgca

SEQ ID NO: 5635 - DNA, 418 bp, Zea mays
  Clone ID: LIB3118-021-P1-K1-E1
cggacgcgtgggtgaaaacccagctcttcagccctataggctccaacaagcaatcgcagcaagcaacatacctttatcacccttgttgtttcaacaatcgccagccctatctttggtgcagtcattggtacaaaccatcagggcacagcagctgcagcaactcgtgctacctgtgatcaaccaagtagctctggcaaacctttctccctactctcagcaacaacaatttcttccattcaaccaactgtctacactgaaccctgctgcttatttgcagcaacaactattaccattcagccagctagctactgcctactctcagcaacaacaacttcttccatttaaccaattggccgcactgaaccccgctgcttatttgcagcagcaaatactactaccatttagccagctagctgca

SEQ ID NO: 5636 - DNA, 489 bp, Zea mays
  unsure at all n locations
  Clone ID: LIB3118-021-P1-K1-E10
caggccaccggnnnccggaatnntcccgggtcgacgccacgccgnntccgccaactttagcagcatnntgaactctttgctgcttnnatttacagcnnagcaacaactacnntaccattcgagcccagctttagctgtatgtnngagccctgcttgccnnnttcttgacccacaacaaccagtnntgttgctcgttactaacctgtcacgcttattgcnnctaacgcnntggcacccnntcttacaacatgcaacaatttgctgcnncattcaaccagacgttgtctttgacaaactcaacagttgttctaccaaccaacccatcattggtggtgccctcttttagattgcttatgagttatagttcaataatgaagttttttggatgatgtttgtggcgtcccagaaataagaaagtacatttctagattcttaaaaaaaaaaatatatgctacaaaaactttttttttctcttaacaacattaattt

SEQ ID NO: 5637 - DNA, 412 bp, Zea mays
  Clone ID: LIB3118-021-P1-K1-E11
tgaaagcccaggcgctgagggactccagcatgtctgggtacatgtcctccaagaagacgatggagatcaaccccgagaacgccatcatggaggagctccgcaagcgtgccgaggctgacaagaacgacaagtccgttaaggaccttgtcatgctgctgttcgagacggcgctgctcacttctggctttagcctcgacgatcccaacacctttggcagccgcatccaccgcatgctcaagctgggcctgagcatcgacgaggacgaggaggctccggaggctgacaccgacatgccccctctggaggatgacgctggcgagagcaagatggaggaggtcgactaagctgggtttattcttatggaggaaagagagagaacatcgggtctgttctgtgggtcttaccacttatg

SEQ ID NO: 5638 - DNA, 413 bp, Zea mays
  Clone ID: LIB3118-021-P1-K1-E12
cccacgcgtccgcccacgcgtccgcccacgcgtccgcagaagactgttgatgggccctcatctaaggactggaggggtggaagggctgctagtttcaacatcattcccagcagcactggagctgctaaggctgttggcaaagtgcttcctgtcctcaatggaaaattgactggaatgtctttccgtgtcccaactgtcgatgtttctgttgttgatctgactgttaggcttgagaagtctgccacctatgatgagatcaaggctgcggtcaaggccgaggcagagggtagcctcaagggcattctgggttatgtcgaggaggaccttgtttccaccgatttccagggtgacagcaggtctagcatctttgatgcgaaggctggcattgccttgaacggcaactttgtgaagct

SEQ ID NO: 5639 - DNA, 354 bp, Zea mays
  Clone ID: LIB3118-021-P1-K1-E2
gccgttgcaccggtaccaggcgacatacggtgtggtcctgcagtccttcctgcagcagcagccgaagggcgagctcgcggctctgatggcggcccaggtagcacaacatctgacggctatgtgcggtctgcatctagcaaaaccagccccctgctttaacaacgcatgttggcggtggtgactactagtgaaaaaactttctgctgtaataatagtatagaggcgccggctaataaccacaaagggtagtagactaattaaacggcgatgaggaaaatcgtgttacccctcatcaccatgggtggctgtgcgagcactcccctgaaccacctcttgatgggggagggatttttt

SEQ ID NO: 5640 - DNA, 404 bp, Zea mays
  Clone ID: LIB3118-021-P1-K1-E4
accaactagcaacatagaaagcacaatagtgtaccaacaatggcagacaaaatattttgcttccttatgctccttggtctttctgcaagtgttgctaccgcaaccattttcccacactgctcacaagctcctatagctttccttcttcccacatacctctcaccagcggagtcttcagagtgtgaaaacccaattgttcaaccctacaggatccaacacgcaatcgcaacaggcatcttaccattatcacccttgttccttcaacaaccgtcagccctattacaagagttacctttggtccatatggtggcacaaaacatctgggcacaacaactacaacaacttgtgctagcaaaccttgctgcatactctcagcaacatcagtgtcttccattcaaccaact

SEQ ID NO: 5641 - DNA, 363 bp, Zea mays
  Clone ID: LIB3118-021-P1-K1-E5
acgaccaactatcaacatatcaagaacattacagtaccaacaacggcaaccaagagatgggcgctacttattctcatcctactcaccgcaagacacaccaccacatccattcacccacaatgctcacaatctcctatacctacccccttttaccaataccacacaccaacgctttctaccaagtggtaaaaccaaattgaacaaccctacaacaacaaacaatcaatggttacacccatcttaccattattaccctggtatattcaacaaccgaaagatttataacaagagtgacctctttccaatattcttactaataacattatggatcaacaactacaacaacttgtgctaacaaaactt

SEQ ID NO: 5642 - DNA, 298 bp, Zea mays
  unsure at all n locations
  Clone ID: LIB3118-021-P1-K1-E6
ggaannggagggtcgcgcccacgcgtacgcctacgcgcacgcccacgcgtactcccacactttcggagaagactgttgatggggcctgatgtaaggactgtaggggtgtaaggtctgctaggatcaacatcagtcccagcaggactgcaactactaaaactgctgtcaaggtccttctcttcctctttggaaaacagactggaatgtttttccgtgtcccaactgccgatgttactgctgtggatttcgctgttaggctagagaagtcttgctcctatgattagatcaaggctatggt

SEQ ID NO: 5643 - DNA, 376 bp, Zea mays
  Clone ID: LIB3118-021-P1-K1-E8
gccgctgcaccggtaccaggcgacatacggtgtggtcctgcagtccttcctgcagcagcagccgcagggcgagctcgcggcgctgatggcggcccaggtagcgcagcagctgacggcgatgtgcggcctgcagctgcagcagccaggtccctgcccttgcaacgcagctgccggcggtgtctactactgaggaaactatgtactgtagtaataatgtaatggagccgctggctagctacctagctcgctagtttactcatttagcggcgatgagtaacgtagtgtcacccatcaccatgggtggcagtgtgagcaatgacctgaatgaaccattgaaatggaaaggaataatatataagggaaaaaagatgattgt

SEQ ID NO: 5644 - DNA, 358 bp, Zea mays
  Clone ID: LIB3118-021-P1-K1-E9
cggacgcgtgggcacgcacaaacttgacgcagctgtctgcgcccgtgcaactacctcatgcgcggcagccggaagcagggcctgccatggacaacgacgccacggtcggatcggggcagcgccagcagctaacagcactatgaagaagaagctgattccagggccgtgatggcggagctggacgcgccgctgcacgcccttgggttcgagatggaggagctctacccgtcgcggctcaccggccggctgcccatcactaccatctgctgccagccgttcaaggtgctgcacggcggcgtgtcggctctaggggccaaggcactgacgagcatgggcgcgcacatggcttttgtgtacc

SEQ ID NO: 5645 - DNA, 282 bp, Zea mays
  Clone ID: LIB3118-021-P1-K1-F1
cccacgcgtccgaacagataagaatgtgcatgaagattcactaatagctcctgattttccatcatcaagcaatcaagatggcttgcctgtcccatcaagcaatcaaaatggatcacatgttcatttttcaagcatcaaagcagatgaggaagaatctgatacatcggatgagattgtcccagttgtggttcggcctggtcacattcgctttgaaccagcaggtggagaacccgacaaatcgccagcacaggagttacagggcacgttccaatggagtgcaac

SEQ ID NO: 5646 - DNA, 377 bp, Zea mays
  Clone ID: LIB3118-021-P1-K1-F10
cccacgcgtccgattggcatgaattcctaaggcagcagtgcagccctttggtgatgccttttctccaatcacgtttgatacaaccaagtagctgccaggtattgcagcaacaatgttgtcatgatcttaggcagattgtgccacaatacattcaccaagcaatctacaacatggttcaatccataatccaggaggagcaacaacaacaaccatgtgagttatgtgggttctaaacaggctcctaaaagggcgggggcatcttgacaggcgaccaaacccaccaataatgggcgggttgtaccactcatactaccaaaataattcatgcagcagcaatgacattagtggtgtttgcaattgaagaattgtgtctacct

SEQ ID NO: 5647 - DNA, 400 bp, Zea mays
  Clone ID: LIB3118-021-P1-K1-F11
cccacgcgtccgcccacgcgtccgcggacgcgtgggcactagtgattcgctgaacaaaaaaaaaaaaaaaaatacaagaaggaatcgagagcaaatgctatcttcaaccacactccgaccaccggcgtcgccggcgccggcacacctcaccatctgctcctcgcccgcagcgtggcggcgtgcgccgacggcggcggcggtgcgcgcggtgcggaactacgactccatcccgaagcgggagcccttcagctccagccgcagcatcctccacgagttcctcaggcaggacaagcccctcatgcagcgcaccaaggaccagatcacagattattgcacggccatcgaacgcgatgagtgctgcagctgttgggacgcttactatgaactgaataaacttgag

SEQ ID NO: 5648 - DNA, 301 bp, Zea mays
  Clone ID: LIB3118-021-P1-K1-F2
cttcttcatttgtgttgtgttgtagcctgcctgacaaagcgtggtcttgctggatcgctcgcagggcaaggtgatgaactgcggtggcggcggaagttgtggcacttgcatcgtcgagataatcgatggaaaggagctcctgaatgagaggacgagcaccgagaattgatacctgaagaaggtaggcattggacactggacagcgcgtacagttcactcagcactcagttgctctgtctttattcaataagctcgtttgatctcccttgtccccggcagaaaccagactcatgggggctag

SEQ ID NO: 5649 - DNA, 349 bp, Zea mays
  Clone ID: LIB3118-021-P1-K1-F3
gaacctgcggcgttggcagcaccccgatcctgggccagtgcgtcgagtttctgaggcatcagtgcagcccgacggcgacgccctactgctcgcctcagtgccagtcgttgcggcagcagtgttgccagcagctcaggcaggtggagccgcagcaccggtaccaggcgatcttcggcttggtcctccagtccatcctgcagcagcagccgcaaagcggccaagttgcggggctggtggcggcgcaaatagcgcaacaactggcggcgatgtgcgggctggagcaagcgacttcatgcccctacgcttgttgcgggggggtcccccactggaaaaactatgtgctggagta

SEQ ID NO: 5650 - DNA, 75 bp, Zea mays
  Clone ID: LIB3118-021-P1-K1-F4
tggcacgccccaggtaccgtatcgcagtgtcgggctagacctacgcgtacgcccacgcccacgcatacgccgacg

SEQ ID NO: 5651 - DNA, 410 bp, Zea mays
  Clone ID: LIB3118-021-P1-K1-F5
cccacgcgtccgattgtcatgaattcctaaggcagcagtgcagccctttggtaatgccttttctccaatcacgtttgatacaaccaagtagctgccaggtattgcagcaacaatgttgtcatgatcttaggcagattgagccacaatacattcaccaagcaatctacaacatggttcaatccataatccaggaggagcaacaacaacaaccatgtgagttatgtggatctcaacaagctactcaaagtgcggtggcaatcttgacagcagcacaatacctaccatcaatgtgcggcttgtaccactcatactaccaaaataatccatgcagcagcaatgacattagtggtgtttgcaattgaagaattgtgtctacctagccgttatactcctataacggtgttaagcaa

SEQ ID NO: 5652 - DNA, 397 bp, Zea mays
  Clone ID: LIB3118-021-P1-K1-F6
cccacgcgtccgattgtcatgaattcctaaggcagcagtgcagccctttggtaatgccttttctccaatcacgtttgatacaaccaagtagctgccaggtattgcagcaacaatgttgtcatgatcttaggcagattgagccacaatacattcaccaagcaatctacaacatggttcaatccataatccaggaggagcaacaacaacaaccatgtgagttatgtggatctcaacaagctactcaaagtgcggtggcaatcttgacagcagcacaatacctaccatcaatgtgcggcttgtaccactcatactaccaaaataatccatgcagcagcaatgacattagtggtgtttgcaattgaagaattgtgtctacctagccgttatactcctatta

SEQ ID NO: 5653 - DNA, 309 bp, Zea mays
  Clone ID: LIB3118-021-P1-K1-F7
gaccggaaggccgggccatgacctacgcgcacgcgtacgaacagataagaatgtgcatgaacattcactaatagctcctgggtttgcatcatcaagcaatcaagatggcttgcctgtcccatcaagcaatcaaaatggatcacatgttcatttttcaagcatcaaagcagatgaggaagaatctgatacatcggatgagattgtcccagttgtggttcggcctggtcacattcgctttgaaccagcaggtggagaacccgacaaatcgtcagcacaggagttacagggcacgttccaatggagtgcaac

SEQ ID NO: 5654 - DNA, 250 bp, Zea mays
  Clone ID: LIB3118-021-P1-K1-F8
cccacgcaaacgagcagagaaggaacgcagacggacaaaaacggaacccgccggaacggccacaaggcaaggggaaaaaccgcgggggcggccgaagaagcagcacaagcaacgcacagaaaaacgaaggaaaggagcccccgaaagagaggacaagcaccgaaaagcgagacccgaagaagggagggaaaggacacgggacagcgcggacagaacaatcaaggcgagaacgggacaaaccgaaacaaaa

SEQ ID NO: 5655 - DNA, 416 bp, Zea mays
  Clone ID: LIB3118-021-P1-K1-F9
atcacgccacatgaaggtccagacgcgagagacaagcgacacgatctcttaggaatggataaaggatatacgattgatcatgaagtagaatgtgggaaactaattactctcttcagtgctccggactacccacagtttcaggcttcagaggagcgatacaacaatcgtggagcatatattgtccttagttcacctgattttgctacccctgttttccatagcttcggagctgtaaagcctcgacctgcggcccatccgttctatgattttgaacaagtgatcgactcatatgaagaattggatttaatcgccatggacagcggcacgtcgagcctgtcatgacgactcgccatgtaccttttgcacttagggtggtatttattattatcgctccaattgttgccatggaagcgtgg

SEQ ID NO: 5656 - DNA, 285 bp, Zea mays
  Clone ID: LIB3118-021-P1-K1-G1
cccacgcgtccgcccaagcgtacagagacgcgagaccggtcgcttagggcgggcgcaaggatataccagtgatcatgaactcgaatgtgggaaactaattactcttttcagtgctccggactacccacagtttcaggcttcagaggagcgatacaacaatcgtggagcatatattgatcttagtccacctgattttgctacccctgttttccatagcttcggagctgtaaagcctcgacctgcggcccatccgttctatgattttgaacaagtgatcgactttaa

SEQ ID NO: 5657 - DNA, 302 bp, Zea mays
  Clone ID: LIB3118-021-P1-K1-G11
cgctgcctttcagctgggtatacggtagggacgtccaactgtgagatcggaaacctgctgcggactgcttagacaagacctgctgtgtctgcgttacatagttctccaggttttgaccagatggtcccgtgtcgtcttatagagcgataggagaacgtgttggtctgtggtgtagctttgttttttatttttatttttctggtttgatgtacaacctgtggccgcatgaactggggcgtggagatgggagcgaccatgccgttctttgtctgtcgctggcggtgtgtttcggtatgttattt

SEQ ID NO: 5658 - DNA, 341 bp, Zea mays
  Clone ID: LIB3118-021-P1-K1-G12
cccacgcgtccgcacggttgatctggacgtggtgaccaggatggacctgcttggtttcttcaaggaagagtgcgagcagagggaagctaccatcgtgtacgccacccatatatttgacggactcgagacgtgggctaccgactttgcgtacatccaagaaggcgagctgagaaggtccgggagatactccgacatcgaggagctaaggagcgccaagaacttgctgtcggtagtcgagtcgcggctgaggtcagagaccaaacttccgaagaaggaacccccaggacgtcctgagacccatgccaggccttcttggccggtcgatgcttgtcatttacctt

SEQ ID NO: 5659 - DNA, 392 bp, Zea mays
  Clone ID: LIB3118-021-P1-K1-G2
acgatcaggtcacatgaaggtccagacgcgagagacaagcgacacgatctcttagggatggataaaggatatacgattgatcatgaagtagaatgtgttaaactaattactctcttcagtgctccggactacccacagttttaggctatagaggagcgatacaacaatcgtggagcatatattgtccttagtccacctgattttgctacccctgtttttcatagcttcggagctgaaaagccttgacctgcggcccatccgttctatgattttgaacaagtgatcgactcagatgaagaattggatttaattcgcatggacagcggcacgtcgagcctgtcatgacgactcgccatgtaccttttgcacttagggttgtgattattattatc

SEQ ID NO: 5660 - DNA, 242 bp, Zea mays
  Clone ID: LIB3118-021-P1-K1-G3
acgggtggtgtctccttgagcacccgcctcaagcttctgccactgccggcagtgcgtggggcgtctgtgcagcctgaccgagaacatgtagttcttcgccaccccgccggtgcacggttcgctggcgaaccaggtggtgcacccggccgacctgtactacaagatcccggacgatgttagcttgggggtggagtccataaggtagcagctgaccgagagcggccaaggttcggggcttttgg

SEQ ID NO: 5661 - DNA, 355 bp, Zea mays
  Clone ID: LIB3118-021-P1-K1-G5
cacgagcgccagcggatcgatcattcgatccccaccactgtccgaggccccctgctcgctgacttggctcctccgccgtggccggaggcgaagcaagtggggaccacagaagcattagctgggtgaactctttcaaaaggggcaggtgcgctagtttgaatggctgctacaaagcttcaggccttttggaaccaccctgctggccccaaaaccattcatttctgggcgccaacattcaaatggggtatcagcattgccaacatagccgactttgcaaagccgcctgaaagatatttaccctcacaagttgtgttgatgcctgaatattggcaagtcagttgtatacacgaaactg

SEQ ID NO: 5662 - DNA, 373 bp, Zea mays
  Clone ID: LIB3118-021-P1-K1-G6
cagcgcgcgagatatctacatggatcataataaccagcgagcgagccggccgagcagcaccgatggcggcgtacatgcgcgtgacgcaccgcgacgaggaaggcaagaaggtgacggataagatgccggtcccggagacgcggatcccggacacggacaagcacttggagcgcaagctggaggagcagggcctccaccgttttgagcggcacccggcgaacgcgccccggggcgtgggcatgggcgccccatccgcccaagcccggccgcggtggaaagtacaccggggagggccccggcagcgtctattagaaccatctagacctggcgccgcccgtcattgaccccaacaaccccaactacgatgagggag

SEQ ID NO: 5663 - DNA, 415 bp, Zea mays
  Clone ID: LIB3118-021-P1-K1-G7
atcaggtcacatgaaggtccagacgcgagagacaagcgacacgatctcttaggaatggataaaggatatacgattgatcatgaagtagaatgtgggaaactaattactctcttcagtgctccggactacccacagtttcaggcttcagaggagcgatacaacaatcgtggagcatatattgtccttagtccacctgattttgctacccctgttttccatagcttcggagctgtaaagcctcgacctgcggcccatccgttctatgattttgaacaagtgatcgactcagatgaagaattggatttaatcgccatggacagcggcacgtcgagcctgtcatgacgactcgccatgtaccttttgcacttagggttgtatttattattatcgctccaattgttgccatggaagcgtg

SEQ ID NO: 5664 - DNA, 206 bp, Zea mays
  Clone ID: LIB3118-021-P1-K1-G9
acgcggacgcgtgggggcgctggagccgggcgttagctgctggcgcttacgccactgcagggtggttagctacaacctgggcgaggacatgaagtttaatcaaaccggcttgcaggctgtggccacttggccgttttcgtaacgccggccgccgttgggcctgggcccctgtcagcgtaggggcgtacgagtccgcgtcggggggg

SEQ ID NO: 5665 - DNA, 398 bp, Zea mays
  unsure at all n locations
  Clone ID: LIB3118-021-P1-K1-H1
aagcgggcgggcttgaacaggaaactaggcacggcgggctagcccggcacggcctgtttacctctaagcccgttaaacccgtttttttttacactaaaacgtgcttaccggcccgtttagcccgcttttcggcccgttatttcgtgctaaacgggccggcccggcccgtttaggcccgctgcgggccgggcttggacagaaacttaagcccgctggctcagcaggcccggcccggttttggccgggcttcaccgggcccgggccgggccgggccggcccggcccgtttggccatctttactctatatatatgtatagnccgtgcccgtgtcctcatttgtaccaatacaggccaagcttagtgaagtggatgtgtattattgttgcgctatcacatac

SEQ ID NO: 5666 - DNA, 291 bp, Zea mays
  Clone ID: LIB3118-021-P1-K1-H10
aaggaacccgagagggacaggaagaaggtcaagaacatcaagcacagcggcaacattagcctcgacgacgttattggagaacgccaagaccatgccgaacaaggccatgggcaaggggttggccgggaccggcaaggggaacctggggacctgggttagggttgggtgcacccgcgatggggagggccccaaggacttgcagcaggagatcgattattgggagggtgagaacccatcagtttaaaggctttccacctggaaatattcggcccctttaaaaggggggttttg

SEQ ID NO: 5667 - DNA, 290 bp, Zea mays
  Clone ID: LIB3118-021-P1-K1-H11
gttacttggtacaccaatctcttcaaacacaactaacttaccgctgttttttacttcttgtcctttggagtatgtatgccagtcctcgtccttttaagtatctgtgttgcaacaaaaatttaaggccttgttttgatgcataggctcactttaagatttaaaaaaaaaaaataaataagaaagaccaaaaaaaaaaaaaaaaaaaaaaaaaaaaaataagaaatttaaaaaatcattaaatttaaaagctatacaaaattgaaaaaaattaaacaatattaaaaaggggg

SEQ ID NO: 5668 - DNA, 142 bp, Zea mays
  Clone ID: LIB3118-021-P1-K1-H2
ctacgcgtcctgaacatctacatcctacaccataaacacccagcccaccatccaactcggggactggtgccctttctgtgttcaagtgccgcatatactaccacgcgcctacagtggttccgggtgccgaccttaccaaggt

SEQ ID NO: 5669 - DNA, 410 bp, Zea mays
  Clone ID: LIB3118-021-P1-K1-H3
acgggacctcaacgccttggtggccaccatgaagactaagcgcaccatccagttcggggactggtgcccgatggttgtttcaagtgcggcatcaactaccaggcgccgacagtggccatttttccccaccgctcacaagctcatattgctttgtttattatctccaacttcaccaccgtggtggaggtgttctgccgcatcaacagcatgttcgacctcatgtacgccaagcgcgcgttcgtgcactggtacctctgcgagggcatggaggagggggagttcttcgaggcacgcgaggacctggcctccctggagaaggactaccaggaggtcgccgcacagggcggcagtgatgacggtgacgaggaggaggaatactgatctgcttgcatgaatatttttttctgttg

SEQ ID NO: 5670 - DNA, 407 bp, Zea mays
  Clone ID: LIB3118-021-P1-K1-H5
gcaactgatgtcgagtggggagacgatgttcgacgtgcgcgtgctctcagctcatggggttccatcagccgtcagtctcgcgtgcctcctcccgactgcagcaggaagaagacggcgaggccgacgacgagccccgacacggccagcgccagcgtcggcgccggagtacccacgcccaagttctgcacgccacccacaacaaactcgtgcccttgccggtggccacctcgacggcgatcgcggaggcgaagccgaccatggccgcgcggcccagccatgtgtccggcccgccgcccttctttgcgctttgctcgcacctgatgatggacagcgacctgctgctgacggccctgcaagagacgacgcgcctcttgtgggcgccggagatgctgcgtttcgttcgacga

SEQ ID NO: 5671 - DNA, 367 bp, Zea mays
  Clone ID: LIB3118-021-P1-K1-H6
tcggttacttggtacaccaatctctttaaacacaactaacttaccgctgttttttacttcttgtcctttgaagtatgtatgccagtcctcgtccttttaagtatctgtgttgcaacaaaaatttaaggccttgttttgatgcataggctcactttaagatttaaaaaaaaaaaaaaaataaataaaaaaaaaagaaaaaaaaaaaaaaaattaaataaaagaaaggaattagaacaaataatattaattgaattgtacaaagtacagaatagaggatgtttaaaatattgggggggggctcttttaaaggtctcaagttttccttcgcgtgttggcaaagtatatgttttttttttgtgtcccctaa

SEQ ID NO: 5672 - DNA, 415 bp, Zea mays
  Clone ID: LIB3118-021-P1-K1-H7
cccacgcgtccgcccacgcgtccgcccacgcgtccggccgcgcttcgccctctcgctccagccgcttcacagcgccgccgctcgcctctccgaccgccgcgagaatgccgttcaagaggttcgtggagatcgggcgcgtggccctggtgaactacggcaaagactatggccgcctcgtcgtcatcgtcgatgtggtcgaccagaacagggcacttgtggacgcccctgatatggtcaggtgccagattaacttcaaacggctctcacttactgacatcaagattgacatcaaacgcgttcccaagaagtcaaccctgatcaaggctatggaggaagctgatgtgaagacgaagtgggaaaacagctcatgggggcaagagcttgatgtccagaagaggagggctgcgctcagtgt

SEQ ID NO: 5673 - DNA, 408 bp, Zea mays
  Clone ID: LIB3118-021-P1-K1-H8
ggacgtgaacgccgcggtggccaccatcaagacgaagcgcaccatccagttcgtggactggtgcccgacggggttcaagtgcggcatcaactaccaggcgccgacagtggtgccgggtgccgacctcgccaaggtgcagcgtgccgtgtgcatgatctccaactccaccagcgtcgtcgaggtgttctcccgcatcaacagcaagttcgacctcatgtacgccaagcgcgcgttcgtgcactggtacgtcggcgagggcatggaggagggggagttcttcgaggcacgcgaggacctggccgccctggagaaggactacgaggaggtcgccgcagagggcggcagtgatgacggtgacgaggaggaggaatactggtctgcttgcatgaatctgtttggctgtcgagc

SEQ ID NO: 5674 - DNA, 414 bp, Zea mays
  Clone ID: LIB3118-021-P1-K1-H9
cccacgcgtccgctagcaacatagaaagcacaatagtgtaccaacaatggcagccaaaatattttgcctccttatgctccttggtctttctgcaagtgctgctacggcgaccattttcccgcaatgctcacaagctcctatagcttcccttcttcccccgtacctctcaccagtgttgtcttcagtatgtgaaaacccaattcttcaaccctacaggatccaacatgcaattgcatcaggcatcttacctttatcacccttgttcctccaacaatcatcagccctattacagcagttacctttggtgcatttattggcacaaaacatcagggcacaacaactcgtgctagcaaaccttgctgcctactctcagcaacaacagttacctttggtgcatttgttggcacaaaacat

SEQ ID NO: 5675 - DNA, 402 bp, Zea mays
  Clone ID: LIB3118-022-P1-K1-A10
cccacgcgtccgcggcgcgtgggctccagtccatcctgcagcagcagccgcaaagcggccaggtcgcggggctgttggcggcgcatatagcgcagcaactgacggcgatgtgcggcctgcagcagccgactccatgcccctacgctgctgccggcggtgtcccccactgaagaaactatgtgctgtagtatagccgctggctagctagctagttgagtcatttagcggcgatgattgagtaataatgtgtcacgcatcaccatgggtggcagtgtcagtgtgagcaatgacctgaatgtacaaaaaaaaaaaaaaatataaaatataaataaaaaaataaatatataaaatataatttataataattttttaataatttattataaaattaatatattttat

SEQ ID NO: 5676 - DNA, 190 bp, Zea mays
  Clone ID: LIB3118-022-P1-K1-A11
tctcactcttccgcccactcctactcctaacaattttctttatttcatcctacaccaccaaacggaagacttacaattcttttggccttttacaacacacatatctcatcaactatactacaaatttctttcttcactacactactccattcccctactctatctacttctattatccacactaaataaa

SEQ ID NO: 5677 - DNA, 355 bp, Zea mays
  Clone ID: LIB3118-022-P1-K1-A12
aacaacccatcattggtggtgccctcttttagatttcttatgagttatagtgggataataaagttttttgtcggatgtttgtggcttcccagaaataagaaagtacatttctaaaaaaaaaaaaaaaaaaaaaaaaaaaaaaaaaaaaaaaaaaaaaaaaaaaaaaaaaaaaaaaaaaaaaaaagggcggccaataaaaaaaaaacaaaaaataaaaacacatacatacaaaataaataacttcttatataaagaaacctaaaataaaataaaatttccgggcgttttacaacgggggtcccaggtaaacccccggcgttacccaaattaaatccccttttagattatacccatt

SEQ ID NO: 5678 - DNA, 361 bp, Zea mays
  Clone ID: LIB3118-022-P1-K1-A2
agcaccccgatcctgggccagtgcgtcgagtttctgaggcatcagtgcagcccgacggcgacgccctactgctcgcctcagtgccagtcgttgcggcagcagtgttgccagcagctcaggcaggtggagccgcagcaccggtaccaggcgatcttcggcttggtcctccagtccatcctgcagcagcagccgcaaagcggccaggtcgcggggctgttggcggcgcatatagcgcagcaactgacggcgatgtgcggcctgcagcagccgactccatgcccctacgctgctgccggcggtgtcccccactgaagaaactatgtgctgtagtatagccgctggctagctagctagttgagtc

SEQ ID NO: 5679 - DNA, 403 bp, Zea mays
  Clone ID: LIB3118-022-P1-K1-A3
gtgctagcaaaccttgctgcctactctcagcaacagccagtttctgccattcaaccaactagctgcattgaactctgctgcttatttgcaacaacaacaactactaccattcagccagctagctgctgcctaccaccagcaatttcttccattcaaccaactggcagcattgaactctcctgcttatgtacaacaacaactactaccattcagccagctagctgctgtgagccctgctgccttcttgacacagcaacagttgttgccgttctacctgcacgctgcgcctaacgttggcaccctcttacaactgcaacaattgctgccattcaaccaacatgctttgacaaacccaacagcgttctaccaacaacccatcattgggggtgccctcttttagatt

SEQ ID NO: 5680 - DNA, 391 bp, Zea mays
  Clone ID: LIB3118-022-P1-K1-A4
ccgttttcgtgctcacacacccaaaccttattcgcgatcaggccccaaggactcgagatgaattcgagggcacggtccaccgccggcgactccaggctctcggtgaggaagaccaaggctgagaaggacccaaacaagcccaagaggcctccgagcgcgttcttcgtcttcatggaggagttcaggaaggactacaaggagaagcaccccaatgtgaagcaagtctccctgattggcaaggctggtggtgacaagtggaagtccctgtctgatgccgagaaggctccctacgtgtctaaggcagagaagctcaaggctgagtacaccaagaagatcgacgcttacaacaacaagcagtctggagaccccaccgcgtctggtgattccgaca

SEQ ID NO: 5681 - DNA, 406 bp, Zea mays
  Clone ID: LIB3118-022-P1-K1-A5
cggacgcgtgggttctggatccagatatccttgtaaggtgtgaagagttggaaagggaggaagggcttcgtctggaagaacaagctgcagaagatgctttccagattgatggtcatgaactaactcaggaacagaaggagattttggctcagattaggaagaagaaggcattacttatccaagaacatagaatgaagaagagaactgcagaaagccgtcctattgtccctagaaagtttgacaaagataggaaattcacaactgataggatgggacgccagctttcatccatgggtatggatcctagtgctgccatgaatagaattcgcagtcagtctaggggtcgcaagcgtgagaggtcagtgagcagagctgcagcggatggtgacggtatggagatagatgg

SEQ ID NO: 5682 - DNA, 392 bp, Zea mays
  Clone ID: LIB3118-022-P1-K1-A6
ctgaagatgaaggcgatccccgtggctctcctgctcctcgtcctggttgctggcgcgtcctcgttcaagcatctcgccgaggcagcagacggcggcgcggtgccggacggcgtgtgcgacggcaagtgccgcagccggtgctcgctgaagaaggccgggcggtgcatgggcctgtgcatgatgtgctgcggcaagtgccagggctgcgtgccgtcggggccgtacgccagcaaggacgagtgcccctgctacagggacatgaagtcccccaagaaccagcgccccaagtgcccctaggccctaccgctctaagggagggaggatgacccaggatttcgctcgcgatcctgcacagcttctagtcttgtactgctagtttagcgcgccgagcg

SEQ ID NO: 5683 - DNA, 343 bp, Zea mays
  Clone ID: LIB3118-022-P1-K1-A7
cccacgcgtccgggacattaggattgatgtgaagctcaacaagcacatctggagcagcgggatcaggagcgtgccgcggagggttcgtgtgaggatcgcccgcaagaggaacgacgaggaggatgccaaggaggagctctactcccttgtcaccgtcgcggagatccccgccgagggcttgaaagggctggggaccaaggtcgttgacgataccgattaagctgtcgcgttatctacatctttagagagttcctagtttgtatttgcaacagcaaaaccttttgtattcacaaagttgtctatttccgcaacagaattgcatgggctagttttcttttcaaaa

SEQ ID NO: 5684 - DNA, 391 bp, Zea mays
  Clone ID: LIB3118-022-P1-K1-A8
cagttctccgagctcgtcaacgagttctacaacaacgggctcacctccaacctggccggcagccgcaaccccagcctggactacggcttcaagggcaccgagatcgccatggcctcctactgctccgagctccagtacctgggcaaccccatcaccaaccacgtgcagagcgcggagcagcacaaccaggacgtgaactccctgggcctcgtctcggccaggaagaccgccgaggcgatcgacatcctgaagctcatgtcgtccacctacatcgtggcgctgtgccaggccgtggacctgcgccacctcgaggagaacatcaaggcgtcggtgaagaacaccgtgacccaggtggccaagaaggtgctgaccatgaacccctcgggcgagc

SEQ ID NO: 5685 - DNA, 245 bp, Zea mays
  unsure at all n locations
  Clone ID: LIB3118-022-P1-K1-A9
gcggggttttttatccttcnnannactccaaactctctaactttttctacatcaacnnactcaacaccaggcagaccgtcaaacatatttctccagcccccacaacaacaacaaggccacctatatcacacaatactcttactactcccaactccaatacatttacaaccccatcaccaaccacatacatatctcatatcatcacaaccaaaactttaacctcctttatcctaatcttaaacaat

SEQ ID NO: 5686 - DNA, 409 bp, Zea mays
  Clone ID: LIB3118-022-P1-K1-B10
agacgagcgccatgtaccagccgctccggcaacagtgctgccagcagcagatgaggatgatggacgtgcagtccgtcgcgcagcagctgcagatgatgatgcagcttgagcgtgccgctgccgccagcagcagcctgtacgagccagctctgatgcagcagcagcagcagctgttggcagctcagggtctcaaccccatggccatgatgatggcccagaacatgccggccatgggtggactctaccagtaccagctgcccagctaccgcaccacctcctgtggcgtctccgctgccattccgccctactactgattcatgatatttgggaaatctcctctatccatccctctctatctatatctgtaataatgcaagaagacgacacacattatcatgtgtggtatgac

SEQ ID NO: 5687 - DNA, 405 bp, Zea mays
  Clone ID: LIB3118-022-P1-K1-B11
cccacgcgtccgacacagcgaaccgagaaaccaacacaacaagcaaagcagcgatccgacatccgagagatggacgcggtgatgttcgggctggagactcccctgatggccgcgctgcagcacctgctggacgtgcccgacggcgacgccggcgcgggcggcgacaacaagacgggcagcggcggcagcgccacgcgcacctacgtccgcgacgcgcgcgccatggcggccaccccggccgacgtgaaggagctgcccggcgcgtaccccttcgtggtggacatgccggggctgggcacgggcgacatccgggtgcaggtggaggacgagcgggtgctggtggtcagcggcgagcggcgccgggaggagcgcgaggactacgccaagtacctgcgcatggagcgg

SEQ ID NO: 5688 - DNA, 406 bp, Zea mays
  Clone ID: LIB3118-022-P1-K1-B12
gtccaagttagtgatgtgaagaatgttatcatctggggtaaccactcgtcctgtcagtaccctgatgttaaccatgccacagtgaagacttccactggggagaagcctgttcgtgagcttgtctctgatgacgagtggcttaatggtgaattcatcacaactgtccaacagcgtggtgctgcaatcattaaagcgagaaagttctccagtgctctctcggctgctagctctgcttgtgaccacattcgtgattgggttcttggaacacctgagggtacatttgtttccatgggtgtgtactctgatggttcatacggtgttccttctggactcatttattcattcccagtaacatgcagtggtggtgaatggaaaatcgttcaaggcctcccgattgatgagttct

SEQ ID NO: 5689 - DNA, 411 bp, Zea mays
  Clone ID: LIB3118-022-P1-K1-B4
cccacgcgtccgcccacgcgtccgcccacgcgtccggtcttgaagagatatgctgaggaacaacttgagccttcaccagatgatgaagagtggacaaattctgaggcaattggagagtttcttggggcatttgaggaagctacaaaagcattctcagcacatagaagtccaacatctcatttgtttttgcataatgtgctatgtatccatcaagctctaagaaatgaaaattggcaaatcaattgtgtgcttgaggatttggcactagcaatggattctaagttcgataaatactgggagaagggcaagtataatatggcacttgtcatagccactatacttgacccgtcaaagaagatggattttttggactttttttatgagaagacgtgtcaacagtttatcgacatc

SEQ ID NO: 5690 - DNA, 410 bp, Zea mays
  Clone ID: LIB3118-022-P1-K1-B5
ctatggttggtttcagttgctatcggccttgtgagttggcccctggcttatgtgggtaaatttattcctgtgcccgtaagacctcttccggactatttcaagccccgctgttgtcggaaacagccgcgccgagacgaggaggaaggtgggcagagctaaagcgcaacgaggagtgggcagtgtaaataggcacgtgataaaaaaaatggagataaattgcactggttgattccatggtagcagcatcctggggatgtacgtataagatggcaggtagtcggcctcgtcgttttgttctaggagaagcagttggaagaaaagaagtactatacagaagccaaacttgtctacccctatccagctggtgtgtctgctatgcggcagcgaaacttgagtcattagattgtagc

SEQ ID NO: 5691 - DNA, 402 bp, Zea mays
  Clone ID: LIB3118-022-P1-K1-B6
gctttcatctagccctctcgttgtgggtaatgcacctacatacctgcaacaacaagggctgcaacagattgtaccagctctgactcagctagctgtggcaaaccctgctgcctacttgcaacagctgcttccattcaaccaactgactgtgtcgaactctgctgcgtacctacaacagcgacaacagttacttaatccactagcagtgcctaacccattggtcactgccttcctacagcagcaacaattgctaccatacagccagttctctttgatgaaccctgccttgtcgtggcagcaacccatcgttggaggtgccatcttttagattacatatgagatgtaatcgataatggtgccctcataccggcatgtgtttcctagaaataatcaatatattga

SEQ ID NO: 5692 - DNA, 392 bp, Zea mays
  Clone ID: LIB3118-022-P1-K1-B8
tgcaccaagaaatccatcgagaggccgtcgacaggggaattaatggcgtcggggtctagcagcagccaccgccgcctcatcctcgcagccgccgtcctgctctccgtgctcgcggctgccagcgccagcgccgggacctcctgcgtgccggggtgggccatcccgcacaacccgctcccgagctgccgctggtacgtgaccagccggacctgcggcatcgggccgcgcctcccgtggccggagctgaagaggagatgctgccgggagctggcggacatcccggcgtactgccggtgcacggcgctgagcatcctcatggacggcgcgatcccgccgggcccggacgcgcagctggagggccgcctagaggacctgccgggctgcccgcggga

SEQ ID NO: 5693 - DNA, 407 bp, Zea mays
  Clone ID: LIB3118-022-P1-K1-C1
ttgccgaagaccacatcaatttcttttcccaatggcaaggatgatctgatgaattgggagacccaccatccgacctgatgaaggatattacatgggcggcactttcgttttcacctttcaagtgtccccatcttatcctcatgatcctccgaaggtcaaatgcaagaccaaggtgtaccatccaaatattgatctggaaggcaatgtctgtctgaacattctgcgcgaagattggaagcctgttctcaacatcaacactgttatttatggcctgaatcttctttttacgcaaccaaacgacgaggatcctctgaaccacgaagctgcagttgtccttcgtgacaatccaaagatgttcgaggcaaatgtgagaagagccatggctggaggctacgtcggccaacact

SEQ ID NO: 5694 - DNA, 409 bp, Zea mays
  Clone ID: LIB3118-022-P1-K1-C10
aaactggattcggaacattgaacaacacgcctctgataatgtcaacaagatgggggttggcaacaaggccgatatggacgaaagcaagagggctgtacctactgcaaaaggacaagcacttgctgatgagtacgggatcaagttttttgaaacgagtgcgaagacaaacctgaatgtggagcaagtgtttttctccatcgcacgtgacatcaagcagaggcttgcggagactgattcaaagccagaggacaaggcaatcaaaattaacaagccagaccagggttccgaggcaccagctgcccagcgatctgcttgctgcggctcataagcagatgcacgatggccatagcctttggttatttgacattatttatttcccgcttggctgttataggaaggatttgaagaa

SEQ ID NO: 5695 - DNA, 352 bp, Zea mays
  Clone ID: LIB3118-022-P1-K1-C11
ttcgtctccagtccaagcaagcgaagagcacccctcgagatctctccctgcccgcgccgccatggacgcagttgactcggtagtcgacccgctccgggagttcgccaaggacagcatccgcctcgtcaagcgctgccacaagccggaccgcaaggagttcaccaaggtcgccgcgcggactgcgatcggcttcgtcgtcatgggattcgtcggcttctttgtcaagctcatcttcatccctatcaacaacatcatcgtcggctccggctgatccgtaaacctcaggctagtggctgcaggagtggacaatggcgtcactaccttggaggcagcaccgttttcagctcttatt

SEQ ID NO: 5696 - DNA, 181 bp, Zea mays
  unsure at all n locations
  Clone ID: LIB3118-022-P1-K1-C2
cccacgcgtccgcccacgcgtccggcttcagcaatgacattagtggtgtttgcgaatggaagaattgtgtctacctagccgttatactcctataacggtgttaagcaataaagtaccatacattatgatgtttgtactatgatatttgaataagaatactaattgtaattataatgctnct

SEQ ID NO: 5697 - DNA, 408 bp, Zea mays
  Clone ID: LIB3118-022-P1-K1-C4
cacatatctactatactatactctaggaagcaaggacaccaccgccatggcaggcaagatgcttgcattgttcgctctcctagctctttgtgcaagcgccactagtgcgacccatattccagggcacttgccaccagtcatgccattgggtaccatgaacccatgcatgcagtactgcattgatgcaacaggggcttgccagcttgatggcgtgtccgtccctgatgctgcagcaactgttggccttaccgcttcagacgatgccagtgatgatgccacagatgatgacgcctaacatgatgtcaccattgatgatgccgagcatgatgtcaccaatggtcttgccgagcatgatgtcgcaaatgatgatgccacaatgtcactgcgacgccgtctcgcagattatgc

SEQ ID NO: 5698 - DNA, 131 bp, Zea mays
  Clone ID: LIB3118-022-P1-K1-C5
cccacgcgtccgcggacgcgtgggtagccagcggctatactacagcacataggttcgtcagtgggtggcagtgtcagtgtgagcaatgacctgaatgaacaattgaaatgaaaagaaaaaagtattgttcc

SEQ ID NO: 5699 - DNA, 121 bp, Zea mays
  Clone ID: LIB3118-022-P1-K1-C8
cccacgcgtccgcggacgcgtgggtaggagttttatgttacttataaactggtgtgagcctcgatgtgagttgaacttaatgtggagtgtatctgagatatgaagaactcattatatggct

SEQ ID NO: 5700 - DNA, 395 bp, Zea mays
  Clone ID: LIB3118-022-P1-K1-C9
acaacaactaccattcagccagctacctgttgcctacccccagcaattggttgcattcaaccaactggcagcattgaactctcctgcttatttacagcagcaacaactactaccattcagccagctagctggtgtgagccctgctaccttcttgacacaaccacagttgttgccgttctaccagcacgctgcgcctaacgctggcaccctcttacaactgcaacaattgctgccattcaaccaacttgctttgacaaacctagcagtgttctaccaacaacccatcattggtggtgccctcttttagatttcttatgagttatagttcaataataaagttttttgtctgatgtttgtggcttcccagaaataagaaagtacatttctagattctt

SEQ ID NO: 5701 - DNA, 264 bp, Zea mays
  Clone ID: LIB3118-022-P1-K1-D1
gaactctgctgcgtacctacaacagcgacaacagttacttaatccactagcggtggctaacccattggtcgctgccttcctacagcagcaacaattgctgccatacaaccagttctctttgatgaaccctgccttgttgtggcagcaacccatcgttggaggtgccatcttttagattacatatgagatgtactcgataatggtgccctcatagcggcatgtgtttcctagaaataatcaatatattgattgagatttatctcg

SEQ ID NO: 5702 - DNA, 330 bp, Zea mays
  Clone ID: LIB3118-022-P1-K1-D10
cgctagctggttcaagtgcggcgagcggagccggagaccggtagaggaaattaagaggcgtcgatcgggcatggggtgcgacgacaagtgcgggtgcgccgtgccgtgccccggcggcaaagactgcaggtgcacgtcggggagcggcgggcagcgggagcacacgacttgcggctgcggggagcactgcgagtgcagcccgtgcacgtgtggccgggccacgatgccgtccggccgcgagaacaggagggctaactgctcctgcggggcgtcctgcaactgcgcattcttgcgcctcggcctgatccgtgcgcctcgccctcgtgctac

SEQ ID NO: 5703 - DNA, 366 bp, Zea mays
  Clone ID: LIB3118-022-P1-K1-D11
cgcacatatctactatactatactctaggaagcaaggacaccaccgccatggcggccaagatgcttgcattgttcgctctcctagctctttgtgcaagcgccactagtgcgacccatattccagggcacttgccaccagtcatgccattgggtaccatgaacccatgcatgcagtactgcatgatgcaacaggggcttgccagcttgatggcgtgtccgtccctgatgctgcagcaactgttggccttaccgcttcagacgatgccagtgatgatgccacagatgatgacgcctaacatgatgtcaccattgatgatgccgagcatgatgtcaccaatggtcttgccgagcatgatgtcgcaaatg

SEQ ID NO: 5704 - DNA, 149 bp, Zea mays
  unsure at all n locations
  Clone ID: LIB3118-022-P1-K1-D12
ccgctcccacaactaccataccattcttttttaaccaccaacaccaaccaagaacgagccaaaacaattttccacccctccccaaaaaacccnacaacaaacaccaatcatcaaacacaaccatcaatccactttacaccaaccaaccc

SEQ ID NO: 5705 - DNA, 387 bp, Zea mays
  Clone ID: LIB3118-022-P1-K1-D2
gtcaccaacgcaaattgcaccaagaaatccatcgagaggccgtcgacaggggagttaatggcgtcgtcgtctagcagcagccaccgccgcctcatcctcgcagccgccgtcctgctctccgtgctcgcggctgccagcgccagcgccgggacctcctgcgtgccggggtgggccatcccgcacaacccgctcccgagctgccgctggtacgtgaccagccggacctgcggcatcgggccgcgcctcccgtggccggagctgaagaggagatgctgccgggagctggcggacatcccggcgtactgccggtgcacggcgctgagcatcctcatggacggcgcgatcccgccgggcccggacgcgcagctggagggccgcctagaggac

SEQ ID NO: 5706 - DNA, 409 bp, Zea mays
  Clone ID: LIB3118-022-P1-K1-D3
gttccgtccaggcaaccaaaaagcaagttgccccgccgcgcagaggaagaagagagcagaggaggatggctcgtacgaagcagaccgcccgcaagtccacgggaggcaaggccccccgcaagcagctcgccaccaaggcggcgaggaagtcggcgccgacgaccggcggcgtgaagaagccccacaggtacaggcccggaaccgtggcgctgcgcgagatccgcaagtaccagaagagcacggagctgctgatccgcaagctgcccttccagcgcctggtgcgcgagatcgcgcaggacttcaagacagacctccggttccagagccacgccgtgctggcgctccaggaggccgccgaggcctacctcgtcggtctcttcgaggacaccaacctctgcgccatccacgc

SEQ ID NO: 5707 - DNA, 396 bp, Zea mays
  Clone ID: LIB3118-022-P1-K1-D4
cccacgcgtacgcaaatgcgttcattattccccaatgctcacttgctcctagtgccattattccacagttcctccctccagttacttcaatgggcttcgaacacccagctgtgcaagcctacaggctacaacaagcgcttgcggctagcgtcttacatcaaccaattgcaaccaaccgacagcattgaactctactgcttatttacagcagcatcaactactaccaattcagccagctagctggtgtgagccctgctaccttcttgacacaaccacagttgttgccggtctaacaacacgctgggcctaacgctggcaccctcttacaactgcaacaattgctgccattcaaccaacttgctctgacaaacccagcagcattctaccaacaaccca

SEQ ID NO: 5708 - DNA, 409 bp, Zea mays
  Clone ID: LIB3118-022-P1-K1-D5
cggacgcgtgggcggacgcgtgggctgaaccctgctgcttatttgcagcaacaacgattaccatttagccagctagctactgcctactctcaacaacaacaacttcttccatttaaccaattggccgcactgaaccccgctgcttatttgcagcagcaaatactactaccatttagccagctagctacagcaagccgtgcttccttcttgacacaacaacagttgctgccgttctaccagcagtttgcggctaaccccgcaaccctcttacaactacaacaattgttgccctttgtccaacttgctttgacaaacccagcagcctcctaccaacaacacatcattggtggtgccctcttttagattgcttattagatgtaattcaataataaagttttttggatgatgg

SEQ ID NO: 5709 - DNA, 399 bp, Zea mays
  Clone ID: LIB3118-022-P1-K1-D7
cccacgcgtccgcccacgcgtccgcccacgcgtccgttttgagcattcagaaacacaccaagcgaagcgcactagcaacaacctaacaacaatggctaccaagatattatccctccttgcgcttcttgcgctttttgcgagcgcaacaaatgcgtccattattccacaatgctcacttgctcctagttccattattccacagttcctcccaccagttacttcaatggccttcgaacacccagctgtgcaagcctataggctacaacaagcgattgcggcgagcgtcttacaacaaccaattgcccaattgcaacaacaatccttggcacatctaacaatacaaaccatcgcaacgcaacagcaacaacagttcctaccagcactgagccacctagccat

SEQ ID NO: 5710 - DNA, 292 bp, Zea mays
  Clone ID: LIB3118-022-P1-K1-D8
cggacgcgtgggtgctggtggacaaggagaagggtatactgaagattgcgtgagctgggactcggtagggctttcactgtgcccatgaaaagctacacccatgagattgtgaccctttggtacagagctcctgaagttttgcttggagcaacacattacttaactggcgttgatatgtggtctggtggatgcatttttgctgaaatggcccgaccgcaggctctctttcctggtgacttggagttgcaacagttgcttcacattttcaaggtgctgggaacacctactgagg

SEQ ID NO: 5711 - DNA, 397 bp, Zea mays
  Clone ID: LIB3118-022-P1-K1-D9
cggacgcgtgggtttgaagccattaatttccagcggcaatctagctgaaccgggtaagtttagtgagactgaacaagaacagatgatggagctccgagaccaggttttcagagtatggggtcttttgagatcctcaaataactttgatccgagccttttgcagccaatcgttcaggttctacaagaaccagaggcccgtgtcttgggttctcgtgtcgcaggtggtgtaacacagcgccttgcggcacgtctgctgcaacagcttctcaggacccctcctgctcctggatcttcttagcagatatatagatataggctcgtatgattgtatgaagcatgtaaattgacacgatatttttcacaggaaatgagaaggaagcacaactcagaattcgag

SEQ ID NO: 5712 - DNA, 329 bp, Zea mays
  unsure at all n locations
  Clone ID: LIB3118-022-P1-K1-E1
cccattcttccgnaactctnctncntacctacaacatcttcttcagttactaaanccactagcgggggctaacccaattttttctgcctcccaacaacancaacaatctccgccacacaaccagatcactttgatgaaccctgccatcctcaaacaacaacccatcgatccatttgcacccaatcaacaacatctacaaaaaccataagcccgtgtctcctcttctcgtctcgcatttgctataaccacatcgccttgcggcacgtctgctgcaacagcttctcaagacccctcctgctcctggatcttcttaacaaatatataaatat

SEQ ID NO: 5713 - DNA, 415 bp, Zea mays
  Clone ID: LIB3118-022-P1-K1-E10
gatgtaattcaataataaagttttttggatgatgtatgtggccaaccagaaatgaaaaagttacatttccagattctaaaaaaaaaaaaaaaaaaaaaaaaaaaaaaaaaaaaaaaaaaaaaaaaaaaaaaaaaaaaaaaaaaaaaaaaaaaaaaaaaaaaaaaaaaaaaaaaaaaaaaaaaaaaaaaaaaaaaaaaaaaaaaaaaaaaaaaaaaaaaaaaaaaaaaaagggggcgccccttttaaagaaacaaagttttattccccggcaattcaagaaaatattttttttatgggtcccccaaaattaaattaccggcccggcttttaaaaaacctgtgaccggaaaaaacctgggggtacccaaaattaatgctcttaaaaaaaaaccccttttgcaaagtggtcttaaata

SEQ ID NO: 5714 - DNA, 404 bp, Zea mays
  Clone ID: LIB3118-022-P1-K1-E11
cccacgcgtccgcccacgcgtccggtccgctcgctgtgggcaatgcacgtacatacctgcaacaacaattgttgcaacagattgtaccagctctgactcaactagctgtggcaaaccctgttgcctacttgcaacagctgcttccattcaaccaactgactctgtcgaactctgctgcgtacctacaacagcgacaacagttacttaatccattggtagtggctaacccattggtcgccgccttcctacagcagcaacaattgctgccatacaaccagttctctttgatgaatcctgtcttgtcgaggcagcaacccatcgttggaggtgccatcttttagattacatatgagatgtactcgattatggtgccctcataccgacgtgtgtttcctagaaataat

SEQ ID NO: 5715 - DNA, 400 bp, Zea mays
  Clone ID: LIB3118-022-P1-K1-E12
gcttcgtcgccgtctcctcagctcgacgcggctatagctgcactgaccgcacctcgaccgcgtgcccaccggcaccgctcagtgctagcgcgcgctcatggcgtcgcttggccagctcctcctcgtcgccggcctggccttcctggtgctgctgctgggtgcccaggatcacgggcgtggagagcaagcgaccggcggcggcccggccgttggagcagcagccgccgccgctgctcctcccgcgcgggaggctgtaatcatcagccggcaccagcattcgcagccgtcggccgcggcgatggcggagagcaagcggctccccatccctccgtccgggccgtccactaagtggaactacgaggcgaatcacgagaagccgtcgtcgtcggagtcgggctcg

SEQ ID NO: 5716 - DNA, 400 bp, Zea mays
  Clone ID: LIB3118-022-P1-K1-E2
cccacgcgtccggttggcttctcctttccctccggttcgggttcgggttcgggggggtctccggggttcggtttcgtgggtgagcggatcgagatggcggcgtcggatgttgagtaccgctgcttcgtcggcggcctcgcctgggccacggacgaccactccctccacaacgccttcagcacctacggcgaggtcctcgagtccaagatcatcctcgatcgggagacgcagaggtcccgcggcttcggcttcgtcaccttctccacggaggaggcgatgcggaacgccatcgagggcatgaacggcaaggagctggacggccgcaacatcaccgtcaacgaggcccaatcccgcggcggccgtggaggcggcggcggtgggtacggtggtggccgtggag

SEQ ID NO: 5717 - DNA, 410 bp, Zea mays
  Clone ID: LIB3118-022-P1-K1-E3
cccacgcgtccgccgatggtgatcgggcacgagtgcgcgggcgtggtcgaggaggtgggcgccggcgtgacgcacctgtccgtgggcgaccgcgtggcgctggagccgggcgtcagctgctggcgctgccgccactgcaagggcgggcggtacaacctgtgcgaggacatgaagttcttcgccaccccgccggtgcacggctcgctggcgaaccaggtggtgcacccggccgacctgtgcttcaagctccccgacggggtgagcctggaggagggcgccatgtgcgagccgctgagcgtgggcgtgcacgcgtgccgccgcgcgggggtggggcccgagacgggcgtgctcgtggtgggcgccgggcccatcggcctggtgtcgctgctagcggcgcgagccttcggcgc

SEQ ID NO: 5718 - DNA, 393 bp, Zea mays
  Clone ID: LIB3118-022-P1-K1-E4
gttggcttctcctccccctccggttcgggttcgggttcgtgaggttctccggggttgggtttcgtgggtgagcggatcgagatggcggcgtcggatgttgagtaccgctgcttcgtcggcggcctcgcctgggccacggacgaccactccctccacaacgccttcagcacctacggcgaggtcctcgagtccaagatcatcctcgatcgggagacgcagaggtcccgcggcttcggcttcgtcaccttctccacggaggaggcgatgcggaacgccatcgagggcatgaacggcaaggagctggacggccgcaacatcaccgtcaacgaggcccagtcccgcggcggccgtggaggcggcggcggtgggtacggtggtggccgtggaggcggc

SEQ ID NO: 5719 - DNA, 408 bp, Zea mays
  Clone ID: LIB3118-022-P1-K1-E5
cccacgcgtccgcccacgcgtccggccgtaacacaaggctgaatttttgttcggtgtagccgacccgacgatggcgtccagcgacgggaaaccactgccaaccccggcctctgtgggcggcggcggcggcagcagcaccgcgccgcccgggcagccgaccacggtagcgtccaaggtgctggacatgggcgcggcggcgatgcagtcgttgcgccccgtgaagcaggcgaagcagcacatgtgcacgttcgcgctgtacgcgcacgacccgaagcggcaggtggagacgcaccactacgtctcccgcctcaaccaggacttcctccagtgcgccgtctatgactccgacaaagccgacgcgcgtctcatcggcgtggagtacatcgtgtcgaggaagatcttcgactc

SEQ ID NO: 5720 - DNA, 76 bp, Zea mays
  Clone ID: LIB3118-022-P1-K1-E6
cggacgcgtgggcagaaataagaaagtacatttctgggaaaaaacaaacatagggcggacgacttaattgttgcac

SEQ ID NO: 5721 - DNA, 391 bp, Zea mays
  Clone ID: LIB3118-022-P1-K1-E7
caactagcaacatagaaagcacaatattgtaccaacaatggtagccaaaggattttgcctccttatgctccttggtctttctgcaagtgctgctacgacgaccattttcccgcaatgctcacaagctcctatagcttctcttcttcccccatacctctcaccagcgttgtcttcagtatgtgaaaacccaattcttcaaccctacaggatccaacaggcaatcacagcaggcatcttacctttatcacccttgttcctccaacaatcatcaaccctattacatcaattacctttggtgcatttattggcacaaaacatcagggcacaacaactacaacaactcgtgctagcaaaccttgctgcctacgctcagcaacagcagttacctttg

SEQ ID NO: 5722 - DNA, 101 bp, Zea mays
  Clone ID: LIB3118-022-P1-K1-E8
attggcggtgccctcttttagattgcttatgagttatagttcaataatgaaggtttttggatgatgtttgtggcttcccagaaataagaaagtacatttct

SEQ ID NO: 5723 - DNA, 406 bp, Zea mays
  Clone ID: LIB3118-022-P1-K1-E9
cggacgcgtgggctccgtttcgccgcatagccgagaggaagcaggcggcggcgagaatccagtagaacgcgagcagacggcggcgatggcatggcgggcgagcctgtctcggagtgtaaaggagatacgcgtcctcttctgccagtcctcccccgctagcgcccccgcccgggagttcgtgaagaagaactatggtgacatcaaggcccgcaacccctccctccccttccttgtccgcgagtgctccggtgtccagccccagctctgggcgcgctacgatatgggtgtggagagatgcgtgaacttggatggtctgacggaagcacagattgataagaagctggaggaacttgcaatggccggggagtctcttaaaaccaaatagttttggaactcgtatcatgtc

SEQ ID NO: 5724 - DNA, 401 bp, Zea mays
  Clone ID: LIB3118-022-P1-K1-F10
tctacttgagacaaggcattggtgttggtggcttccagaagatttatggtgggcgccagaggaatggctcacgcccacctcacttctgcaagagcagtggtgccatttcacgcaacatcctccagcagctgcaggagatgggcatcattgatgtcgatcccaagggtggacggcgcatcacctcccagggaaggcgtgatctggaccaggtggctggaagggttgctgttgaagcttgagcaatctcatatttggtttctatgatgtcatgtttgattgttgagatggctacactttatttgcactttggattaggatttttgtgttaagagaactcaaggcattctagctatggttcacactgtattttccctgagtacctatttatcaaaacctattcg

SEQ ID NO: 5725 - DNA, 351 bp, Zea mays
  Clone ID: LIB3118-022-P1-K1-F11
gtggagccgcagcaccggtaccaggcgatcttcggcttggtcctccagtccatcctgcagcagcagccgcaaagcggccaggtcgcggggctgttggcggcgcagatagcgcagcaactgacggcgatgtgcggcctgcagcagccgactccatgcccctacgctgctgccggcggtgtcccccactgaagaaactatgtgctgtagtatagccgctggctagctagctagttgagtcatttagcggcgatgattgagtaataatgtgtcacgcatcaccatgggtggcagtgtcagtgtgagcaatgacctgaatgaacaattgaaatgaaaagaaaaaagtattgttcc

SEQ ID NO: 5726 - DNA, 400 bp, Zea mays
  Clone ID: LIB3118-022-P1-K1-F12
cggacgcgtgggcgagtagtatcacattttgttgccttggcttggatggtgaaagatatttaaggattttcgtgccttgtctactggttactggttgagcaagaagacaatgttcttttgcacctctttttattggtcggcatattttgcgctgtgattggaaaaaaaaaaaaaaaaaaaaaaaaaaaaaaaaaaaaaaaaaaaaaaaaaaaaaaaaaaaaaaaaaaaaaaaaaaaaaaaaaaaaaaaaaataaaaaaaaaaaaaataaaaaaaaaaaaaaaaaaataaaaaaaaagggggggccccttttagggtttcaaagtttatttccgcgggcttgctatgtaatatttttttttttatgggccctaaatttaaattactggcccttttttttaa

SEQ ID NO: 5727 - DNA, 406 bp, Zea mays
  Clone ID: LIB3118-022-P1-K1-F2
gacgaccgccgggaagaagcccaaggcggataagcgggtccccgcgggcaagtccggcggcaaggagggcggcgagggcaagcgtggcaagaagaagggcaagaagagcgtggagacgtacaagatctacatcttcaaggtgctgaagcaggtgcacccggacatcggcatctcctccaaggccatgtccatcatgaactccttcatcaacgacatcttcgagaagctggccggcgaggccgccaagctcgcgcgctacaacaagaagcccaccatcacgtcccgcgagatccagacctccgtgcgcctcgtgctccccggcgagctcgccaagcacgccgtctctgagggcaccaaggccgtcaccaagttcacctcctcctaggctgcacgctcgccctttgta

SEQ ID NO: 5728 - DNA, 217 bp, Zea mays
  Clone ID: LIB3118-022-P1-K1-F3
cacacggcgatgggatccatgccgccgacctccgcctccggatctacaccggcgccgcaggattatgagctgctgggtccaaatggggccatacacatggacatgtattaggcactgcgggtttcgtgatcgctgggaacattttatttgcaggcgtcgctgaataaggctggttgtctctcccttgacatgaaatccaaataactcacaattaacc

SEQ ID NO: 5729 - DNA, 404 bp, Zea mays
  Clone ID: LIB3118-022-P1-K1-F6
cggacgcgtgggcgagggccgcccttttttttttttttttttccttaagattgactgagaataaagcctgacgggggtaacagcatccatcgatccgcagtccatgctgtttgatgcatgggtctgctgaaaccgaggatgaacacagcactaacaactgacacagagcgaccttgcaatcaaaaacacagatgggcaacaacaaacacgacacgaacgaagataaaccctctggactagggtaaacatcacggtagcgaacaggataacttggccgcgcgggccccaccgctcagttcctccagttcccgtcggagttgccgtagccgccgccacggttgccaccgtcgtagccgtcgccaccaccaccgtagccgccgtcgccaccgtagccgtcgtcaccg

SEQ ID NO: 5730 - DNA, 402 bp, Zea mays
  Clone ID: LIB3118-022-P1-K1-F7
aagaaatccatcgagaggccgtcgacaggggaattaatggcgtcgtcgtctaggagcagccaccgccgtctcagcctcgcagccgccgtcctgctctccgtgctcgcggctgccagcgccagcgccgggacctcctgcgtgccggggtgggccatcccgcacaacccgctcccgagctgccgctggtacgtgaccagccggacctgcggcatcgggccgcgcctcccgtggccggagctgaagaggagatgctgccgggagctggcggacatcccggcgtactgccggtgcacggcgctgagcatcctcatggacggcgcgatcccgccgggcccggacgcgcagctggagggccgcctagaggacctggcgggctgcccgcgggaggtgcagaggggattc

SEQ ID NO: 5731 - DNA, 114 bp, Zea mays
  Clone ID: LIB3118-022-P1-K1-F8
cggacgcgtgtgcggacgcgtgggctgacgcgtggagaggttcagggagctggctccttataatcttgactggacctacataaggcctgattcaattgcagggaaaatctacct

SEQ ID NO: 5732 - DNA, 400 bp, Zea mays
  Clone ID: LIB3118-022-P1-K1-F9
cccacgcgtccgcccacgcgtccgcttccagcgcgacgaaatcatcgagttcgtgaaggaggcagggcgtggtggaaagggaaaccttcctctgaacgatgcacctacagtagtcgcgtccgagccgtgggacggcaaagatggagaggtcattgaggaggatgaattctccctcgacgagctcatgggcgacagctcctcagcaaacgatgagttgtgattctgatggttcttggactgatctgcgtgtcggttagccagactgtaaatctgaggaactctgttttgaaaaatcattccttgagtggcataattttccaggttatggatgctagaatggattaagattaaggagaactgatgtgatagaccttttctttaacgtttttttttatccctg

SEQ ID NO: 5733 - DNA, 348 bp, Zea mays
  Clone ID: LIB3118-022-P1-K1-G1
ttcgtcgactcctccccgcacaagactaaaaaaccctcgccttggaggcgcgggagcccgacacccagagcgaaaaaaagcgaggggtctgaccgccggcgatggcgtccatctccggagcggcggcggcgccatcttccgctgcgtgccggctgcggctgcgtaggcacctcctgctgcggccctcgcacctccgtcttcgcgcgccccactccatcgccgacctctcccgctccttcagctcctctaattccgccccgacccgggcccagccgctgggctccaggccggagaacggcggcttccgcgcggtggagaaggacccgatcaagctgtgggagcgctacg

SEQ ID NO: 5734 - DNA, 401 bp, Zea mays
  Clone ID: LIB3118-022-P1-K1-G10
cggacgcgtgggggagaggatgctggccaggctgatgcggcggcggagctccgtccccctgtccggcctcctccaccacggaggagcgcccgccccgctgcaggccgccggcgccactggggcctccccgctgatcttgtcgcaccagcagcagcagcagcacacggccgcctccgccgtcctgccggggctcaagatcagggactccgcgtcccagctgatcgggaggaccccgatggtgtacctgaacaaggtgaccgaggggtgcggcgcccgggtggctgccaagctcgagttcctgcagccgtccttcagcgtcaaagacagaccggcgatctcgatgctggaagacgctgaaaagagggggctcatcactccaggaaagaccacgttgatcgagc

SEQ ID NO: 5735 - DNA, 397 bp, Zea mays
  Clone ID: LIB3118-022-P1-K1-G11
caactagcaacatacatagtgaagtacactagcaacatcttagcaccaatgggagccaagatttttgccatccttgccctccttgctctttcagcaagcgttgctaccgcgactattattccacaatgctcacaacaatacctctctccggtgacagccgcgagatttgaatacccaactatacaatcctacaggctacaagaggccatcgcagcaagcatcttacggtcgttagcattgaccgtccaacaaccatatgccctattgcaacaaccatccttaatgaatctatatctccaaagaatcgcagcacaacaactacaacaacagttgcttccaacaatcaatcaagtagttgcagcgaaccttgctgcttacctccagcaacaacaatttc

SEQ ID NO: 5736 - DNA, 400 bp, Zea mays
  Clone ID: LIB3118-022-P1-K1-G5
ggcgaacagggcccttggcagaatggtcaccgagccatggtgtgtgccgccacacgagcttgccgttgcatcccgcgtgcaccttgctcccgcggacagccagctcgatgtaccacatctcaggggccatctgccacagcacgaagcggccaggctcgccgccgcgtccagcgctgcggttcttagtgagacggccggcggtctcgaactcggtggccaccatgcgtaccttgcccatggcgtaggtgctgcgcagggaggccaggagcttgtgccctccggaagccgcgaggtactgctgcaggatgtactgcgcggacgaggtttcgatgggagtgtccttgacgctgaggtgcgggagtggctcggcggcgcagacgcggaccggcgcgagcggcgc

SEQ ID NO: 5737 - DNA, 401 bp, Zea mays
  Clone ID: LIB3118-022-P1-K1-G6
agcaactctccctctctgtcctcttcctgtcgccgcactcattttctcttgccgggtggaatagggaacggccatacaccatggcggatttctccaaggaatcttgcccttctgtgaagaacattttacttctggattctgaaggaaagcgtgttgctgtaaagtatttctcagatgattggccgactaatgcatcaaagttagcctacgaaaagtctgtttttactaaaactctaaagacaaatgcacggacagaagctgagataacattgtttgatggttatattgtcgtttacaagtttgtacatgaccttcacttttttgtcaccgctggagatgatgagaatgagctcatcttagcaagtgtactacatggtttttctgattctgttggtcttcta

SEQ ID NO: 5738 - DNA, 351 bp, Zea mays
  Clone ID: LIB3118-022-P1-K1-G8
ggacgcgtgggtgcaaatatgatgaccatcgtcgacgaccttgctgtgcgacactctcattgaggactatctgtgcgctgagccagttaacgagtacgtacagagttgcgacatagttgccttcaacaagatctaggcgtgactttcgatcagtccttcccctggggtgctggcgatggtggtggctgggcaatgcaccagcctaatttatccatagctatatgtctgctttgtgtggccagtgatattgccgtgagtatttttggatcctattcgaggtggaaggtaccagtaccagagttaatttgctttaattcgaaacaccgttccaggtggaaaattaaaaaatat

SEQ ID NO: 5739 - DNA, 401 bp, Zea mays
  Clone ID: LIB3118-022-P1-K1-H10
cggacgcgtgggcggacgcgtgggcgcgcgctgccagtccccgctgatgagcaccccaagatctaccgcatggagcttgcgctaccaacgagatctgctccaaatccaagctctggtactatctgaggaagctcaagtctcaagaaggtttaagagcaacggtcagattctcgccatagacgagatctgagtgtaaccctacaaaaatcaagaactgtggcatctggctgtgttaccagtgcaggacaggttaccacgacctgcacaaggagtaccgtaataccatcctgaatggtgccatggagcagatgtacaatgagacggcttcctgtttgtcaccctacgtacagatcatcaagacggcaacaatcaactttaagctttgcaagagggacaacacc

SEQ ID NO: 5740 - DNA, 400 bp, Zea mays
  Clone ID: LIB3118-022-P1-K1-H11
cgctcgcgcaagtcgtcgcacccttccccaggccccagccccagctagccatggcgaccgcgccgcggaggctgctccccgcgctcctcaaggccctagctccagccggcgcgcgcggcctctccaccgagaaggctgtcggcgccgccgccgtcgctgtcgtgggcagccacaccgctaagtggatgcaggacacgagcaagaagtcaccgatggaactgatcaacaaggtacctccgatcaaggttgatggccgcatcgccgtttgtgaaggggctgctgaaggtgttgggcttggccacccaatcgagtatatctgccttgatctggaggcacccaacgtgtgcaaatactgtggcctccgttatgttcaaattcaccatcactaaatagggaagat

SEQ ID NO: 5741 - DNA, 397 bp, Zea mays
  Clone ID: LIB3118-022-P1-K1-H12
gcgtcctaagtgtgtgcctatgttcgacttcaacgtcagtggaagacctttcgagtttagactatgtgcagggcaggttatcagtggctgggacgttggcgtcaatggtatgcgggttggggacaaaaggagactcaccattccaccttccatggggtatgggagcaaaagagtggggcagataccacagaactcaactctcatcttcgatgtggagctggtgaacgtaaaatgaagtgagaagatccacgagaaactgcggcagtttcacaaattttgctacgcatcattttccttgggcaatgctgtttcgtaggcataggggcatgttaagtggattcatctctgtcgctatcatactttcgaactgagtttcagaaagaaaaaaactgtggac

SEQ ID NO: 5742 - DNA, 180 bp, Zea mays
  Clone ID: LIB3118-022-P1-K1-H4
cccacgcgtccgcccacgcgtccgggttccttaatttgcttactagctagctacgtaccgcggtccgtgtccttgtctctggctgatgtttgctgcctgcgtccgtcgtgcatccgacgacgtgtcgttgcgttgcgcaccggtcctccgagtcaataaagctctccgtgttcattgcgc

SEQ ID NO: 5743 - DNA, 422 bp, Zea mays
  Clone ID: LIB3118-022-P1-K1-H5
ccgttactcaaggcccgacccaacccacccgtcaggcgtccgaaccaattggccgcactgaaccccgctgcttatttgcagcagcagatactactaccatttagccagctagctgcagcaaaccgtgcttccttcttgacacagcaacagttgctgcctttctaccagcagtttgcggctaaccccgcaaccctcttacaactacaacaattgttgccctttgtccaacttgctttgacagacccagcggcctcctaccaacaacacatcattggtggtgccctcttttagattgcttattagttgtaattcaataataaagttttttggatgatgtatgtggccaaccagaaataagaagttacatttccagatttttaaaaaaaaaaaaaaaaaaaaaaaaaaaaataaaaaatttaaaa

SEQ ID NO: 5744 - DNA, 421 bp, Zea mays
  Clone ID: LIB3118-022-P1-K1-H6
ggaatggccggcccgcccgacccgtcctaagtgtgtgcctctgggccaagtcatcgtcttgctttgccaatccgaggctgcactctgtacacaccggcgaagaggaggctaagaagcgatgggcgtgaccaaggaggacgtcgaggcggccatcacctctgctctcagcccttccaatctccatcttcagttgttgactaaccaacaaagagcgggtcctttgctgcgccgttgattgattcgtcggtgcgaaggtgtggcgcgagctacgagatcgaggtggtgtcggagaagttcgaggggaagcggctgctggagaggcaccggatggtgaacaccgcgctggcgtctcacatggcggagatccacgccgtcttcatcaagaaggcgctcaccccggctcatgcccagccccaggccc

SEQ ID NO: 5745 - DNA, 402 bp, Zea mays
  Clone ID: LIB3118-022-P1-K1-H7
cagcaaagcggcagtgcgtagagaggatcgtcgaacagaacagcatgaagatggtcatcgttctcgtcgtgtgcctggctctgtcagctgccagcgcctctgcaatgcagatgccctgcccctgcgcggggctgcagggcttgtacggcgctggcgccggcctgacgacgatgatgggcgccggcgggctgtacccctacgcggagtacctgaggcagccgcagtgcagcccgctggcggcggcgccctactacgccgggtgtgggcagccgagcgccatgttccagccgctccggcaacagtgctgccagcagcagatgaggatgatggacgtgcagtccgtcgcgcagcagctgcagatgatgatgcagcttgagcgtgccgctgccgccagcagcagcc

SEQ ID NO: 5746 - DNA, 407 bp, Zea mays
  unsure at all n locations
  Clone ID: LIB3118-022-P1-K1-H8
cccacgcgtccgcccacgcgtccgctgaaccctgctgcttatttgcagcaacaactattaccatttagccagctagctactgcctactctcagcaacaacaacttcttccatttaaccaattggccgcactgaaccccgctgcttatttgcagcagcaaatactactaccatttagccagctagctgcagcaaaccgtgcttccttcttgacacagcaacagttgctgcctttctaccagcagtttgcggctaaccccgcaaccctcttacaactacaacaattgttgccctttgtccaacttgctttgacagacccagcggcctcctaccaacaacacatnattggtggtgcccccttttagattgcttattagttgtaattcaataataaagttttttggatgat

SEQ ID NO: 5747 - DNA, 367 bp, Zea mays
  Clone ID: LIB3118-023-P1-K1-A11
tgattctagcagtctcacatctgcagttgatgaaatttttggtgatgaaaaattgatggcagacatgtctcagaaggcactaactgcagcccgaccaaatgcttcagctgatataatccgccacatatgttcattgattggttcaacctacccatcatgaaactggttttagacattgcaaagagttcatgtcatgaacacattttgtattggttttttttttgagcaaccgcatcatgtcatgtttttcttgaggtggaaactgatgtttaattccatcatgacagtgcagtttgcgcctgcttccaggtagcgttcaattggctatttttcacatccaatggacgactttttatttttttgatac

SEQ ID NO: 5748 - DNA, 90 bp, Zea mays
  Clone ID: LIB3118-023-P1-K1-A12
cggtccggattcccgggcaataataaagttttttggatgatgtatgtggccaaccagaaataagaatttacattttcagattttaatggg

SEQ ID NO: 5749 - DNA, 218 bp, Zea mays
  Clone ID: LIB3118-023-P1-K1-A2
ggcgggcgaaggtctatgggcgtccgacgggctggggtaccctggcgcggcgggcggcgcataagagcgggtgcgcctgctctaccgcagggcgctcaaagacacgcttaactgggccgtccaccgtcacctcttataccaggacgcgttggatctcccggacaagttcgaggccaaccgacacctggataacctggacgtggtcgataggctcatcg

SEQ ID NO: 5750 - DNA, 118 bp, Zea mays
  Clone ID: LIB3118-023-P1-K1-A4
tcgcggacgcgtgggcggacgcgtggggtgaaactgttcatttaaaaaaaaaaaaggcgggggggagaaaccaaatgggagtaaaatacgtagttaaaaattaaaacacaaaatcaaa

SEQ ID NO: 5751 - DNA, 338 bp, Zea mays
  Clone ID: LIB3118-023-P1-K1-A5
gccacgcgttcggagcttccttattagcatctttgttggatgatgactttgtggatccatctaaagagctgaacctgcaaaatatgggcaaatcgagatctggtgctctgacaactttcatagaccaagtcgcaagtattgaattgctggttccttcaatatttagaggctgtatgtcattgcatcctgctggatctactgatcctgatgcagtggcattcttttctcccactgagggaggaagctatctttatggaaggggcacgtcggtacataatgtgtttaaacatgtaaaggaacatgctgacaaggcattgcagtacttcatcagtgtggag

SEQ ID NO: 5752 - DNA, 73 bp, Zea mays
  Clone ID: LIB3118-023-P1-K1-A6
caataataaagttttttggatgatgtatgtggccaaccagaaataagaagttacatttccagattttaatgtg

SEQ ID NO: 5753 - DNA, 250 bp, Zea mays
  Clone ID: LIB3118-023-P1-K1-A8
ccacgccttccggcaaggaaacctggaaagggttcttccgaccggaacggcccttattttccttggccccgaccttcccgacccggtggggcccaaagggggaaaaaagcccggggaaaaaaaacccgccggccgaggggaaggcgggaaaaccaccgcaggggaaaaggccaagggccggaaaggggttgcccgggtccaagtcctccgcaagggaggccggcgagaaaaaggggaggaaaagggccaa

SEQ ID NO: 5754 - DNA, 271 bp, Zea mays
  unsure at all n locations
  Clone ID: LIB3118-023-P1-K1-A9
tcgtccacgcgttcgtccacgcgttcgtccacgcgttcgtccacgcgttcgcccacgcgttcgcccacgcgttcgcccacgcgttcggaagaacgtagcaaaatgcgatacctggtgtgaattgcagaatcccgcgaaccatcgagtttttgaacgcaagttgcgcccgaagccttctggcggagggcacgtctgcctgggcgtcacgccnntntaaaaaaaatatataaatattattgtattaaaaaatatattaatattttattatatt

SEQ ID NO: 5755 - DNA, 420 bp, Zea mays
  Clone ID: LIB3118-023-P1-K1-B1
atggtgaaccctgccgcctacctacaacagcaacaactgctttcatctagcccgctcgctgtggccaatgcacctacatacctgcaacaacaattgttgcaacagattgtaccagctctgactcagctagttgtggcaaaccctgctgcctacttgcaacagctgcttccattcaaccaactgactatgtcgaactctgctgcgtacctacaacagcgacaacagttacttaatccactagcagtggctaacccattggtcgctgccttcctacagcagcaacaattgctgccatacaaccagttctctttgataaaccctgtcttgtcgaggcagcaacccatcggtggaggtgccatcttttagattacatatgagatgtactcgataatggtgccctcattccggcatgtgttttct

SEQ ID NO: 5756 - DNA, 419 bp, Zea mays
  Clone ID: LIB3118-023-P1-K1-B10
atcagggagttttacggcgtcattttcccgttgttgctgcagcttccgagtggcatcaccgagctggacgacaggaagcagaggaagctctgcctcaagaaattcaggagcagggatgagcagctctgggaggtggacacggagagggagcttgagtgtgggatctgcctcgaggaaatgacacctactctactccgcagcttaaaacctcaagatatgtcggtaatcaaacaagtacaagtttcaaggaaatgggaatttcatggaaatacagacattgggtccatattacacattgatatgattttggctgacaaagagcgctgtctgaggtgcgtggtcaagtcgaggcgaagatgagcaaggaggatgtgctcaaggtgcagttcttgatttcagatctctgaagccaattacgt

SEQ ID NO: 5757 - DNA, 51 bp, Zea mays
  Clone ID: LIB3118-023-P1-K1-B11
atggactgcggatcgatggatgcttttacccccgacaggctttttccttaa

SEQ ID NO: 5758 - DNA, 405 bp, Zea mays
  Clone ID: LIB3118-023-P1-K1-B12
aaaatagttactggtttggctcacagaatgatgattctgtttctgcagttcattcaaatttggttctgatggatgttaaacctaaaaaataaaaataaaaaaataaaaaaaaaaatataaaaaaaaaaataaaaaaaaaaaaaataaaaaaaaaaaaataaaaaaaaaaaaaaaaaaaaaaaaaaaaaaaaaaaaaaaaaaataaaaaaaaataaataaaatggggggggccgttttaaaagaacaaattttatttcacattgcatgcaaatttataatttttttttagggtacctaaaattaaattaattggccctttttttaaaatgtcttaattggaaaaacctatggtttacaaaaattaaatgttttgaaaaaaaattcctttttatcaagttgtttaat

SEQ ID NO: 5759 - DNA, 390 bp, Zea mays
  Clone ID: LIB3118-023-P1-K1-B2
cttggctcgacggcaagcacgtcgtcttcggccaggtcgtcgagggcatggacgtcgtcaaggccatcgagaaggtgggcacccgcaacggctccacctccaaggtggtcaaggtcgctgactgcggacagctctcctagatctctctgatctggtctgttcggccgccctccctccgtcatcgtcgactccccctgcgtccgttcctttggatctgaataagatggtggtgatctgagtgggggtcttagtttatcatgtatcgctcgcagtttaatttagcggtttaggtgtggatctgtgaaccccatggcgcctctgcttgattcgtgtttcacctgttatgttctgggattcatgataatgctatgagaaccgaaattcccgttt

SEQ ID NO: 5760 - DNA, 381 bp, Zea mays
  Clone ID: LIB3118-023-P1-K1-B4
cggacgcgtgggaacccgctcacgaacatggctgctgtgctcaagctcaacccctacctcggcactgcccggaagatggccacccttgctgaggctgcccgagtcaaggcccggaaggagaagcttgattccaagaggaccaagcttacctcggagactgccaaggtcaatgctgccggcaaggcgtggtacaagaccatggtctcggacagtgactacaccgagtttgagaacttcaccaagtggctcggagtgacgcagtgaagcggcctttgaggcctagttaagttttgagtagttgtgtcgctgaacttgtattgagacgaaatagtatttttatcaatctgtcttatcctgcgtcttcaaaaaaaatatttcaaa

SEQ ID NO: 5761 - DNA, 134 bp, Zea mays
  Clone ID: LIB3118-023-P1-K1-B6
ctcgcaccggccgcccgtgacggcgctgcacgcgacgcacgcgcgtggggaggtggagctggtgtggtgccagagccccgcgccgtggtttcacggcgccagcgtggaggccgcggtgcggggcgcgcgggagc

SEQ ID NO: 5762 - DNA, 397 bp, Zea mays
  Clone ID: LIB3118-023-P1-K1-B7
cccacgcgttcgcccacgcgtccgccagccgccgccatgtcgaagcgaggcaggggaggttcggcggggaacaagttccgcatgtcgctgggtctgccggttgccgcgacggtgaactgcgcggacaacacgggcgccaagaacctctacatcatctccgtcaagggcatcaagggccgcctcaaccgcctcccgtccgcctgcgttggcgacatggtcatggccaccgtcaagaaggggaagcccgacctcaggaagaaggtgatgcccgccgtcatcgtccgccagcgcaagccgtggcgccgcaaggacggtgtctacatgtacttcgaagataatgctggagtgattgtgaatcccaagggtgagatgaaaggttccgctatcactggaccta

SEQ ID NO: 5763 - DNA, 395 bp, Zea mays
  Clone ID: LIB3118-023-P1-K1-B8
tttggttcgacggcaagcacgttctcttccgccaggttgtcgagggcatggacgtgaggttgggcatcgaaaaggttgtcacccgcaacggctctccctgcaaggtggtcaaggtcgctgactgacgacagctcttctagatctctctgatctggtctggtcgggcgcccttccttcggtatcagccacttcccctgcgtccgttcctttggatctgaataagaaggtggtgatctgagtgggggtcttagtttatcttgtattggtcgcagattaatttaacggtttagtggtggatcctgcgtacggacggtgtcttcatgctctttggatatattacctgagttgttttgtaattcctagggttagatggatggaccgtgattcccttttat

SEQ ID NO: 5764 - DNA, 411 bp, Zea mays
  unsure at all n locations
  Clone ID: LIB3118-023-P1-K1-C1
cccacgcgtncgcagcttgttaggagtaacttccacccagttttaatgcacccagggtctatctctagctgctccaatacttaagttgcgatgaatgttttatatattcaattgatctttcatcttctgtcatgcatatttctatggcacgacgttaagatgtttcatgcttgtcattcctttttgccatggaattatgaattttcaattcactaatattctaattcctagttctttcaatttgacaaagatcatggagagcctagagcatgcaattaaacgtgatgcaccaataattgcggagtatttaggtggtgctgtgaactgtgatgcttaccatatgactgacccgagatctgatggtcttggtgtttcatcttgcatcaagcaaagtctcgaagatgctggtgt

SEQ ID NO: 5765 - DNA, 321 bp, Zea mays
  Clone ID: LIB3118-023-P1-K1-C11
cctactcgtgagtggacgctttggcggattcctatgctcttactaccagaacgtgccggacgaggccgccaagaaggagatcaagttcatctttacagcctacaagcacaccctaaagctcaataagacggcaggcgccgagcgcaacaaggggaagggtcgtgggcgccggacgaggattgcaaagcactacacttcaaccacatgacgactacagcttgaaagcacacatcaaagaagaggagcgtacatctattctcgattagaagaggctaacaatctggacgatgatgtagctactgagttaccataatgtaaaga

SEQ ID NO: 5766 - DNA, 426 bp, Zea mays
  Clone ID: LIB3118-023-P1-K1-C2
aaaaccctagagctctcgcctgctcgcctccgccgccggagcgagctccccatcttcatccgtcaaccatggcgacccagatcagcaagaagaagaagttcgtcagcgacggtgttttctacgccgagctcaatgagatgctgacgcgggagctggcggaggacggctactctggcgtggaggtgcgcgtcacgccgatgcgcacggagatcatcatccgcgccacgcgcacgcagaacgtgctcggcgagaagggccgtaggatcagggagctcacctccgtcgtccagaagaggttcaacttccctgagaatggcgttgagctttatgccgagaaggtcgtcaaccgtgggctctgtgccatcgcgcaggccgagtccctccgttacaagctcctcggtggccttgccgtccgcagggcttgct

SEQ ID NO: 5767 - DNA, 272 bp, Zea mays
  Clone ID: LIB3118-023-P1-K1-C4
gaggtgggttggcttctcctccccctccggttcgggttcgggttcgtgaggttctccggggttcgggttcgtgggtgagcggatcgagatggcggcgtcggatgttgagtaccgctgcttcgtcggcggcctcgtctgggccacggacgaccactccctccacaacgccttcagcacctacggcgaggtcctcgagtacaagatcatcctcgatcgggagacgcagaggtcccgcggcttcggcttcgtcaccttctccacggaggaggcga

SEQ ID NO: 5768 - DNA, 418 bp, Zea mays
  Clone ID: LIB3118-023-P1-K1-C5
tcgatagagaccaactcgcaggctcgcagccggcctctccgcctccggctctcccctcctcgagcgctttcggcaccgtagttcggtacgatggcagcggcggccccgacgagggcagaggtgctgtcgcttttccggtccttactccgcacggcgaagcagttctcggactacaacatccgcgagtacacacgccgacgcgccgcggacgccttccgcgaaaacagcgccctctccgacgcgccgtccgccgccgtcttgtttgcggtggggaagcagcagctagaggttgcgaagcgacaagcggtgatttactcaatctacgcccccaaggccaagagcgtgatggagttgaaggtgcagtgatggacgaggtgctgcgcccttttcttcctcatcgttttcctttccgaattcg

SEQ ID NO: 5769 - DNA, 413 bp, Zea mays
  Clone ID: LIB3118-023-P1-K1-C6
acgagatccccggcgtgggcaaggtccacggcggcttcatgaaggcgctgggcctgcagaagaacgccgggtggccagcgcagctcaccgagccgacgacgacgcgcccgtacgcgtactacgccgtccgcgagaggctgcgcgcggtgctggccgcgaacccgcgcgcccgcttcgtggtggcggggcacagcctcggcggcgccctggccgtgctgttcccgaccgtgctggctctgcacggggaagggtccctgctggggcgcctggcgggcgtgtacacgtacgggcagccccgcgtcggggacgcgcagctggggcggttcatggaggagcacctggaccgcccgcgccgctacttccggttcgtctactccaacgacgtcttgccgagggtgccctacgacgacgcc

SEQ ID NO: 5770 - DNA, 326 bp, Zea mays
  unsure at all n locations
  Clone ID: LIB3118-023-P1-K1-C7
cggacgcgtgggcggacgcgtggggaagagaggaagcagcgcgtcctcgcctaaagccctcgccgccctctttcggctcctcgcctctcgtccacgcgcgacgacgtgtcggcaaacactcagtccatcccaagactcgcgaggcgatggtggacgcgtggtggcctctgctgggcgcggcgatcccggcgctggtggcgggtcagtttgtccgcatcaagcgccgccgcgacgaggagcagcgcctcaaggcggcgcgcgggcgggagaagagctccgacgaggtattcgtctgcgagcgcgtgtgcacctncaagcgtatgctc

SEQ ID NO: 5771 - DNA, 367 bp, Zea mays
  Clone ID: LIB3118-023-P1-K1-C8
cccacgcgttcgtgtttaccgtgccgtcaccgtcaccgtgaggatgccgttcaagaggttcgtggagatcgggcgcgtggccctggtgaactacggggaggactatggccgtctcgttgtcatcgtcgatgtggtcgaccagaacagggcacttgtggatgcccctgatatggtcaggtgccaggtgaacttcaagcggctctcacttactgacatcaagattgacatcaaacgtgtccccaagaagacagccctgatcaaggcgatggaggaagctgttgtgaagaccaagtgggagaacagctcattggggcaggaagctgattttccaaaaagaggagagcatcgctcaatgactttgataggt

SEQ ID NO: 5772 - DNA, 389 bp, Zea mays
  Clone ID: LIB3118-023-P1-K1-D1
gccatggtgaaccctgccgcctacttgcaagagcagctgcttgcatccaacccacttgctctggcgaacgtagttgcaaaccagcaacaacaacagctacaacagtttctgccaacgctcagtcaactagccatggtgaaccctgccgcctacgtacaacaacaacaactgctttcatctagcccgctcgctgtgggcaatgcacctacatacctgcaacaacaattgttgcaacagattgtaccagctctgactcaactagctgtggcaaaccctgttgcctacttgcaacagctgcttccattcaaccaactgactctgtcgaactcttgttgcgtcctacaacagcgacaacagttacttaatccattggtagtggctaacccatt

SEQ ID NO: 5773 - DNA, 271 bp, Zea mays
  Clone ID: LIB3118-023-P1-K1-D10
atcgagtacagtcggctaggtaatctggtggtacgacgacatggcggccaccagcagcaagtcgtcgtcgtcctcgagctcggcgcagcgggcagctgccgcactgctcgtggccgccgccgtggcggtgtccgtcctggtggtgggcgcggcggcggtgtgcgacatgagcaacgagcaggtcatgtcgtgccagcccgcggaggccaagacgacggacccgcctgccgtgccgtttgaggtatgctgagaccctcttgcgtttgcgata

SEQ ID NO: 5774 - DNA, 100 bp, Zea mays
  Clone ID: LIB3118-023-P1-K1-D11
aacgagtacagccggctaggttatctagtggtaccacaacatggaggccaccagcaataagtcgtcgtctgtctcgagctcggcgcaacggtcagctgcc

SEQ ID NO: 5775 - DNA, 418 bp, Zea mays
  Clone ID: LIB3118-023-P1-K1-D4
gcattcagaaacacacctagcgaagcgcactagcaacgacctaacaacaatggcttccaagacattatccctccttgcgcttcttgccctttttgtgagtgcaacaaatgcgttcattattccacaatgctcacttgctccgagtgccattattccacagttcctccctccagttacttcaatgggcttcgaacacccagctgtgcaagcctataggctacaacaagcgcttgcggcgagcgtcttataacaaccaattgcccaattacaacaacaatccttggcacatctaaccatacaaaccatcgcaacgcagcagcaacaagcactgagccacctagccgtggtgaaccctatcgcctacttgcaacaacagctgcttgcatccaacccacttgctttggcaaacgtagctgca

SEQ ID NO: 5776 - DNA, 415 bp, Zea mays
  Clone ID: LIB3118-023-P1-K1-D6
gatcagcaaagcggcagtgcgtagagaggatcgtcgaacagaacagcatgaagatggtcatcgttctcgtcgtgtgcctggctctgtcagctgccagcgcctctgcaatgcagatgccctgcccctgcgcggggctgcagggcttgtacggcgctggcgccggcctgacgacgatgatgggcgccggcgggctgtacccctacgcggagtacctgaggcagccgcagtgcagcccgctggcggcggcgccctactacgccgggtgtgggcagacgagcgccatgtaccagccgctccggcaacagtgctgccagcagcagatgaggatgatggacgtgcaatccgtcgcgcagcagctgcatatgatgatgcagcttgagcgggccgcttgcgccagcatcagcccgtacgagcc

SEQ ID NO: 5777 - DNA, 422 bp, Zea mays
  Clone ID: LIB3118-023-P1-K1-D7
cccacgcgtacgcccacgcgttcgacctaattcacgcgtttcagggctcctcccatttcgtcggcttcgtttgtcgtcgtcgtaagctgcagctagtgtggactggagatccaccactccaccagtccggtccatctgctggacctcgattggtttcttcttacctaggaacatccggggatgtcgactcctgcgaggaagaggctgatgagggatttcaagcggttgatgcaggaccctccggccggcataagtggcgccccgcaggataacaacataatgctgtggaatgctgtcatatttggacctgatgataccccgtgggatggaggtacgtttaagctgactctccagtttaatgaagaatatccaaacaaaccaccaactgtgcgatttgtttctaggatgctccatcctaacat

SEQ ID NO: 5778 - DNA, 404 bp, Zea mays
  Clone ID: LIB3118-023-P1-K1-D9
cccacgcgttcgcccacgcgttcgcccacgcgttcgcccacgcgttcgcggacgcgtgggagctgaaggaggggcgaatctaagcccaattgaagcatgagggcgtcgattaatcgtcccccgacgccgagcgcggaggaggatcgggacaagcagccttctctcggagagatcattaacatcaagttggtagagactggggagaaggagaagctaatggagctactccgcgagcgactcgctgagtgcggctggagggatgagatgaaggcactctgcagggcatatgcaaggaagaaaggaagaaataatgtgacagtagatgacctcattcatgttattactccgaaaggaagagcatccgtgcctgattcagtgaaaggagaacttctgcaacgcattcg

SEQ ID NO: 5779 - DNA, 342 bp, Zea mays
  Clone ID: LIB3118-023-P1-K1-E1
gctggaactgacggagatcagggatgttctgcgctgtattttgcacaccatatgcttccatagaaccctcagcctggttcgccccaaagatgttgactgtgatttcctcgatattacttatgtacaatgtggtctaccggaactagaaaaggaagttgacgaaaagatagaccagttcagtgcatgggtggagaaacacccaaaccgcagaaaccagatcttgctctcctttttcgacgagaaacacagacaccctggttggtttgtcaacaaaacagagcgcatctattgggagcaatggttcatcaatttgcaagtcatgttccccaaaagatacagcaa

SEQ ID NO: 5780 - DNA, 370 bp, Zea mays
  Clone ID: LIB3118-023-P1-K1-E11
cccacgcgtccggttggcttctcctccccctccggttcgggttcgggttcgtgaggttctccggggttcgggttcgtgggtgagcggatcgagatggcggcgtcggatgttgagtaccgctgcttcgtcggcggcctcgcctgggccacggacgaccactccctccacaacgccttcagcacctacggcgaggtcctcgagtccaagatcatcctcgatcgggagacgcagaggtcccgcggcttcggcttcgtcaccttctccacggaggaggcgatgcggaacgccatcgagggcatgaacggcaaggagctggaccgccgcaacattaccttcaacgaggcccagtcccgcggcggccgttgaggct

SEQ ID NO: 5781 - DNA, 187 bp, Zea mays
  Clone ID: LIB3118-023-P1-K1-E12
gaccaactgctataggatatttgagttttcaaatctgctgctgtgagtttcttcttaatataggataaatttgttgactattactcttgacagttttgtggtatgtttaacttgtaatcattcaagagtgttgtaatcatcaagagttataagttaaaaaaaaaaaaaaaaaataaaaaaaataaaa

SEQ ID NO: 5782 - DNA, 380 bp, Zea mays
  Clone ID: LIB3118-023-P1-K1-F1
tcgcggacgcgtgggcgacgacgaggatctcttaaggtgccccagttccctgccacgccctacagctacaagaagtgcgttgttcgagtgaagggggagaaaggaactgctgtgcctccggcggctaggaaaggaggaaggaggcgcctcgtgaacgagcaacagaagtggaagcccaaaggagctgtggacgaggacctctacaagatatccccgcagcttctctgcaagaagaagctcctgaggaatctgctgggagggtgcctgggcctgaactgcatcgcatgaccgagagacgcatcgcttaataagtttctggggagtttgttgttcggtgggtgctctggagagttgtatagtgtctacgcctatatggaatc

SEQ ID NO: 5783 - DNA, 423 bp, Zea mays
  Clone ID: LIB3118-023-P1-K1-F10
gcttctcaaccggataggtagcaccggagcaggtagaacgctgcacaatcccgttcgccgccgccaagatggtgaacgttcctaagaccaagaagacgtactgcaagaacaaagagtgcaagaagcacacactccacaaggtgactcagtataagaagggcaaggatagcctgtctgcccagggaaagcgccgttatgaccgcaagcagtcaggatatggtggtcagaccaagcctgtcttccacaagaaggccaagaccaccaagaagattgttctgaagctgcagtgccagagctgcaagcactactcacagcacgccatcaagagatgcaagcattttgagattggtggagacaagaagggcaagggcacatctcttttctaagcttctcgtccacctgtcttggttgtgagttgaagct

SEQ ID NO: 5784 - DNA, 383 bp, Zea mays
  Clone ID: LIB3118-023-P1-K1-F12
ctgcgacgagacttgatgggctaccgccgctgcgcttcgccaggtgctgacgggttcgccgatctcttcgccggcgatagcactcaccaggaatgggcctgtggacattgctggagggttttttgcttctcgcaaatgcgttggcgatattgaacgaagaccgcttccttggtccaaggggatggagcatgtctgaagtctcaggaaacgggcaaaccaagtcgttcaagggccagatcgtggggcttatctacgctacgcagtttctgcggatgcccttaattgctctcaatgttctcatcatcggtgtcaaattggtgtctggctgagcctgatgaatcggtatctgtttcacctttatgtaaaagctaagagatcccaaa

SEQ ID NO: 5785 - DNA, 409 bp, Zea mays
  Clone ID: LIB3118-023-P1-K1-F2
cccacgcgtccgggcacaacaactacaacaacttgtgctaggaaaccttgctgggtactctcagcaacagcagtttcttccattcaaccaactggctgcattgaactctgctgcttatttgcaacaacaactaccattcagtcagctagctgctgcctacccccagcaatttcttccattcaaccaactggcagcattgaactctgctgcttatttacaacagcaacaactaccaccattcagccagctagctgatgtgagccctattgccttcttgacacagcaacagttgttgccgttctacctgcacgctgcgcctaacgctggcaccctcttacaactgcaacaattgctgccattcaaccaacttgctttgacaaacccaacagcgttctaccaacaacccatc

SEQ ID NO: 5786 - DNA, 364 bp, Zea mays
  Clone ID: LIB3118-023-P1-K1-F3
acccacgcttcgcccactcattcgtcacaacatcttcaacaacttgtgctaggaaaccttgctagcgactttcaacatcattaataactttcattcaaccaactggctgtattgaactctgctgcttatttgtaacaaccactaccattctttcagcttgctgctgcctacccccagtaattttttccattcaaccaacttgcagtattgaactttgctgtttatttacaacaggaacaactaccaccattcaatcaactagcttatttgagccctattgccttattgacacagcaacagttggtgccgttcctaccctgcacacatcacccaaagcagatcccccttttacaactgcaacaat

SEQ ID NO: 5787 - DNA, 405 bp, Zea mays
  Clone ID: LIB3118-023-P1-K1-F6
tcgcggacgcgtgggggcgatggataagcataatgacaccagcatcttggtcctggtgcaggagtgtttctgcgaggggctcataaccatcaaccagatgaccaaaggctttgcccgtgtcaaggaaggccttgatgatctgatcctcgacatcccaaatgcccaggagaagtttggagagtatgtggagctggcaacagagcgcgggtggctgctgccgacctttgcctccgttccctgagcatccaccactggcgatacctttcttatgtgtacatttgtgcccatgatgtcattagctccgtaccaaagttttcctattcctagtttacttatggtaccgtatactggaggatttgaagatggatgttgggtccgttgttgagataagtttctattggtcta

SEQ ID NO: 5788 - DNA, 349 bp, Zea mays
  Clone ID: LIB3118-023-P1-K1-F8
gttgcaccgattcctgattttggagtgtaaagtttgtataacctagtgttatgtgttatgcaccagttatatgctgagtgccatgttttttgcggtttgctactgtatcacagcgagccgacattttacaacagttatatgtaatgttctgtagtgatacaatagtgcctattctgggtgatatgtatttttttccctgtaggaaatttgctgctgtcgagggcatcctcgcaatttgttttaaaaaaaaataatgggagccctataggcttttttacaaaaaaacaagttgttagatttattaccatgatgctgagcctaaagtttaaaaaaattttggggcggccgc

SEQ ID NO: 5789 - DNA, 132 bp, Zea mays
  Clone ID: LIB3118-023-P1-K1-F9
gttgcaccaattcctgattttggagtgtaaagatagtataacctagggttaacgacgatgcaccagttatatgctgattgccacgttatttgcgaggtgctactgtatcacagtgagccgacattctacaac

SEQ ID NO: 5790 - DNA, 404 bp, Zea mays
  Clone ID: LIB3118-023-P1-K1-G11
tcgcgcatgcatggtctgcagaggcgaccctcgccggagccaaggcggcagcggtggcgactatcgccttcgcgatccccaccctggccagcgtgcggatgctgccatgggccaaggccaacatcaaccccaccggccaggcgctcatcgtctccacggtggctgggatggcctacttcatcgccgccgacaagaagatcctgtcgctggcgaggcgccactcgttcgagcaagcccctgagcacctcaagaacaccttctttcagggcaccggccgtccccacccagccttcttcaagccgtgagacgagacctccgttcagagctagctacctaacctttttttcagtttgccaatgcaagcaccaaatgcccaccgatgcatgcctgaataaactactgta

SEQ ID NO: 5791 - DNA, 241 bp, Zea mays
  Clone ID: LIB3118-023-P1-K1-G12
gtggatcaccggccgaagaacaaatctctcgagggactgcaggccaatgttcagaggcttaaaacgtacaaggccaagctggttatcttcccaaggcgtgctcgcaaggccaatgcccgcgactttactccggaggagcttgccacggccacccaagtgcagggtgactacatgcctattactcgtggtgaggagcgctcaatcgaggttgtgaaagctactgatgagatgaagtcgtttg

SEQ ID NO: 5792 - DNA, 420 bp, Zea mays
  unsure at all n locations
  Clone ID: LIB3118-023-P1-K1-G2
atcgagtacagtcggctaggtaatctggtggtacgacgacatggcggccaccagcagcaagtcgtcgtcgtcctcgagctcggcgcagcgggcagctgccgcactgctcgtggccgccgccgtggcggtgtccgtcctggtggtgggcgcggcggcggtgtgcgacatgagcaacgagcagttcatgtcgtgccagcccgcggcggccaagacgacggacccgccggccgcgccgtcgcaggcgtgctgcgacgcgctggcgggggcggacctcaagtgcctgtgcggctacaagaactcgccgtggatgggcgtctacaacatcgaccccaagcgcgccatggagctttcggccaagtgcggtctcgccacgccgnccgactggtagcagtgtgctagccaagccaagccaagcaggaa

SEQ ID NO: 5793 - DNA, 419 bp, Zea mays
  Clone ID: LIB3118-023-P1-K1-G3
cagaaacacaccaagcgaagcgcactagcaacaacctaacaacaatggctaccgagatattatcccttcttgcgcttcttgcgctttttgcgagcgcaacaaatgcgtccattattccacaatgctcacttgctcctagttccattattccacagttcctcccaccagttacttcaatggccttcgaacacccagctgtgcaagcctataagctacaacaagcgattgcggcgagcgtcttacaacaaccaattgcccaattgcaacaacaatccttggcacatctaacaatacaaaccatcgcaacgcaacagcaacaacagttcctaccagcactgagccacctagccatggtgaaccctgtcgcctacttgcaacagcagctgcttgcatccaacccacttgctctagcaaacgta

SEQ ID NO: 5794 - DNA, 419 bp, Zea mays
  Clone ID: LIB3118-023-P1-K1-G4
cccacgcgtccgcacagggtaccaggattgcttctgagggtctgaagcacagagtctttgaggtttgcctagctgatcttcagggcgacgaggatcaagcttacaggaaaatcaggctccgtgctgaagatgtgcagggcaggaatgtgctcacaaacttttggggtatgaattttaccactgataaactgagatccctagtgaagaagtggcagacattaatcgaagcccatgttgatgtcaagacaaccgacaactacatgttgcgtttgttctgcatcggcttcacgaagaggcgcccaaaccaggtcaagagaacctgctatgctcaagcatcccagatccgtcagatccgccgtaagatggttgagattatgatcaaccaggcttctacatgtgacctgaaagaacttgtttcg

SEQ ID NO: 5795 - DNA, 124 bp, Zea mays
  Clone ID: LIB3118-023-P1-K1-G5
cccacgcgttcgtccacgcgttcgcccacgcgttcgcccacgcgtgcgcccacgcgtacgtccacgcgttcgaccacgcgtccgtccacgcgtccgtccacgcgttcgtagttctagatcgcga

SEQ ID NO: 5796 - DNA, 178 bp, Zea mays
  Clone ID: LIB3118-023-P1-K1-G6
tgcatgcatggtctacttaggccacccttgccgttagccaaggaggcagatgtggagactatccccttcgcgatccccacccttgccagagtgcgagtgctgccatgggccaaggccaacataaaccccgccgggcaggggcataatgcctacaaactaggtgggattgactacatta

SEQ ID NO: 5797 - DNA, 424 bp, Zea mays
  Clone ID: LIB3118-023-P1-K1-G7
ctattttcgtctcctccccacagcagcccggcgaaaaccctagtaagcaaaccagcggagcagcggcgcttgcgcgggcggagccatggcggacgacgattacaacgaaattgacatggggtatgaggatgagcccccagaaccggagattgaggaaggagctgaagaagagcctgagaacaacgaagatgcccctgatgacgtcataggtggtgagggtgaagataaggaacaggaaaagaccaagcgtgaacgcaaaacaacaaaatacatgacgaagtacgaacgtgcgcgcattctgtgtacacgagccttgcagataagcatgaatgctccagtcatggttgagcttgagggtgaaactgaccctcttgagattgcaatgaaggagctgagagcgcgcaagatacccttcacgatcaga

SEQ ID NO: 5798 - DNA, 363 bp, Zea mays
  Clone ID: LIB3118-023-P1-K1-G8
attggtaaggagattgagaagtctacctccagcatcttcccacttcaaaacgtgttcatccgcaaggtgaagatactcaaggcccccaagttcgatcttgggaaactcatggaggttcatggcgactacaaagaggatgttggtgtgaagcttgagaggcctgtcgagggagatgaggctgggcaggaggttgctgctgccgagtagtttgtttgctacttctgtatctaggcgagtctggacatgaggttgcttatgacgtgaacttatagagttgtcttggctacgtgttttcatctggccctaagattttgtcttgaaacaagtttaaaattaagattactcgtggcgatcttctgtgtt

SEQ ID NO: 5799 - DNA, 174 bp, Zea mays
  Clone ID: LIB3118-023-P1-K1-G9
ctgtgtttttgattgcaaggtcgctctgtgtcagttgttagtgctgtgttcatcctcggtttcagcagacccatgcatcaaacagcatggactgcggatcgatggatgctgttacccccgtcaggctttattctaagttaatcttaaggaaaaaatggtgcttcttggtgctgc

SEQ ID NO: 5800 - DNA, 264 bp, Zea mays
  Clone ID: LIB3118-023-P1-K1-H10
ttttaaggatgggtttatctattaatacttttcagagggaaagctacaaatcaacccttcttgggcattatcaattggataatatccctgtagatgtattttattgctgggcacatgctttttgaggtggcacaaaccttggccggtaccacaaagttgggttaagggattgttagctaacccattggtttactgggggaagggccctttgattgtgtggttaattttattttctgcaccccaccttttttggggtaatttttt

SEQ ID NO: 5801 - DNA, 384 bp, Zea mays
  unsure at all n locations
  Clone ID: LIB3118-023-P1-K1-H11
cccacgcgtncggaaggttgaaagttatatgcaaatcgtgttttcagtatcagcctttactcttttcctccccgttgtcaccaatttcctagtacctccctccggggagaaaggcggcagcatttcgttaggaggctgcttacagcttcttggtttctgtacctttgagtcatgtgttggtatattttggccatcaatcatgaagatgagatctcaatatattcccgaggaggcaagaagcacaatcatgaatttttttcctataccgctcaacctgtttgtttgcgtggtactatacaatgtgaatgcattcccaataactgtcatgttccgcatgtgctccattttcttctcatggcaacagtcttgcaagaggcgcttaat

SEQ ID NO: 5802 - DNA, 352 bp, Zea mays
  Clone ID: LIB3118-023-P1-K1-H12
gtggaagaagaagcgcatgaggaggctgaagaggaagcgccgaaagatgaggcagagatccaagtaggctgatggggattgtggatggtggtgtcggcatagttgtgttacgtttcttcgatgcgtgagttcatggagagatgtcacatcctagttcgtcgtcaccgtttgccatgggtccaatggctcgtcttggaaacctgcacttcagtaggccatctatcgtggtttctagctatatccagagttttgtgctaagacaaatcagtcagtcgttttgtgaacctattatgatggagctttatttgctgctaatatcgacctacctgttaagtaattgcaacgttcgtct

SEQ ID NO: 5803 - DNA, 404 bp, Zea mays
  Clone ID: LIB3118-023-P1-K1-H5
attctgacaatatagtcaaggtgtactcaacttcaatggcaatgcttttaacgatggttttatctatatatcttttcagtgtgaaagctacaattcagctcttcttgggcattatcatttgtataatttccctgcagatgtattttatgcctgtgcacatgcttattgagttgccacaaactttgcctgtaacatcaaagtaggttcatggcattgttagctaacccattgatcagctgagggtagggcactgttgattgagtggttaattgactatctgcagcccagctctatttgagtcatatatttggagatttatggttgtaatctcaacagctatggatatagacagctaggttagtttcatgttgcaagaaaggtgaatcaactgtcaagtgagcatg

SEQ ID NO: 5804 - DNA, 420 bp, Zea mays
  unsure at all n locations
  Clone ID: LIB3118-023-P1-K1-H7
agagaccacaagactgcctttgatatagctgaagggttaccagtatgtgaggagtcttgcgaaattaaggatattttatctcaacatggtgcgctcagatccagggagctcaatcagccacgagatgagctacggaagacagtgacagagataaagaaagatgtccacacacagctggaacaaacaagaaaaaccaacaaaaatgttcatggcattgctaaagaattcaggaagttgcacagagaaggcatcaacaacgctacaaactctgtaactgttgttgctgtgctgttcgcaacagttgcttttgcagctatattcaccgtacctggtggaaatgacaataatggacttgcagttgttgtccagactacgtnctttaagatattcttcatcttcaatgctggggctctatttaca

SEQ ID NO: 5805 - DNA, 375 bp, Zea mays
  unsure at all n locations
  Clone ID: LIB3118-023-P1-K1-H8
gtctctgagctggagttgctcatgatgcacaacagaacctactgtgccgagatcgcccacaacgtttcaaccaagaagcgcaaggagattgttgaacgtgccgcgcagctcgacattgtggtcaccaacaagctcgccaggctccgcagccaggaggatgagtagtctggtttcttgtcacaacggccaaatagatcctgccattcccggctgtaggaaactactctgctttgtgccttgttagtacttagaataccagacatttctacatttttggtaccagtagcgacttctatgtggcnnattaaaaaaatatataattcattaattttttaatttaaattaatttttatataattttattattataattat

SEQ ID NO: 5806 - DNA, 374 bp, Zea mays
  Clone ID: LIB3118-023-P1-K1-H9
cggacgcgtgggttggcttctcctccccctccggttcgggttcgggttcgtgaggttctccggggttcgggttcgtgggtgagcggatcgagatggcggcgtcggatgttgagtaccgctgcttcgtcggcggcctcgcctgggccacggacgaccactcccttcacaacgccttcagcacctacggcgaggtcctcgagtccaagatcatcctcgatcgggagacgcagaggtcccgcggcttcggcttcgtcaccttctccacggaggaggcgatgcggaacgccatcgagggcatgaacggcaaggagctggacggccgcaacataaccgtcaacgagggccagtcccgcggcggccgtggaggcggcggc

SEQ ID NO: 5807 - DNA, 292 bp, Zea mays
  Clone ID: LIB3118-024-P1-K1-A1
cccacgcgtgcggacttatccggttctcccttcttcatagcagccacccacgcatctcagcgccgaggcgagcgaggacctcgtggttcgtgccctgctcacctcgtgaggatgtggatcgcgaggcggctcttcctcgcggcggcggcgctgctgatggctgtgcttctgctcgtcgcggggccggtggcggcgcacgacgcggcggtggagggcgtggccccgcctgcggaggagatcgcggcgaacgcgagggccaaggaaggcggggttctggccggcgagctagtgc

SEQ ID NO: 5808 - DNA, 253 bp, Zea mays
  Clone ID: LIB3118-024-P1-K1-A10
cccacgcgtccgcccactcgttcgcccacgcgttcgtagtggatgagctaatgcggaacgtgcataacaagatctctttctactttgtggagtggatccctaacaatgtgaagtcgtgtgtgtgtgacatcccacctattggtctgaagatgttcttcatattcattggctactagtctcttcatccaggagaagtttcggcgcgttagcgagcatttcatttgcatgtttaggaggaaggcctttttgcatt

SEQ ID NO: 5809 - DNA, 223 bp, Zea mays
  unsure at all n locations
  Clone ID: LIB3118-024-P1-K1-A11
cggacgcgtgggggaacgcagtaccaaagatgcgaggaacagccagttttgggctgtataattttgcgagatcagatgagtgttaatttattattattattattgtttggaccaggatggaaagaaagaagccatggattttacccttgggcgaccagcttattttgctggaggccccagatgaacaaggctaaatatatgatgttttcgtgtcananaaaaa

SEQ ID NO: 5810 - DNA, 302 bp, Zea mays
  Clone ID: LIB3118-024-P1-K1-A12
cccacgcgtccggtgaaggactccaatgtgcctgctgcacttgatggaaatcctcaacctatggaccaaactgaagacaattctatgccctcagcacagcaacaggaagaagcaatcaagaagaagtttggaggactaatgcccaaaaagcccccactcatctcaaaggatcatgagcgggcctactttgattctgctgactgggctctagggaagcaaggtgttgccaaaccaaaaggaccgctggaggcacttaggcccaagcttcagccaacacgccaacaacagcaacaacgtgcaag

SEQ ID NO: 5811 - DNA, 206 bp, Zea mays
  unsure at all n locations
  Clone ID: LIB3118-024-P1-K1-A2
gaccggnccggaccgggaggaccgacgcgcgcgcccgcttgggcaccatggtcaccacagaaactgagaagagtgggcgcacggagaagggcgcgcatgttgccgagcagagcaagaggccattagagcatggaccccagagcggaagctacaaggaggcagcaaactgatgatatcgcaagaaggaagcgctcgacgcagcctat

SEQ ID NO: 5812 - DNA, 296 bp, Zea mays
  Clone ID: LIB3118-024-P1-K1-A3
cttgcttgtgctccaaggtcaccaaagaaactgagaaggttgtgtgcatggagaaggttgtgtatgttgctgagcagtgtaagaggccatttgagcatggcttccagtgcggaagctacaaggttccagcaaactgatgatatcgcaagagggaagcgcttgacgtagtctttagatttcaattgttgcagccgatcaaccttcttagggttgtataatatgaagtcaatgttgagactaatgtgaggtgggagagggcctattgatgcatcaaaagtattatgagctaataataa

SEQ ID NO: 5813 - DNA, 209 bp, Zea mays
  Clone ID: LIB3118-024-P1-K1-A4
cttgcttgtgctacacggtaaccaaagaaactgatatggttgtgtgcatggacatggaagagaatgatgctctgcactgcatgaggccataatagcgtgaactccagtgtataagctacatgggggccagcggaaccatgatacctcatgagggctgcgctagacgtagtgtaccaatattaagtgtggcggtcatgcaagcccgtgta

SEQ ID NO: 5814 - DNA, 320 bp, Zea mays
  Clone ID: LIB3118-024-P1-K1-A5
tctaattgtcccatacatcacaagatcgtcaagctatcatcatggaacggaacatgcaacaaaggcatcgactgtacttcatggtgctgaaataggggcaacaactgactatactcacctgttggttggtgggaccactaaacctcctacatccttgcaaatacgtagtgaaccaatattatgtttgctggaaatggtgcgcgtgttgaagatgcctacagttcttcttgtcacttctggtggacagcagcaaggcaagagctctacagtttctgatcttgaggtactgcaaagcttaagagagcacttgcccaacacac

SEQ ID NO: 5815 - DNA, 296 bp, Zea mays
  Clone ID: LIB3118-024-P1-K1-A6
ttccccttttgtctatagaagaaaaaccctgtgcgtcaattgtacgccacctgactgcaaaaactctatcttcagcttgtcgctttcctcacaaacagcttttgaacctgctccaatgtcaagaacataatcacattccaagatcccagtcttgcaaagtttggcaggaagcctttgtaaaatgccaaagggccatcattctttagcgtcttcacaaaacaatcgagagtgcttttgtaggctgagtcacccatcattctcgacttaaccacatggactgcggatcgatggatgct

SEQ ID NO: 5816 - DNA, 210 bp, Zea mays
  Clone ID: LIB3118-024-P1-K1-A7
ctgggggatactaattgaaacaaatgttagtattattcgtggaacagattaagacaataaggttgccccgccgcatggtgattaacttattgtttgggcaacaaaattccatgtaattctgcacctgtacaactatgttggacgcagaacattttattgagttttgtgattacatgggaatacataggttgaggcaaacggtcctacttt

SEQ ID NO: 5817 - DNA, 227 bp, Zea mays
  Clone ID: LIB3118-024-P1-K1-A8
ctcgaatcccccgcctcgcattcggctcgccgtcgctcctcctccgcgtcccgccaccctccgcacgcacaagtttactatgtctgggatggcatctgatgattcacctgcccaagtgaatgttgaaggagatgtttcagagaaaaaagtagaagttcaagaccagaatgaagtgggtgggatgccctcacgacaagaggaggaggcagcaattaagaaaaagtatg

SEQ ID NO: 5818 - DNA, 275 bp, Zea mays
  Clone ID: LIB3118-024-P1-K1-A9
cccacgcgtccgcccacgcgttcgcccacgcgtccgaagtggatgagcaaatgctgaacgtgcagaacaagaactcttcctactttgtggagtggatccctaacaatgtgaagtcgagtgtgtgtgacatcccacccatcggcctgaagatgtcctccacattcatcggcaactcgacctccatccaggagatgttccgccgcgtcagcgagcagttcactgccatgttcaggaggaaggcctttttgcattggtacacgggtgagggcatggat

SEQ ID NO: 5819 - DNA, 115 bp, Zea mays
  Clone ID: LIB3118-024-P1-K1-B1
caacaacccatcattggtggtgccctcttttagatttcttatgagttatagttcaataataaagttttttgtctgatgcttgtggcttcccagaaataagaaagtacatttctag

SEQ ID NO: 5820 - DNA, 311 bp, Zea mays
  Clone ID: LIB3118-024-P1-K1-B10
cgttctcgtcgtgtgcctggctctgtcagctgccagcgcctctgcaatgcagatgccctgcccctgcgcggggctgcagggcttgtacggcgctggcgccggcctgacgacgatgatgggcgccggcgggctgtacccctacgcggagtacctgaggcagccgcagtgcagcccgctggcggcggcgccctactacgccgggtgtgggcagccgagcgccatgttccagccgctccggcaacagtgctgccagcagcagatgaggatgatggacgtgcagtccgtcgcgcagcagctgcagatgatgatgc

SEQ ID NO: 5821 - DNA, 300 bp, Zea mays
  Clone ID: LIB3118-024-P1-K1-B11
aacaacagttgctgcaacaaattgtaccagctctgactcagctagctgtggcaaaccctgctgcctacttacaacagttgcttccattcaaccaactggctgtgtcaaactctgctgcgtacctacaacagcgacaacagttacttaatccattggcagtggctaacccattggtcgctaccttcctgcagcagcaacaacaattgctgccatacaaccagttctctatgatgaaccctgccttgcagcaacccatcgttggaggtgccatcttttagattacatatgagatgtactcga

SEQ ID NO: 5822 - DNA, 311 bp, Zea mays
  Clone ID: LIB3118-024-P1-K1-B12
ctctcctgcttatttacagcagcaacaactactaccattcagccagctagctggtgtgagccctgctaccttcttgatacaaccacagttgttgccgttctaccagcacgctgcgcctaacgctggcaccctcttacaactgcaacaattgctgccattcaaccaacttgctttgacaaacccagcagcgttctaccaacaacccatcattggtggtgccctcttttagatttcttatgagttatagttcaataataaagttttttgtctgatgtttgtggcttcccagaaataagaaagtacatttctag

SEQ ID NO: 5823 - DNA, 268 bp, Zea mays
  unsure at all n locations
  Clone ID: LIB3118-024-P1-K1-B3
cataaatgattagcatttgctccactgaggtggatggttgtgatgaaatctgttggtnttgaaaaaaaaaaaaaaaaaaaaaaaaaaaaaaaaaaaaaaaaaaaaaaaaaaaaaaaaaaaaaaaaaaaaaaaaaaaaaaaaaaaaaaaaaaaaaaaaaaaaaaaaaaaaaaaaaaaaaaaaaaaaaaaaaaaaaaagccccccccctataaagaaccaaatttaaccaccccgtccatccaaaaaaaaacctttttaaagggcccccc

SEQ ID NO: 5824 - DNA, 118 bp, Zea mays
  Clone ID: LIB3118-024-P1-K1-B4
cctaagtgattagcatgtgctccactgaggcgtgtggtggtgaggaaatctgtggggagggcaaggtccttgtaagaaggacacagtgggtctacattgtatacgcagatacgccagg

SEQ ID NO: 5825 - DNA, 311 bp, Zea mays
  Clone ID: LIB3118-024-P1-K1-B5
accttgtacattagttcaaacacgccggccgcagtcccgttccggctgactgtgccaagaacatttctcttgtcgcacgggcacagtaagtcaacgctctacacgcctagacgccttgtgcggactgcatagttgcagcccatatggccagccgccggcctgaaagctgtcatcagatcagtaccatgtccctctatctgtccgagccagctggtgaggagggaagcaacaccgacggtaggatggaggtaggcgagtgcaatagcatcgactacggcgccttcagatactgtgacgcccgctactccttc

SEQ ID NO: 5826 - DNA, 276 bp, Zea mays
  Clone ID: LIB3118-024-P1-K1-B6
accttctacattcgttcaaacacgccggccgcagtcccggtcccgctgactgtgcgaagaacatctctcttgtcgcacgggctcatcaggtctacgctctacacgcctagacgccttgtccggcctgcaaagttgcagcccaactgcccagccgccggcctcaaagctctcatcagatcagtaccctctccctctatcttcgcgagccagctgataaggagggaagcaacaccgccgataggacggaggtaggcgagtgcacgagcatcgtctacg

SEQ ID NO: 5827 - DNA, 126 bp, Zea mays
  Clone ID: LIB3118-024-P1-K1-B7
accaataaatggtggcgccctctcttatatcagttatgagtcatagtgcaaggagaaagttatttgtctgatgctaggggcttaccagaaataagaaagtacatctctagaaaaaaaaaagaacag

SEQ ID NO: 5828 - DNA, 210 bp, Zea mays
  Clone ID: LIB3118-024-P1-K1-B8
cacagatgttgtattcactcttgatgatggtactggcaagatagatgtgaatcgctgggaaaatgaggcttccgatgctaaggagatggctgatgctaataacgagaactatgtcatagtcattggcggtttgaaaggttttcaaggaaagcgccatgtagttgcctatgctgtgcggcgtgtgacaaacttcaatgaaataacctgtca

SEQ ID NO: 5829 - DNA, 138 bp, Zea mays
  Clone ID: LIB3118-024-P1-K1-B9
accaacagatgatggatggagtcctgatgaagatactggaagaataaatgtgaagtgataaagaaatgaggctgacgatgctgacgtgacagatgtagctaagtacatgaactgtgtcatagacattggcggggggga

SEQ ID NO: 5830 - DNA, 115 bp, Zea mays
  Clone ID: LIB3118-024-P1-K1-C1
caacaacccatcattggtggtgccctcttttagatttcttatgagttatagttcaataataaagttttttgtctgatgtttgtggcttcccagaaataagaaagtacatttctag

SEQ ID NO: 5831 - DNA, 316 bp, Zea mays
  Clone ID: LIB3118-024-P1-K1-C11
agcgaggcgtgattcgccatgggcggcctcactatggaccaggccttcgtgcaggcccccgagcaccgccccaagcccatcgtcaccgaggccaccggcatccctctcatcgacctctcgcctctggccgccagcggcggcgccgtggacgcgctggccgccgaggtgggcgcggcgagccgggactggggcttcttcgtggtcgtgggccacggcgtgcccgcagagaccgtggcgcgcgcgacggaggcgcagcgagcgttcttcgcgcctgccgcagagcggatggccgccgtgcggaggaacgaggccgacc

SEQ ID NO: 5832 - DNA, 214 bp, Zea mays
  Clone ID: LIB3118-024-P1-K1-C12
cgcgaggggtgattcgccatgggcggtcttactatggaccaggccttcgtgcaggcccccgagcaccgccccaagcccatcgttaccgaggccaccggcattcctttcatcgacctctcgtctttggccgccagcggcggcgccgtggacgcgctggccgtcgatgtgggctcggcgagccgggactggggcttctttgtgggcgtgggccacg

SEQ ID NO: 5833 - DNA, 115 bp, Zea mays
  Clone ID: LIB3118-024-P1-K1-C2
caacaacccatcattgggggcgccctcttttagatttcttatgagttatagttcaataataaagtgctttgtctgatgtttgtggcttcccagaaataagaatgtacatttctag

SEQ ID NO: 5834 - DNA, 300 bp, Zea mays
  Clone ID: LIB3118-024-P1-K1-C4
cccacgcgtccgggttgcaatgttctgccccatgatatgtcgtgaaattgtgaaaaatggcacagggtcgtccaaaaatcatgctattgcgctccctgaaagagttaatccagccagtttgagtttgattcttgactactgccggtttcatcaggttactgggcgctcaaacaaggagcggaagtcctttgatgaaaaatttgttaggatagaaacagaaagactctgcgaattgacttctgcagctgacagtctacagctaaagccacttgttgatcttactagtcgagctcttgctcg

SEQ ID NO: 5835 - DNA, 295 bp, Zea mays
  unsure at all n locations
  Clone ID: LIB3118-024-P1-K1-C5
cccacgcgtccgcccacgcgtccgcccacgcgtncgcggacgcgtgggattgggtacaagatcgggacgatgattgagattcccagggcagctctagtggctgacgagatcgcggagcaggctgaattcttctcctttggaacgaacgacctcacgcagatgacctttggctacagcagggatgatgtggggaagttcatccccatttatctggctcagggcatcctccagcatgaccccttcgaggttctcgaccagagaggagtgggcgagctggttaagcttgctacagaga

SEQ ID NO: 5836 - DNA, 246 bp, Zea mays
  unsure at all n locations
  Clone ID: LIB3118-024-P1-K1-C6
cccacgcgtccgnttttttttttttttattttttttttgtcgcgtgggattgtgtacatgatcggtacgattattgatatttccagtgcagttctagtggctgacgagatcgtggagcatgctgtattcttctaaaaagaaaaaaaaaagtgtctcaaaagacctttggctccacaaaaatgacgtaggggggttcatccctttttataccaccaatggcataatacattttgaaaacttttaaat

SEQ ID NO: 5837 - DNA, 114 bp, Zea mays
  Clone ID: LIB3118-024-P1-K1-C7
acgaccacgcgtccggtggcgccctcttttacatttcttatgactcatagttcagtaatcaagatctttgtctgatgtttgaggctccccagaaataagaaagtacatttctag

SEQ ID NO: 5838 - DNA, 117 bp, Zea mays
  Clone ID: LIB3118-024-P1-K1-C8
cacagaagttggattcactcttgatgatggtactggcaagaaagatgtgagtggtgtgggaaaatgaggcttgcgatgctaatgagacggctgttgctaataacgagatctatgtca

SEQ ID NO: 5839 - DNA, 240 bp, Zea mays
  Clone ID: LIB3118-024-P1-K1-C9
tggcgaagcaagtgagagaagaaatagctgtccaagtcaccaggatgaaggatgtgatcggcattgtgcccggcctggctgtcatccttgttgggtcgaggaaggattctcagacttacgtgcggaacaagaagaaggcgtgcgaagcggtcggtataaagtcgtacgaggtcaacttgcctgaggacagctctgaggaggaggttatcaagcacatagcgagtttcaacagtgacccgt

SEQ ID NO: 5840 - DNA, 271 bp, Zea mays
  Clone ID: LIB3118-024-P1-K1-D1
aactagcaacatagaaagcacactagtgtaccaacaatggcagccaaaatattgtgcctccttatgctcctcggtctctctgcaagtgctgctaccgcgaccattttcccgcaatgctcacaagctcctatagcttcccttcttcccccgtacctctcaccagcggtgtcttcggtatgtgaaaacccaattcttcaaccctatatgatccaacaggcaatcgcaggtggcatcttacctttatcacccttgttcctccaacaatcatcag

SEQ ID NO: 5841 - DNA, 109 bp, Zea mays
  Clone ID: LIB3118-024-P1-K1-D10
agcgaggcttaattcgacatggcctgtctcactatggaccattctttcttgcgggccctgaataaccgcctcatgcccatcttttccgaagccaccggcatccctattt

SEQ ID NO: 5842 - DNA, 250 bp, Zea mays
  Clone ID: LIB3118-024-P1-K1-D2
aactagcaacatagaaagcacactagtgttccaacaatggcagccaaaatattttgcgctccttatgctccttggtctctctgcaagtgctgctaccgcgaccattttcccgcaatgctcacaagctcctatagcttcccttcttcccccgtacctctcaccagcggcgtcttcggtatgtgaaaacccaattcttcaaccctatatgatccaacaggccatcgcagctggcatcttacctttatcaccc

SEQ ID NO: 5843 - DNA, 326 bp, Zea mays
  unsure at all n locations
  Clone ID: LIB3118-024-P1-K1-D3
gcaggaggttgggtatgtgactaccatatgcttttcttgtttcttgatcagatgcgtcatgatgtgccttaatgcgtttgataaagcagcagatcttgatgttctgaaccatccaatcctgaacttcttctattacctgctggttgagatagtgccttcagctctggtgctcttcattctacggaaactgcctccaaagcgtgggatcacacaataccacccgatccattagagagcaggccttgtgaacaggcaaaggttntctggtggatagtgttacacaacgtggtaaatacagaagggagagtgaaaggtaccactcgagc

SEQ ID NO: 5844 - DNA, 327 bp, Zea mays
  Clone ID: LIB3118-024-P1-K1-D4
gcaggaggttgggtatgtgactaccatatgcttttcttgtttcttgatcagatgcgtcatgatgtgccttaatgcgtttgataaagcagcagatcttgatgttctgaaccatccaatcctgaacttcttctattacctgctggttgagatagtgccttcagctctggtgctcttcattctacggaaactgcctccaaagcgtgggatcacacaataccacccgatccattagagagcaggccttgggaacaggcaaaggttttctggtggatagtgttacacaacgtgggtaatacagaagggagagtgaaaagtaccactcgagct

SEQ ID NO: 5845 - DNA, 226 bp, Zea mays
  Clone ID: LIB3118-024-P1-K1-D5
gagtgtgtatgtgactaccatagctctctgttccagacagtgcgggtgactgccttaacgcatcgataaaacagtatcttgatgttgaccatcaatctaacttttctattacctgctgttgagataggccttcagcttggtgctttattctacggaaactgccttcaaaggtggatcacacataccacccatccattatagtacagccttgtaacaggcaaaggtt

SEQ ID NO: 5846 - DNA, 294 bp, Zea mays
  Clone ID: LIB3118-024-P1-K1-D6
ggcaaagaaagaaatttggtccattgaaataaggttccaagatacagatcataatcttttcgaaaacattgctaaagcacaaatggtgacatgcttcctctggctctcaaggtttgatgtgaaactttccatgtttacttctcgtaaatccaggggtgctggctgctctgccaatcagcagggccctcggggaaccacagggcaatctccttattagcactctcaatgctgtcacttccatgaatgactttgctgtcgacattggcaggaatgtcattcatgggaagtgacagc

SEQ ID NO: 5847 - DNA, 242 bp, Zea mays
  Clone ID: LIB3118-024-P1-K1-D7
ggcaaagaaagaaatttggtccattgaaataaggttccaagatacagatcataatcttttcgaaaacattgctaaagcacaaatggtgacatgcttcctctggctctcaaggtttgatgtgaaactttccatgtttacttctcgtagatccaggggtgctggctgctctgccaatcagcagggccctcggggaaccacagggcaatctccttattagcactctcaatgctgtcactttcatg

SEQ ID NO: 5848 - DNA, 294 bp, Zea mays
  unsure at all n locations
  Clone ID: LIB3118-024-P1-K1-D8
gcaaagcagaagttgcggttggcctcgtcctcctcttctccgtcgcggctcagatctctgcgtgcgtcgatggcgtcgttctcggaggctccccccgggaacccgaaagccggcgagaagatctttaagaccaagtgcgcgcagtgccacacggtcgacaagggcgccggccacaagcaaggtccaaacttgaacggtctttntgggagacagtcgggtaccactgcaggctactcctactctgcgggaaacaaaaacaaggctgtagtctgggaagaagacactttgtatgag

SEQ ID NO: 5849 - DNA, 296 bp, Zea mays
  Clone ID: LIB3118-024-P1-K1-D9
gcaaagcagaagttgcggttggcctcgtcctcctcttctccgtcgcggctcagatctctgcgtgcgtcgatggcgtcgttctcggaggctccccccgggaacccgaaagccggcgagaagatctttaagaccaagtgcgcgcagtgccacacggtcgacaagggcgccggccacaagcaaggtccaaacttgaacggtctttttgggagacagtcggttaccactgcaggctacttctactctgcgagaaacaaaaacaaggctgtagtctgggaaggaagacactttggtatgag

SEQ ID NO: 5850 - DNA, 348 bp, Zea mays
  Clone ID: LIB3118-024-P1-K1-E1
ggcttctcctccccctccggttcgggttcgggttcgtgaggttctccggggttcgggttcgtgggtgagcggatcgagatggcggcgtcggatgttgagtaccgctgcttcgtcggcggcctcgcctgggccacggacgaccactccctccacaacgccttcagcacctacggcgaggtcctcgagtccaagatcatcctcgatcgggagacgcagaggtcccgcggcttcggcttcgtcaccttctccacggaggaggcgatgcggaacgccatcgagggcatgaacggcaaggagctggacggccgcaacatcaccgtcaacgaggcccagtcccgcggcggccgt

SEQ ID NO: 5851 - DNA, 269 bp, Zea mays
  Clone ID: LIB3118-024-P1-K1-E10
cggacgcgtgggttcgattagtacggggaaagaagaagaagaagaagcccaggccggagaaccatcgcctgcatttcgatctgtttcaccgcaattcgcattgttagtcgtgtattggagttatgtgtacttggtttccaagaactttggttccttctcgttttttttccttgtttgagcgtttttgggcagcgctggcctggttcctagtatggtgggaattggctgcaccttttgcttcgaataaaaatgcctgctcgttcacctgt

SEQ ID NO: 5852 - DNA, 302 bp, Zea mays
  unsure at all n locations
  Clone ID: LIB3118-024-P1-K1-E11
cggacgcgtgggttcgattagtacggggaaagaagaagaagaagaagcccaggccggagaaccatcgcctgcatttcgatctgtttcaccgcaattcgcattgttagtcgtgtattggagttatgtgtacttggtttccaagaactttgcttccttctcgttttttttacttgtttgagcgtttttggacagcgctggcctggttcctagtatggagggaattggctgcaccttttgcttcgaataaaaatgcctgctcgttcacctgtcaganactggggttcagcttattgtccttttgg

SEQ ID NO: 5853 - DNA, 265 bp, Zea mays
  Clone ID: LIB3118-024-P1-K1-E12
cggacgcgtgggttctattagtacgggcaaagaagaagaagaagaagcccaggccggagaaccatcgcctgcatttcgatctgtttcaccgcaattcgcattgatagtcgtgtattggagttatgtgtacttggtttccaagaacttcgctttcttctagtttttttcacttgattgagcgtttttggacagcgctgtcctgtttcctagtatggtgggaatttgctgcaccttttgcttcgaataaaactgcctgctcgttcac

SEQ ID NO: 5854 - DNA, 204 bp, Zea mays
  Clone ID: LIB3118-024-P1-K1-E2
tgcttctcctccccctccggttcgggttcgtgttcgtgaggatctccgacgttggggtacgtgggtgagcagatctacatggcgtactcgaatgtcgagtaccgctgcttcatctgacgcttcttctgggtcaattacgatcacttccttcacaacgccttataacacttaactgaaggtccctttagtcccaaatcatacctt

SEQ ID NO: 5855 - DNA, 352 bp, Zea mays
  Clone ID: LIB3118-024-P1-K1-E6
cccacgcgtccggtggggttgaggatgaggcgcaataatatgcatgcaaaccaacaacctaggcttgctttataagtaggaagtagttttggacaaagagctcataaccatggtataagagctcataaccatggtataagcttcggtctgcaggttctgcttgtgctttgtaatgggcgttgtagagtgagtttatgtgttagtgataggaaatagtctaaggactgttctacgatagagcctggagaaagttgaagtggctggtgattataagaactggtggcaactcccattcctgtcgtagtcctggctgactgtaaatatcgtttgacagagcattaccatgccaact

SEQ ID NO: 5856 - DNA, 252 bp, Zea mays
  Clone ID: LIB3118-024-P1-K1-E7
cccacgcgtccggtggggttgaggatgaggcgcaataatatgcatgcaaacgcaacaacctaggcttgctttataagtaggaagtagttttggacaaagagctcataaccatggtataagagctcataaccatggtataagcttcgttctgcaggttctgcttgcgctttgtgatgggcgttgtagagtgagcatatgtgttagtgataggaaatagcctaaggactgttctacgatagagccttgagaaag

SEQ ID NO: 5857 - DNA, 362 bp, Zea mays
  unsure at all n locations
  Clone ID: LIB3118-024-P1-K1-E9
agccgaagcgcgagctgagcaaggcggaggcggcgggaccggcgatggagcggctgcagcggatctttggcgcctccggcatggggcagccgccgacggactcgccgctgctcgactcctccgagcaggtctacatctcctccctcgcgcttctcaagatgctcaagcacgggagggccggcgtgcccatggaggtcatgggtctcatgctcggcgagttcgtcgatgactacaccgtcagggtcgtcgacgtcttcgccatgccgcagagcgggactggggtcagcgtcgaggccgtcgaccacgtcttncagacaaacatgcttgacatgctcaagcagaccggcaggccagaaatggtt

SEQ ID NO: 5858 - DNA, 196 bp, Zea mays
  Clone ID: LIB3118-024-P1-K1-F1
cccacgcgtccgcggacgcgtggggtgctaggcgtgcggcgaaattagttacccatgttgggtactatctatgtactattattatatccaaaactatagttgtcctggctgaattgaactcaaaagggtttgtttgagaaaaaattgtcccaagattggattgcttgttaaagctcaatattgttattgaagtgtt

SEQ ID NO: 5859 - DNA, 352 bp, Zea mays
  Clone ID: LIB3118-024-P1-K1-F10
cggatcccttcagtccatcaccacaccaggcaccagcgatgatttaaaaaggaaagcacaggcgccgctgtccaggagccacagcgccgtcggctgggccgccgggtcgtccgaggccgacgaggacctgcgcgagctggtccgcgccgcgtcgcagcgccgcgtggagcagcgccgcgccgagctgcaggccgtggcccggagccagagcatggccgcctcgctctccatggcgcgcatcgacgaggacgcgccgtgcgacttcggggcgcccggggcgctgtgcccgaggagccagagctgtgtcggcgacgccgcggtgaggaggccccaccgccgcggccacgggaag

SEQ ID NO: 5860 - DNA, 214 bp, Zea mays
  Clone ID: LIB3118-024-P1-K1-F11
gtggaataaggactgcatattccgtttcatgatgctggatggtttcctgaggctggatatggacgacggtgtggaaatgtgtatgccgcgtgttcttatgctatcactgtaatacttgagtagatgttagatgggtcctaaggttccacatggatcttgtttgtaacacatgagcagatgagttgttacaataaaccttcaattcgtttagttt

SEQ ID NO: 5861 - DNA, 369 bp, Zea mays
  Clone ID: LIB3118-024-P1-K1-F12
tcttaaaatcctcaataacaactgacgccggcccacggcttcaaatagctgcagattgcagcccatcatcaagaaaccaacaccgtaccgtaccgcagctctccgtcgccccaccgccacctgcaagatgagtccgtggtggaagcccctcttgctggccaccgcggccctcgccgcgctcctcgcggccgacgctaccgtggatacgacgtgcaaggcggcagccgccacggacgaccgcgtcgactacggcttctgcgtgtcggagctgagcaagcaccgcgacagccctggcgcggacgcctggggcctggccaaggtggctgccaacctcggcgtcaacaacgccggcggcgcggtccgtgacgc

SEQ ID NO: 5862 - DNA, 297 bp, Zea mays
  Clone ID: LIB3118-024-P1-K1-F2
gcgacgacgagcgcggcgacttcacgggcgagcagctcaggtacccctgcaagctgaggcggcacatctgcgccgagtgcgggatgcaccgcggcgagcacggcggcaggcccggcgcgggtgtcagggtcagggacgaggacctgcccccgcgcaagcgggccgtgttcagggcgcggggagagttgcagccgatggtgatgggcctcggcggcggcgaggacgagggcgacggcgagagggaggggcaggcctgggctaccgccgacgccatcgccaaggggaagcggggggcca

SEQ ID NO: 5863 - DNA, 250 bp, Zea mays
  Clone ID: LIB3118-024-P1-K1-F3
gcgacgactagcgcggcgacttcacgggcgagcagctcatgtacccctgcaagctgaggcggcacatctgcgccgagtgcgggatgcaccgcggtgagcacggcggcaggcccggcgcgggtgtcagggtcagggacgaggacctgcccccgcgcaagcgggccgtgttcagggcgcggggagagttgcagccgatggtgattggcctcgtcggcggcgaggacgagggctacggctagagggaggggca

SEQ ID NO: 5864 - DNA, 378 bp, Zea mays
  Clone ID: LIB3118-024-P1-K1-F4
cgagtacagccggctaggtaatctggtacgacgacccacgacgacatggcggcggccaccaccaccagcagcagcaagaagtcgtcgtcgccgtcgtcctcgagctcggcgcagcgggcagcagctgccgccctgctcgtggcggtgtccgtcctggtggtgggcgcggcggcggtgtgcgacatgagcaacgagcagttcatgtcgtgccagcccgcggcggccaagacgacggacccgccggccgcgccgtcgcaggcgtgctgcgacgcgctggcggtggcggacctcaagtgcctgtgcggctacaagaactcgccgtggatgggcgtctacaacatcgaccccaagcgcgccatggagctgccggccaagtgc

SEQ ID NO: 5865 - DNA, 357 bp, Zea mays
  Clone ID: LIB3118-024-P1-K1-F5
aaccgcatcctctcatcagcttccttccacattcgtctcgagatctcgccccgtcgccatggacgcgatcgacagcgtggtggatcccctccgcgacttcgccaaggacagcgtccgcctcgtcaagcgctgccacaagcccgaccgcaaggagttcaccaaggtggcggcgcggacggcgatcgggttcgtcgtcatgggcttcgtcggcttcttcgttaagctcatcttcatccccatcaacaacatcatcgtcggttccggctaggcttacaggagtacagggcgactagcatgggagtagtgcaatacttttgggagcaatagataacgaggatcctggtctttcgaatagta

SEQ ID NO: 5866 - DNA, 408 bp, Zea mays
  Clone ID: LIB3118-024-P1-K1-F6
cccacgcgtccgcgtacagcgtggtggacggcgagctggcggacttctacaagaacttcaagatcacgctgaaggtgactccggccaaggcggagggcgagggcggcgccgtcgtcagctgggccatggagttcgacaaggccaacgaccaggtgcctgacccggacgtcatcaaggagaccgccaccaagacgttccacgacctcgacgactacctcctcaagaactagatggagcgagaactggagatggtccagtacagtacagttccagtccattcatcgacgcgtcacagtttactagtgcacgtcgctggtgtggtgtggtgcccgtgctggttccttaatttgcttactagctagctacgtaccgcggtccgtgtccttgtctctggctgatgtttgctgc

SEQ ID NO: 5867 - DNA, 171 bp, Zea mays
  Clone ID: LIB3118-024-P1-K1-F7
cccacgcgtccgcccacgcgtccgaaaaaaaaaaaaaaaaaaaaaaaaaaaaaaaaaaaaaaaaaaaaaaaaaaaaaaaaaaaaaaaaaaaaaaaaaaaaaaggggcgggccgtttaaaagaatcaaacttaacttccgcgggattccaaggaaaaagttttttattgggg

SEQ ID NO: 5868 - DNA, 324 bp, Zea mays
  Clone ID: LIB3118-024-P1-K1-G1
gcaaagacttccaagtggtaagtttattccagggaataacaacagttatgacaaatgtcgtcgaagatttgacctgggtgatgcagactatcttaggtatcatggtatgcaagagtttgatcaggcaatgcaacatcttgagcaaaaatatgaattcatgacatctgatcaccagtatatttcccggaaacatgaggaggataaggtgattgtgttcgaaaagggagatttggtatttgtgttcaacttccactgcaacaacagctattttgactaccgtattggttgtcgaaagcctgaggtgtataaggtggtcttggactc

SEQ ID NO: 5869 - DNA, 112 bp, Zea mays
  Clone ID: LIB3118-024-P1-K1-G10
cggacgcgtgggcggacgcgtgggggaataaagtggtctctgctagcttaaagaactgcgaatcgtaaagcactggagtatagaaaaggaataaagtggtctctgctagctt

SEQ ID NO: 5870 - DNA, 217 bp, Zea mays
  Clone ID: LIB3118-024-P1-K1-G11
gtgacacatggactgcatattgcgttaaatgaggctggatggtttgctgagggtggatatggacgacatggacataaattgttatagccgaatgatcttatgctatcactgtaatacttgagtagatgttagatgagtcctaaagttccacatggatcttgtttgtaacacatgagcagatggagttgctacaataaacctgtaatccgtttaggtt

SEQ ID NO: 5871 - DNA, 302 bp, Zea mays
  unsure at all n locations
  Clone ID: LIB3118-024-P1-K1-G12
cccacgcgtccggcgcgccaagagcaaggcgagccgtgagaggaagatcgctaggagggaggagaggttggcccagggtccacgagaaataacaccacctgtctcatccacagctccagctactggggcaccgaagaaagcaaagaagtgaagtattgaaataaagctgtagctttctagtccagtactgcactttcttttataagctctagtcaaattttggagcgcctgaactgttttgctgttatataacttagtgtattgataaattcgactatcacatctggattattctgctggnt

SEQ ID NO: 5872 - DNA, 222 bp, Zea mays
  Clone ID: LIB3118-024-P1-K1-G2
gcaaagactagcaagtcgtatgtacattcgagcggataacaacagttatgacaaatgtgggccaaaattggacctgggtgatgctgaatatcttagggctcatggtgtgcaagagctcgatcatgcaatgcaacatcttgagcataaatatgaattcatgacatctgatcaccactatattagcggtaaacatgatgaggataaggctattgtgttccaaaa

SEQ ID NO: 5873 - DNA, 77 bp, Zea mays
  Clone ID: LIB3118-024-P1-K1-G3
tcgaacactcgggaggccacacgtacgattttatatttcttcgtcacttgactgtgggggtgaaggaagcttgctca

SEQ ID NO: 5874 - DNA, 290 bp, Zea mays
  Clone ID: LIB3118-024-P1-K1-G4
tcaaagacttccaagtggtaatgttcattccagtaaataacatcctttttgacaaaggggggcgaatatttgacctggttgatgcagactatcttaggtatcatgttatgcaagagtttgatcatgcaatgcatcatcttgagcaaaaatatgaatacatgacatctgatcaccattatatttcccggaaacatgaggaggataaggtgatcgttctcgaaaagggagattttctttttgtgttaaacttccactgttacatcagttatttttactacctgtattggttg

SEQ ID NO: 5875 - DNA, 401 bp, Zea mays
  unsure at all n locations
  Clone ID: LIB3118-024-P1-K1-G5
cgacgagcttctgacccactcgaacgccttctcgctgctgcccaagacccggtggcgcgacgcggcggtgatcctgatgctgatccaccagttcatcaccttcggcttcgcgtgcacgccgctctacttcgtgtgggagaaggtgatcgggatgcacgacgccaagagcatcttcaagcgcgccctggcgcggctgcccatcgtcgtgcccatctggttcctcgccatcatcttccccttcttcgggcccatcaactccgccgtcggcgcgctgctcgtcagcttcaccgtctacatcatcccggccctggcgcacgttctcacctaccgcacggngtccgcgcgcatgaacgccgcggagaagccgnccttcttcctgccgagctggacggngatgttcg

SEQ ID NO: 5876 - DNA, 340 bp, Zea mays
  Clone ID: LIB3118-024-P1-K1-G6
cccacgcgtccgcccacgcgtacgatcgctgaagcttcaccaccctctggtagctctgaagagccagttgctgcagcaaaacctagaaggacagccagtgctacgaagaaacatgtctatattagtgaaagcgatcctgaagatgaagtggtggagttgagtgatgattcggactttgatttggatgctgactctgactagtgagggtaactgtcatccgtagcatgtgctacctttattgatgatgcatttcttgtgcatgtgctactataattgacgagtgcgggtaactgtcaatctgtcatccgtgttgatctgttgactgatgtatgagagtttt

SEQ ID NO: 5877 - DNA, 319 bp, Zea mays
  Clone ID: LIB3118-024-P1-K1-G7
cgcagcaaacactggggagatttggaggaagaggaggaagaagaggaagaggaggaagaggaagaaccaatggaagacgaggaaatggaagacggaattcagtccgtcgataccatttcaagtactccgactggtgttgaaacacctgatgttatcgaccttcggaagctgcagaggaaggagactgacaagcaggcagaacggccgttgtatcaggttcttgaacagaaggacaaaaggatcgcccctgggacactatatgggtcaagccatacatatgtctccctaaccttaaacatgttacatgctcccctggttt

SEQ ID NO: 5878 - DNA, 228 bp, Zea mays
  Clone ID: LIB3118-024-P1-K1-G8
cgcagcaaacactggggagatttggaggaagaggaggaagaagaggaagaggaggaagaggaagaaccaatggaagacgaggaaatggaagacggtattcagtccgtcgataccatttcaagttctccgactggtgttgaaacacctgatgttatcgaccttcggaagctgcaaaggaaggagactgacaagcatgcagaacggtcgttgtatcaagtttctttgaac

SEQ ID NO: 5879 - DNA, 191 bp, Zea mays
  Clone ID: LIB3118-024-P1-K1-G9
cccacgcgtccgcccacgcgtccgatataatctctcttcgtcactagctcgtggtaataagggaagcttgatcatctttccttacggcggtgatgaagagcagcacaatcgtcgcgcttctgttggctgttgccattctgtcctcgctgtctccatgctacgaagccggcggctgcatcgggaaacccaag

SEQ ID NO: 5880 - DNA, 336 bp, Zea mays
  unsure at all n locations
  Clone ID: LIB3118-024-P1-K1-H1
tagctttggagttgtactactagagatgatgactggtagaaggtcaatggacaagaacaggccaaacggagaacacaacctggttgaatgggcacgcccttatctgggagaaagacgcagattctataagcttgtagaccctcgtttggatgggaacttctccataaaaggcgcccagaagacggctcagctggcccatgcctgcctcagccgtgaccccaaggctaggcctctgatgagccangtggtggaggtgctgaagcctctcagaacctcaagacatggcagctcttctatacttcagtcatgcaaatgacgtcgacagacttgcaacca

SEQ ID NO: 5881 - DNA, 257 bp, Zea mays
  Clone ID: LIB3118-024-P1-K1-H10
cccacgcgtgcgcccacgcgtgcggtataatctttgtttagcgctagcttcgggggatgctggtaagcttgatcatctttccttacaggggtgataaagagcatcacaatcttcacgcttttgttggctgttgacattcttttctcggtcgctccatgctaccaagccggcggctgcgtctggaaacccaatatgttcatcgccgccggctaaaaggtcataccttttgtcctattgtcaggaccaccataactgcc

SEQ ID NO: 5882 - DNA, 352 bp, Zea mays
  Clone ID: LIB3118-024-P1-K1-H11
atccagaagcagaagccaccgatcggcgtgccgcgtgcgtgaggcgatcggagcatcccgtcccgaggaggaagacaaccggcgacgcggggggaacatggggaagacgccggtgcggatgaaggcggtcgtgtacgcgctgtcgcccttccagcagaaggtaatgccggggctgtggaaggacatcaccaccaagatccaccacaaggtcaccgagaactggatctccgccacgctcctcctcacccccgtcgtcggcacctaccaatacgccatgtggtacaaggagcaagagaagctttcccacagatattaaatgcgcttgccttgacagacagcactcggagttttc

SEQ ID NO: 5883 - DNA, 55 bp, Zea mays
  Clone ID: LIB3118-024-P1-K1-H12
ctttttagaacagaggagctgcgtcgtttattaaataaagggccgggtttcattc

SEQ ID NO: 5884 - DNA, 227 bp, Zea mays
  Clone ID: LIB3118-024-P1-K1-H2
tagcttcgtaggtagactactagagatgatgactggtagaaggtcattggacacgatcagggcaaacgtagaacacagcgctgcagaatgggcacgcccttatctggaagaaagacgcgtattctataagcttggacaccctcgtttggatgggaacttgacacataaaaggcgcccatattacggctcagctggcccatgcctgcctcagtgcgaaccccaaggct

SEQ ID NO: 5885 - DNA, 282 bp, Zea mays
  unsure at all n locations
  Clone ID: LIB3118-024-P1-K1-H3
atggaccatgaggaggcccgccgtaagaatgttggtggcaaggttctaggtttcttttattgaaaatgtgtttttttgagccacagatgcgtccaagaactcgtctgatgttttgaggtttgttaagactgggtgtccgagcctttgtggtttgttaagacagcgatgtgtcatgtatttcagaaattgggatttttatgagatgtacctgcgagagccctgtctgtttcgattttcagatattggttttgatttatgcgatacanacaggtcctttagtcc

SEQ ID NO: 5886 - DNA, 197 bp, Zea mays
  Clone ID: LIB3118-024-P1-K1-H4
cacagagtgtcatgtactgactgggtgtccgagcctttgtggtttgttaagacagcgatgtgtcatgtatttcagaaattgggatttttatgagatgtacctgcgagagccctgtctgtttcgattttcagatattggttttgatttatgcgatacaaacaggtcctttagtccaaaaaaaaatcataaaaataaaa

SEQ ID NO: 5887 - DNA, 99 bp, Zea mays
  unsure at all n locations
  Clone ID: LIB3118-024-P1-K1-H5
ccggtccggaaagncaggacccacgcgtccgggcattcactgagagatatagaacagaggagctgcggcgttgattaaagaaagagctggatgtcattc

SEQ ID NO: 5888 - DNA, 68 bp, Zea mays
  Clone ID: LIB3118-024-P1-K1-H6
ggcattcactgagatatatagaacagaggagctgcgtcgtttattaaataaagagctggatttcattc

SEQ ID NO: 5889 - DNA, 68 bp, Zea mays; identical to SEQ ID NO: 5888
  Clone ID: LIB3118-024-P1-K1-H7

SEQ ID NO: 5890 - DNA, 83 bp, Zea mays
  Clone ID: LIB3118-024-P1-K1-H8
ggagaaaggtctaataatgaagagctgcagctattgtaaagtgcaagtattgagcatgcttgaaagttgaaccggttgccctt

SEQ ID NO: 5891 - DNA, 143 bp, Zea mays
  Clone ID: LIB3118-024-P1-K1-H9
ggagaaaggtctaataatgaagagctgcagctattgtaaagtgcaagtattgagcatgcttgaaagttgaaccggttgcccttaaaaaaaaaataaaaaaaaaaaaaataaaaataaattataaaaaaaaaataaaaaaatag

SEQ ID NO: 5892 - DNA, 210 bp, Zea mays
  Clone ID: LIB3118-025-P1-K1-A1
gtcgaaagattagtgatgtcaaacttcagggccatgtagattttgctcttatggtgcaacagcagagatcagtggctttgtggcgtttaagagatgccgttctgttgcgccatgtatcaaacgagaagatttcctggtccactgacaggccacttgtctatagatcgtttaaaaactactgagaggaactagagtacaaaaacatagcgt

SEQ ID NO: 5893 - DNA, 293 bp, Zea mays
  Clone ID: LIB3118-025-P1-K1-A11
aaaaaaaaaaacaaaacaaaaaaaaaaaaaaaaaaaaaaaaaaaaaaaaaaaaaaagaaaaaattaaaaaaaaaaaaaaaaaaaaaaaaaaaaaaaaaaaaaaaaaaaaaaaaaaaaaaaaaaaaaaaaaaaaaaaaaaaaaaaaaaaaaaaaaaaaaaaaaaaaaaaaaaaaaaaaaaggggggggccctttaaggggacccaggtttacttcccggggttgggaaggtaatactttttttatggggcccccaaatttaattcccggggccgggttttaaaaccgggggggg

SEQ ID NO: 5894 - DNA, 347 bp, Zea mays
  Clone ID: LIB3118-025-P1-K1-A12
gaaagttcggagttggaggaactagagaagagactggctgctctaaaaaatgcataggatctgtttacaaccctctcctctatgcacatagcaagcctgtcgtgtaccttaattccaaatcttcattcgacacgcaaagtcactgtgatttgtatgtatcaaaaggaagatgatgcaaacccccaagtttttgggcgaatcgatgttgctgctgttcgtacacactcacgtataagatggggctgtgctgccttattagcgacatgattcagagcaagggattccatagtcttgtaaagaagtttgattatttttacatgacaaattaaaaaataaaaatatattat

SEQ ID NO: 5895 - DNA, 255 bp, Zea mays
  Clone ID: LIB3118-025-P1-K1-A2
cccacgcgtccgtgatgatgagaggcgagtcctacgccctagtcctactactaccctctttgtgtgctgccatccatccgtccccgctagacgatcgaggagagaataacgcagagctctgtgctcccggcctctgtcttctgccgtcccggccgtttaatttatagtctctactgtgtgttcgtcccatgtgtttagcagcagcagcaggtgtattgtgcgggtatgtaatggtattgcaactatattgggtgt

SEQ ID NO: 5896 - DNA, 384 bp, Zea mays
  Clone ID: LIB3118-025-P1-K1-A4
aaaaaaaaaaaaataaaaaaaaaggaataaataataaaagaaaaaaaaaaactcattgaagggggaatataaaaaagagaaaaaaaaaaaaacttaaacttaaaaaaaaaaaataaacgcaaaaaaataaagttttagacacaaaaaaaaaaacaaaaaacaacaaaaatttttagttttaaaaaaaacataaaaaaaaaaaaaaggggggcgtcccttttagggggccccagttttcctcccggggccgtgcgtgattatgttttttttttggggcccccaaattcaatctccgggccgcgtgtatccccccgggggggggggaaacccccgggcgtccccaaattaagcgcctggagagaaaccccctctttcgcgggtggg

SEQ ID NO: 5897 - DNA, 407 bp, Zea mays
  Clone ID: LIB3118-025-P1-K1-A7
gggttggcttctcctccccctccggttcgggttcgggttcgtgaggttctccggggttcggtttcgtgggtgagcggatcgagatggcggcgtcggatgttgagtaccgctgcttcgtcggcggcctcgcctgggccacggacgaccactccctccacaacgccttcagcacctacggcgaggtcctcgagtccaagatcatcctcgatcgggagacgcagaggtcccgcggcttcggcttcgtcaccttctccacggaggaggcgatgcggaacgccatcgagggcatgaacggcaaggagctggacggccgcaacatcaccgtcaacgaggcccagtcccgcggcggccgtggaggcggcggcggtgggtacggtggtggccgtggaggcggctgctacggcggt

SEQ ID NO: 5898 - DNA, 340 bp, Zea mays
  Clone ID: LIB3118-025-P1-K1-A8
gggttggcttctcctccccctccggttcgggttcgggttcgtagaggtactccggggttcggcttcgagggtgagcggatcgagatggcggcgacggatgttgagtaccgatgcttcggctgcggccttgtctgttccacggaccaccactccctacacatcgcctttactgcctactgcgaggatctgtagagcaagatcatcctgtgtcgtgagacgcaatgtaacggtagtttaactatattgaccttatacacgagatgaagctgtgcaaaacacgcaaggaaaaaaaaaacaaaagggagctcgacgtacaggacataagcttactcacggccca

SEQ ID NO: 5899 - DNA, 400 bp, Zea mays
  Clone ID: LIB3118-025-P1-K1-A9
gctgaacctgcgaacacgcgtaccaaacatgctaatagagctaccgtacattagcgtgccaacaacgttctgtatgcggagaatagatctgttcctacctcgggcctggtcctgtgtgaacatcaggggcacaacagaggggggggtgtacctcttgtgcaagattactcatacaccggacaacatgtatttccggtgtaaatgaggaagtgctcattgcttactatgataacatgttttacatagcgacagggtggacttcctcaaggttcttatgtcatcggaggatctcccattggctggaattttcttgggtggcctggaagcaaagcagtctactatggtttgaccaaagcagagtggttggctcgtcaatctgcaaatagaaattcgaacatgc

SEQ ID NO: 5900 - DNA, 136 bp, Zea mays
  Clone ID: LIB3118-025-P1-K1-B1
tcgggttcccctgaccctccatttgtggtctagcaaaccgctgtattcactgaaccggggaaggcctgaatcggagtccaaggtcactgccaagaccgttggcattgctgctttatagcaaccaagccgctacgta

SEQ ID NO: 5901 - DNA, 402 bp, Zea mays
  Clone ID: LIB3118-025-P1-K1-B10
tgaaaatccaggacgtatcgcagttggagcagctcctggccaaggaggtgctgctggagctccacaaaatcggcacgaatgcaactggaaacagatcgttcctggagaggctccacgcaagcatcaccatggctacgctggttcaggcgctgcattccttggacttggatccatcggcggcgctgcgtatggaggtgctgttcttggcgctggagaatatgcgtggaaaaaacaactcaaggcgaagaagcgaggacgtccttgagctggaggagcggccagagcagatccggtcggtgctggaggctggcaccagggccaggctcaatgatgaggaacacatgccgtcggtgtctgtgcaggctgaagaccaagcctttcccaaaccgaagttggccaaag

SEQ ID NO: 5902 - DNA, 361 bp, Zea mays
  Clone ID: LIB3118-025-P1-K1-B11
atcgagtacagtcggctaggtaatctggtggtacgacgacatggcggccaccagcagcaagtcgtcgtcgtcctcgagctcggcgcagcgggcagctgccgcactgctcgtggccgccgccgtggcggtgtccgtcctggtggtgggcgcggcggcggtgtgcgacatgagcaacgagcagttcatgtcgtgccagcccgcggcggccaagacgacggacccgccggccgcgccgtcgcaggcgtgctgcgacgcgctggcgggggcggacctaaagtgcctgtgcggttacaagaactcgccggggatgggcgtctacaacatcgaccccaagcgcgccatggagctttcggccaagtgc

SEQ ID NO: 5903 - DNA, 325 bp, Zea mays
  Clone ID: LIB3118-025-P1-K1-B12
ttttttttttttttttttttttggttttttttttttttttttttttttttttttttttttttttttttttttttttttttttttttttttatttttttttttttttttttttattattttttttttttttttttttttagaagaatactggaaaaaaaacaaaaaatgattttaatttttatttctttgattgttaaaagaactggatataatataataaattaatgcttttatggttatggaggaaaacaaaagcaacattaaacttcataaaactcttttgttttaaaaattttttttttatttttttaaacagttttttctt

SEQ ID NO: 5904 - DNA, 240 bp, Zea mays
  Clone ID: LIB3118-025-P1-K1-B3
actggatcacatagctaatctgttgggttctataaattctccaccgttcaaatgctccgaaaggaagggcctttggataagtttctctttttttccctttttttgtttgggtgtgcacacattgttggacgggctgtagttgaatgagtagagtgtacgcctcgggctgaagatgagtcggattcaacgacgaacatttttgttgtgcccgcgaatggccaatatttcgctttcatgtac

SEQ ID NO: 5905 - DNA, 391 bp, Zea mays
  Clone ID: LIB3118-025-P1-K1-B4
ttaggatcaagagcgaggcgctccttaaattttcttgcgacttggaatacagaaagagggtggatgggctcgtgtttttttcagcactaaacaaatactttgctgctcaggcacatggaagggttcatgtgacacacgatgtcagggtctctactctagctaaagaaggacttatgcaaggaaacggatcgcgatgcgcttaatggttctctacatgcaaagataacaagtgctactgctgcattagggggcagaactcatgctcgctactctacgcttgctgagtgtagtcatgccttgttataaacaaaaaacaagatcattgttattatatacattgtaatgggaggtaatgctattaataatatatggcaattgtaggttcggtatt

SEQ ID NO: 5906 - DNA, 340 bp, Zea mays
  Clone ID: LIB3118-025-P1-K1-B5
ttaggaatcaagagtgaggagttccttaaattttcttgcgacatggagtacataagggggggggatgggctagtggttttttcagtacttatcaaatactttgctgctcatgcacatggaaagggtcatgttacacacgatgtcggaggtcctactctagctaaagaaggaattttgcaaggaaacggagcgcgatgtgcaaaagggtgtcctccatgcaaagattacaagagctactgctgcataaggcggcgaactcatgctcgctactctactcttgctgagtggagtcatgcctgcttctaacaaaaaatacggacactgtaatatatacattgca

SEQ ID NO: 5907 - DNA, 377 bp, Zea mays
  unsure at all n locations
  Clone ID: LIB3118-025-P1-K1-B6
actaggtctagatcgaaagctgctgttaatttgcaacaacaactaccattcagccagctagctgttgcctaccccagcattttcttccattcaaccaactagcagcattgaactctgctgcttatttacagcagcaacaactactaccattcagccagctagctgatgtgagccctgctgtctttttgaacaacaacagttgttgccgttctacctacacgctatgcctaacgctggcaccctcttacaactgcaacaattgctgccattcaaccaacttgctttgacaaacccagcagtgttctaccaacaacccatcattggtggngccctcttttagattgcttatgagttataagtcaataatgaagtttttt

SEQ ID NO: 5908 - DNA, 411 bp, Zea mays
  Clone ID: LIB3118-025-P1-K1-B7
agaaaaaggaaaggaaaggacaaaggagcggcggcgaggtctatggcgtcgacggcggggtacctggcgcggcgggcggcgcagaaggagcgggtgcgcctgctctaccgcagggcgctcaaggacacgctcaactgggccgtccaccgccacctcttctaccaggacgcgtcggatctccgggacaagttcgaggccaaccgacacgtggataacctggacgtggtcgataggctcattgacgatgcggaggctcagtacaggaacttccagcaccccgatccctacattgttccatgggcaccaggcggcactaaattcacaagaaacccccctccacctcaagggatcgagatcatctacaattatggcaaggaggaccagtaaacaagagtcctgcaagcggaatag

SEQ ID NO: 5909 - DNA, 346 bp, Zea mays
  unsure at all n locations
  Clone ID: LIB3118-025-P1-K1-B8
gaaagttcggagttggaggaactagagaagagactggctgctctaaaaaatgcataagatctgtttacaaccctctcctctatgcacatagcaagcctgtcgtgtaccttaattccaaatcttcattcgacacgcaaagtcactgtgatttgtatgtatcaaaaggaagatgatgcaaacccccaagtttttgggcgaatcgatgttgctgctgttcgtacacactcacgtataagatggggctgtgctgccttattagcgacatgattcagagcaagggattccatagtcttgtaaagaagtttgattatttttacatgacananaaaaaaaaatataaatatgg

SEQ ID NO: 5910 - DNA, 141 bp, Zea mays
  Clone ID: LIB3118-025-P1-K1-C1
gcgtcgtgccctcaccctcccttcttggtctgccaaaacactgcattgccgtgacctttggtctcccagatcggtgacccaaaacactgcagtgcccatctgctttgctttgttttttaccaatacgttcttactagcacc

SEQ ID NO: 5911 - DNA, 376 bp, Zea mays
  Clone ID: LIB3118-025-P1-K1-C10
ctatagcttcccttcttcccccatacctctcaccagcggtgtcttcagtgtgtgaaaacccaattgttcaaccctacaggatccaacaggcaatcgcaacaggcatcttaccattatcacccttgttcctccaacaaccgtcagccctattacaagagttacctttggtccatttggtggcacaaaacatcagggcacaacaactacaacaacttgtgctagcaaaccttgctgcatactctcagcaacatcagtttcttccattcaaccaactggctgcattgaactctgctgcttatttgcaacaacaactaccattcagccagctagctgctgcctacccccagcaatttctttcattcaaccaactagcagc

SEQ ID NO: 5912 - DNA, 398 bp, Zea mays
  Clone ID: LIB3118-025-P1-K1-C11
gatcctccaagaggggtgcttctgtatggtcctccgggtactggcaagaccatgcttgccaaagcagttgcacatcataccactgctgcttttatcagggtcgtcggttcagagtttgttcaaaagtacttgggtgagggccctagaatggtgcgtgacgtgttccgtttggccaaggagaatgccccagcaatcattttcattgatgaggttgatgctatagccactgctcgttttgatgctcagactggtgctgaccgagaagttcagcgtattcttatggagctactcaatcagatggatgggtttgatcaaacagtcaatgtgaaggttataatggcaactaatcgggcagacactctagatcctgctttgttgcgtcctggtagactttgaca

SEQ ID NO: 5913 - DNA, 71 bp, Zea mays
  Clone ID: LIB3118-025-P1-K1-C12
gctgagtgtagtgtagttttgctagattgtcgctgttttcctatatctctttaaagacgaaattcttcgcc

SEQ ID NO: 5914 - DNA, 409 bp, Zea mays
  Clone ID: LIB3118-025-P1-K1-C2
gcaacatagaaagcacaatagtgtaccaacaatggcagccaaaatattttgcttccttatgctccttggtctttctgcaagtgctgctaccgcaaccattttcccacaatgctcacaagctcctatagcttcctttcttcccccatacctctcaccagcggtgtcttcagtatgtgaaaacccaattcttcaaccctacaggatccaacaggcaatcgcagcaggcatcttacctttatcacccttgttcctccaacaaccgtcagccctattacagcagttacctttggtgcatttgttggcacaaaacatcaaggcacaacaactacaacaacttgtgctaggaaaccttgctgcctactctcagcaacagcagtttcttccattcaaccaactggctgcattgaac

SEQ ID NO: 5915 - DNA, 87 bp, Zea mays
  Clone ID: LIB3118-025-P1-K1-C3
gtcattctatagcaagaattccatgacaaagattgcttggcacttgattgctgctttgtttgcaagctggctggccgggattacccc

SEQ ID NO: 5916 - DNA, 287 bp, Zea mays
  Clone ID: LIB3118-025-P1-K1-C4
cccacgcgtccggcgcagcagctgacggcgatgtgcggcctgcagctgcagcagccaggtccctgcccttgcaacgcagctgccggcggtgtctactactgaggaaactatgtactgtagtaataatgtaatggagccgctggctagctacctagctcgctagtttactcatttagcggcgatgagtaacgtagtgtcacccatcaccatgggtggcagtgtgagcaatgacctgaatgaaccattgaaatggaaaggaataatatataaggaaaaaagatgattgg

SEQ ID NO: 5917 - DNA, 385 bp, Zea mays
  Clone ID: LIB3118-025-P1-K1-C5
gaaagaacttgtttcgaagttcattccagaagttattggtaaggagattgagaagtctacctccagcatcttcccacttcaaaacgtcttcatccgcaaggtgaagatactcaaggcccccaagttcgatcttgggaaactcatggaggttcatggcgactacaaagaggatgttggtgtgaagcttgagaggcctgtcgagggagatgaggctgggcaggaggttgctgctgccgagtagtttgtttgctacttctgtatctaggcgagtctggacatgaggttgcttatgacgtgaacttatagagttgtcttggctacgtgttttcatctggccctaagattttgtcttgaaacaagtttaaaattaagattactcgtggcg

SEQ ID NO: 5918 - DNA, 51 bp, Zea mays
  Clone ID: LIB3118-025-P1-K1-C6
gctagaatgacgctcgtttccaatatctctttaaagacgaaaattttcggc

SEQ ID NO: 5919 - DNA, 291 bp, Zea mays
  Clone ID: LIB3118-025-P1-K1-C7
tggaacgcgcaccctcccatctaggtctaccaaaacgatgtacagaccggaccttgggcctgccctatcgctgacccataacactaaagagcccatgcgctttgcttgctatgtgtaccaatatgctacttactagcaccggtgatctcttacgtggcctcaacgtattacgtatgaatgcactaggtgctagcacgatacaatcatacagttaaggttcgagtaaatctatgttgttgacaagtatgatacacttagtgacagaactttctggtcaatgtatattgcaaa

SEQ ID NO: 5920 - DNA, 401 bp, Zea mays
  Clone ID: LIB3118-025-P1-K1-C8
gctgaatgctgatgagaaagcgcttcaggttgaggatcagcataaaaggcagaaacatactagatttaaagaatattacgatgtgtacacatcatttgtttgcagactaaactgttgcattaaaaacacctcacttgacagccacactaaaagctacggagcatatgctcaggtgaagaataatcatcgataaagaatacacataatgacctgagcttggcattgcacgacatgtataatgaacacgctatactcaactcacttaaccacactatcgttatgaaactaagcagacgcaacattgcactgcacgaggctcacacagagctagaacatggactgcttgatctttcatgcggcagacacatatatgatataagagaatgcggcagcttgatcta

SEQ ID NO: 5921 - DNA, 401 bp, Zea mays
  Clone ID: LIB3118-025-P1-K1-C9
cggacgcgtgggcggacgcgtggggcggcagtgcgtagagaggatcgtcgaacagaacagcatgaagatggtcatcgttctcgtcgtgtgcctggctctgtcagctgccagcgcctctgcaatgcaaatgccctgcccctgcgcggggctgcagggcttgtacggcgctggcgccggcctgacgacgatgatgggcgccggcgggctgtacccctacgcggagtacctggggcagccgcagtgcagcccgctggcggcggcgccctactacgccgggtgtgggcagacgagcgccatgtaccagccgctccggcaacagtgctgccagcagcagatgaggatgatggacgtgcagtccgccgcgcagcagctgcatatgatgatgcatcttgagcgtgccg

SEQ ID NO: 5922 - DNA, 82 bp, Zea mays
  Clone ID: LIB3118-025-P1-K1-D1
tctatagcatgaatcccatgacacagattggtgggcacttgattgctgctttgtttgcaagctggctggccgggattacccc

SEQ ID NO: 5923 - DNA, 74 bp, Zea mays
  Clone ID: LIB3118-025-P1-K1-D10
gctgagtgtacgttttttatgatagattgtcgatgtttatatatatatggtgaaggacgaaattttctggcaac

SEQ ID NO: 5924 - DNA, 218 bp, Zea mays
  unsure at all n locations
  Clone ID: LIB3118-025-P1-K1-D11
aagaccattagctttatctactccagagcgcagaagaacccgatcgacaccatgagggtgttgctcgttgccctcgctctcctggctctcgctgcgagcgccaccttcacgcatacaagcggcagctgcggctgccagccaccgccgacggttcatctaccgccgccggtgcatctgacacctncggttcacctgccacctgctgtgcatctaccacc

SEQ ID NO: 5925 - DNA, 400 bp, Zea mays
  Clone ID: LIB3118-025-P1-K1-D12
cggacgcgtgggcggacgcgtgggcggacgcgtggggctgcagcgcctccgccggcggcgccgcatctaacgcagttccctccgccgcagcccgaggcaagatggttctccagaacgacattgatctgctcaacccgccggcagaactcgagaagctcaagcacaagaaaaagagactcgtccagtcgcccaactccttcttcatggatgttaagtgccaggggtgcttcagcataaccactgttttcagccactcccagactgttgttgtgtgccctggctgccaaactgtcctctgccaacccacaggaggaaaggcaaggctcactgagggctgctctttccgcacggagggagactagagcggatgtggtcttcaagttttgctctatgccagata

SEQ ID NO: 5926 - DNA, 409 bp, Zea mays
  unsure at all n locations
  Clone ID: LIB3118-025-P1-K1-D3
cccacgcgttcgcccacgcgttcgcccacgcgtncgagtgactcttatccgccaagttgctgagaaagtgttcgccaatgtgggcaagactatcgggtacaaagttggaacaatgattgagatccccagggcagctctggtggctgatgagatagcggagcaggctgaattcttctccttcggaacgaacgacctgacgcagatgacctttgggtacagcagggatgatgtgggaaagttcattcccgtctatcttgctcagggcattctccaacatgaccccttcgaggtcctggaccagaggggagtgggcgagctggtgaagcttgctacagagaggggccgcaaagctaggcctaacttgaaggtgggcatttgtggagaacacggtggagagccttcctctgtg

SEQ ID NO: 5927 - DNA, 71 bp, Zea mays
  unsure at all n locations
  Clone ID: LIB3118-025-P1-K1-D4
gctgagtgtagtgtagttttgctagattgtcgctgttttcctatatctctntaaagacgaaattcttcgcc

SEQ ID NO: 5928 - DNA, 353 bp, Zea mays
  Clone ID: LIB3118-025-P1-K1-D5
cccacgcgtccgaccacatatctacagaactctgggagagaacttcaatgagagagtttggccttcaatcatccatgaaacactgaaagctgttgttgctcaatataatgctagtcagctgatcacacagagagagactgtgagtagggagattaggaagatactgactgagagggctagattcttcaacattgctcttgatgacgtctccatcacaagcctgagctttgggaaggagtttactcatgccattgaagcgaagcaggttgctgcacaggaagctgagcgtgctaagttcattgtcgagaaagctgaacaagataagagaagtgcaattatcagggctcaaggag

SEQ ID NO: 5929 - DNA, 214 bp, Zea mays
  Clone ID: LIB3118-025-P1-K1-D6
cccacgcctccgaagactattaggtttccttgcccgacgcgtggggatgcagctcctaccacgacgagggtgtatataatggaggttgctccacccgaggccgaggcaaaatgtgacttcagaacgacaatgctcttttttacccgccggcagaactcgagaagctcaagcacaagaaaaagagacttgttcagtcgcccaactccttttttat

SEQ ID NO: 5930 - DNA, 405 bp, Zea mays
  Clone ID: LIB3118-025-P1-K1-D7
cggacgcgtgggtccgccgccgccgccatgtcggggctctacagccagggcttctcccctgcgcgaaacctctcccctcagattagaagcaacccggatgtcgatagccagtacttggcggagctgctcgctgaacaccagaagctggggccgttcatgcaggtgctgcccatatgcaacaagctgctgagccaagagattatgcgggtgtcaagcattgtccacaaccatggatttggcgatcatgacaggcatcggtttagaagtcctagtccgatgtcttctccgaaccctagagctaatctccctggcaatgggttcagtccttggagcggactacaagagagattaggttttcctcaacgaactagcatggactggcaaggagcaccaccaagtcctagc

SEQ ID NO: 5931 - DNA, 168 bp, Zea mays
  Clone ID: LIB3118-025-P1-K1-D8
atcacttattcccctagcaaagtataagtctgtctggaaggtaatgtttgagctttgctagtgtggctgggcactctggtcactggttgtgttgtgcatgcatcagctgtatgatcgtcgtctgttgtggaaaattggtcaatgtattctcttgctgaataatttgtg

SEQ ID NO: 5932 - DNA, 256 bp, Zea mays
  Clone ID: LIB3118-025-P1-K1-D9
caaacgcgtgggttgaactctgctacaactgcgacattgggtctaataacacgagggagtattcagcgcgtgctattagacagcaaccatccgatcatctgttgaaatttgaaccgtttcgccatgttataacagctagggtagcacagaaataaaggtaggaactgcttcaatcatatacataagacacatactgaattaaagtgcggtgtgagtaaagatgaatcatgaataaaagaaaattcccgccaatttg

SEQ ID NO: 5933 - DNA, 435 bp, Zea mays
  Clone ID: LIB3118-025-P1-K1-E1
ccggttccgaatttccgggggggccccagccgtccgcccactcgttcgtccactcgtcgcccacgcgtccgagtgactcttatccgccaagtggctgagaaagtgttcgccaatgtgggcaagactatcgggtacaaagttggaacaatgattgagatccccagggcagctctggtggctgatgagatagcggagcaggctgaattcttctccttcggaacgaacgacctgacgcagatgacctttgggtacagcagggatgatgtgggaaagttcattcccgtctatcttgctcagggcattctccaacatgaccccttcgaggtcctggaccagaggggagtgggcgagctggtgaagcttgctacagagaggggccgtaaagctaggcctaacttgaaggtgggcatttgtggagaacacggtggagagcct

SEQ ID NO: 5934 - DNA, 397 bp, Zea mays
  Clone ID: LIB3118-025-P1-K1-E10
gaaggatagacgtcttgtattaaccatggatgacctttctaaagctttgcgcgagcacggcgtgaacttgaaacacgcggagtacttcgcagacagcccttcagctggaatggctccttcgaccagagaggagtagactggattaggccaacttgtacggaactagggagggatcgcgtggaatggatgggcatgttggcattcttgcccgatcagatcgatgggatgtattactattaagtactgctactatgactagtatatttctcaattaccattgtcactgagagaatccagacacaagtcgttttgcccatgcgcttttatttgtacaaactgtcaatcatctgtaaccctatggggcccaaggatgattgggcaaacatcatgagttttt

SEQ ID NO: 5935 - DNA, 403 bp, Zea mays
  Clone ID: LIB3118-025-P1-K1-E11
ggaagaagcgaaagtatgagcttggtcgccagccggccaacaccaagttgtcaagcaataagacagtgaggagggtccgtgttcgtggaggtaacgtgaagtggagggctcttcgccttgatactggtaactactcatggggaagtgaagctgttacccgcaagacccgtatcctcgacgtggtctacaatgcatcaaacaatgagcttgtgaggacacaaacccttgtgaagagtgccattgtgcaagttgatgctgccccattcaagcagtggtacctcactcactatggagttgacattggtaggaagaagaaaacccctgctgcaaagaaagataatgcttgaggacaagaggttgaggcagcagctgatgaaacgaaaaagagcaaccatgtcacgag

SEQ ID NO: 5936 - DNA, 405 bp, Zea mays
  Clone ID: LIB3118-025-P1-K1-E12
acatgatgtcggactcatacgccacattcatccagaatgtacgtgcagctgtggccggcccgaagcggcgaagcctgacacggtgctagggcccaaatccaaggtaagtcggccggtgctggccaaagagacgtcgtctggcctgccgccgccgaagtggatccacgtcgttctcaacagcaagggcggcgctgcgcccacggtggccatccacagcgacaatgcctacatcgtcggcttcaccaacagcaagaggacgtggtaccagctcagcaagacgggcaccaaggacaagctcgtcgacgaaaaccccgtgatggcgggcttcgacgtcaactatagctcgctcatcggcggcggcgacaagctgcaaaccatcaagggataagggataaatagcggggg

SEQ ID NO: 5937 - DNA, 309 bp, Zea mays
  Clone ID: LIB3118-025-P1-K1-E3
cccacgcgtccggagccttcatcggttgctttcttcgccaagactgggctggattacgtttcttgctcccctttcagggtcccgatcgctaggctagctgcagctcaggtgcttgtctgaggggctgcctcctcgttggcagcctgctgttggtgcatctggtgattaataatactactatgacagagccatatgctctgtgaagagtattagtagcagcgctcataaaagctacagttccatctattttctcagctatgtaaaacttccaaactgttcatgcttaaaactgagggttttcgtggtgtg

SEQ ID NO: 5938 - DNA, 402 bp, Zea mays
  Clone ID: LIB3118-025-P1-K1-E4
cggacgcgtggggttcagtctgttgtcactgcgttgttgggttgattatcatcaacgtctattcagcgcatgctggagaaagcaaccaagcgaacgtctgtggtcatttagctcgaattgtcatgtgaaaatagcagtgggagcaatgtaccaaatatatgaatttctccagttagatagatgagacgaattcataatgttgttggtgactgagtaaagcattcccatgaatagatgagacgaattcctcgggagttttgtacgacgtcctcaaaggttatttgtaatgtgccttgtaatttcaaccaccaaccaggttagttgctgtatgcgcattcgttttgtgtactgggtagagaaatgaatccgggatacatcaactaacctggattcttaactgat

SEQ ID NO: 5939 - DNA, 339 bp, Zea mays
  unsure at all n locations
  Clone ID: LIB3118-025-P1-K1-E8
cagaaataacaggggaatgccgaagcactatgcccagagtttccacccttttcaggcgacagagaagggcggccatccacctacaactctggccgccctctgttttatgcagtttttacagagtcgtggaactggccaaaaagaccggagtaccatttgcacctgtgtagcgtaagcttgtactacaaataggcgtgtgctaatctgtatcaccattcatcaattgcgaggaactgttgaactccttccatcagtaaagtaaattttggtnnaaaaaaaaaaaaaaaaaaaaaaaaaaaaaaaaaaaaaaaaaaaaaaaaaaaaaaaaaaaaattttgg

SEQ ID NO: 5940 - DNA, 406 bp, Zea mays
  Clone ID: LIB3118-025-P1-K1-E9
cccacgcgtccggagcaatgcagcaacttcaaaataccaggatacaagcaggaccaaccactattctgcccaagataatgatgactttctttcttcagaatcagatagacagcttctactcatgaggcagcaggatgaagaacttgatgagctcagtgaaagtgtccaaaggattggtggcgtgggactaaccatacacgaagagctgtctggacaggaaaggatcctaaacgacctaagcttggagatggagactacttccaacagacttgatttcgttcagaaaagagtggccatggtgataaagaaggccggcatcaagggtcagatcatgctgatcgtgttcctggttgttctgttcatcattcttttcgttttggtgttcttgacatagccaagtgcacca

SEQ ID NO: 5941 - DNA, 397 bp, Zea mays
  Clone ID: LIB3118-025-P1-K1-F1
aaaataaatcggcaggaaaaagatattttgtttaccatgaggaatgctctgcttggccaaaattctaatattttgacatcagtaggatccagcagggttgaagggctattgcctgaaaaggcacttgataacctcagctataggtttcaaggtcttgtgcctggtgatgcagaacacattcaagcatatggtcctgatgcacttggatctcatgctcgagattctcagaatatgcatcatcttctacagggtacgccttctatgatggcacctcaccctatgatggatcacattgttaataggaaacagccagctccatttgatatggcacagtctatacaccatgattcttaacgttcttttccatgtaatgtgaatcatatgcaacataatcttc

SEQ ID NO: 5942 - DNA, 392 bp, Zea mays
  Clone ID: LIB3118-025-P1-K1-F10
gtcgtcaccagcagggtgtgtcccggccggtcctctctagtttctaccccggcccccaacattggcctgatgctgctgccatgtagcccagcgctcccccctcggcttcaccggcggcggcggcaacgacggtgaaaactacatcgggtgctagctccgacggtggtgcgtgccctgttgacgatagggcgcgcggggcgcgggcagcttgtaggcgttcgatcggccatgtagggcaactatacatctttggcaggtctccatcatcctccgtgggagagaagatgcatggtaatggagtgcgtgtgtatgtatgtgtatgcccatggcgcgcgcgcgcggctctgggcgagtcacagtagagatgcaatatcatgtatccagtatctttc

SEQ ID NO: 5943 - DNA, 264 bp, Zea mays
  Clone ID: LIB3118-025-P1-K1-F11
gagacgcgtgcgagtagatcgggcatcatccgtctgcacaaatacagcaggggggtgcagcggattttttaaccgttagagtgttaggacaagattgtgctcaaaggtgatgcaccttctagagtggagcgcggtggaatccgcactgctgcttacgcatacgaccacacgcggtactgatgataatataggcattgccacctcaatgctcctatttacactgacgtggatggcgtgcgcaagatgcaccactcactgctctga

SEQ ID NO: 5944 - DNA, 259 bp, Zea mays
  unsure at all n locations
  Clone ID: LIB3118-025-P1-K1-F12
cccacgcgtccggttcaccacaccaacaagtagaaaaggagcctgatcagagaagaagtggtggctatgccgacgcgggcagcgccatcgtcctctctcttgccgnttgcactcgccggcggcgcagtcgtcgtagaacttgcctgttgctcctgttgcgcgaccaccgattcttcaggcctaggagcgggagccagagagatggctgcacggaacgaccccaagtgcgaggagatggtgccctgcaccttcaggcgct

SEQ ID NO: 5945 - DNA, 394 bp, Zea mays
  Clone ID: LIB3118-025-P1-K1-F2
aaaggccgggggttggggtttgtcactatgagcactgtcgaggaggctgagaaggctgtggagatgttccatcgctatgatgtcaatggaaggcttctgactgtaaataaagcagctcctagaggctctcgtgtggacagacctcccagacaatctgggccttctctcagaatttatgttggcaacctgccttggcaagtggatgattctagattggtggagttgttcagcgagcatggtaaagtagttgatgccagagttgtctatgaccgagaaactgggcgttcgcggggatttggttttgttactatggcatcgcaggacgaattggatgatgctattgctgcccttgatggacagagtttggatggccgtgccttgcgggtgaatgttg

SEQ ID NO: 5946 - DNA, 72 bp, Zea mays; identical to SEQ ID NO: 1800
  Clone ID: LIB3118-025-P1-K1-F3

SEQ ID NO: 5947 - DNA, 323 bp, Zea mays
  Clone ID: LIB3118-025-P1-K1-F5
gagaccaacaggcaacatagaacggggaatacatttgcaacaatagagcaacaggggcggccaagatattttccatccttatgctccttgctctttctgcatgtgttgctaacgcgaccatttttcctcaatactcacaagctcctatagctgcccttcttcccccataccttccatcaatgaccggttcactctgtgaaaacccagcccttcaaccctacaggctccaacaagcaatcgcaacaagcaacttacctttatcacccctgttctttcaacaatcgccagccctatctttggtgcagtcattggtacaaaccatc

SEQ ID NO: 5948 - DNA, 388 bp, Zea mays
  Clone ID: LIB3118-025-P1-K1-F7
cgcaaattgcttccatcttcttagcaactggactggacgggccggcgggctacgtacggcccaaaagcaaagctccctctctgctactccgaccgacatcctcagaaagaccagttagactagaccaccgccgctccacgcttccaccctctgctgcgggacgagctcgagaggttcgccggcgctcctgctcggccgacggccgtcgccgcgcgataataggccaggagacgcggagagatgctgtcgtccgccgccttctcctcctcaccgctgctgcgcggagccccgctgcggacccggcacctgctcctggcccctcccgcgcgcgcgcaacgcggggcggcgagccgcgcccgcggtggcctttcgaggttccacgccccgt

SEQ ID NO: 5949 - DNA, 399 bp, Zea mays
  Clone ID: LIB3118-025-P1-K1-F9
gtggggttcgcgcactgcagtacgttcgcggaccgtatccagccgtagtcggtggaccctactatgaacgcgacttacgcggatgacctgcatgcggtttgcccgtgggtggtggaccccaacatcgctctgcagatgaaccctgcgacgccgaatgcctttgacaaccagtacttcggcaacctggtggacggacgtgggctgttccactccgaccaggtgctcttctccgacgcccggtcgcagcccaccgtggtggcgtgggcgcagaacgccaccgccttcgagcaggccttcgtcgacgccgtcaccaggctcggccgcgtaggtttcaagaccgacccgtcgctcgatgacgttcgtcgcgactgcgcctttctcaactgaaaaggatggaca

SEQ ID NO: 5950 - DNA, 303 bp, Zea mays
  Clone ID: LIB3118-025-P1-K1-G1
ataggaaagcggccacaaagagttaaggttggcttagcaaatggacctttgccgaccaaggcaagccgggggcacaccatcgcttaaacgcaagacagggcctccttcccttaattattcttgaacaccaaggcgtgctacaacgactatactaggctgctgcatacgaccgacgcctgcgcgctctgcgccaaggcgacgtgacgcgaatgcaacatatccatgtacagagggcacacgcccttgtgctgcaagaagtgcctgagagagctcatgcggctcagcgccgttccgaccctgcag

SEQ ID NO: 5951 - DNA, 291 bp, Zea mays
  Clone ID: LIB3118-025-P1-K1-G10
ctgtatgccaagaaggactacaacctggcgaagcacccgcagatagatgtgcccaacctacaggtgatcaagctcatgcagagctgtaagttcaaggagtatgttaggtagaccttctcctggcagtactactactggtatgttaccaacgatggtattgagcacctacgcaactacctggacctcccgtttgagatcgttcctgccacgctcatgaagtgtgccaagccacctggccggccatttggctctgaccctccgggtgaccgcccaaggggcccatgccctttt

SEQ ID NO: 5952 - DNA, 65 bp, Zea mays
  Clone ID: LIB3118-025-P1-K1-G11
cgtccgttcgcccacgccgtaggtctagattgcttatgaattaccccgtaaatagattaagccct

SEQ ID NO: 5953 - DNA, 369 bp, Zea mays
  Clone ID: LIB3118-025-P1-K1-G12
gagactcttgcgatccaaggggtacaccctaaaggagggggctaagcacaacaccaaggacgactgctggctcgtcatcggcggcaaggtgtacaatgtgaccaagtttctggaggatcaccctggaggcgatgatgttctgctgtcttccactgccaaggatgctaccgatgatttcgaagatgtggggcacagcagcactgtccgtgcaatgatggacgagtacttagtgggtgagattgatgcacctacgatacccaccaaggtgaagtacacgccccccaagcagccgcactacaaccaggacaagacccaggagttcgtcatcaagatcctccagtttttggtccccctcacaatactgggtct

SEQ ID NO: 5954 - DNA, 390 bp, Zea mays
  Clone ID: LIB3118-025-P1-K1-G2
gaaggtggaatccagtaccaccaatagagcaccattggcgaccaagatattttccctccttatgctccttgctctttctacatgtgttgctaacgcgacaattttccctcaatgctcacaagctcctatagcttcccttcttcccccataccttccatcaattatagcttcaatatgtgaaaacccagctcttcaaccatataggcttcaacaagcaatcgcagcaagcaacatacctttatcgcccttgttgtttcaacaatcgccagccctatctttggtgcagtcattggtacaaaccatcagggcacaacagctgcagcaactcgtgctacctctgatcaaccaagtagctttggcaaacctttctccctactctcagcaacaaac

SEQ ID NO: 5955 - DNA, 256 bp, Zea mays
  Clone ID: LIB3118-025-P1-K1-G3
cccacgcgtacgcggacgcgtgggtttgaacgtaaatgagctaattaaagcctttgcagagaaaacaaacgacgggggggcggtctatagaacccaagcttactgacgcgtagctgcaatgtgcttgatattttattgagcaatctaattctaatcaaggggcccgagtagtacaaggatttgaatcgaaacaccatggcttctgctaacggaagcgcatcgtgcttctgttcactgattgcagcttaagaaaagg

SEQ ID NO: 5956 - DNA, 235 bp, Zea mays
  Clone ID: LIB3118-025-P1-K1-G4
actacacgtacggttcaatacaggaacatgaacaaaaggagcctgatcacagaagaggtggtggcgatgccgacgcgggcagcgcagtcgacatctctcttgccggtggcactctccggcgccgcatacgacctggaacttaccaactgctgttgttgcgcacccaccgatgttcctggcctgggagcggtagacagagagatggcgctcaagaagtatgccaagcgcacctggg

SEQ ID NO: 5957 - DNA, 104 bp, Zea mays
  Clone ID: LIB3118-025-P1-K1-G5
cccacgcgtccgtttagattgcttatgagttatagttcaataatgaagttttttggatgatgtttgtggcgtcccagaaataagaaagtacatttctagattct

SEQ ID NO: 5958 - DNA, 221 bp, Zea mays
  Clone ID: LIB3118-025-P1-K1-G6
cccacgcgtccgcttagaccggtcattacatgtaggcgaacactcaagttggagggacggtggatgtgtcgaccgtgacaccagaccgaccagatttcgctcatagtgaagtcaccttcgagacggagggtgtagaaagcccaaactttgcttcacctgcacgaccacaagatatatctaatatagcgtgaccaaagcacacttcaatggtcaatgttaca

SEQ ID NO: 5959 - DNA, 400 bp, Zea mays
  Clone ID: LIB3118-025-P1-K1-G7
gcaccaggcgctgacaactggggcggtgaatggggtgctggcgaagctgcagctccagctgctagcattccagctgctggcgcagactgggctgctgctccagctcctcctgctgacggtgtctgggacgcagctgcggttccacctccagcatcagcccccggatgggaacaaggcgcggcccccgtcgcggcggcggcgacccctacctgggagtaattaataaagagtaaatgagcatggtggatggcttttactagtcataagcggagcttgttggtaggcacttgctggagtagttgcttcgaacttctttttacgtgttagatgaggtaaaaaaacaattttgtgttattgactctgctgtgagcgagtgaaccttgcgcattttcgttatctc

SEQ ID NO: 5960 - DNA, 398 bp, Zea mays
  Clone ID: LIB3118-025-P1-K1-G8
gcaccaggcgctgacaactggggcggtgaatggggtgctggcgaagctgcagctgcagctgctagcattccagctgctggcgcagactgggctgctgctccagctcctcctgctgacggtgtctgggacgcagctgcggttccacctccagcatcagcccccggatgggaacaaggcgcggcccccgtcgcggcggcggcgacccctacctgggagtaattaataaagagtaaatgagcatggtggatggcttttactagtcataagcggagcttgttggtaggcacttgctggagtagttgcttcgaacttctttttacgcgttagatgaggtaaaaaaacaattttgtggtattgactctgctgtgagcgagtgaaccttgcgcattttcggtatc

SEQ ID NO: 5961 - DNA, 377 bp, Zea mays
  Clone ID: LIB3118-025-P1-K1-H1
cccacgcgtacgcggacgcgtgggtttgaacgtaaatgagctaattaaagcctttgcagtgaaaacaaacgacatgatgttggtgatatacctgtcttctctgatccggagcgtcattgcgcttcacaatttaatcaacaataagatgctaaacaaggagcacgagaaggccgaggattcgaaaccaaccgccattcctactgctgacggaagctaaacgtgcttttgatcactgattggtggctaagaaaagggaagaaacttgtgatgacatgttagcacggttgtgctcgaaccaactgtcttgaccttgaatggacattttttatgtttattttatgtatgatcaggtcaacggcaagagaaaccaattacac

SEQ ID NO: 5962 - DNA, 409 bp, Zea mays
  Clone ID: LIB3118-025-P1-K1-H10
cccacgcgtccggttcaccacagcaacaagaagaaaaggagccagatcagagaagaagtggtggcgatgccgccgagggcagcgccgtcgtcgtctctcttgccgcttgcactcgccgccgccgcagtcgtcgtagcacttgccgtttcctcctgttccgcgaccaccgatgctccaggcctgggagcgggagcgagagagatggtggcacgggacgaccccaagtgcgaggagatggtgccctgcaccttcaggcgctgcatccagtactgcgtcagcatcgggctgcagcccaaggggttctgcaactccaagcccaacatgcaggtctactgctgctgcgtcatcccctagcatcatagctcctcgtcaacacacctaaatctgcagccctgcgctagagaagata

SEQ ID NO: 5963 - DNA, 396 bp, Zea mays
  Clone ID: LIB3118-025-P1-K1-H11
cccacgcgtccgattgcaccaagaaatccatcgagaggccgccgacaggggaattaatggcgtcgtcgtctagcagcagccaccgccgcctcatcctcgcagccgccgtcctgctctccgtgctcgcggctgccagcgccagcgccgggacctcctgcgtgccggggtgggccatcccgcacaacccgctcccgagctgccgctggtacgtgaccagccggacctgcggcatcgggccgcgcctcccgtggccggagctgaagaggagatgctgccgggagctggcggacatcccggcgtactgccggtgcacggcgctgagcatcctcatggacggggcgatcccgccggtcccggacgcgcagctggagggccgcctaaaggacctgcccggct

SEQ ID NO: 5964 - DNA, 390 bp, Zea mays
  Clone ID: LIB3118-025-P1-K1-H12
gctggtgtaatgttttaccagatgctcttcggaaagcgtccttttggtcatgaccagacccaggagagaatacttcgggaagatacgattatcaatgcacggagagtggagttcccttcaaagccagctgtatcaaatgaggcaaaggatctgatacgccggtgcttgacatacaaccaatcagagagaccagatgtactaaccatagctcaagatccttatctctcatacgcaaagagatagccgctatgccggagaacactaaggcaagggtagctgatcatttatgagattatttatgtatggggatggataatcttgcgaaggagcaaagtgttccacaagctcaagaagaccacaaagggggtaactgtatatgttggaaatttt

SEQ ID NO: 5965 - DNA, 385 bp, Zea mays
  Clone ID: LIB3118-025-P1-K1-H2
ccaaggggtacgcggccgcgtgggtttgaacgtaaatgagctaatgaaagccttcgtagtgaagccaaacgatatgtttacatggattgaccactcgtctatgatccgtagcggctcagagcttcacattgcaatcatcattacgatactcctcacgtgacacgtgaaggcacgatattcaaacccaactgtcattccttctggtgtcgaaagcgcaacgtgcttatgctcactgactgcatgctcatagaagggaaaacactcgtgaggacttttttgcgcggaggcgctggtaccaactgtctggacccagcatggacattaactagggctatcttatgtcagaccaggtgatcgggaagagaaaccaccctccttgcatgag

SEQ ID NO: 5966 - DNA, 420 bp, Zea mays
  Clone ID: LIB3118-025-P1-K1-H3
aaaaaaaaaaaaaaaaaaaggggaaaaaaaaaaaaaaaaaaaaaaaaaaaatttaaagaaaaaaaaaaaaaaaaaaaaaaaaaaaaaaatttaatttaaaaaaaaaaaaaaaaaaaaaaaaaaaaaaaatttaaaaaaaaaaaaaaaaaaaaaaaaaaaaaaaaaattttttttttaaaaaaaaaataaaaaaaaaaaaaaaaggggggggccgttttaagggttccaagtttatcgcccgggggttgggaagttttttttttttttttggggcaccaaaattaaattccggggccggttttttaaaaggggggtggggggaaaaccctggggttcccaaatttaattcgtttggaaaaaattccctttttcgggggtggggttataagaaaagggccccacccggtgggcttttcaaaa

SEQ ID NO: 5967 - DNA, 298 bp, Zea mays
  Clone ID: LIB3118-025-P1-K1-H4
gagaatgttgggtttcaaggtgtacaccctgggggaggggccagaacaaaaaacaaggggcggcgattccgtcgagatgggaggcaaggtcttatatgtagccaattgcactgagcaccaccgcagaggcgatgaaacttgccgtttcctcctgttccgcgaccacccgggttataaggaagagggcgggagcgagagagatggtggcacgggacgacaccaagtgcgaggagatggtgccctgcaccttcaagcgctgcatacagtactgcgtcagcatcgggctgcagcccaaggg

SEQ ID NO: 5968 - DNA, 411 bp, Zea mays
  Clone ID: LIB3118-025-P1-K1-H5
cgaggatgtcgggatccaaggtgtacaccctcgaggaggtggctaagcacaacaccaaggacgactgctggctcgtcatcggcggcaaggtgtacaatgtgaccaagtttctggaggatcaccctggaggcgatgatgttctgctgtcttccactgccaaggatgctaccgatgatttcgaagatgtggggcacagcagcactgcccgtgcaatgatggacgagtacttagtgggtgagattgatgcagccacgatacccaccaaggtgaagtacacgccccccaagcagccgcactacaaccaggacaagacccaggagttcgtcatcaagatcctccagtttttggtccccctcgcaatactgggtctggccgtcgctgtaaggatgtacaccaagtcggaatctgcct

SEQ ID NO: 5969 - DNA, 405 bp, Zea mays
  Clone ID: LIB3118-025-P1-K1-H7
cccacgcgtccgcggacgcgtgggcgagtccaagatcatcctcgatcgggagacgcagaggtcccgcggcttcggcttcgtcaccttctccacggaggaggcgatgcggaacgccatcgagggcatgaacggcaaggagctggacggccgcaacatcaccgtcaacgaggcccagtcccgcggcggccgtggaggcggcggcggcggctacggtggtggccgtggaggcggcggctacggcggtggcgggcgccgtgatggcggcggcggctacggcggtggcggcggcggctacaggggcggcggtggctacggtggtggtggtggcggctacagcggtggcaaccgtggcggcggctacgggaactccgacgggaactggaggaactgagcggtggggcccgc

SEQ ID NO: 5970 - DNA, 394 bp, Zea mays
  Clone ID: LIB3118-025-P1-K1-H8
caactagcaacatagaaagcacaatagtgtaccaacaatggcagccaaaatattttgcttccttatgctccttggtctttctgcaagtgctgctaccgcaaccattttcccacaatgctcacaagctcctatagcttcctttcttcccccatacctctcaccagcggtgtcttcagtatgtgaaaacccaattcttcaaccctacaggatccaacaggcaatcgcagcaggcatcttacctttatcacccttgttcctccaacaaccgtcagccctattacagcagttacctttggtgcatttgttggcacaaaacatcaaggcacaacaactacaacaacttgtgctaggaaaccttgctgcctactctcagcaacagcagtttcttccattc

SEQ ID NO: 5971 - DNA, 401 bp, Zea mays
  Clone ID: LIB3118-026-P1-K1-A1
cgctcaccgtcacgctatccgccaacgccaccgacggccagaacccgctgttcccggtctccttctcggcggtggccacgtgcgcgccgtcgtccaagctgcccgccggcgccggcgccgtcggcgtagcggggctcgcgccctcctccagcagccagcagtcgctcccggcgcaggtggcgcgcacgcagaaggtcgccgacaaggtcgcgctgtgcctgcccagcgacggcaggtccacgtcgggcgacagcgtcggcgtggccatcttcggcggcggcccgctgttcttcgtgccgccggaccgcggtgacttcaccacgatgctggccggtacggcaccgctccacgcccgagccggagccgtttcccccgggtactacgtctcctccaccggcata

SEQ ID NO: 5972 - DNA, 330 bp, Zea mays
  Clone ID: LIB3118-026-P1-K1-A10
cccacgcgtccgatatgaaaaatgtaacccattcttttgtttttttagctcactggccattcgctgggagtttcgggcttaataccgatattttagcaacaaatctaataaatctaactgtagtggttggtgtattgattttttttggaaagggagtgtgcgcgagttgtctatttcaagaatagattggatctatccggctgcactttagaatatttttaggattttttttgaataaaaagaaaaagggcacgatcttaaacccttgctttgggaaggcagcaacccatcgttggaggcgccatcttttacattacatatgagaggtac

SEQ ID NO: 5973 - DNA, 381 bp, Zea mays
  Clone ID: LIB3118-026-P1-K1-A12
actaagtcaagcagtcgcgactgtaggggttgtctcaataggaatttgggtctcgtcgttccttgggttacagtagaactagctactccgtccggatgtgtatattacctactgagtttacatctttctgctagcagtagcagctgcaaaatatatgtatattcgtatatagtgtgtgaattgatagggtaatctgtttgggtaatactgagtgaacgtgtgaagtactgatgaagatcgtgtagttgagctcctggtgagtcatgagtcatgacagctgagtggcttttgagtaatcctcatgtcaaaaaaaaccaagcaaaagaagaagaagaaaaagatcttctcatcagttgcttaaaaaaaaaaaaaaaataaaaa

SEQ ID NO: 5974 - DNA, 418 bp, Zea mays
  Clone ID: LIB3118-026-P1-K1-A2
ctagagagagagagaggagcgttggagtttggaagcagttcctgcggccggagccccggggcatattcctcgcccggagatcccgtacccgaccctcccctgataaacaaacgcaagcgtcagggagggagggagggacagagagaggtagagagggccggggcgaagggggcaaagatgcgttcttgaggagcctgtgcaggggaggtccaatccagaggccgccattccttttctttttccccccaacctctgcaggctcttcagatccagcaatccggcttgtttcttttgctggttgatttatactctatagtggttctctacttagcatcaagtcttggcatggcaatggcctcgtagctcgcggctctctaataggaataattttactcaaaatgaagctatagcgtcatgc

SEQ ID NO: 5975 - DNA, 351 bp, Zea mays
  Clone ID: LIB3118-026-P1-K1-A3
cccacgcgtccgcccacgcgttcgcggacgcgtgggcgaggacctagccatccgccaccaagggtggcgatgtcacctgatgttgttggggatttgctaccacgaggaagagtaccaccctcaggacctagccatcccccacccttggtggtgatgtcacctagcattgttggggatttgctaccacgaggacctagccatccaccacccttggaggaaatgatcgagtatagcaatgatgtcctcggtgcgaatgataaacttgttgggaatgtaaggatgaatacataaggataatgtgatgtaacttatagacaataacataaataaaaagaatatcatgtgttgttt

SEQ ID NO: 5976 - DNA, 386 bp, Zea mays
  Clone ID: LIB3118-026-P1-K1-A4
tagatcgcgagcggccaatgcacctacatacctgcaacaacaattgttgcaacagattgtaccagctctgactcagctagttgtggcaaaccctgctgcctacttgcaacagctgcttccattcaaccaactgactatgtcgaactctgctgcgtacctacaacagcgacaacagttacttaatccactagcagtggctaacccattggtcgctgccttcctacagcagcaacaattgctgccatacaaccagttctctttgataaaccctgtcttgtcgaggcagcaacccatcgttggaggtgccatcttttagattacatatgagatgtactcgataatggtgccctcattccggcatgggttttctaaaaataatcaatata

SEQ ID NO: 5977 - DNA, 232 bp, Zea mays
  Clone ID: LIB3118-026-P1-K1-A5
tagatcgcgagcggccaatgcacctacatacctgcaacaacaattggcgcaacagaggggaccagctctgactcagctagttgtggcaaaccctgctggctacttgcaacagctgcttccattcaaccaactgactatgtcgcactctgctgcgtacctacaacagcgacaacaggtacttaatccactagcagtggctaacccattggtcgctgccttcctacagcagcca

SEQ ID NO: 5978 - DNA, 387 bp, Zea mays
  Clone ID: LIB3118-026-P1-K1-A7
gtctgatcggaacgctttccgtcgaaatgttgaatatgcatgcactgcagaagaagtgcagcatcattttcaagtctggaggaactgtcaacagagcgacaatgctgaactgacaggtggggcaaccaaagagggtggctcatattgaattagttagaatcggagcctttcaggaaactattcattctggaagaatcataactgcatgggcgccatctaaaggccgcacctcagtagatttacgttcctgggctgagaaagctcttcagatccaggtataaagcttgcctgttttgttggttgatggatactcgatattggttctgtacttagcagaaagtcttggtatggcaacggcctagaaactagtggttgtgttataagaat

SEQ ID NO: 5979 - DNA, 356 bp, Zea mays
  Clone ID: LIB3118-026-P1-K1-A8
aagtctcggaccccaaccctcgaggaaggcgaccggagatggcggcgtcgtcggcggtggagaagctcaaggtcctctgggactcgcaggtcaacgacgaggagcagtgggcgctcaattataagctgctgaaggccgctggtctgtttgcgggatccatcttcctgatgcggaacttcggtgatctgatggccatttagtaggcttatcagcgttgtttacttggatcctatgagtgttgttttgatgttccaataattcctgctatgaatatgaaagttattttgctctgaagaggactagatctgtgccgatagtgcttgatcttaaactttgtagccatagagattagaccc

SEQ ID NO: 5980 - DNA, 334 bp, Zea mays
  Clone ID: LIB3118-026-P1-K1-A9
cccacgcgtccgatatgaaaaatgtaacccattcttttgtttttttagctcactggccattcgctgggagtttcgggcttaataccgatattttagcaacaaatctaataaatctaactgtagtggttggtgtattgattttttttggaaagggagtgtgtgcgagttgtctatttcaagaatagattggatctatccggctgcactttagaatatttttagtattttttttgataaataagaaaaggtgcacgatctcgacgaattacttctgaataacttcagaaatcatatggaagaaccatagcatttcgcgattcattggtaaatttac

SEQ ID NO: 5981 - DNA, 285 bp, Zea mays
  Clone ID: LIB3118-026-P1-K1-B1
atctgcgccttaattggcttctccccaatcccaacttggatggggaagatgatttacatactgtttttcggagttggtaaattcatagcaccgtggtaaaagaaaaaggagaaaatgatagctatactggttttgggagtgttgacttacagtttgggttgagatctgagaacatgttcatgtctgagccagacagctagtcggtaatggtactaatgtctgaatttttgttgctggtgatattcaaaggttttatctggaaaaaaaaaaaactaatgaataact

SEQ ID NO: 5982 - DNA, 398 bp, Zea mays
  Clone ID: LIB3118-026-P1-K1-B10
cccacgcgtccgcccacgcgtccgcccacgcgtacgggttgctacttcttttggcagggagctgtcattgctttcacacaaaagttaattacgattgttgataagcaattgaaggcctcgtattcctgcaaaaggccatcaggagaggatgcctgcagcaccagtttatatgggtgcaccgagaaaaagtcttcctctggtctggactatgcaaagattggatttgattttatacaacagagcaatcaaattggcccactcttccataacattgccctgcaacaatacattctactttgttctcaggtactaaagggaggcttgagggataagcctggaaagaacagagatcactatgattcatgctactgtctcagcggcctcgcagttagccagta

SEQ ID NO: 5983 - DNA, 171 bp, Zea mays
  Clone ID: LIB3118-026-P1-K1-B11
caattgctgccatttagccaacatgctttgacgaatcctaccaccttattgcaaccgcccaccattggtggtgccatcttctagattttttatgatttatactgtaataataaagttctcatgctgatatgtgcgacctctcagtaataaagtattagagatctatatttt

SEQ ID NO: 5984 - DNA, 171 bp, Zea mays
  Clone ID: LIB3118-026-P1-K1-B12
caattgctgccatttagccaacatgctttgacgaatcctaccaccttatggcggccgcccaccattggtggtgccatcttctagattttttatgattgatactgtaataataaagtgctcatgctgatatgtgcgacctctcagtaataaagtattagagatctatatttt

SEQ ID NO: 5985 - DNA, 418 bp, Zea mays
  Clone ID: LIB3118-026-P1-K1-B2
gataaatgggggtttacttgcgcccgcaggtcagcgtgccccaaatgatgctgtaggcaatgatgatgggttcttgaaatatatatcaagaagagtcgttgctatatttcttgaagtactctcttttttgcggttcttcattcgtcgacgacaacactcggaaaatgttcattcacatactgcaactgcacccagtagtctggcaaatcttcagacaattaaggaagatcgtgtaaatccttgtctggagcgtcttgatcgacttgagtcaatgtttaatcagctgagcaaaaagcctccagagcttccagaggacaaggaccgggccatacaagattcttttgacaggataaagtccattgagtttgatctgcagaagacaaagaaggtattgcatgcaacagttatcaaacaaatg

SEQ ID NO: 5986 - DNA, 414 bp, Zea mays
  Clone ID: LIB3118-026-P1-K1-B3
gaggaggcatcatctttggcaaaacctgcatcaaagacctctgctgcatcaaaaagtgggacaagcgtatcacctgtcacagaggatgaaatcaggagtgttcttcttgcagtggctccagtcaccacacaagatctggtatccagattcaagtctaggcttcgaggtgcagaggacaagaatgcatttgctgaaattctgaagaaaatttcgaagatacagaagacgaacggccacaactacgttgtcctcagagatgacaagaagtaaataaccgaacaaaggcgctgacatcgcaaccgttggctgtactgagataatatgtttatgtaacatgctgccttgaagataaacaagtctgtaacactagaattgtcttctaacccttgtgtacttgaattttattttactatt

SEQ ID NO: 5987 - DNA, 402 bp, Zea mays
  Clone ID: LIB3118-026-P1-K1-B4
caataggcgtcccccaagaactagtaaacatggcaaaactgttgagcctgttcttagccctctcctttgtagcagctatgtttgccataggctctcatgctgatggagactgtgagaatgacctccaaagcctgataagtgactgcaagacatacgtgatgttcccagctaatccaaaggtccctccttcggatgcttgctgtggtgtcatcaagaaggcaaacgtttcttgcttgtgctccaaggtcaccaaagaaactgaaaaggttgtgtgcatggagaaggttgtgtatgttgctgagcagtgtaagaggccatttgagcatggcttccagtgcggaagcttccagggttccagcaaactgatgatatcacaagagggaagcgcttgacgtagtcttt

SEQ ID NO: 5988 - DNA, 344 bp, Zea mays
  Clone ID: LIB3118-026-P1-K1-B5
ctattttcgtctcctccccacagcagcccggcgaaaaccctagtaagcaaaccaccggagcagcggcgcttgcgcgggcggagccatggcggacgacgattacaacgaaattgacatggggtatgaggatgagcccccagaaccggagattgaggaaggagctgaagaagagcctgagaacaacgaagatgcccctgatgacgtcataggtggtgagggtgaagataaggaacaggaaaagaccaagcgtgaacgcaaaacaacaaaatacatgacgaagtacgaaccgtgcgcgcatgctgggtacacgagccttgcagataagcatgaatgctccagtcatg

SEQ ID NO: 5989 - DNA, 406 bp, Zea mays
  Clone ID: LIB3118-026-P1-K1-B6
cttcatgtggaagaggtacgagcagttaaatggggggaccgaagagaagctgagggctctcatagagattaaagaaactgttcagcacaggaagcatcttgacagcagtatcgatttcgttgggaggctcgtcttcggatttgagaaagggccttcgatgcttgaggctgttagaacctctggtcaaccattagtcgatgactgggactgtttgaagaggatggtgagtatggtgatttttcttattcgactcttgatacaaggcatgcacatgaaaatgaagctccttactgctgtgcgcacattcccatcctgtcagtgcgctgcctaactcatttcacttggtggcttttgcttaggtgcggattttcgagttccaatgtgggtcacttactcagtacgggat

SEQ ID NO: 5990 - DNA, 378 bp, Zea mays
  Clone ID: LIB3118-026-P1-K1-B7
tcgatggaggtttactagctaccaacggtcaactgggctgaccgaagagaatcggcggggtctaatggtgattagagtatctatccagcacagacgcatctatccagctagaaggactctctttgtagcgcttgtttatgagttgacaacggcacttcgatactggtgagttgcagactgctacggcacccattagtctatcacaggtaactgcaagtagaggaagatcgtgtatggtgcttgtctggaagcggatgatcgactccgaggcattgacaaataaattgagctcaatgccgtgagggcttcaataggacaactgtccgtgccatacaataatcttttgactggatagagttcatttaatttgatctgcat

SEQ ID NO: 5991 - DNA, 411 bp, Zea mays
  Clone ID: LIB3118-026-P1-K1-B8
agaccaacaagcaacatagaaagtggaatccagtagcaacaatagagcaacaatggcgaccaagatattttccctccttatgctccttgctctttctgcatgtgttgctaacgcgacaattttccctcaatgctcacaagctcctatagcttcccttcttcccccataccttccatcaatgatagcttcagtatgtgaaaacccagctcttcaaccctataggctccaacaagcaatcgcagcaagcaacatacctttatcacccttgtttcaacaatcgccagccctatctttggtgcagtcattggtacaaaccatcagggcacagcagctgcagcaactcgtgctacctgtgatcaaccaagtagctctggcaaacctttctccctactctcagcaacaacaatttct

SEQ ID NO: 5992 - DNA, 410 bp, Zea mays
  Clone ID: LIB3118-026-P1-K1-B9
cccacgcgtccgcccacgcgtccgcccacgcgtccgggttgctactccttttggcagggagctgccattgctttcacacaaaagttaattacgattgttgataagcaattgaagtcctcgtattcctgcaaaaggccatcaggagaggatgcctgcagcaccagttcatatgggtgcaccgcgaaaaagtcttcctctgctgtggactatgcgaagtttggatttgattttatacaacagagcaaccaaattggcccactcttccataacattgccctgcaacaatacatcctactttgttctcaggtactagagggaggcttgagggataagcctggaaagaacagagatcactatcattcatgctactgcctcagtggcctcgcagttagccagtacagtgccatgac

SEQ ID NO: 5993 - DNA, 384 bp, Zea mays
  Clone ID: LIB3118-026-P1-K1-C10
ggcccgcgagggcgagaccgtcgtccccggcgggaccggcggcaagagcgtcgaggcccaggagcacctcgccgaagggcgcagccgcggaggccagactcgcagggagcagctggggcagcaggggtacagcgagatggggaagaagggcggtctgagcaccacggacgagtccggcggcgagcgcgccgccagggagggcgtcagcatcgacgagtccaagttcaccaagtagtcctatcgcgtgcgtgcgtacgcagcgttcgtagctgtctgcgtagtgtaccttggccgtagctagtgctactctctactttggagtagctgaatgataataatgtaactagcagcatgcatgtaggcgatcatacatacgtacgtaca

SEQ ID NO: 5994 - DNA, 171 bp, Zea mays
  Clone ID: LIB3118-026-P1-K1-C11
caattgctggcatttaaccaacatgctttgacgaatcctaccaccttattgcaagcgcccaccattggtggtgccatgttgtagattttttatgatttatactgtaataataaagttctaatgctgatatgtgcgacctctcagtaataaagtattagagatctatatttt

SEQ ID NO: 5995 - DNA, 171 bp, Zea mays
  Clone ID: LIB3118-026-P1-K1-C12
caattgctgccatttagccaacatgctttgacgaatcctaccaccttatgtgaggcgcccaccattggtggtgccatcttctagattttttatgatttatactgtaataataaagttctcatgctgatatgtgcgacctctcagtaataaagtattagagatctatatttt

SEQ ID NO: 5996 - DNA, 96 bp, Zea mays
  Clone ID: LIB3118-026-P1-K1-C2
gataaatgggggtttacttgcgcccggaggtcagcgtgccccaaatgatgctgggggcaatgatgatgggtttcttgaaatatatattaagaagag

SEQ ID NO: 5997 - DNA, 320 bp, Zea mays
  Clone ID: LIB3118-026-P1-K1-C3
cacaggtcaagcccggtactcaacctggtcagaaggtagttctgagaggaaaagggatcaagacaagaaactcaccgtactacggagatcaatatgtccatttcaatgtcaacatccccgaaaatttgacgtctagacagcgggagctgatcgaggaattcgcgaaggaggagcaaggcgaagacgagaaggacgccaaggcagcagctggagcatcggggggatagccggttttaggagccacagtagtgccttttagctggtatttataccgtgaccatagacctgtctcaaattcgcagcggaaaaaatatatagat

SEQ ID NO: 5998 - DNA, 409 bp, Zea mays
  Clone ID: LIB3118-026-P1-K1-C5
atgcgtccacgcctgcgaggacgcgaccgtccacccgtgcgggactgctcacaagagccgtggagaagctgaccccgtccgagcccaagaaacccaagaccatcgaggtcaaggtcgcctgaggtgggactaggtcgcccgatcgtggctctgaagatgtgggagcagtgccagcgagttgtgaggacctctacctgtgtggaatgtggcgaggaataatcgtagtctgtagtgggggtgcttctgatgtgcgtgtttgcgctccttcggtctcggtgtctgtctaccaatccctatctgatgcatgggctacggtctcgtatgaaccatgccggatgctttcagtatgttcatctacctgtgtctgttgtctaaataatccgcagtcttcattgccagaaagactaca

SEQ ID NO: 5999 - DNA, 327 bp, Zea mays
  Clone ID: LIB3118-026-P1-K1-C6
ccgacgcctgcctggacgcgcagctacacgcttttgtacccgaccaagtggacggtgagcatctgttatgtcttgctccgcgctatagagcgcaggcatagcagccgtctgctttctagcttgagaacggctgctcgagcaatgtacagcatcatcaccatcccgctgagcatggagaaggacatgaccgcataggcgtgtggcgtgatgaacgcgatggtctttgagcatctgctatcagcggagctagactacacaggcgggcccgtctacacgaactgcaatgacatacacccaggcgcggcgtgcttggtgcccaatagcatg

SEQ ID NO: 6000 - DNA, 375 bp, Zea mays
  Clone ID: LIB3118-026-P1-K1-C9
aaaaaaaaaaaaaaaaaaaaaaaaaaaaaaaaataaataaaaaaaaaaaaataaggagggaaaaaaaaaattaataaaaaacataaaaataaatacaataaaaaaaaaaaaaaaaaaaaaaaatggggcgcccgttttaaaggttccaagttttcttccccgtgcttgcaactttatattttttttttggggcaccctaattttattttattggccgtgctttaacaacgtttggattggaaaaaccttggagttaccaaatttaattcttttgtaacacttccctttttcaccacttggtattttactaaaagggccctcaccgatcctctttccaaaaagttgcccagcttaaatgtcaattggaccccccct

SEQ ID NO: 6001 - DNA, 412 bp, Zea mays
  Clone ID: LIB3118-026-P1-K1-D1
gtgaagaatttagtggaactttggttaccctaagaatggctcttgatgatctttgtggcctgactggcgaaaatgtgggtcccttacctggttatattgaagatgctgttaaagctgcatataatcgctacatgacatatctggagtcctttggtcctgaggaaaactatctaagaaagaaggtggagactgagttggggacaaaaatgatacacctcaaaatgcgatgcagtggcataggttctgagtggggaaagatctccctgattggcacctcagggatctcaggttcctatgttgagctaagggcatgatgggacgtctgcaggtaaccatggaaatcatcgatgagctgaggaagtctgtagatcagaatatgccagtactgcattttcctttcccctttctagct

SEQ ID NO: 6002 - DNA, 405 bp, Zea mays
  unsure at all n locations
  Clone ID: LIB3118-026-P1-K1-D10
gcaagaagaaggctttcacaaagtatgctctcaaatatgaaaatgatgctggcaagaaggaaattcagctgcagcttgagaagatgaagaaatatgcttctgttatccgtgtcattgctcatacccagattaggaagatgaagggtttgaagcagaagaaggctcacctgatggagattcaggtcaatggtggtaccattgctgacaaggtggactatggctacaaattctttgagaaagaggtccctgttgatgctgtcttccagaaggatgagatgattgacatcattggtgtgaccaaagggaaaggttattaaggtgtggtcactcgttgnggtgtcacccggcttccccgcaagacccacaggggtctccgcaaagttgcttgtatcggtgcatggcatc

SEQ ID NO: 6003 - DNA, 379 bp, Zea mays
  Clone ID: LIB3118-026-P1-K1-D11
ctttccctttcccatccgcgcgtccctactcctccccctccctcctcaacgacgcgagaagacgcaatcctgggagctccgaaccctagctcctaatttgagccccggtgtcatcgattcctcaggagcccgccgcgattcggctcccgtagcagcatagggctccaccgctccccagctgcatcagcatcgacggcggcggcgcgccgccgcgactacgctcgaggaagcacctagtctcggcgggttctcgttcttggaggccttccataaggcggtttcgtggtgtccgagcccggatctacggcgatctgcaagcggaaggcgatagatgaggcgattcagtggtaacccccaatccggtgggtttccggctggc

SEQ ID NO: 6004 - DNA, 114 bp, Zea mays
  Clone ID: LIB3118-026-P1-K1-D2
cggacgcgtgggaaaaaaaaaaaattaccataaaaaatgactcttgataaatcttgggcggggctgactaattaatatttgtatcaccttacctgaagaatattaaaaatgctg

SEQ ID NO: 6005 - DNA, 372 bp, Zea mays
  Clone ID: LIB3118-026-P1-K1-D3
cccacgcgtccggttacctggatgttcactgttttgttggtacatgtcaaaaaaaaaggagaaaaaaaccatattaaaaaaaaaaaaaaaaaaaaaaaaaaaaaaaaaaaaaaaaaaaggaaaaaaaaaattttaaaaaaaaaaaaaaaaaaaacccaaaaaaaaaaaaaaaaaaaccaaaaaaaaaaaaaaagggggggccgttttaaagaatcaaagttaacgtacgcgtgaatgcaaggtaaaagtttttttatggggcaactaaaataaaattaatgggccggggtttaaaaacgtggggattggaaaaaccttggggtaaccaaattaaatggcttggaaaaaaatccccttttcgcaagttggcgt

SEQ ID NO: 6006 - DNA, 233 bp, Zea mays
  Clone ID: LIB3118-026-P1-K1-D4
cggacgcgtgggcggacgcgtgggcggacgcgtgggttggcgtattgcatgcagtgaataatttatcttcgcgttgggttggtgacaatgttgggaacggatttgaattggggtttatgcttgccatctcctcatatctcgaactcagctgctgtttcactgagtaatgtacatttccctggtaatggtacttgtgcactctgctgctttatggaaaagagtgcattttactg

SEQ ID NO: 6007 - DNA, 371 bp, Zea mays
  Clone ID: LIB3118-026-P1-K1-D5
ggagatggtgcagataatgtcgacttaattggcccatctgggccgcctgaaccgggcagcaatactgttgagggccgaaacgagtgcctgaccaatcatttccgttcggagttacccaacgatccggaccaggacatcacctgtcaggcaacatacttgtatttacagcacaacctcatagaacacatgtacgctcgtcgaggctgcatgggttgatgcattctatccaaatgatgtgctacaccaatgttgtttactttcaattatgatgtgtaccaggattagtagtcgtatgtggtttgtatgtccgtagttcacaaagtatggttccttgtaagtgttatgcctctagtacaaataagttgcatatg

SEQ ID NO: 6008 - DNA, 354 bp, Zea mays
  Clone ID: LIB3118-026-P1-K1-D6
cggacgcgtgggctcaagtaattaacagaaaatatatttcatcattgaaaatgagtgccgttgttttgggtgctactggtagggagaataagacatcatggcctgaggtggtgggcatgtacatcaaggaggcaagagagatcattcttaaagacatgcccaacgctaacattcaagttctaccggttggctcgcttgtgacccaagactttcgccctgatcgtgttcgcatcttcgttgatattgttgcccagacttcaacagttggctgacaaggatatgccttatctataggccaaataaacaaagcctacttttatgtatcatggctaataaatactacatttcttggtt

SEQ ID NO: 6009 - DNA, 364 bp, Zea mays
  unsure at all n locations
  Clone ID: LIB3118-026-P1-K1-D7
aatnagtaaaaaaacccgcgacccaacgccacgcgtggcacacattttaaaaaaaaaaaaaatacactaaaaaaaaaaaaaaaaaaaaaaacgccgcccggaaatacattttttaaaacaaccaaacaaaaaaaaaaaaaaaaaaaaacgcccccccctcataaaaaacccaaacttacctccccgtccttccaaatacatatcatttattatacttcacccaaaattaaattaccctccccctaacaaacaaccatcaccctgaaaaacccctccctctcccaaacataaacccctttcaaaaaaccccccttttcccaccttccataaaacaaaacaacccccaaccaactcccctttcaaa

SEQ ID NO: 6010 - DNA, 379 bp, Zea mays
  Clone ID: LIB3118-026-P1-K1-D8
atcaggcaatcgatgggctatagtcatgtcccgcagtgctggattttctgagcaggttgtggagttggacttcttgtacccgagcgagggcatccatagacgctgggacaatggcttccgtattactgcaatggctgccacgatggatcagtctgcgctgatcctaagcaagccaaggcgtcgcccaagagacgagacacaagagactctgcggactacacagtttcccagtcaacatgtcaaggacaagtgggccaagaatctctaccttgctgggatatgctatgggcgaaccggggcctaacatcgttcggtgctgacctagctgttggttgaggtatattttgagctttttattaactgctaacaacatgagcca

SEQ ID NO: 6011 - DNA, 316 bp, Zea mays
  Clone ID: LIB3118-026-P1-K1-D9
cggacgcgtgggaagaaactgagaaggttgtgtgcatggagaaggttgtgtatgttgctgagcagtgtaagaggccatttgagcatggcttccagtgcggaagctacaaggttccagcaaactgatgatatcgcaagagggaagcgcttgacgtagtctttagatttcaattgttgcagccgatcaaccttcttagggttgtataatatgaagtcaatgttgagactaatgtgaggtgggagaggcctattgatgcatcaaaagtattatgagctaataataaagccttctccacagattttatgattgctcaaaa

SEQ ID NO: 6012 - DNA, 392 bp, Zea mays
  Clone ID: LIB3118-026-P1-K1-E1
gcacctccaaagtctccaggagttgatgatgtaactggagagccattgattcaaaggagggatgacactgccgaggttttgaagtcaaggcttgaagccttccacaaacaaactgagcctgtgattgattattactctaagaagggcttggtggtaaatctgcctgcggagaaaccaccaaaggaagtgactgctgaggtgctgaaagccctctcatgatgaaatgcccctttgtctgagtttattcaggttaagcataatatgtactgaaatccctttgtttgggtttcttcacaccagcatcatgcagtttcctttttgtgcgattacaccattttgtcatagctttgacaagcttggtaactgtctgaataatctgttttgaatgaagg

SEQ ID NO: 6013 - DNA, 399 bp, Zea mays
  Clone ID: LIB3118-026-P1-K1-E10
gtttttgaacggagaagttggacccaagaccattcatgttcctactggggagaagctttctgtttttgatgcggccatgagatacaaatctgagggccatgctactataatcctcgctggcgctgagtatggaagcggcagttctcgtgattgggctgctaagggtccgatgctcctgggagttaaagctgtaattgccaagagctttgagcgtatccacagaagcaacttggtggggatgggaatcattcctctgtgcttcaaagctggtgaggatgctgattcacttggcctcactggacatgagcggtacagcatcgatctccctaccaacctcagtgagatccgtcccggccaggatgtgactgttactaccgacaatgggaaatctttcacttg

SEQ ID NO: 6014 - DNA, 291 bp, Zea mays
  Clone ID: LIB3118-026-P1-K1-E11
gtttttgaacggaaaactcgcacccataaccattcatgttcctactgaggggagggggtatatttttgatgcggacatgagatacaaatctgatggtcatgctactataatcctcgactggcgctgagcatggaagcgagcaggctcgcgattgggctgatgaggcaccgatgctcatgtgagttaaagttgtcattgccaagagctcggagcgtatccacagaagcaactaggtggggatgggaattattcctctgtgctggaaagctgtaggggatgttgattgatttg

SEQ ID NO: 6015 - DNA, 334 bp, Zea mays
  unsure at all n locations
  Clone ID: LIB3118-026-P1-K1-E2
cctccgccgtcgacttccgtcgcccccctatcccgcgtccgggcttacccgatggcacggctgcactggcttgaggctgtcctgccgctgnggatcatcggcggcatgctctgcatcatgggcaacgcccagtatttcatccacaaggccgcgcacggcaggccgaagcacatcgggaacgatatgtgggacgtcgccatggagcgccgcgacaagaagctcgtggaacaatcctccggcaactagggtattgatcaacctcaaacttttctggatgttgacgaacctcgttcaaaagcacagaagtactgctcttttgtttcctgtacaattg

SEQ ID NO: 6016 - DNA, 67 bp, Zea mays
  Clone ID: LIB3118-026-P1-K1-E3
gccacacaaaggtttttgtattttggttctcgccgcctacgccgtcgacttacgaggcggcactagc

SEQ ID NO: 6017 - DNA, 349 bp, Zea mays
  Clone ID: LIB3118-026-P1-K1-E5
cgacccatacatgcggtttttgaacggacaattttgacccaattaccattcatgttcctactgcggagagggcgtctgtttttgatgcggccattataaacaaatctgaaggccatgctactataatcctcgctggctctgagtatggaagcgtcagttctcgtgattggactgctaagggtcccgattctctttcgagttaaagctgtaattgccaagagctttgaacgtatttacagaagcaacttggtgggggatgggaatcatttctctgtgcttcaaagctggttaggatgctgtattcacttggcctcactggacatttaaccgtacagcattgaatctccct

SEQ ID NO: 6018 - DNA, 137 bp, Zea mays
  Clone ID: LIB3118-026-P1-K1-E7
atcctgacgttttgctttagcgtatcttactttgcttcgtggaacatgaatttcaagtgttttgagggtattacagtgccttatgtgaacttgcctatcttgtgctgaacatcggaatgtatcctccgagtatgttt

SEQ ID NO: 6019 - DNA, 220 bp, Zea mays
  Clone ID: LIB3118-026-P1-K1-E8
cggacgcgtgggcggacgcgtgggctttcgatggacttgtctggcactattgttgatatgaatgtcgcttaggacaacaatcggtttatgtaggatagatgctgcagattcctgaaagacggtacttgaactgcccggagcatgttgtattttcttaagatgctggaactaagacggcttagttgaatttgcactatcaagtgagtctcggtcttgcccc

SEQ ID NO: 6020 - DNA, 343 bp, Zea mays
  Clone ID: LIB3118-026-P1-K1-E9
cctcaacctccagcccaacctccagcccgggatcgagagcaatggcgctcgccaaggccaaggagatcgttgcctccgctcccctcgtcgtcttcagcaaaacttcctgccctttctgcgtccgtgtgaagcagttgttcgagaagctcggagcaagctacaaggccattgagttggataaggaaagtgatggagctgagctccagaatgccctgaaggagtggactggacagaggactgtcccaaatgtcttcatcaatgggaagcatattggcggctgtgatgatactatggcactgaacaatgatgggaaagcttgtgcctctgctgactgaggctggag

SEQ ID NO: 6021 - DNA, 387 bp, Zea mays
  unsure at all n locations
  Clone ID: LIB3118-026-P1-K1-F1
cccacgcgtccggcaacatagaaagcacaatagtgtaccaacaatggcagccaaaatattttgcttccttatgctccttggtctttctgcaagtgttgctaccgcaaccattttcccacaatgctcacaagctcctatagcttcccttcttcccccatacctctcaccagcggtgtcttcaatgtgtgaaaacccaattgttcaaccctacaggatccaacaggcaatcgcaacaggcatcttaccattatcacccttgttcctccaacaaccgtcagccctattacagcagttacctttggtccatttggtggcacaaaacatcagggcacaacaactacaacaactngtgctagcaaaccttgctgcatactctcagcaacatca

SEQ ID NO: 6022 - DNA, 404 bp, Zea mays
  Clone ID: LIB3118-026-P1-K1-F10
caacaggcaatcgcagctggcatcttacctttatcacccttgttcctccaacaatcatcagccctattacagcagttacctttggtgcatttattggcacaaaacatcagggcacaacaactacaacaacttgtgctagcaaaccttgctgcctactctcagcaacagcagtttcttccattcaaccaactagctgcattgaactctgcttcttatttgcaacaacaacaactaccattcagccagctatctgctgcctacccccagcaatttcttccattcaaccaactgacagcattgaactctcctgcttatttacagcagcaacaactactaccattcagccagctagctggtgtgagccctgctaccttcttgacacaaccacagttgttgccgttcta

SEQ ID NO: 6023 - DNA, 274 bp, Zea mays
  unsure at all n locations
  Clone ID: LIB3118-026-P1-K1-F11
cagcagaaggacgcaaggcgcannacangagagacaaaaacaaaacggcacaaggccaaacaaaaacgaggagcaagcaaaccnngccggcacccgaaccaacggcaggaccccacagacagacaaacacaggcaccggacccagagcgcaaaggacgagaccaacagagacaaggcagccggcgaaccgcaaacaacccgacgaaggangcaaacggcaagacaaccagagcacngaacccaccgggggacggacagagacaacaaaaacgac

SEQ ID NO: 6024 - DNA, 321 bp, Zea mays
  Clone ID: LIB3118-026-P1-K1-F12
gcaaacattgctgctttcttgagacaacaacatttgttgccattttacccacaggttgtgggaaacattaatgccttcttgcaacagcaacaattgctaccattctacccacagaatgcggcaaacattgttgccttcttacaacaacaacaattgctgccatttagccaacatgctttgacgaatcctaccaccttattgcaaccgcccaccatcggtggtgccatcttctagattttttatgatttatactgtaataataaagttctcatgctgatatgtgtgacctctcagtaataaagtattagagatctatatttt

SEQ ID NO: 6025 - DNA, 350 bp, Zea mays
  Clone ID: LIB3118-026-P1-K1-F2
agaagagcaaggagaccgcaggcgccgccaccaccaccaccacccaggcgccaccggcatccgagaaggcagccgccgccgagcccgtcaaggacgagctgtgagcatccaaggtgtggacggctgtggctgcgtaagcatgggaagaaaacctggcgctaacgtgcctccaacgcctagtttttgcgggaccagagggagagagagagagggacggagttagagagagaggggatctgcgacgtgttttgctctgcggcggcatgtctgtgtatcccattgaggttatgtacacaattacaccgcgggcgggtgggtgttttttagttaattatcacaagtgacagtag

SEQ ID NO: 6026 - DNA, 144 bp, Zea mays
  unsure at all n locations
  Clone ID: LIB3118-026-P1-K1-F4
aaaaaagcaaanggaanngggaaaaaaaaaaaaaaaaaaaagaaaaaaaaagagggggaaagggggaccagagcaagagagaacaagcgaaagaacgggcacaaaagacgagggaacaaggaaaaagagaaagagagagagaaa

SEQ ID NO: 6027 - DNA, 408 bp, Zea mays
  Clone ID: LIB3118-026-P1-K1-F5
aatttccaaggatgcaatcacaatcccaaggcataggaagtgctgcagggaacgccctaattccaccgcagcttcgtggaaggagcaatgttgttactgaagacatgagcaaactctttgtggctaaacgaaaagagtagcatcttaaccttttctggacctgaacctctgtttggactccatagactgataaacgcatgtactggtcccatagtgcaatggatgtgccggcatgatccaaggttgttgctgaatcctaaagaaccggacgaaggatgctaacggtaggacgacctggtctcttagcctaccgtgggctgttgtcagatgtcaaaaatgcccccttagaagtttagaacatttctttggtgctcactcgcgtttcatgttcaacggtgctacatgact

SEQ ID NO: 6028 - DNA, 309 bp, Zea mays
  Clone ID: LIB3118-026-P1-K1-F7
catagagccgcgccgccgcaagagaggagagagcgcctccaacgccacctggaggagaggacagcgcgccagggagggggaggaggaagaagaacatggggaagggcgtcctggaggtgcacctcgtcgacgccaaggggctctccggcaacgatttcttagggaagctggacccctacgtgatcatgcagtaccggagccaggagcgcaagagcagcgttgcccgagaccaatgaaggaacctttgctgtaacgaggtgttcaagtttcagatcaactcggtctgtgccaacgtgcagcacaagctta

SEQ ID NO: 6029 - DNA, 409 bp, Zea mays
  Clone ID: LIB3118-026-P1-K1-F8
ctaaaacccgcgatctgaagcgactagtcgaaggcggcggcggcgatggggagcgaccaggagacggagaagaagaagaccccggtggcactaatgcccatcgcgaagcccctcgcaggaaagaagctctgcaagcggaccctcaagctcgtgcgacgagcctctgaggccaagtgcctcaagcgcggagtcaaagaggtagtcaagagcattcgccgcgggaacaaagggttgtgtgtgattgctggaaatatttctcctattgatgtgattacacacgttccaatactatgtgaggaatctaatgttcccttacatatatgttcccatcaaaggaggatctggcaaccgcggaacccattaagaggccaactggttgcgtcctggttctgaccaaaccaaaaagggg

SEQ ID NO: 6030 - DNA, 341 bp, Zea mays
  unsure at all n locations
  Clone ID: LIB3118-026-P1-K1-F9
cccacgcgtccgtgatgggctcggatcctttggaggctggctcccaggctgcccagctggtgctggatatccgcaagaggaagggtctgaaagaacagatgactcctctttctgagtttgaggacaagctctaatcttttcgtttttgctactgttactggttttaattgtcactcggagtctgggaactatttatatcttgtttccttttagttgtcaagtgcatgtttctgaacatcattggtcatactggactatccaagtgctggtgagacacttttttctatcaatcgtgatgtaacagttggtatatgctggcttggtgggaagtgtttgtngtt

SEQ ID NO: 6031 - DNA, 358 bp, Zea mays
  unsure at all n locations
  Clone ID: LIB3118-026-P1-K1-G1
gttgctattgattttttgagggagtgaggcagaaacatgcatttggtgaaggtgctaattatggtgnntccatngnnnngggcagcaacaaagtttcccagttttttttttttgcccacctctttttatccggggccgcgcttttataaaaaaacaaattttcccccccttatttttagcgtttttttttttttttagggcccaaaaaattaaagcgcgcggcgcggatttacaaacggggggatgggaaaacccggggggaccccaattttaaggcgttgggaaaaatttctttttttgccgaggttgtgtataaagaaaagcgccccaccattttttttttcaaaaattttgcccc

SEQ ID NO: 6032 - DNA, 407 bp, Zea mays
  Clone ID: LIB3118-026-P1-K1-G10
cccacgcgtccgcggacgcgtgggtattttcagcattcaaaaacacaccaagcgaagcgcactagcaacgacctaacaccaatggctaccaagatattagccctccttgcgcttcttgcccttttagtgagcgcaacaaatgcgttcattattccacagtgctcacttgctcctagtgccagtattccacagttcctcccaccagttacttcaatgggcttcgaacatccagccgtgcaagcctacaggctacaactagcgcttgcggcgagcgccttacaacaaccaattgcccaattgcaacaacaatccttggcacatctaaccctacaaaccattgcaacgcaacaacaacaacaacagtttctgccatcactgagccacctagccgtggtgaaccctgtcac

SEQ ID NO: 6033 - DNA, 289 bp, Zea mays
  Clone ID: LIB3118-026-P1-K1-G11
cccacgcgtccgcggacgcgtgggtattttcagcattgataaacacaccaaggggggcggactaacaactacagtaataccaatgactaccaagatattagcccttcttacgcttgttgccctttagggagcatcaacaaatgcgttcattattgcacattgctaacttgctccaagtgccagcattgcacagatcctcgcaccgagtcacttaaatgttcttagaacatccattcgagcgagcatacaggctacaattagcgcttgcgatgagcgccttactacaacc

SEQ ID NO: 6034 - DNA, 321 bp, Zea mays; identical to SEQ ID NO: 6024
  Clone ID: LIB3118-026-P1-K1-G12

SEQ ID NO: 6035 - DNA, 371 bp, Zea mays
  Clone ID: LIB3118-026-P1-K1-G3
cccacgcgtccgaaaaaaaaaaaaaaaaaaaaaaaaaaaaaaaaaaatattaaaagggggaaaaaaaaatatttaatttaaaataaaaaaatattaattaaaaataaattaatatatttaataattttatattatataaatttaatgaaggggcgccctttttaaaggttcaaattttacttccccttttttccaaatttatattttttttttagggcccctaaatttaatttccttgcccgggtttttaaaacttggtatttggaaaaaccttggttttccccaattaattccctttgaaaaaatttccctttttccccagtttgcttataaacaaaaaggccccccccatttccccttttcaaaaattt

SEQ ID NO: 6036 - DNA, 345 bp, Zea mays
  Clone ID: LIB3118-026-P1-K1-G7
cggacgcgtgggcggacgcgtgggcggacgcgtgggcggacgcgtgggcggacgcgtgggggcggcggctgatgtggagtaccgttgcttcgtcggcgggcttgcctgggccaccagcaacgagtcgctggagaatgccttcgcctcctacggcgagatcctcgactccaaggtcatcaccgaccgggagacggggaggtctcgcggcttcggcttcgttaccttctcctccgagaactccatgctcgacgctatcgagaacatgaacggcaaggagctcgacggccgtaacatcaccggttaaccaggcccagtcccgtggcggtggccgttggcggcggtggc

SEQ ID NO: 6037 - DNA, 279 bp, Zea mays
  Clone ID: LIB3118-026-P1-K1-G8
cggacgcgtgggcggacgcgtgggcggacgcgtgggcggacgcgtgggcggacgcgtgggggcggcggctgatgtggagtaccgttgcttcgtcggcggtcttgcctgggccaccagcaacgagtcgctggagaatgccttcgcctcctacggcgagatcctcgacttcaaggtcatcaccgaccgggagacggtgaggtctcgcggcttctgcttcattaccttctcctccgagaactccatgctcgacgctatacagaacatgaacggcataggagc

SEQ ID NO: 6038 - DNA, 185 bp, Zea mays
  Clone ID: LIB3118-026-P1-K1-H1
gaggaaactatgtactgtagtaataatgtaatggagccgctgactagctacctatagctagttcactcgtttagcggcgatgagtaacggagtgtcacccatcaccatgggtggcagtgtgagcaatgacctgaatgaaccattgaaatggaaaggaataatatatagggaaaaaggatgtttgg

SEQ ID NO: 6039 - DNA, 406 bp, Zea mays
  Clone ID: LIB3118-026-P1-K1-H10
gtcaaatgataaataccaagtaatcaagccacctgtagattttgaatggtttgaatttgaaaatgaatccaggctatccaaaaacctttatttgggaaaatcagagaaaggggtgtactgtgctttgcgttatccgtcaaccgtttccttttcgatttacattctcgatgaatctgacggcaaaacggagtggataatgaagcctcactattatctcgggagtcaaggaattgacgggcctggaccctggactctacaagatatcaactataactgggacacccagtatgaagacagtatggaggaaaagttcgagtgggactccgacagcgataatgttgtcgagaacagaagcaacggtggatatccttgccttcctcgtatagaacttcttgggtttcacccc

SEQ ID NO: 6040 - DNA, 393 bp, Zea mays
  Clone ID: LIB3118-026-P1-K1-H11
cccacgcgtccgcccacgcgtgcggcctctttacgatgcttgctgatcctcggcatccagccgaatcaaccagtaatacaaatgagtcagttctgaaggttgctctagaccatggcaaggcatgtggtgtgatcaagtcccatgaccgtgttgtcgtttgccagaaggtgggagattcatcggctgagaagatcattgtgctggacgactagggcatactttgccgattttttttttgacgaggccggaatatgttggctatatgtataatcctatagctttctttacaaatgagcatgtttgtcctatggtgccatcataggacttgcttagcgatttaaaactcgaatatgtgccacctaatatgggcagatggaacaatgaaatcatact

SEQ ID NO: 6041 - DNA, 443 bp, Zea mays
  Clone ID: LIB3118-026-P1-K1-H12
actcggaatctccgcggctcgacccatgctttcgaggctgcctaactctttggtgtttcaaggacaagacaaatatacgagcaagcagtggaatccggcctcccagacaaagatgttctgacaatgtgcatgaagttcgctgagctagagagaagccttggtgaaattgatcgttcgcgtgccatctatgtgcatgcatccaactatgccgatccaaataatcctgacttttggaagaagtggaatgactttgagattcagcacggtaacgaagacacattcagggagatgcttcgtatcaaacggacagtggctgctagccgtagtcagacacatttcatactaccggagtacttgatgcagaaggatcagaggttaaacctggacgaagccgttgacactctgaaacgtgctggcgtacctgaggacgagatggcagcctt

SEQ ID NO: 6042 - DNA, 390 bp, Zea mays
  Clone ID: LIB3118-026-P1-K1-H2
ccgacgccaaggatgtgaagcttaacttgaagtctgcaggccatttcaacttctcagctaagggctcagatgactggccctatgagtttgacattgagctgtttgatgctgtgaatgtggaggagagcaaagcagctgttgccccaaggaccatatgctacctgataaagaaagctaagagcgggtggtggccaaggctgctgaagcaggagggcacgccacctgtgttcttgaaggttgactgggacaaatggcaggacgaggatgatgaagatgctggatttaatgactttggtgggttggacttctcgaaactggacataggaggtgctgatgacgacgatatcggggatgatgaagatgatgtggttgaaagtgctaacaaagatg

SEQ ID NO: 6043 - DNA, 409 bp, Zea mays
  unsure at all n locations
  Clone ID: LIB3118-026-P1-K1-H4
atcaagaagaagtacggtcaggatgcgacaaatgttggggatgaaggtggttttgcacctaacattcaggaaaacaaagaaggccttgaactattgaaggcagccatagaaaaggctggctacactggaaaggtggtcattggaatggatgttgctgcttctgagttcttcggtgagaaagacaagacttatgatcttaatttcaaggaggagaacaacgatggctcaaagaaaatttcaggcgacagcctgaaagacctgtacaagtcctttgtttctgagtaccctatcgagtcgatcgaagacccatttgatcaggacgactggagcacttatgccaaactcactgatgagattggacagaaagtgcagattgtangagatgatcttctcgttaccaaccccacca

SEQ ID NO: 6044 - DNA, 355 bp, Zea mays
  unsure at all n locations
  Clone ID: LIB3118-026-P1-K1-H5
ctcatcaagacattaccacccaatcagctcctcgaagaaaattagttaccacccaagcaacttgcaaattatgtcacctctagagttttctcgatttgtttagatccgatatgcgccaggcctctcaaaccattcgtcttcggcgccacgtattccctgatgagaaatattcaaaactacacctgtcacaaaaggggaaaaactatggttggacaataagattcatgaaaaaaatatgtgatccaaattaagtgtacatctcttttatcaaggaaccaaatgtaagttggtcaaatatatacatataagtactaatatttatgggagaaacactaataccatattaactattnaa

SEQ ID NO: 6045 - DNA, 412 bp, Zea mays
  Clone ID: LIB3118-026-P1-K1-H6
accctgccgcctcaccgcctctctcaatctgataccgcagatccgtcgtccggtgagtggaagccgcacgaacccatggcctccggcgagcttgcctgcacctacgccgctctcatcctcagcgacgatggcatcgccatcaccgccgagaagatcgccacgatcgtgaaggcggccaacatcaaggtcgagtcctactggccggccctcttcgccaagctcctggagaagcgcaacgtcgaggacctcatcctctccgttggatctggtggcggagctgctccagttgctgctgccgcacctgctggtggtgctgcggctgctgctgccccggctgtcgaggagaagaaggaagaggccaaggaggagtctgatgacgacatgggcttcagcctgttcgactgaggagacc

SEQ ID NO: 6046 - DNA, 370 bp, Zea mays
  unsure at all n locations
  Clone ID: LIB3118-026-P1-K1-H7
ccggcccggaaggaccggggcgacccacgcgcgcgccgacgccaaggaagngaagcaaaactcgaaggcagaaggccagcacaacaccacagctaagggcgcagaagacgagccccacgagaacgacagggagccgcccgaagccgggaaagaggaggagagcaaagcagcagacgccccaaggaccagacgctacctgataaagaaagctaagagcgggtggtggccaaggctgctgaagcaagagggcaagccacctgcgtttttgaaggatgactgggacaaatggcacggccaggatgatgaagatgctgcatttaacgactatggcgggatggacttctcgaaacaggacataggaggggctgat

SEQ ID NO: 6047 - DNA, 297 bp, Zea mays
  Clone ID: LIB3118-026-P1-K1-H8
acgacgccaagggtgtgaacctacacttgaagcctgcaagccattctatcttgtaagctgaaggcttatacgactggtcatgaaggattactgggggaaactaattactctattcagtgctgcggactacctacaggttgaggcttgacaggagcgatacaacaagcggggagcatatattgtccttagtccacctgattttgctacccatgttgtccataacttcggagctgtaaagcctgcacctgcagcccatccgatctatgattttgaacaagtgatcgactcagatgtaga

SEQ ID NO: 6048 - DNA, 358 bp, Zea mays
  Clone ID: LIB3118-026-P1-K1-H9
gcccttcctcatgctattctacgtctggatcttgctggtcgggacctcaccgactcgctcatgaaaattctcactgagaggggttattccttcacaacctccgccgagcgagaaattgtaagggacatcaaggagaagcttgcgtatatagctcttgactacgagcaagagttggagactgccaagaacagctcctcagttgaaaagagctatgagctacctgatggccaagtaatcaccatcggtgcagagagattcaggtgccccgaggtcctcttccagccatccatgattggtatggaggctgctggaatccatgagacaacatacaattcaatcatgaagtgtgatgtggata

SEQ ID NO: 6049 - DNA, 349 bp, Zea mays
  Clone ID: LIB3118-027-P1-K1-A1
cgtggttgccagcttcctgctgctcttcttcgccgggaactacgcgctgtatgtgtacgcgcagaagacgctcccgcccaagaagaagaagccggtctccaagaagaagctgaagagggaaaagctgaagcagggggtctccgctccaggggagtgaacagacagggatgccgccgatcggcccgtcctgagcccgccccctatttacatgattgtcgaagaaaaaagatacacctgctggagccgcggtgttcgtagtaattttgttctgtagatgccttttgttgtcttcgatggtagtgcatttgtattggacaccttgtttcagcaactgatgaatctttagcct

SEQ ID NO: 6050 - DNA, 385 bp, Zea mays
  Clone ID: LIB3118-027-P1-K1-A10
aagatttgtgagggtgatccgcgctgagaagagatggctaagatcgccgcggcggcggcggcggcgctgtgcttcgcggccctggtggccgtggccgtctgccaaggcgaggtcgagcggcagaggctcagggacctgcagtgctggcaggaggtccaggagagcccgctcgacgcgtgccgccaggtcctcgaccggcagctaaccggcggcggcggcggcggcggcgttggcccgttccggtggggcaccgggctccggatgcggtgctgccagcagctccaggacgtgagccgcgagtgccgctgcgccgccatccggagcatggtcaggggctacgaggaggccatgccgccgctggagaaaggctggtggccattggggc

SEQ ID NO: 6051 - DNA, 409 bp, Zea mays
  Clone ID: LIB3118-027-P1-K1-A11
cccacgcgtccgcccacgcgtccgggcacggatgacgatgatgttttggatgatcccgtatcaaggaaatccaagggatcctcttcttattcgaagcaaaatgtcgggaaaaggtctaggaaggttatgactgaggtggaagaagacgaggagataaatacgaggcaaaggcaaagggcgtgagtgcgagatgtgcaactgcaacgacggttatatgatgtcagatgccggcaggcagccacttctgatgtatgttggatcattttatacttgccttcgtactgtaacgcggagtgctgagacgtcaattaattttggccgtggtttacatggcctaatatgttatgagcaagaaaaaagaaacgggtgataactcagttgaggatgtgggagaccatctagttttcga

SEQ ID NO: 6052 - DNA, 215 bp, Zea mays
  Clone ID: LIB3118-027-P1-K1-A12
cccacgcgtccgcccacgcgtacgggcacggatgacgatgatgttttggaggaggccggataaaggaaatccatgggatccttttcttattcgaagcaaaatgtcgagaaaaggtctaggaaggttattactgaggtggaagaagtcgaggagataaatacgaggcaaaggcaaagggcgtgagtgcgagatgtgcaactgcaacgtcggttata

SEQ ID NO: 6053 - DNA, 371 bp, Zea mays
  Clone ID: LIB3118-027-P1-K1-A3
cccacgcgtccgcaccacctgattgactagagcaaaagcacaagccgcccacgcatctcgattcgagcagcagcagcagcagcagcagaagcggcgcgcagagctcgtgacgagagcaaccttccttccgttcctcgatcgccatggacaaggtgctggccttctcgatcctgagcgcgtcgccggccgacctctcctccacgggcgccggcttcggcgggagctgggcgcggctgtcgtggcggaggggcgcggacgaccagcgtgcgccgcggcgggagcagcagcagcggcaggaggaggaggacagggagaagcgagacccgcgctcccgcgacggcggcgcgcacgcgagcggagggggagcggcg

SEQ ID NO: 6054 - DNA, 65 bp, Zea mays
  Clone ID: LIB3118-027-P1-K1-A4
cccacgcgaacgaacagcctgataggctagagtaaaagacgaagccgtccaagcagatggattca

SEQ ID NO: 6055 - DNA, 413 bp, Zea mays
  Clone ID: LIB3118-027-P1-K1-A6
agaccaacaagcaacatagaaagtggaatacagtagcaacaatagagcaacaatggcggccaagatattttccatccttatgctccttgctctttctgcatgtgttgctaacgcgaccatttttcctcaatactcacaagctcctatagctgcccttcttcccccataccttccatcaatgaccgcttcagtatgtgaaaacccagcccttcaaccctacaggctccaacaagcaatcgcaacaagcaacttacctttatcacccctgttctttcaacaatcgccagccctatctttggtgcagtcattggtacaaaccatcagggcacaacagctgcagcaactcgtgctaccagtgatcagccaagtagctctggcaaacctttctccctactctcagcaacaacaatttc

SEQ ID NO: 6056 - DNA, 402 bp, Zea mays
  Clone ID: LIB3118-027-P1-K1-A7
gtagaataaaatgatgggagttattttgttgtagatgccaaaagtcaaccatgttctttttgaaatgtgctctgaacatccatgtttactcctaccaggagatgaaaaaaaaaaaaaaaaaaaaaaaaaaaaaaaaaaataaaaaaaaaaaaaaaaaaaaaagatgccaacaatcaaaacagaactgagcccccccccaaaaaaaaaaaaatgaaaaagaaatttagatacaactactaaaacacgtggagttcgtagaaataaaagaaaaaaaaaaaaactgggggcgccttttaaaaaaaaaaaaattttattggccacccttggaacattaactgtttttttttgtagcccaaaaaaaaaaaaaaaaagcggcgtttaaaaaaaagggggaatgaaaaa

SEQ ID NO: 6057 - DNA, 161 bp, Zea mays
  Clone ID: LIB3118-027-P1-K1-A8
gtgatgattaatctcagcatactgtttaagtttccccatgcttcaatgtctcgctggggctgatgacttaggaagatggactcagttgctcgaaggctggaagagaatttatgggatcaaaacagtatggtgatgattaatctcagcattttttttcttgc

SEQ ID NO: 6058 - DNA, 428 bp, Zea mays
  Clone ID: LIB3118-027-P1-K1-A9
cccacgcgtccgcccacgcgtccggccgaggttagcacgcgtcctgcgtccatggaggacgaggagcacgaggtgtacggccaggagattcccgttgacggcgaggacgtcgacatggctgccggcgacgatgccaccaagctgcaggaacttgacgatatgaagcgccggctcaaggaaatggaggaggaggccgccgcgctccgcgagatgcaggccaaggttgccaaggagatgcaaggtgtagatcccaatgcaaccacatctgaaaacaaagaggagatggattctcggtcagtattcattggaaatgttgactatgcgtgcactccagaagaagtgcagcagcacttcaattgttgtggaactgtcaacagagttacaatcctgactgacaagtttgggcaaccaaaaggttttgcttacgt

SEQ ID NO: 6059 - DNA, 281 bp, Zea mays
  Clone ID: LIB3118-027-P1-K1-B1
attcagccagctagctgctgtgagccctgctgccttcttgacacagcaacagttgttgccgttctacctgcacgctgcgcctaacgttggcaccctcttacaactgcaacaattgctgccattcaaccaacatgctttgacaaacccaacagcgttctaccaacaacccatcattggtggtgccctcttttagattgcttatgagttatagttcaataataaagtttttttgctgatgtttgtggcttcccaaaaataagaaagtgcatttctagtttctt

SEQ ID NO: 6060 - DNA, 382 bp, Zea mays
  Clone ID: LIB3118-027-P1-K1-B10
acccaaccccaacacaaagagcgctggatggaaatccaaaaacagaaacgcatctaccgggggggctccctgccggcggacttactcgtctaaaccaaaaaggacgaggcctgccaccaccgaaagaaccagcacaggctcagcagaacaacaaacacagtagaaaccgcccgctccacactgggcccggcaggctcatgcacacggcgggcaagggcaagccctggaaccgcctctacaccggaagggcatgccccctcgaccacaccagaaaagaggacgacctctacatacacggcgactattgaggagccccctcgcccgccggcgaccggcattgaaccacccaagtcttcttggtagagagaaaactactaaatcc

SEQ ID NO: 6061 - DNA, 255 bp, Zea mays
  Clone ID: LIB3118-027-P1-K1-B12
agctggtgtgagccctgctaccttcttgacacaaccacagttgttgccagggtaccagcacgttgcgcctaacgctggcaccctcttacaactgcaacaattgctgccattcaaccaacttgctttgacaaacccagcagagttctaccaacaacccatcattggtggtgccctcttttagatctcttatgagttatagttcaataataaagtgttttatctgatgttcgtggcttcccagtaataagaatgtac

SEQ ID NO: 6062 - DNA, 429 bp, Zea mays
  Clone ID: LIB3118-027-P1-K1-B3
ggcttctcctccccctccggttcgggttcgggttcgtgaggttctccggggttcgggttcgtgggtgagcggatcgagatggcggcgtcggatgttgagtaccgctgcttcgtcggcggcctcgcctgggccacggacgaccactccctccacaacgccttcagcacctacggcgaggtcctcgagtccaagatcatcctcgatcgggagacgcagaggtcccgcggcttcggcttcgtcaccttctccacggaggaggcgatgcggaacgccatcgagggcatgaacggcaaggagctggacggccgcaacatcaccgtcaacgaggcccagtcccgcggcggccgtggaggcggcggcggtgggtacggtggtggccgtggaggcggcggctacagcggtggcgggcgccgtgatggcggtggcggc

SEQ ID NO: 6063 - DNA, 379 bp, Zea mays
  Clone ID: LIB3118-027-P1-K1-B4
ctcaactgaacgaagagctaactaagcgtggattaggcacgcagttgttagagctgaggactccaagcacgaaccatctactcgcactttataagaagcatgttttcagccagtaaataatggccacgtgaaggtacagtcttcaacacataatctatccaaactcgggcaacatttgagtcatctgtcagtatttataacagcgctggtgcctgattgatctccacgcattctgtgatgctgattgaactgtatgttggagaaaacataaaattagctcccgttttagactaggctttgtatctctcaccttgctgcttggctgtaggaatttattaggacttctgagtgctaaatgacctccaccaacgctagtcgt

SEQ ID NO: 6064 - DNA, 420 bp, Zea mays
  Clone ID: LIB3118-027-P1-K1-B5
accgccaacgcatcgagcgctggatggaaatccagaagcagaagcgcatctacgagctgggctccctgcccccgttcttgctcgtcttcgccggtgaggtcgaggccgtcgaccaccgatggaaccagcacggcctcggcggcaacaacgtccacggtagctgccgcccgctccacgctgggcccgtcagcctcatgcactggtcgggcaagggcaagccctgggaccgcctcgacgccggcaggccgtgcccgctcgaccacacctggaagtcgtacgacctctacatccccggcgactctggaggcgccgcctcgccggcgtccgggccggcattgtccgcatccgtgttctcttggtagagagatagcttctagttccattgtcttgctgtggctgttgccgccgctgctatgatct

SEQ ID NO: 6065 - DNA, 411 bp, Zea mays
  Clone ID: LIB3118-027-P1-K1-B7
cggacgcgtggggtcatggttgatctgttcttctacagagacccagaggaagcgaaggagcaggaggaggaagctgctgcggcccctgagtttgctgcagtcactgattaccaaggagctgatcagtggggtggtgaccagtggacctctgatgtggctgcaccacctgttgctcctactggtgctgattggggtgctgcaccagcttcggttcctaccggtgatggctgggatcaaactgtggcccctgttcctgtggatggcactgttcctccagtggtcgctcctactggttgggaatcagcagcccaacccacttgccaaggctgggagtaggcgttgaggcatcactctgagacgtcttgtgcgggattattccaaagtatgaatgccccgaagtagacgacatat

SEQ ID NO: 6066 - DNA, 427 bp, Zea mays
  Clone ID: LIB3118-027-P1-K1-B8
caacaactacaacaacttgtgctagcaaaccttgctgcctactctcagcaacagcagtttcttccattcaaccaactaggttcattgaactctgcttcttatttgcaacaacaacaactaccattcagccagctacctgctgcctacccccagcaatttcttccattcaaccaactagcagcattgaactctcctgcttatttacagcagcaacaactactaccattcagccagctagctggtgtgagccctgctaccttcttgacacaaccacagttgttgccgttctaccagcacgttgcgcctaacgctggcaccctcttacaactgcaacaattgctgccattcaaccaacttgctttgacaaacccagcagtgttctaccaacaacccatcattggtggtgccctcttttagatttcttatg

SEQ ID NO: 6067 - DNA, 327 bp, Zea mays
  Clone ID: LIB3118-027-P1-K1-B9
ccggaacggaagggccgggccagagcgacgcgtccgctcatgcttctgcggattgggtttggataaaacaggggctcctacgattgggagggtgggtgagcggatccaaatgactcccatagatgttgagtactgatgattaatatagagcctcgcctggggcacagacgaccactccctccacatagccttttgtacctacagagaggttctcgaggccaagaacatcctcgatcggaaggacacagagggccctcggcttcgggtgtgctaccttatccacggaggaggcgatgcttgacgccatccatgacattgacgggatgg

SEQ ID NO: 6068 - DNA, 412 bp, Zea mays
  Clone ID: LIB3118-027-P1-K1-C10
cacaccaacaagcaacatagaaagtggaatccagtagcaacaacagagcagcaagggcgaccaagatattttccctccttatgctccttgctctttctgcatgtgttgctaacgcgacaattttccctcaatgctcacaagctcctatagcttcccttcttcccccataccttccatcaatgatagcttcagtatgtgaaaacccagctcttcagccctataggctccaacaagcaatcgcagcaagcaacatacctttatcacccttgttgtttcaacaatcgccagccctatctttggtgcagtcattggtacaaaccatcagggcacagcagctgcagcaactcgtgctacctgtgatcaaccaagtagctctggcaaacctttctccctactctcagcaacaacaatt

SEQ ID NO: 6069 - DNA, 269 bp, Zea mays
  Clone ID: LIB3118-027-P1-K1-C11
acgagctggtgtgagccctgctaccttcttgacacatccacagttgtcgacgagtggagagcacgtcgcgtctaacgcaaacaccctcttacaactacaacaattgctgccatttaaacaacttggtttgacaaacccagttgtgcactaccaacaacacataataggtggtgccctattatagatttctaaagagttatatcctaataataaagttttttatctgctgtttgggggctttaaaaaataagaaagtgcatttttagatc

SEQ ID NO: 6070 - DNA, 269 bp, Zea mays
  Clone ID: LIB3118-027-P1-K1-C12
agctggtgtgagccctgctaccttcttgacacaaccacagttgttgccgttctaccagcacgttgcgcctaacgctggcaccctcttacaactgcaacaattgctgccattcaaccaacttgctttgacaaacccagcagtgttctaccaacaacccatcattggtggtgccctcttttagatttcttatgagttatagttcaataataaagttttttatctgatgtttgtggcttcccagaaataagaaagtacatttctagattctt

SEQ ID NO: 6071 - DNA, 399 bp, Zea mays
  Clone ID: LIB3118-027-P1-K1-C2
cctgatgcttaaaaaaaaaaaaaaaaaaaaaaaaaaaaaaaaaaaaaaaaaaaaaagaaagaaaaaaaaaaaataataataaaaaaaaaaaaaaaaaaaaaaaataaaaaaaaaataaaaaattaattaaaaaaaaaataaaaaatttgcatttttttaaatttattaaatttttattatggggggtgccctttttaatggtcttatttttttttcccccttttttgaccttttttttttttttttttttcctcctttttttattcttgggtgcgttttttaacatatttttttttgtataattctttttttttttcccttctatttttttttttaattttcccttttttgtgggttttttttttggtaagtgctattttattttctttttcaaatttt

SEQ ID NO: 6072 - DNA, 398 bp, Zea mays
  Clone ID: LIB3118-027-P1-K1-C3
tctacttgagacaaggcattggtgttggtggcttccagaagatttatggtggccgccagaggaatggctcacgcccacctcacttctgcaagagcagtggtgccatttcacgcaacatcctccagcagctgcaggagatgggcatcattgatgtcgatcccaagggtggacggcgcatcacctcccagggaaggcgtgatctggaccaggtggctggaagggttgcttgttgaagcttgagcaatctcatatttggtttctatgatgtcatgtttgattgttgagatggctacactttatttgcactttggattaggatttttgtgttaagagaactcaaggcattctagctatggttcacactgtattttccctgagtacctatttatcaaaaccta

SEQ ID NO: 6073 - DNA, 427 bp, Zea mays
  Clone ID: LIB3118-027-P1-K1-C4
gacaaaacaggaagcactgcctgctcattttcttcctgtgcgcgtacagagatactactagcgagcacgccatggagcaaaccgaggcggcggtgagcggcgcgcttggagcgggagtggaaggtggcgacaagacggcgaggaaggcgctgaaggtggtggcggccgtggacgcgagcgaggagagcctgcacgcgctgtcgtgggcgctggacaacgtcgtgcggtgccacccggacgcgacgctcgtcgtcgttcacgcccaacacgccgccgaccacttcgcctaccccgtcgccgcgcacggcatcgtgtacgccccgtcctcggcggtggagtccgtgcgggcggcgcaggaggagagctcccgcagggtcgtagcgcgcgcgctggacatctgcaaggagaggcaggtggacgccacggg

SEQ ID NO: 6074 - DNA, 391 bp, Zea mays
  Clone ID: LIB3118-027-P1-K1-C7
gcaattagctcatcgactccagattggagaactcgacaccatgaaggtgctgatcgttgcccttgctctcctggcgctcgctgcgagcgccgcctccagtacaagcggcggctgtggctgccagacaccaccgtttcatctaccgcctccgttctatatgccgcctccgttctatctgccgccgcagcagcagccgcagccatggcaataccccactcaaccaccgcagctaagcccgtgccagcagttcggatcctgcggcgtcggcagcgtcggcagcccgttcctgggccagtgcgtcgagttcctgaggcaccagtgcagcccggcggcgacgccctacggctcgccacagtgccaggcgctgcagcagcagtgctgccaccagatc

SEQ ID NO: 6075 - DNA, 347 bp, Zea mays
  Clone ID: LIB3118-027-P1-K1-C9
cccacgcgtccgcggacgcgtgggcgaccatacttaggtgtagagagtatgggagatgctctttttatgcccgttgcatggccaacaaacaagatgggtcgtaacaaaaaatcaacgttgacccaaggttctacagcagcagaacttattcggtgatcttttgacccatctttgctgataccgacaaagtacgcatgctgctgttgtcaagggaagaggtgctggaagcaaagatcagagtgcttgaagtgtgtgaaaaatgattactcgcatgcatgctagccgttggcgtaacacccagctgatggagagattttagtttgctagatgaatctttagactttgca

SEQ ID NO: 6076 - DNA, 67 bp, Zea mays
  unsure at all n locations
  Clone ID: LIB3118-027-P1-K1-D1
ccgtccgtagtatcggcgaggcgnngccgctctatgaggnanntccaagcttaccgtacccgcgtgc

SEQ ID NO: 6077 - DNA, 187 bp, Zea mays
  Clone ID: LIB3118-027-P1-K1-D10
cctaacccccacatttgattttcaaaaggacagtctcattcttcattcatacaaggcttcctcaaaaacgccaagggcatattttttattaaaaccccctgatacttgtggaggtccaaaacatggttaatatggaaggttgggtggggacccaaaaaataacctgcccttccatttttatgaaaaa

SEQ ID NO: 6078 - DNA, 420 bp, Zea mays
  Clone ID: LIB3118-027-P1-K1-D11
tctagagttaaatatgctgtgatggatgttcccatcaccttaccttcgttgaaaccagcttttgacaagcctaaccccaaacaaggcattggtatgctgtcatggagcagcgacagccactatttcttcaccaggaatgacaacatgccaactgttctttggatatgggatatatgccgccttgagcttgccgctgtgctcgtgcagaaagatccaatccgtgctgcagcatgggaccctacctgcacacgccttgttttatgcacagagagccctcacttgtacatgtggacgccatccggtgcctgctgtgtcaacatcccctttctgaacttccgaatcgttgatttgaagtggagctcgaatgggagctgtctcctcctgaaggagcgcgaatctttctgctgtgccacaatcata

SEQ ID NO: 6079 - DNA, 164 bp, Zea mays
  Clone ID: LIB3118-027-P1-K1-D12
atttttggatcctattcgagtcgaatgtaccagtaccatagctatatgtctgctttgtgtggccagtgatattgccgtgagtatttttggatcctattcgagtcgaatgtaccagtaccagagttaatttgctttaattcgaaacaccgttccggttggaattc

SEQ ID NO: 6080 - DNA, 421 bp, Zea mays
  Clone ID: LIB3118-027-P1-K1-D3
caaagcggcagtgcgtaaagaggatcgtcgaacagaacagcatgaagatggtcatcgttctcgtcgtgtgcctggctctgtcagctgccagcgcctctgcaatgcagatgccctgcccctgcgcggggctgcagggcttgtacggcgctggcgccggcctgacgacgatgatgggcgccggcgggctgtacccctacgcggagtacctgaggcagccgcagtgcagcctcgtggcggcggcagccctactacgccgggtgtgggcagccgagcgccatgttccagacgctccggcaacagtgctgtcagcagcagatgaggatgatggacgtgcagtccgtcgcgcatcagctgtagatgatgatgcagcttgagcgtgccgctggcgccagcatgaggctgtacgagccagctctgatgc

SEQ ID NO: 6081 - DNA, 339 bp, Zea mays
  Clone ID: LIB3118-027-P1-K1-D4
gctcccctgccgccgccgccatgggacactccaacgtgtggaactcgcaccccaagaactacggccctggatctagggtttgccgtgtgtgcgctaacccccacggcttgatccgaaagtacgggctcatgtgctgcagacagtgcttccgcagcaacgccaaggacattggcttcatcaagtaccgctgaaacttggggagctccaaagcatggcaataatggaagcatggatggggacctaaaagatagcctgtactcttattcttatgataaaaccatgtaatgaattgtttggctttgtgtggacgaagttggtgtattctagatggtactcttg

SEQ ID NO: 6082 - DNA, 178 bp, Zea mays
  Clone ID: LIB3118-027-P1-K1-D5
cccacgcgtccgcccacgcgtccggcccaaagacatccagctcgcccgccgcatccgcggcgagcgcgcgtaggcgtatctcgcgcccggccccagtggcggcggagggatggaggagggcaatttgtaaccttatgctgtttgttcgcttttacacggcgtggtgaagaactagtgt

SEQ ID NO: 6083 - DNA, 147 bp, Zea mays
  Clone ID: LIB3118-027-P1-K1-D6
tcgctccactcgttcgcccactcatacggcccaaagacatacagctagacctctacatcggtggtgagcgctcagtgacatttccttcaccctttcccaatcctattcgagtcaaaggtaccagcactatattatcttttactgaat

SEQ ID NO: 6084 - DNA, 406 bp, Zea mays
  Clone ID: LIB3118-027-P1-K1-D9
gcaccatcgtgggacccgtacagcgcaccgcccagccgccggatctgcgccggcgacgcgcccggacgtcggatctacgccgccgcaggaggggggaggcggcgctgtggccgttctctgcccgtgagcgcccggatccgtcccgccgcaaggattatggatccgaaagagaagccaaatgtatcgagcagtccaccaacaccacggctggactgcataaaatgctttgatatgctctggttctgttactcaccattccaccagatgcagaattattaccggtatggggagttcgacacctgcttcggcaagtggggcgatcttatgggctgcctcgctcttaaaacaaagcggaaggcaaaggtggaggagatcctcatcgcgcgggagaaggtcaaaccacata

SEQ ID NO: 6085 - DNA, 318 bp, Zea mays
  Clone ID: LIB3118-027-P1-K1-E1
ttggccggcaccgtcaaggagatcctcggcacctgcgtcagcgtcgggtgcaccgtcgacggcaaggaccccaaggacctgcagcaggagattgatgacggcgaggtcgagatcccgtccgcttgaagactagacatcgaaggggacttccattggtgctgctgaagtgttgttgttctgcatgctgtcgatgtacctttttcaagcaacgcgagccatctatttcttttgtctagctatgttagtgatatcttgtgagagacctcaatgttaccaccgtatctttgtctttgttggatggagagatttaagcacctt

SEQ ID NO: 6086 - DNA, 421 bp, Zea mays
  Clone ID: LIB3118-027-P1-K1-E10
gagaccaacaagcaacatagaaagtggaatccagtagcaacaacagagcaacaatggcgaccaagatattttccctccttatgctccttgctctttctgcatgtgttgctaacgcgacaattttccctcaatgctcacaagctcctatagcttcccttcttcccccataccttccatcaatgatagcttcagtatgtgaaaacccagctcttcagccctataggctccaacaagcaatcgcagcaagcaacatacctttatcacccttgttgtttcaacaatcgccagccctatctttggtgcagtcattggtacaaaccatcagggcacagcagctgcagcaactcgtgctacctgtgatcaaccaagtagctttggcaaacctttttccctactcttagcaacaacaattttctttcat

SEQ ID NO: 6087 - DNA, 287 bp, Zea mays
  Clone ID: LIB3118-027-P1-K1-E12
gcagctcaaggccaaggcacaaaagggcgcgattggaggctcgggtctgaagaaaagtggaaagaaatgagactggtcacccgtctccattacctagaggatgataaggcagctgtctatctgtgttgcgcttcactacgtgtgattgtaacagtggtacctcttgtgttctgtgttccgcgatgttgcagttggttgcttgatcgaaagatgtttcagcctcccatctgctagctatgatacagatggttcctgataataatgatgacatattctgtgatggatgc

SEQ ID NO: 6088 - DNA, 427 bp, Zea mays
  Clone ID: LIB3118-027-P1-K1-E2
aaattcgaactttcgtcgaaatcgtctctattcatatgtatgaaatacatatatgaaatacgtatgtggagttccctagaatttcatgtgattcagtaaacagaatatggattccatgattgctagattgatccgtagggattgatgaagagtgagctgataatggaatttttcttctataaataggaaacttaagattcaaatgctccggaatggaaatgagggaatgtccacaatacccggatttagtcagatccaattcgagggattttgtagattcattaatcaaggcttggcggaagaacttgagaagtttcccacaattaaagatccagatcacgaaattgcatttcaattatttgcgaaaggatatcaattgctagaaccctcgataaaagaaaggaatgctgtgtatgaatcactcacc

SEQ ID NO: 6089 - DNA, 359 bp, Zea mays
  Clone ID: LIB3118-027-P1-K1-E3
cccacgcgtccgcccacgcgtccggccagaaactctgatgaaccacttgatgtcggcaaggcaattacaatgtacaaggtgaaaaaggagaagcagagaaggaaagagaaaggcatgtcatcgaaatctgataagcttaagccccagaagaaaccccacaagaagtcatcgaagaaaaaggcttaggtccacatctttcaggtgaccacagttttgaaagctcaagcaaggaggcctgtcagcatattcaattgtatttttctgctttgaatctatgagagaaatattgttattccgtttactggctatgacacaaaaacctgaatgctgttataatatatgcccatcttgtacctttt

SEQ ID NO: 6090 - DNA, 272 bp, Zea mays
  Clone ID: LIB3118-027-P1-K1-E4
cttacgcgtccgtccacgcgtttggacagatactctgatgaacccaacagagcaacaagtggcgaccaagatattttccctccttatgctccttgctctttctgcatgtgttgctaacgcgacaattttccctcaatgctcacaagctcctatagcttcccttttttccccataccttccatcaatgatagcttcagtatgggaaaacccagctcttcagccctataggctccaacaagcaatctcagcaagcaacataccttgatcaccct

SEQ ID NO: 6091 - DNA, 67 bp, Zea mays
  Clone ID: LIB3118-027-P1-K1-E5
caataataaagttttttggatgatgtatgtggccaaccagaaataagaagttacatttccagattct

SEQ ID NO: 6092 - DNA, 360 bp, Zea mays
  unsure at all n locations
  Clone ID: LIB3118-027-P1-K1-E6
ctcaagcatcagcggcaggagctctgggcagcgtgcgcacgtggggtacctagctcgctctgctagcctaccatggctgatcaccaccggggcgcgacgggaggtggcgggggctacggcgacctccagcgcgggggcggcatgcacggcgaggcgcagcagcagcagaagcagggcgccatgatgacggcgctcaaggccgcgacggccgcgaccttcggcgggtcgatgctggtgctgtccgggctgatcctggccggcaccgtgatcgcgctcacggtggccacccccgtgctggtgatcttcagcccggtgctgtgcgcggccgncatcnngctggcgctaatggggggcgggttc

SEQ ID NO: 6093 - DNA, 405 bp, Zea mays
  Clone ID: LIB3118-027-P1-K1-E7
cccacgcgtccggtgataacttgaccctatggacttctgacatctcggaggaccctgcggaagagatcagggaggcgcccaagcacgactcgagcgaggggcagtaaagccggctttacgtgcctagaagctagtacctagtgtttgctgctgtctaatgacactatgcaatgtgatctggaccctggtttcttgggtgcgacgcttgtagcagccgtgttatgattatttgtcgggaaaatttgggggctccccatatgagatgctgccgggcaagacctcggcatcccacctcgtttcaggcgggggacgctggagcgtggtccggttgtgttgggaagccccttaaactgttgtcgcttgcattttaaccttttcatcgccgttcagtggtcctaaatctat

SEQ ID NO: 6094 - DNA, 159 bp, Zea mays
  Clone ID: LIB3118-027-P1-K1-F1
ttcatacactggtgtattgacaaaggagagatttatgcgaagaggctgtcaccgggtgggcgcgccgttctgatgatgacatacctcgtgttcgatgaaaactgtgctattgcccgcttgtcatgaagtgctatcgacacacggctagttgtcatcggt

SEQ ID NO: 6095 - DNA, 421 bp, Zea mays
  Clone ID: LIB3118-027-P1-K1-F11
caactgctcttgacggttgcagtaactggagttgcagttttgattggatcaatactgtaccaaggtaaggggaagtagttccggggatagtaatttcacgccccttgatgtgtaaattccctcataaccaaaagagtacagtttataccccagctgaggtaaacaaaatagaataaagaaagagagagtacagctgagattacaacatttatggaaggaccaatgaagctatgtcgttgttctatgtaaatggtaattttcccatcaaacttgtgggcgtttggtaacctatgcaaaatttgttacaactgcaaaagttgtaatatcttatggattcatggacaaactgtgatgtgcagtcagtcaaaaataacttatcctaatacatttgccacccaaaaaaaaaaaaaaaagggcgggc

SEQ ID NO: 6096 - DNA, 415 bp, Zea mays
  Clone ID: LIB3118-027-P1-K1-F12
gatgcttttggtccattcgcaggagctgacgattgggggctcacatctgcaacaacgtgcgatggaaagagagtggtcatactcttacattacatagaggatgatatggcacctgaatatttgagttgccgcttgctgcttgttgattagcaacagtggccattcatgcggttagtgtttggctacgccgcacatttttttttattcaaccgactagcggcactgaactctgctggttatttacaggagcaacaactactaccattcagacagcttgctgatgtgagccctgctgccttcttgacacaacaacagttgttgccgttctacctgcacgctatgcctaacgctggcaccctcttacatctgcaacaattgctgccattcaaccaacttgctttgacaaactcaacag

SEQ ID NO: 6097 - DNA, 208 bp, Zea mays
  Clone ID: LIB3118-027-P1-K1-F2
cggacgcgtgggcagcagccgaggagggccccgaagctgaggtacctggacttcgtccaggtggcggctgcccaggccgcggtgtgcctcgctgggctctacggcctcgccaaggaccacgccggaccgttccgacccagcgttgacgccgcgagttgtcggaagggcgtgtagcccgttagaccgttggggctgcgtcgagtctcgc

SEQ ID NO: 6098 - DNA, 385 bp, Zea mays
  Clone ID: LIB3118-027-P1-K1-F3
gcaacattttcggacccgcacagggcaccaaacagtcatcaaatatttgacgtcgacgcggccgttaccttgtatcatacgccaacatagaaaagcagagagcgaacgtgaacggcatgttattcaaataggataagcttaagccccataagaagccccacaagaagtcatggaaaaaaaaggctcatgagcacatctttcatgagaccacatttttgaatgctcaagcaaggatgcctgtcagcatattcaattgtatttttctgctatgaatatatgagagaaatattgttattccgtttactggctatgacacaaaaacctgaatgctgttataatatatgcccatattgtaccttttaaaaaataaaaaaaaatacttatt

SEQ ID NO: 6099 - DNA, 359 bp, Zea mays
  Clone ID: LIB3118-027-P1-K1-F4
cttcttcaggatatcaagaaggtgacagaaaaacccgtggctgttggctttggtgtgtcgactccagagcatgtccggcagattgcaggatggggcgcagatggtgtgattatcggtagcgcagtgatgaagacgttggaggaagctgcttctccagaagaaggattgaagaagctagaagagttcgccaagaacctgaaggccgcattgccgtgaaccaaccattttcgttagcaaagaaattaagattttttttttcctttcaatcttggctttcagggttgttggttgttgtgtagtgaaaataattgtgtccctatgttgaatgctcaaatgaataaatcaagatcccatatatt

SEQ ID NO: 6100 - DNA, 374 bp, Zea mays
  Clone ID: LIB3118-027-P1-K1-F5
gctgggaggcggtgcttctgatggcatagtttctttcttctctatgttcagagatgttcgtgatcatggtcaagattacaccgatccacctcgaaatggaaatgatcaggtgacatagaatcacggggatgaaagtgggccaattactgaactcgagtgcttgggcggcagtagtctctttctaatatgatataatgccagcacctcccgtcaaaaggataatgacgaatattggtggcaactatacagactggtgtcgctggagatgccatgttagtgttatctgtttctcacttttttagttagtaggtaagggtgaaggttgtatctatattcattacatgtgcacattccctaccgtttgaatgggagcg

SEQ ID NO: 6101 - DNA, 362 bp, Zea mays
  Clone ID: LIB3118-027-P1-K1-F6
gctgggaggcggtgcttctgatggcatagtatctttcttctctatgttcagagaggggggggatcatggtcaagattacacctatccaccttgtaatgtaaatgatcaggtgacatataattactgtgatgaaagtgggtcaattactgaacttgagtgcttgtgcggcagtagtctctttctaatatgatataatgccagtaccttccgtcaaaaggataatgacgaatattggtggctactattcatactggtgtagtttgagattccaatttagggtcattccgtttcatacttttcttagttagtaagtaagtggtgaatgcttcaatttaattatttatttacattttgcaactatt

SEQ ID NO: 6102 - DNA, 311 bp, Zea mays
  Clone ID: LIB3118-027-P1-K1-F8
ggcaaacggtggctgtcggagtcatcaagagtgtggagaagaaggacccaactggagccaaggtgacgaaggctgctgccaagaagaaatgatctatctgtctggtgctgtgcttgcttgttggttacctcgtggaagcttaaaatatctcgtcttgttgacatccttgcagttgtcgcgtgaacaagtaatctatgatggcaatgtttgcctggtcatgaagtattattactttcgttgaaaccgtgatgctattaagacttaatttttttatggaacatcgaatgtaaggcatacatggttatgagttt

SEQ ID NO: 6103 - DNA, 361 bp, Zea mays
  Clone ID: LIB3118-027-P1-K1-F9
cccacgcgtccgcggacgcgtgggcgcaaattgcaccaagaaatccatcgagaggccgtcgacaggggaattaatggcgtcgtcgtctagcagcagccaccgccgcctcatcctcgcagccgccgtcctgctctccgtgctcgcggctgccagcgccagcgccgggacctcctgcgtgccggggtgggccatcccgcacaacccgctcccgagctgccgctggtacgtgaccagccggacctgcggcatcgggccgcgcctcccgtggccggagctgaagaggagatgctgccgggagctggcggacatcccggcgtacttgccgtgcacggcgcttggcatcctcatggacggggcgatc

SEQ ID NO: 6104 - DNA, 426 bp, Zea mays
  Clone ID: LIB3118-027-P1-K1-G1
ctcatacactggtgtatcgacaaaggagagatgaatgcgaagaggctgacaccgattctgctcgccgttctgatgatgacatgcctcgtgtccgctgcaaactgtgcgattgcaggcggccatgacgtggagacgacaccggctagcggtctccggtggccgccgtcgccggacgcagagaagacgatgttggaaagcagtgacatcaacgtcatattgtgtttgaaggctcagtgcgccggttacaagagctgttactgctgcttcactttacctggtttgccgtgctggcctgatcagaagacgtgctggcaagagtgtcccagtcacaagcgactctgatccacccgatttatgaagcacaccgacgcgatgccctccataggtcccagcgggttctcatgagaaaggatctagcctccaatt

SEQ ID NO: 6105 - DNA, 314 bp, Zea mays
  Clone ID: LIB3118-027-P1-K1-G10
gaagactcggagctcagcgagaggggagccgaggcgtctcggaaatgcgggtctgctggcgctcatgctctgctccgtcgtcgcgctctccctcatccgggggagattcgccccaattgtcactaccgcaggagatgccatcaaatccgaggacgacgctgcggcggctgcgctcagggtcagcaaggcgaccgtcaacgttgacaccggcgacagcgccgacgaggccgccgccgaagctgctgctgaggagaaagagaaggaggaagtccagccgaagcccgttgacggtgccggctccggctctcggctcc

SEQ ID NO: 6106 - DNA, 351 bp, Zea mays
  Clone ID: LIB3118-027-P1-K1-G11
gaagactcggagctcagcgagaggggagccgaggcgtctcggaaatgcggctctgctggcgctcatgctctgctccgtcgtcgcgctctccctcatccgggggagattcgccccaattgtcactaccgcaggagatgccatcaaatcccaggacgacgctgcggcggctgcgctcagggtcagcaaggcgaccgtcaacgttgacaccggcgacagcgccgacgaggccgccgccgaagctgctgctgaggagaaagagaaggaggaagtccagccgaagcccgctgacggttccggcttcggctccggctccggcggtggcgcatccaagccggtgtgctacaagacgag

SEQ ID NO: 6107 - DNA, 420 bp, Zea mays
  Clone ID: LIB3118-027-P1-K1-G12
gttacctttggtccatttggtggcacaaaacatcagggcacaacaactacaacaacttgtgctagcaaaccttgctgcatactctcagcaacatcagtttcttccattcaaccaactggctgcattgaactctgctgcttatttgcaacaacaattaccattcagccagctagttgctgcctacccccagcaatttcttccattcaaccaactagcagcattgaactctgctgcttatttacagcagcaacaactactaccattcagccagctagctgatgtgagccctgctgccttcttgacacaacaacagttgttgccgttctacctgcacgctatgcctaacgctggcaccctcttacaactgcaacaattgctgccattcaaccaacttgctttgacatactcaacagtgttcta

SEQ ID NO: 6108 - DNA, 425 bp, Zea mays
  Clone ID: LIB3118-027-P1-K1-G2
gaccaactagcaacatagaaagcacaatagtgtaccaacaatggcagccaaaatattttgcttccttatgctccttggtctttctgcaagtgctgctaccgcaaccattttcccacaatgctcacaagctcctatagcttcctttcttcccccatacctctcaccagcggtgtcttcagtatgtgaaaacccaattcttcaaccctacaggatccaacaggcaatcgcagcaggcatcttacctttatcacccttgttcctacaacaaccgtcagccctattacagcagttacctttggtgcatttgttggcacaaaacatcaaggcacaacaactacaacaacttgtgctaggaaaccttgctgcctactctcagcaacagcagtttcttccattcaaccaactggctgcattgaactctgctg

SEQ ID NO: 6109 - DNA, 411 bp, Zea mays
  Clone ID: LIB3118-027-P1-K1-G3
cggcgtgtttctgtttgccgtaattttcacttttcgggtaagggtaggggggccaaggaattcgatttttgatcattactaccttttcatgcaaatggccaactgcatgcgactgattctgcctacagtaagtttccgtatacatttcttgtacgtaaagatcacaagttcagcgacgaaacatgaagcatacgctactatatgtatgagtcaaaagaagctggcatcttacctttataacccttgttcctccaacaatcatcagccctattacagcatttacctttggtgcatttattggcacaaaacatcagggcacaacaactacaacaacttgtgctagcaaaccttgctgcctactttcagcaacagcaggtttttgcgtgtcaccaattagctgcattgaactct

SEQ ID NO: 6110 - DNA, 75 bp, Zea mays
  Clone ID: LIB3118-027-P1-K1-G4
cttcttcattatttcaaccatgattcaaactttcccattaatgatatattttccggggggattcattatctatca

SEQ ID NO: 6111 - DNA, 266 bp, Zea mays
  Clone ID: LIB3118-027-P1-K1-G5
tcgcccacgcgttcgcccacgcgttcgtccactcgttcgttgacgcgtgggcggacgcgtgggcggtcgcatttgtgttctcttatttaagtacagtgaattctggtcacgataatatagtgtattaaacataatttatgtttgttgaggttaaattgaatattgttaggaatgtaaagatgtttaataatttaatatatttactaacttataatttgataataaaagataattatatttttgtttaaaataaataatttattaat

SEQ ID NO: 6112 - DNA, 391 bp, Zea mays
  Clone ID: LIB3118-027-P1-K1-G7
cccacgcgtccgcccacgcgtccgcggacgcgtgggcgcaaattgcaccaagaaatccatcgagaggccgtcgacaggggaattaatggcgtcgtcgtctagcagcagccaccgccgcctcatcctcgcagccgccgtcctgctctccgtgctcgcggctgccagcgccagcgccgggaccttctgcgtgccggggtgggccatcccgcacaacccgctcccgagctgccgctggtacgtgaccagccggacctgcggcatcgggccgcgcctcccgtggccggagctgaagaggagatgcttgcgggagctggcggacatcccggcgtacttgcggtgcacggggcttagcattcttatggacggggcgatccccgccggccccggcccc

SEQ ID NO: 6113 - DNA, 267 bp, Zea mays
  Clone ID: LIB3118-027-P1-K1-G8
cccacgcgtccgcccacgcgttctctgacgcgtgggcgcaaattgcaccaagaggtgcatctataggccgtcgactggcgaattaatggcgtcgtcttctagcagcagccaccgccgtctcatcctcgcagacgtcgtcctgctctccgtgctcgcggctgccagcgccagcgccgaaacctactgcgtgccgtggtgggccatcccgcacaacccgctcccgagctgccgctgttaccttaccagcctgacctgctgcatcgggcc

SEQ ID NO: 6114 - DNA, 388 bp, Zea mays
  Clone ID: LIB3118-027-P1-K1-G9
gcttatgtagcgaaagaactttatggcatgggctgctatgaggtttcacttggtgataccattggagtcggcactccaggtaccgtggttccgatgcttgaggcagctatctccgtcgttcccgtggagaagctcgctgtccacttccacgacacctacggccagtccctctcgaacattcttatctctcttcagatgggagtaagcgtggtggactcctccgtcgccggcctcggtggctgcccgtacgcgaagggtgcgtcggggaatgtggcgacggaggatgtggtgtacatgctcaacgggctgggcgtcaagacgggcgtcgacctgggcaaggtgatggccggcggcgagttcatctgcaggcacctgggaccgcagtctg

SEQ ID NO: 6115 - DNA, 328 bp, Zea mays
  Clone ID: LIB3118-027-P1-K1-H1
ctcatacactggtgtttcgacaaaggagagatgaatgcgaagaggctgacaccgattctgctcgtcgttctgatgatgacatgcctcgtgtacgatgcaaactgtgcgattgcaggcgggcatgacgtggagacgacaccggctagcggtctgcggtggccgccgtcgccggacgcaaagaagacgatgctggaaagcagtgacatcaacgtcatattgtgtttgaaggctcactgcgccggctacaagagctgttactgatgaatcactttacctggtttgccgcgctggcctgatcagaagtacagctgtcaagagtgtaccagtc

SEQ ID NO: 6116 - DNA, 251 bp, Zea mays
  Clone ID: LIB3118-027-P1-K1-H10
gaagactcggagctcagcgagaggggagccgaggcgtctcggaaatgcggctcttctggcgctcatgctctgctccgtcgtcgcgctctccctcatccgggggagattcgccccaattgtcactaccgcaggagatgccatcaaatccgaggacgacgctgcggcggttgcgctcagggtcagcaaggcgaccgtcaacgttgacaccggcgacagcgccgacgaggccgtcgccaaatgcctcttgtgag

SEQ ID NO: 6117 - DNA, 290 bp, Zea mays
  Clone ID: LIB3118-027-P1-K1-H11
gaagactcggagctcagcgagaggggagccgaggcgtctcggaaatgcggctcttctggcgctcatgctctgctccgtcgtcgcgctctccctcatccgggggagattcgccccaattgtcactaccgcaggagatgccatcaaatccgaggacgacgctgcggcggctgcgctcagggtcagcaaggcgaccgtcaacgttgacaccggcgacagcgccgacgaggccgccgccgaagctgctgctgaggagaaagagaaggaggaagttcaggcgaagcccgctgacg

SEQ ID NO: 6118 - DNA, 231 bp, Zea mays
  Clone ID: LIB3118-027-P1-K1-H12
gaaaacttagatacattaagagggaacaaaacatgagggcaacaacaactacaacaacttgtgctagcaaactttgctgcatactctcagtaacataagttggttccattcaaccaactggctgcattggactgtgatgcttatttgtaacaacacttaccatttagccagtttgttgctgtctacccgcgagactttcttgcattcaaccaactaagagcattgaactct

SEQ ID NO: 6119 - DNA, 426 bp, Zea mays
  Clone ID: LIB3118-027-P1-K1-H2
ccgacggcgacgccctactgctcgcctcagtgccagtcgttgcggcagcagtgttgccagcagctcatgcaggtggagccgcagcaccggtaccaggcgatcttcggcttggtcctccagtccatcctgcagcagcagccgcaaagcggccaggtcgcggggctgttggcggcgcagatagcgcagcaactgacggcgatgtgcggcctgcagcagccgactccatgcccctacgctgctgccggcggtgtcccccactgaagaaactatgtgctgtagtatagccgctggctagctagctagttgagtcatttagcggcgatgattgagtaataatgtgtcacgcatcaccatgggtggcagtgtcagtgtgagcaatgacctgaatgaacaattgaaatgaaaagaaaaaagtattgttccaaa

SEQ ID NO: 6120 - DNA, 57 bp, Zea mays
  Clone ID: LIB3118-027-P1-K1-H3
ccgacagtgacttcatactgcgctcctcagtgtcagaccaaggggaagcagagctgg

SEQ ID NO: 6121 - DNA, 401 bp, Zea mays
  Clone ID: LIB3118-027-P1-K1-H4
aagcaacatagaaagtggaatccagtagcaacaacagagcaacaatggcgaccaagatattttccctccttatgctccttgctctttctgcatgtgttgctaacgcgacaattttccctcaatgctcacaagctcctatagcttcccttcttcccccataccttccatcaatgatagcttcagtatgtgaaaacccagctcttcagccctataggctccaacaagcaatcgcagcaagcaacatacctttatcacccttgttgtttcaacaatcgccagccctatctttggtgcagtcattggtacaaaccatcagggcacagcagctgcagcaactcgtgctacctgtgatcaaccaagtagctctggcaaacctttcttcctactctcagcaacaacaa

SEQ ID NO: 6122 - DNA, 70 bp, Zea mays
  Clone ID: LIB3118-027-P1-K1-H7
cccacgcgtccgcaccaacgcatattgcaccaagaaatccatcgagaggccgtcgacagtctaattaatg

SEQ ID NO: 6123 - DNA, 294 bp, Zea mays
  unsure at all n locations
  Clone ID: LIB3118-027-P1-K1-H8
ggaaannccggggcgggccacgcgaccggcgacggcgacgccctacagggcgccacagagccagacgaagcggcagcagagcgggcagcagcccaagcagggggggccgcagcaccggagccaggcgagcaacggccaggcccaccaggccaaccggcagcagcagccgcaaagcggccaggccgcggggccgagggcggcgcagacagcgcagaaacngacggcgaggagcggccagcagcaggcgaccccaagccccaacacagcagccggcggcgacccccacagaagaaa

SEQ ID NO: 6124 - DNA, 358 bp, Zea mays
  Clone ID: LIB3118-028-P1-K1-A10
caaacacgtgctaaattggaggcccagaacaagatggtgaaaaatcggaagccatatcttcatgagtcccgacatcgtcatgccatgaaacgggctcgtggatcaggaggacggttcctcaacacaaagcagctccaggagcagaaccagcagtatcaggcatcgagtggttcattgtgctcaaagatcattgccaacagcataatctcccaaagtggccccacctgcacgccctcttctggcactgcaggtgcttcaacagccggccaggaccgcagctgcttgccctcagttggcttccgccccacgacaaactttagtgaccaaggtcgaggaggcttgaaagctgccgtgatcg

SEQ ID NO: 6125 - DNA, 410 bp, Zea mays
  Clone ID: LIB3118-028-P1-K1-A11
acaatgttggaaatagtaaaccaacttgatgggtttgatgcaagagggaacatcaaagttctcatggccactaataggcctgataccttggatcctgcacttctgcgccctggtcgcttggacagaaaggtggaattcgggctacctgacttggagggccgtacccaaattttcaagatccatacacgtaccatgaactgtgagcgagatattcgtttcgagcttctggcacggctctgccccaactctactggagctgatataaggagcgtttgcacagaagccgtgatgtacgccattcgcgcccgcaggaaaacggtgacagaaaaggattttctcgatgctgtcaacaaggtcatcaagggctaccagaagttcagtgcaacacccaagtatatggtgtacaacta

SEQ ID NO: 6126 - DNA, 238 bp, Zea mays
  Clone ID: LIB3118-028-P1-K1-A12
agctgactctgtgcctattggtgtgctggcatccaagccagggcctattatggctgggagtggattctctgaagccgcaataagtggaaagggaggacatgcttcactttcttatcacactatagatgcgattttggctgcctcaaatgcttttgtgagccttcagcaacttttttctcgaaaagctgatcccttagacttaaagttgtaacagttgcaaagttttaaggaggttttg

SEQ ID NO: 6127 - DNA, 369 bp, Zea mays
  Clone ID: LIB3118-028-P1-K1-A2
aatcagcagcccagcccactgcccaaggctgggagtaggcgttgaggcatcactctgagacgtcttgtgcgggattattccaaagtatgaatgcccgaagtcagacgacatattttgtagataatttgctatgctttgtgcacttatgtttttagggctttctagttgaaccggtgcccctgttctgtttttaaaattgcctctatgtaagaggctgtgcagtataagtactagcccctttgttttcaaaaaaaaaaataaaaaaaaaaaaaaaaaaaaaaaaaaaaaaaaataaaaaaaaaaaaaaaaaaaaaaaaaaattaaataaaaaaaaattataaaaatattatttaaaaaataattaaaatt

SEQ ID NO: 6128 - DNA, 135 bp, Zea mays
  Clone ID: LIB3118-028-P1-K1-A3
cggacgcgtgggcggacgcgtgggcggacgcgtgggtggtggtgccctcttttagatttcttatgagttatagttcaataataaagttttttgtctgatgtttgtggcttcccagaaataataaagtccatttct

SEQ ID NO: 6129 - DNA, 389 bp, Zea mays
  Clone ID: LIB3118-028-P1-K1-A4
cggacgcgtgggtggcgatggacccggacgcggtggcgaaagccttcgtggagcactactaccggacgttcgacaccaaccgcgcggcgctggtggggctgtatcaggagacctccatgctcaccttcgagggccagaagttccagggcccatccgccattgccggcaagctcggatctcttcccttccaggcctgcgagcaccagatcgtcaccgtcgactgccagccgtcggggccccagggaggcatgctcgtcttcgtctccggttccatccgcaccggccccgaggagcaccccatcaagttctctcaggcattccatttgctgccggcagctgggtccttcttcgggcaaaatgacatgttccgcctgactatggctaaaaga

SEQ ID NO: 6130 - DNA, 355 bp, Zea mays
  unsure at all n locations
  Clone ID: LIB3118-028-P1-K1-A5
cccacgcgtccgcccacgcgtccggacagggaggagcaggcggagttcaagaagatgtacagcctcatcgacgagtacaagttgaagggccatatccggtggatctcggcgcagatgaaccgcgtccgcaacggggagctgtaccgctacatttgcgatacgaagggcgcattcgtgcagcctgcgttctacgaagcgttcggcctgactgtgatcgagtccatgacgtgcggtctgccaacgatcgcgacctgccatggtggccctgctgagatcatcgtggacggggtatctggcctgcacattgacccttaccacagcgacaaggccgnggatatcctggtaaacttttttg

SEQ ID NO: 6131 - DNA, 320 bp, Zea mays
  Clone ID: LIB3118-028-P1-K1-A7
gttagacacccagattctctcacaaaggtgcaggcaggagctgaaagcagtacatgaagacgttcagtctgatatttcggagcacaagttgaagggccatatgcggtggatctaggtgctcatgaacctgcgttcgctacggggagctgtaccgttacatttgcgttacttagggcgcattcgtgcatgtctgctttctacttaagcgttcgatcatgtctgtgatcgagtccgtgacgtgcgttttgtcaacgatggcgtcctgccttggtgtctttgctgagttcattctggaccggggatgtgccctgttaattttc

SEQ ID NO: 6132 - DNA, 421 bp, Zea mays
  Clone ID: LIB3118-028-P1-K1-A9
cgagaggccgtcgacaggggaattaatggcgtcgtcgtctagcagcagccaccgccgcctcatcctcgcagccgccgtcctgctctccgtgctcgcggctgccagcgccagcgccgggacctcctgcgtgccggggtgggccatcccgcacaacccgctcccgagctgccgctggtacgtgaccagccggacctgcggcatcgggccgcgcctcccgtggccggagctgaagaggagatgctgccgggagctggcggacatcccggcgtactgccggtgcacggcgctgagcatcctcatggacggcgcgatcccgccgggcccggacgcgcagctggagggccgcctagaggacctgccgggctgcccgcgggaggtgcagaggggattcgccgccaccctcgtcacggaggccgagtgc

SEQ ID NO: 6133 - DNA, 454 bp, Zea mays
  Clone ID: LIB3118-028-P1-K1-B1
cgcctccggtaccggtctcgcagttccgagcccagagcgaccggtgcaagttgatgctgccccattcaagcagtggtacctcactcactatggagttgacattggtaggaagaagaaaacccctgctgcaaagaaggataatgctgagggacaagaggttgaggcagcagctgaggaaacgaaaaagagcaaccatgtcacgaggaagcttgagaagcgcaaggagggacgtacccttgacccacacattgaggagcaatttggcagtggacggttgctggcatgcatttcttcccgccctggacagtgtggccgagctgatgggtacatccttgagggtaaagagcttgagttctacatgaagaagctacagaggaagaagggcaagagcgctgtagcttagagcattctcatggattgtcttgcaccgaaatgtgtgtcctgatgagtacac

SEQ ID NO: 6134 - DNA, 278 bp, Zea mays
  Clone ID: LIB3118-028-P1-K1-B10
gggtgagcggatcgagatggcggcagtcggatagttgagtaccgctgcttcgtcggcgggctcgcctgggccacggacgaccactccctccacaacgccttcagcacctacggcgaggtcctcgagtccaagatcatcctcgatcgggagacgcagaggtcccgcggcttcggcttcgccaccttctccacggaggaggcgatgcggaacgccatcgagggcatgaacggcaaggtgctggacggccgcaacatcaccggcaacgaggcccagtcccg

SEQ ID NO: 6135 - DNA, 323 bp, Zea mays
  Clone ID: LIB3118-028-P1-K1-B11
cggacgcgtgggtgcggttcctgatggtcggatctagacgccgccggttaaaccaccatcctgtacaagctcaagctcggcgagatcgtcaccaccatccccaccattgttttgaatgctgaaactgctgagttcaagaacattagcttcactgtctgggatgtcgggggtcttgacaagatcagacctctgtggaggcattacttacagaacaccgagggtcttatctttggtgtggacagcactgaccgtgaccgtgttgttgtagccagagatgagctccacaggatgctgaacgaggatgatctactggaatgctgtgc

SEQ ID NO: 6136 - DNA, 287 bp, Zea mays
  Clone ID: LIB3118-028-P1-K1-B12
caacaacatctaccatattgccaggttcctgctgcactacccgcagcaattatagtttcattcatccaactggcaaggtcgaactctcctgcttatttacagcagcaacatctactaccattcatccagctagctggtgtgagccctgctaccttgttgatacaaccacagatgttgccgatctaccagcacgctgtgcctaacgctggcacccttttacaactgcaacattagctgtcattcaacctacttgctttgtcaaacccagcaccattttacctacaacc

SEQ ID NO: 6137 - DNA, 419 bp, Zea mays
  Clone ID: LIB3118-028-P1-K1-B2
gtgcaagttgatgctgacccattcaagcagtggtacctcactcactatggagtagacattggtaggaagaagaaaacccctgctgcaaagaaggataatgctaagggacaagaggttgaggcagcagctgaggaaacgaaaaagagcaaccatgtcacgaggaagcttgagaagcgcaaggaggtacgtacccttgacccacacattgaggagcaatttggcagtggacggttgctggcatgcattttttcccgccctggacagtgtggccgagctgatgggtacatccttgagggtaaagagctttgagttctacatgaagaagctacagaagaagaagggcaagagcgctttatcttatagcattttcatggattgccttgcaccgaaatgggatctcttgttagaccacttttttt

SEQ ID NO: 6138 - DNA, 408 bp, Zea mays
  Clone ID: LIB3118-028-P1-K1-B3
cggacgcgtgggatctacgtagttgattcgttggatcgggagagaattggaaaagccaaagctgaatttcaggcaataatcaaagatcctttgatgcttaacagtgtaatactggtacttgccaataagcaagatatgaaaggggcaatgacaccaatggaggtgtgtgagggtcttggcctctacgatttgaagaaccgcatctggcacatccaaggttcttgtgcgctcaaaggtgatggcctttatgagggcttggactggctggcaagcacactgaaggaattgcaagcttcaggtcgcctaccttctggagggacatcgttgttctaagtagcaagcctgcctgtaagatccttcggctgatagcaggaataatggatcaagagcgttttttttgtcatggat

SEQ ID NO: 6139 - DNA, 360 bp, Zea mays
  Clone ID: LIB3118-028-P1-K1-B4
cccacgcgtgcgatctcccgagttgattcgctggatcgggagagaattggaaaagccaaagctgaatttcaggcaataatcaaagatcctttgatgcttaacagtgtaatactggtacttgccaataagcaagatatgaaaggggcaatgacaccaatggaggtgtgtgagggtcttggcctctacgatttgaagaaccgcatctggcacatccaagggtcttgtgcgctcaaaggtgatggcctttatgagggcttggactggctggcaagcacactgaaggaattgcaagcttcaagtcgcctaccttctggagggacaacgttgttctaagtagcaagcctgcctgtaagatccttc

SEQ ID NO: 6140 - DNA, 361 bp, Zea mays
  Clone ID: LIB3118-028-P1-K1-B5
cattcttgtaccgaaacagggcaacctcgtgctaactgggccatcattggccacctcggccatcagtccaattgccttcttcctctacctccatgatggcagcccgcaagccggagaagccactgaggacgacgaggacatcgggaggataatctgcgactgcatcggcggcgacttctccaactacaacagggccatagtcgagactgtccaaacgggctatggccccgctgaagtgatctatgccgtcctgagcaacggcgtccaaggccgggtcgccgtcaaacttgctcgcctgccggtgtccaaagctggagaagaagacgccaccgccattctcgggaggatcgttgctcgcagc

SEQ ID NO: 6141 - DNA, 239 bp, Zea mays
  Clone ID: LIB3118-028-P1-K1-B6
catactcgtgccgtatcaggagatccttgggctaaccgggccagaattggacacgtcagacatgagtccaatggacttattactgtaccttcattactgaacaccgtaagactgagactcgactgtaggcgagatatgcatggggcggttacaccgatggtggagcgtgagggacttgtcctactacatcaggagcaccgtatagactgcatacacggtttttgggcgcgctgaagtga

SEQ ID NO: 6142 - DNA, 226 bp, Zea mays
  Clone ID: LIB3118-028-P1-K1-B7
cattctcgtgccaaatcaggagatgcttgggctaactgggagagaattggggaagtcggacatgagttcaagggccttctcactgtaccttcatggcggaacaccgtaagcctgggacgcgactgtggtcaagatgtgcatggggcggttaccccgctggtggagtgtgagggacttgtcctattacatcaggggcaccgtctatagtgtatacacggtttatggg

SEQ ID NO: 6143 - DNA, 180 bp, Zea mays
  Clone ID: LIB3118-028-P1-K1-B8
caacaacaacaattgctgccatttagccaacatgctttgacgaatcctaccaccttattgcaaccgcccaccatcggtggtgccatcttctagattttttatgatttatactgtaataataaagttctcatgctgatatgtgtgacctctcagtaataaagtattagagatctatatttt

SEQ ID NO: 6144 - DNA, 349 bp, Zea mays
  Clone ID: LIB3118-028-P1-K1-B9
cccacgcgtccgttccattcaaccaactggcatcattgaactctcctgcttatttacagcagcaacaactactaccattcagccagctagctggtgtgagccctgctgccttcttgacacaacaacagttattgccgttctacctgcacgctgcgcctaacgctggcaccctcttacaactgcaacaattgctgccattcaaccaacttgctttgacaaacccagcagcgttctaccaacaacccatcattggtggtgccctcttttagatttcttatgagttatagttcaataataaagttttttgtctgatgtttgtggcttcccagaaataataaagtccatttct

SEQ ID NO: 6145 - DNA, 330 bp, Zea mays
  Clone ID: LIB3118-028-P1-K1-C1
cggacgcgtgggcggacgcgtgggttcagctccaattccaatgagtccattggagagccttgcatcatcagctgttcgcacagcaaactctgccagggcagcacttatcttggtcctgaccaggggaggaactactgctaggcttgtagccaagtataggccatccatgccgattctgtccgttgtggttcctgagctgaagacagactcgttcgactgggcctgcagtgacgagggtccggcaaggcacagcctcattgtgaggggtgtcatcccaatgctgagtgccgccactgccaaggcctttgacaacgaaaccactgacgaagc

SEQ ID NO: 6146 - DNA, 249 bp, Zea mays
  Clone ID: LIB3118-028-P1-K1-C10
catacgggcaactttactagacccaacaggcatgctaagcaggcatctatccttgatcacattagggcctacatcaaccggcaccactattacataagttacattcaggccatgtgaggacaaaaaacatgtgggcacagacagctaccacagcttgtgctagcacaccttgctggatacgtctgagcagcatcgagtttattacatataaccaactgtctggattgtactgtactgtttatttgcatc

SEQ ID NO: 6147 - DNA, 171 bp, Zea mays
  Clone ID: LIB3118-028-P1-K1-C11
cattcgggcaactttactagacacaaaaggtatgcgaagcaggcacctatggttggtaacctttgggccaacatcaaccggcaatattattacaatatgttagattcaggccatgtggagataaaaaacatttgggcaaaacagcgacaactgcttgtgttagttcacctt

SEQ ID NO: 6148 - DNA, 390 bp, Zea mays
  Clone ID: LIB3118-028-P1-K1-C12
atcttttagtaacctttcaataggcgtcccccaagaactagtaaacatggcaaaactgttgagcctgttcttagccctctcctttgtagcagctatgtttgccataggctctcatgctgatggagactgtgagaatgacctccaaagcctgataagtgactgcaagacatacgtgatgttcccagctaatccaaaggtccctccttcggatgcttgctgtggtgtcatcaagaaggcaaacgtttcttgcttgtgctccaaggtcaccaaagaaactgagaaggttgtgtgcatggagaaggttgtgtatgttgctgagcagtgtaagaggccatttgagcatggcttccagtgcgaaagctacaaggttccagcaaactgatgttatcg

SEQ ID NO: 6149 - DNA, 342 bp, Zea mays
  Clone ID: LIB3118-028-P1-K1-C2
cccacgcgtccggttggcttctcctccccctccggttcgggttcgggttcgtgaggttctccggggttcgggttcgtgggtgagcggatcgagatggcggcgtcggatgttgagtaccgctgcttcgtcggcggcctcgcctgggccacggacgaccactccctccacaacgccttcagcacctacggcgaggtcctcgagtccaagatcatcctcgatcgggagacgcagaggtcccgcggcttcggcttcgtcaccttctccacggaggaggcgatgcggaacgccatcgagggcatgaacggcaaggagctggacggccgcaacatcaccgtcaacgag

SEQ ID NO: 6150 - DNA, 98 bp, Zea mays
  Clone ID: LIB3118-028-P1-K1-C3
cccacgcgtgcgattgaacttatcctacacctccaattcgaattacaatacaagagggacttccaaaatcaagtgcgcggacaaacaactcgagatgg

SEQ ID NO: 6151 - DNA, 96 bp, Zea mays
  Clone ID: LIB3118-028-P1-K1-C4
tcgcccacgcgtgcgcttgccttatccttcaactccgattcgagtgcatacattcgagggcgctcgttgatcaggttcgcgggcaaaaaactctag

SEQ ID NO: 6152 - DNA, 383 bp, Zea mays
  unsure at all n locations
  Clone ID: LIB3118-028-P1-K1-C5
cggacgcgtgggtgccaatgacgttcccagtgagtttgacgtccaaggctacccgaccttgtacttcgtgaccccgagcgggaaggtgacatcctacgacagcggcaggacggcggacgacatcgtcgacttcatcaagaagagcaaggagaccgcaggcgccgtcaccaccaccaccacccaggcgccaccggcatccgagaaggcagccgccgccgagcccgtcaaggacgagctgtgagcatccaaggtgtggacggctgtggctgcgtaagcatgggaggaaaacctggcgctaacgtgcctncaacgcctagtttttgcgggaccagagggagagagagagagggacggagttagagagagaggggatctgcgacgtg

SEQ ID NO: 6153 - DNA, 356 bp, Zea mays
  Clone ID: LIB3118-028-P1-K1-C6
caattgttcaaccctacaggatccaacaggcaatcgcaacaggcatcttaccattatcacccttgttcctccaacaaccgtcagccctattacagcagttacctttggtccatttggtggcaaaaaacatcagggcacaacaactacaacaacttgtgctagcaaaccttgctgcatactctcagcaacatcagtttcttgcattcaaccaactggctgcattgaactctgctgcttatttgcaacaacaattaccattcagccagctagttgctgcctacccccagcaatttttttcattcaaccaactagcagcattgaactctgctgcttatttacagcagcaacaactacta

SEQ ID NO: 6154 - DNA, 354 bp, Zea mays
  Clone ID: LIB3118-028-P1-K1-C7
cccacgcgtacgcgatcccgagcaacaagcggcacggggccgcgaagatctttagccaccctgacgtcatggctgaagaaccatggttcgggattgagcaggagtacacccttctccagaaggacaccaagtggcctctcggttggccgctgggcggctaccctggccctcatggaccttactactgcgccgtcggagcggacaagtcctacgggcgggacatcgtggacgcgcactacaaggcctgcctctacgccggcatcgacatcagtggcatcaacggcgaggtcatgccggggcagtgggagttccaggtcggtcctgccgtcggtgtctaggacggcgaccagctct

SEQ ID NO: 6155 - DNA, 364 bp, Zea mays
  Clone ID: LIB3118-028-P1-K1-C8
cacacgcgtaagcgtacaggatccaacaggggatcgcaacaggcatgttagcatgatcacccttgttcctacatcaaccgccaagcctattacagtagttacctttggtccatttggtggaaaaaaacatgagggctcaacaactacaacaacttgtgctagcaaaccttgctgcatactctcagcaacatcagtttcttgcattgaaccaactggctggattgaactgtgctgcttattagcaacaacaattaccattgcatcagctagttgatgtctacccgcagaatgtgtttcattcaaccaaatagcataatttgtactctgcttgttattttacagcagcgacaaacttctaccattt

SEQ ID NO: 6156 - DNA, 330 bp, Zea mays
  Clone ID: LIB3118-028-P1-K1-C9
aatcctgccaactttgctaagcaccaagcgaatcctaaggtgggccctatcatcgcaaagatgatggccaagttcaatgggtcccagtgatggttatgtcgcagtcaggttttgtgagcagcaagcaaaggtttgttggacagtgaacaggtgttcttttcgcgcatctggtctgggagtgtgtttagcttgtgatgaagaacatgagtgtgtgtgttggtcgaggtgcatctggaggtgcgatgagcatgtgataaaaaaaaaaccaaacggctctatggtgatgtatgcaaaaagttgctttcgaacttgatttcttaattcacagat

SEQ ID NO: 6157 - DNA, 198 bp, Zea mays
  Clone ID: LIB3118-028-P1-K1-D1
agcgacggaggttactaagggcctgaaggatacagagggattcactgtcgtttcaaaacgccgaaggcgtccccagccgttcatgaaccccataaatggcctatattctcagccgtctatttgcacctctgtcagttaaggtcattgcgttatcgaagacctgcaatattttgggagatggacctttgcctttgcctt

SEQ ID NO: 6158 - DNA, 219 bp, Zea mays
  Clone ID: LIB3118-028-P1-K1-D10
cggacgcgtgcgaaaaataaaaaatgatagataagaacaatcaacgctataaaaatgataaaaagtgtgctatgttgtagaaccaaaatatacacccgcgcgcggccgttctggagcgtcctagctgacggacccgtgcgtacgactgtagaagtcttatgtggtgcgccctgcttggaattcactggccgtttccccacaaaggggggtcggggattt

SEQ ID NO: 6159 - DNA, 104 bp, Zea mays
  Clone ID: LIB3118-028-P1-K1-D11
ctgtctccttcaaagatgaccaagttctatatggaacattcgatgctttggataggtgaataatgttctatgttgttgaacaaatataacaaatagaggtcgca

SEQ ID NO: 6160 - DNA, 281 bp, Zea mays
  Clone ID: LIB3118-028-P1-K1-D12
cgacgtgaaaagagaccgtctgttccgaggttttgcttccatgtcgacgagaggcggcgaggccgcgaggcaggcgacggtgaatatcatcgagacggtgcacgtggtgtcgtaccggttcagcttcaagtccatcgttcagaggctcacggtgagagactctttggtcggcttcggaatccactactcggatgggtcgcccgaccgttgatgatatcaagaggcgtgccctcatttggctgcttgttttacgtgctagcatgggttgcatgcccttttgc

SEQ ID NO: 6161 - DNA, 395 bp, Zea mays
  Clone ID: LIB3118-028-P1-K1-D2
caacaacaactaccattcagccagctacctgctgcctacccccagcattttctttcattgaaccaactggcagcattgaactctcctgcttatttacagcagcaacaactactaccattcagccagctagctggggtgagccctgctaccttcttgatacaaccacagttgttgccgttctaccagcacgctgcgcctaacgctggcaccctcttacaactgcaacaattgctgccattcaaccaacttgctttgacaaacccagcagcgttctaccaacaacccatcattggtggtgccctcttttagatttcttatgagtgatagttcaataataaaggttttgtctgatgtttgggcttcccagaaataagaaagcacatttgtagattctt

SEQ ID NO: 6162 - DNA, 287 bp, Zea mays
  Clone ID: LIB3118-028-P1-K1-D3
cccacgcgtccgggagtctacatgtacttcgaagataatgctggagtcattgtgaaccccaagggcgagatgaaaggatctgccatcactggacctattggcaaggagtgcgctgacctttggcctatgattgctagtgcagcaaatgctattgtctgatactactggttgggaggctgggttgagatagttttattgtgatccattttaaccttttctgtacttcaacatctgtggaaatttacttgattaatgcactaagggaaaagacgcttaggcgcacaatt

SEQ ID NO: 6163 - DNA, 282 bp, Zea mays
  Clone ID: LIB3118-028-P1-K1-D4
cccacgcgtccgcccacgcgtccggtttcactcccccaattttctttcccaactgtatgctgattcaatcacaactgacagagacatgtggcagctgcccaagctggacctcatccagtaggccagaaggtgtagtatttatcctgggctgtatgcaccgtcaggagcgggggttttcttaggccagtgttgtggttatggattaggtacaggttttttttaagcatggagagacgttttactagataatgatgaatgctgcttgtctgatgccattggcat

SEQ ID NO: 6164 - DNA, 225 bp, Zea mays
  Clone ID: LIB3118-028-P1-K1-D5
cgatcgaagggaattcattcggttagctttaatctgtctcgttagtgtgtcgtgttcgtgtagcaccatgccacagctacgccatgccgtgtgctctgtcacgtgggggccactcgtggggtctcctgctgctgtcagaacgaataagagaagacggaatcgtggtgaaacaataaatatgcatggtttattagatagggatccatgacaagccttttcttgtaa

SEQ ID NO: 6165 - DNA, 392 bp, Zea mays
  Clone ID: LIB3118-028-P1-K1-D6
ccttgttcctccaacaaccgtcagccctattacagcagttacctttggtccatttggtggcacaaaacatcagggcacaacaactacaacaacttgtgctagcaaaccttgctgcatactctcagcaacatcagtttcttccattcaaccaactggctgcattgaactctgctgcttatttgcaacaacaattaccattcagccagctagttgctgcctacccccagcaatttcttccattcaaccaactagcagcattgaactctgctgcttatttacagcagcaacaactactaccattcagccagctagctgatgtgagccctgctgccttcttgacacaacaacagttgttgccgttctacctgcacgctatgcctaacgctggcacc

SEQ ID NO: 6166 - DNA, 348 bp, Zea mays
  Clone ID: LIB3118-028-P1-K1-D7
ccttgttcctccaacaaccgtcagccctattacagcagttacctttggtccatttggtggcacaaaacatcagggcacaacaactacaacaacttgtgctagcaaaccttgctgcatactctcagcaacatgagtttcttccattcaaccaactggctgcattgaactctgctgcttatttgcaacaacaattaccattcagccagctagttgctgcctacccccagcaatgttttccattcaaccaactagcagcattgaactctgctgcttatttacagcagcaacaactactaccattcagccagctagctgatgtgagccctgcttgctttttgacacaacaac

SEQ ID NO: 6167 - DNA, 408 bp, Zea mays
  Clone ID: LIB3118-028-P1-K1-D8
ccttgttcctccaacaaccgtcagccctattacagcagttacctttggtccatttggtggcacaaaacatcagggcacaacaactacaacaacttgtgctagcaaaccttgctgcatactctcagcaacatgaggttcttccattcaaccaactggctgcattgaactctgctgtttatttgcaacaacaattaccattcagccagctagttgctgcctacccccagcaatttgttccattcaaccaactagcagcattgaactctgctgcttatttacagcagcaacaactactaccattcagccagctagctgatgtgagccctgctgtcttcttgacacaacaacagtttgttgccgttctacctgcacgctttgcctaacgctggcacccttttacaactgcaa

SEQ ID NO: 6168 - DNA, 81 bp, Zea mays
  Clone ID: LIB3118-028-P1-K1-D9
gtggctactacaaggatgaccgcgttctagatggaacaatcgatgctttggaaagcttaataatgttttatgttgttgaat

SEQ ID NO: 6169 - DNA, 405 bp, Zea mays
  Clone ID: LIB3118-028-P1-K1-E10
aaacaagtggcgacagacaaagatttgtgagggtgatccgcgctgagaagagatggctaagatcgccgcggcggcggcggcggcgctgtgcttcgcggccctggtggccgtggccgtctgccaaggcgaggtcgagcggcagaggctcagggacctgcagcgctggcaggaggtccaggagagcccgctcgacgcgtgccgccaggtcctcgaccggcagctaaccggcggcggcggccgcggcggcgttggcccgttccggtggggcaccgggctcctgatgcggtgctgccagcatctccaggacgtgagccgcgagtgccgctgcgccgccatccggagcatggtcaggggctacgaggaggccatgccgccgctggagaaaggctggtggccatgggggcg

SEQ ID NO: 6170 - DNA, 249 bp, Zea mays
  Clone ID: LIB3118-028-P1-K1-E11
aatcaggtggagacagacaaagtttcgtgagggtgatccgcgctgagaagaaatggctaagatcgtcgcggatgcagtggctgatctgttctacgcaggccctggtgaccgttagccacatgccaatgctagccctaccggcagatgctgacggacctgcaacgctgggacgaggttcatcagtgcccgcttaacgcgttccacctggtcctcgaacataagctaacccgcatacaaacacgagctgga

SEQ ID NO: 6171 - DNA, 388 bp, Zea mays
  Clone ID: LIB3118-028-P1-K1-E12
atttagccagctagctactgcctactctcagcaacaacaacttcttccatttaaccaattggccgcactgaaccccgctgcttatttgcagcagcaaatactactaccatttagccagctagctgcagcaaaccgtgcttccttcttgacacagcaacagttgctgcctttctaccagcagtttgcggctaaccccgcaaccctcttacaactacaacaattgttgccctttgtccaacttgctttgacagacccagcggcctcctaccaacaacacatcattggtggtgccctcttttagattgcttattagttgtaattcaataataaagttttttggatgatgtatgtggccaaccagaaataagaagttacatttccagattct

SEQ ID NO: 6172 - DNA, 364 bp, Zea mays
  Clone ID: LIB3118-028-P1-K1-E4
atgagcttgacagaggcctaaacatgaaggtttgtactgcgataagcattgctcactgtctcctgtgggcactgtggactgtcatgagtgggcatcggccgcggctcaagatcatatctgtcgccgtccgaggcgcagttgcagtacttgcggaagcctacgacattccaccgcgatggggatacgcatatggccgtgctatctgcctcgctgtggctatccccctgtcataccttcggtggtgctttgccaaggaggatgctgagatgcgaacatcagcaatgctaaagaagacacgataacgaggaaatgcgacatgcgcgctgtgtgcacccacccagccattgaaagataaaagtttcac

SEQ ID NO: 6173 - DNA, 423 bp, Zea mays
  Clone ID: LIB3118-028-P1-K1-E5
cttgctctagcaaacgtagttgcaaaccagcaacaacaacaactgcaacagtttctgccagcgcttagtcaactagccatggtgaaccctgccgcctacctacaacagcaacaactgctttcatctagcccgctcgctgtggccaatgcacctacatacctgcaacaagaattgttgcaacagattgtaccagctctaactcagctagctgtggcaaaccctgttgcctacttgcaacagctgcttccattcaaccaactaactatgtcgaactctgttgcgtacctacaacagcgacaacagttacttaatccattggcagtggctaacccattggtcgctgccttcctacagcagcaacaattgctgccatacaaccggttctctttgatgaatcctgtcttgtcgaggcagcaacccatc

SEQ ID NO: 6174 - DNA, 404 bp, Zea mays
  Clone ID: LIB3118-028-P1-K1-E6
cttgctctaacaaacgtagatgcaaaccagttacaactacaactgcaacagtttatgccagcgcttagtcaactagccatggtgaaccctgccgtctacctacaacagaagcaactgctttcatctagcccgctcgctgtggccaatgcacctacatacctgcaacaagaattgttgcaacagatcgtaccagctctaactcagctagctgtggcaaaccctgttgcctacttgctacagctgctttcattcaaccaactaactatgtcgaactctgtagcgtacctacaacagggacaacagctacttaatgcattggcagcggctaacccattgctcggtgccttgctacagaagaaacaatagctgtcatacaaccggttctctttgatgaatcctgtctt

SEQ ID NO: 6175 - DNA, 363 bp, Zea mays
  Clone ID: LIB3118-028-P1-K1-E7
cccacgcgtccgcccacgcgtccgatttattggcacaaaacatcagggcacaacaactcgtgctagcaaaccttgctgcctactctcagcaacaacagttacctttggtgcatttgttggcacaaaacatcagggcacaacaactacaacaactcgtgctagcaaaccttgctgcctactctcagcaacaacagtttctgccattcaaccaactagctgcattgaacttctgctgcttatttgcaacaacaactagtactaccattcagccagccagctgctgcctacccccagcaatttcttccattcaaccaactagcagcattgaactctcctgcctatgtacagcagcaacaactacta

SEQ ID NO: 6176 - DNA, 393 bp, Zea mays
  Clone ID: LIB3118-028-P1-K1-E8
cgcaccctaagaactacggccctggctcccgcgtatgccgggtctgcgcgaaccctcacggtctgatcaggaagtacgggctcatgtgctgcaggcagtgcttccgcagcaacgccaaggacattggtttcatcaagtaccgttgaagaggccactgcgctgctgtggagaacttcctacatcaaagaaatgggtccttcattagaaggcctaatttatgcgctttagctttttgttcagaacttgagactcatgtgttaaactcgacttgttaaagttttgatggctactttgtgcttgttggaccagctataatcagaagattgaaattttctcactcatgatgtttgttcttatactgcgtgtatgctcagtttttttttttgagttact

SEQ ID NO: 6177 - DNA, 336 bp, Zea mays
  Clone ID: LIB3118-028-P1-K1-E9
cctgagccctagagctggttgggatcctcattcctctgtaacttgtgcgtcagtttttggtggatttgccgctaaatttgctgaggcatgccaggatcctattagatttttagaaacaagacatggtgaccctccgtgcgtaatgagaattcttagaaacaagaagacatggtgtgaccctgcgtgcgtaatgagatattagtctgcgatgcagaagattgtaaccttatacaaacacaatctggaggtttatgcgtgtggagttctacctttgtactctacacataatatcataatataccaggagcgtacaattgttctttcagggtgtgtttg

SEQ ID NO: 6178 - DNA, 83 bp, Zea mays
  Clone ID: LIB3118-028-P1-K1-F10
gggaagacgctggtggcactgagagtttttttctttataaggaattcatgtaaatgtatggatgagctaatgaaggcatttat

SEQ ID NO: 6179 - DNA, 361 bp, Zea mays
  Clone ID: LIB3118-028-P1-K1-F11
cctgagccctagagctgcttgggatcctcattactatgaaacttgtgcgtaagtctttggtggatttgccgactcaatttgctgaggcatgccaggatcctattagatttttagaaacatgacatggtgaccctgcgcgcgttatgagaattattagaaacaagaagacatggtgcgaccctgcgtgcgtaacgagatattagtctgacatgcacaagattggaaccttatacaaacacaatctgtaggtttctgcgtgtggagttctacctttgtactctacacatgttatcataatataccaggtgcgtacaattgctcctttaggaagtttttgtgagcaacaagagtgattacccta

SEQ ID NO: 6180 - DNA, 272 bp, Zea mays
  Clone ID: LIB3118-028-P1-K1-F12
attgagccagatagctactggctactctcatcaacatcaacctcttgcattaaaccaattgggcgcactgaacccaactgcttatttgcagcaggaaatactactaacatttagccagctgagatggaggacaccgcgcgttttttgtgacacattaacaacaggtggccttgtaccaacaatttgggggttacccggcaacccttttacaaatacaacaatgggtgccctttgatcaacaaggttttggcgaccgagggggcatctatcca

SEQ ID NO: 6181 - DNA, 141 bp, Zea mays
  unsure at all n locations
  Clone ID: LIB3118-028-P1-K1-F3
cggacgcgtgggcatttattgtaatatgtttattttctgaaatactaattttgatgtatagaatattgacaaaatcttcatgtcagtttcccttcccatttaatttatttttattanaaaaataatttaaaaattatattt

SEQ ID NO: 6182 - DNA, 99 bp, Zea mays
  Clone ID: LIB3118-028-P1-K1-F4
cggacgcgtgggcatttattgcaatatgtttattttctgaaatactaattttgatgtagagaatattgacaaaatcttcatgtcagtttcccttcccat

SEQ ID NO: 6183 - DNA, 411 bp, Zea mays
  Clone ID: LIB3118-028-P1-K1-F5
cgagagagtgagggacagcgtaaaaggagaggatgggaaccaggacatgtacctgccagctcttctcccaaaagtgcctggccgattctactacctgttcgggcagccgattgagatgaaagggatgggcagccttgtcagagataggaagagcgcgaacgaggtgtatgtacgcatcaaatcgcaggtggaggagatcatgtcgtatctcaagaggaagagggaggaagacccttacaggagcctaccgcagcgtgcactgtaccaggcaacatggggcgcgtccgctcaggtccccacttttgagccatgaacattgggagtagggaagggcgtctgcgagcggactgcaattctttgacaagatgtaatgcggtctcatttctgagatctccctccctcatatgctga

SEQ ID NO: 6184 - DNA, 93 bp, Zea mays
  Clone ID: LIB3118-028-P1-K1-F6
cggacgcgtggggttctagatgtcttggcttcagtgcaacggactgagattgctcatttctgaaattcatcaatggacttgctcttgcacaac

SEQ ID NO: 6185 - DNA, 234 bp, Zea mays
  Clone ID: LIB3118-028-P1-K1-F7
cggaccttggtgtagcactgcaaggctaaggtttactcctccacacatggactttcggggataggcttgccaccgtgttttgctagatgagtcgtgaaataagcttttacttcctcgctgctgtgggtgaagcgactggaattcggaaatttggaactaacaaaaccccccggggatttgtatgatatggtttggttgacaaaaaaaaaaaaaaagggcgggcggtttaaaaga

SEQ ID NO: 6186 - DNA, 163 bp, Zea mays
  Clone ID: LIB3118-028-P1-K1-F8
ggaagacgctgctggcactgagtctttttctctttattagtatttcgtttaaaactatgtatgaccgaatgatggtatttatttgtgtcatccttgaaaaaaaaaaaaactaacaaaataatgataaagaagcgactagaaaaaaagaaataaaaaacaaacg

SEQ ID NO: 6187 - DNA, 94 bp, Zea mays
  Clone ID: LIB3118-028-P1-K1-F9
ggaagacgctggtggcactgagtgtttttctctttattagcatctcatgataaatctatgcatgaccgaatgatggtatttatttgggtatcct

SEQ ID NO: 6188 - DNA, 414 bp, Zea mays
  unsure at all n locations
  Clone ID: LIB3118-028-P1-K1-G1
cccacgcgtccgagcgaacgatggacaccagtgcacacggttgaaagtatagttctgagcatcatttcgatgctctctagtccaaatgacgagtctccagcgaatatcgaagctgccaaggattggagagaaaagcgggatgagttcaagaaaaaggtaaggcaatgtgtccgcaaatctcaggaaatgctctgaaggagaaacatatggggagttgaacgagtgctgcaacttcacaaccagttacctagccagcattcttttgcttttcccctgtatantttccattcagtgtcattcgtatggtgggggttgggtctctttagacaaactggggactggtgcttatcctaaaaattcgattgtattggggggcatgaaatgatcgatgtcaaagaatattttgaacatgct

SEQ ID NO: 6189 - DNA, 424 bp, Zea mays
  Clone ID: LIB3118-028-P1-K1-G11
cctgagccctagagctggttgggatcctcattcctctgtaacttgtgcgtcagtttttggtggatttgccgctaaatttgctgaggcatgccaggatcctattagatttttagaaacaagacatggcgaccctccgtgcgtaatgagaattcttagaaacaagaagacatggtgtgaccctgcgtgcgtaatgagatattagtctgcgatgcagaagattgtaaccttatacaaacacaatctggaggtttctgcgtgtggagttctacctttgtactctacacataatatcataatataccaggagcgtacaattgttctttcagggtgtgtttgagagcaacaagactgaagacgctaaaatctccttatattcaaagcctctttaattcattctaatctacttgctccaaacaaaccctag

SEQ ID NO: 6190 - DNA, 187 bp, Zea mays
  Clone ID: LIB3118-028-P1-K1-G12
cctgagccctagagctgagagggatcgtcatccctctggaactcgcgcgcttacgtgcgggggattaccacggttaatcagctgaggcatgccacgatcctataatatactgagaaacatgacacggcgaccctacgggcgtaacgagaatgcttccaaacttgaacacattgcgggaccttgcgcg

SEQ ID NO: 6191 - DNA, 57 bp, Zea mays
  Clone ID: LIB3118-028-P1-K1-G2
gcctcgacaagacagggtttcctagaaataatcaatatattgattgagatttatctc

SEQ ID NO: 6192 - DNA, 366 bp, Zea mays
  Clone ID: LIB3118-028-P1-K1-G3
cctgagccctagagctggttgggatcctcattcctctgtaacttgtgcgtcagtttttggtggatttgccgctaaatttgctgaggcatgccaggatcctattagatttttagaaacaagacatggtgaccctccgtgcgtaatgagaattcttagaaacaagaagacatggtgtgaccctgcgtgcgtaatgagatattagtctgcgatgcagaagattgtaaccttatacaaacacaatctggaggtttctgcgtgtggagttctacctttgtactctacacataatatcataatataccaggagcgtacaattggtcttttaaggtgggtttgagagcaacaagactgaagacgcttaaatct

SEQ ID NO: 6193 - DNA, 212 bp, Zea mays
  Clone ID: LIB3118-028-P1-K1-G4
cccgagccatggagctggttgctatcctcattcctcatgtacttgggcatcaatctgaggtagaatttgaagctggctttccctatgcatgacacgagcctacaaacatctttcaagccacgacatggctacccttcaggcggactgagaacaattagaagcccgaagacatgctgcgaccctgcttgcgttttgagaaggtagcctaattt

SEQ ID NO: 6194 - DNA, 433 bp, Zea mays
  unsure at all n locations
  Clone ID: LIB3118-028-P1-K1-G5
gaaagaaattggtgaggttcaccttcagcaaggacgaaggcacgctgcgggccgcggtcgagaggttgaaggcgaagctcaggaggaaatgaatgaaggggggattacatgtttgtggctggtgattgttgaataatctgtgctgggtttcaactgcgcccggatgcctgtactgtctctttttttttttttttgctagcaatagttatgctgccagcgacttcatgcctagtgtcgntactatttgtttttgtctgtgtgtaagcagattggcgatggttcaggttccctgccggctgccgttaccctttggtaacctttggaccatttgggggccgctgcctgctacaaaacaatatacccttaatttttctttaatttttaaccctctttattcaatttaattctccttggtgcccaaacaaatctttgt

SEQ ID NO: 6195 - DNA, 245 bp, Zea mays
  Clone ID: LIB3118-028-P1-K1-G6
gaaagaaattggtgaggttcaccttcagcaaggacgaatgcacgctgcgttccgcggtggagaggttgaaggcgaagctcaggaggaaatgaatgaaggggggattacatgtttgtggctgacgattgttgaataatctgtgctgggttttaactgcgcccggatgcctgtactgtgtcttttttttttttttgggtagcaatttttatgttgccagcgattttatgcctagtgtcaaaactatt

SEQ ID NO: 6196 - DNA, 419 bp, Zea mays
  Clone ID: LIB3118-028-P1-K1-G7
acgaacttagcaagagggcacatgaagccgaagaacaggcgagcgagaaggtagcagaagcactggcacaggtagtgtcggcaaaggaatcagaagcaatgagcctggagagcctaaaggaagcgtccgatgaaatggacgagaagaaggaagctcttgagatcgccttggagagagccgggagggcgaacgaagggaagcttggcgcggagcaggagcttaggaaatggagagccgaccacgagcagcgccgcagagctcacgaatccgcgaaacgcgcggtgaatcctttgaacggtccgtctagagtatttgtcgaacagaagagtccataccacaaggagcaggaatccaaggtgcaggcgtcggggagtagtagctacgagggcctcgttccaaaccaaaagatgcagaggaag

SEQ ID NO: 6197 - DNA, 282 bp, Zea mays
  Clone ID: LIB3118-028-P1-K1-G8
cggcgtcgctgtgtgtgtttcgagtcagccagtcagttgcgtgccatggcatgctctgagtctgagatgatgatgatggctgatggcggcgtcgtgtcctcccctggcctgctggggcgcttctggcgagcagtgtgttgtgttgtgtgggcgccgcacgctagcaggctagccatgtgccctgctgtgttgtgtcaccatccatctataatcttatccataccccaccttttgtgtgatgcgtgtaccctttcctgatgtctgttcccgggagtatcaggg

SEQ ID NO: 6198 - DNA, 135 bp, Zea mays
  Clone ID: LIB3118-028-P1-K1-H1
accaagcatacgtatgaacgactggcaccagtgcacacggtcagaagtatatttgtgagaatcattgtgacactctatagtgcaacagaagaggctacatcgaatatcgaagcgtgcaaggactggagagaaaag

SEQ ID NO: 6199 - DNA, 194 bp, Zea mays
  Clone ID: LIB3118-028-P1-K1-H10
gcggctttgttttttttccctagcagaaaaaaaatgatactttttggggaccagcggggtgttgcatattaagggaatattcttattttggagctgttctgttccaagcttgccttaaccaaacaatactaaaggtataacagagccagtccattttacctcggttcttaaccaaacactacctaaatgggaat

SEQ ID NO: 6200 - DNA, 204 bp, Zea mays
  Clone ID: LIB3118-028-P1-K1-H11
catgatcaagatcgagccaaaatgggaagaccctatttgtgcgaatggaggtaaatggaccatcatctgtggaagaggaaaatctgatacgttttggctgcacactctgctggctatgattggcgaacaattcgactatggtgatgaaatttgtggcgcacctgtcagtgtgcgggggaagcatgaaagaattgctatttggac

SEQ ID NO: 6201 - DNA, 289 bp, Zea mays
  Clone ID: LIB3118-028-P1-K1-H12
acgcgcacgcgtgcgcagcaattgtgcccaaatggtatgaccctatttgtgcgaatggaggcaaatggaccatcatctgtggaagaagaaaatctgatacgttttggttgcacactatgttggctttgattggtgaacaatccgactatggtgatgaaattcagttgcgcatttgtcagtgtgcgtggcaagcatagaaagaattgcttcttggacaaaaaatgctggcaatggaacttgtcaagttagcatcctgaagcagaggaaggaacctctggtcttcaatgac

SEQ ID NO: 6202 - DNA, 389 bp, Zea mays
  Clone ID: LIB3118-028-P1-K1-H2
aagcaacatacctttatcgcccttgttgtgtcaacaatcgccagccctatctttggtgcagtcattggtacaaaccatcagggcacaacagctgcagcaactcgtgctacctgtgatcaaccaagtagctctggcaaacctttctccctactctccgcaacaacaatttcttccattcaaccaactgtctacactgaaccctgctgcttatttgcagcaacaactattaccatttagccagctagctactgcctactctcaacaacaacaacttcttccatttaaccaattggccgcactgaaccccgctgcttatttgcagcagcaaatactactaccatttagccagctagctacagcaagccgtgctttcttcttgacacaacaac

SEQ ID NO: 6203 - DNA, 380 bp, Zea mays
  Clone ID: LIB3118-028-P1-K1-H3
cccacgcgtacgcccacgcgtccggttacctttggtgcatttattggcacaaaacatcagggcacaacaactacaacaacttgtgctagcaaaccttgctgcctactctcagcaacagcagtttcttccattcaaccaactaggttcattgaactctgcttattatttgcaacaacaacaactaccattcagccagctacctgctgcctacccccagcaatttcttccattcaaccaactagcagcattgaactctcctgcttatttacagcagcaacaactactaccattcagccagctagctggtgtgagccctgctaccttcttgacacaaccacagttgttgccgttctaccagcacgttgcgcctaacgcttgca

SEQ ID NO: 6204 - DNA, 319 bp, Zea mays
  Clone ID: LIB3118-028-P1-K1-H4
tcttttagtaacctttcaataggcgtcccccaagaactagtaaacatggcaaaactgttgagcctgttcttagccctctcctttgtagcagctatgtttgccataggctctcatgctgatggagactgtgagaatgacctccaaagcctgataagtgactgcaagacatacgtgatgttcccagctaatccaaaggtccctccttcggatgcttgctgtggtgtcatcaagaaggcaaacgtttcttgcttgtgctccaaggtcaccaaagaaactgagaaggttgtgtgcatggagaaggttgtgtatgttgctgagc

SEQ ID NO: 6205 - DNA, 54 bp, Zea mays
  Clone ID: LIB3118-028-P1-K1-H5
accacgagtaacctttcaataggcgttccccaagaactagtaatcatggcaaaa

SEQ ID NO: 6206 - DNA, 300 bp, Zea mays
  unsure at all n locations
  Clone ID: LIB3118-028-P1-K1-H6
acgcccacgcgtncgcgcaaattgcaccaagaaatccatcgagaggccgtcgacaggggaattaatggcgtcgtcgtctagcagcagccaccgccgcctcatcctcgcagccgccgtcctgctctccgtgctcgcggctgccagcgccagcgccgggacctcctgcgtgccggggtgggccatcccgcacaacccgctcccgagctgccgctggtacgtgaccagcccgacctgcgggatcgggccgcgcctcccgtgggcggagctgaagagggagatgctgccggggagcctggcgga

SEQ ID NO: 6207 - DNA, 353 bp, Zea mays
  unsure at all n locations
  Clone ID: LIB3118-028-P1-K1-H7
cccacgcgtccgcccacgcgtccgcatttaaccaattggccgcactgaaccccgctgcttatttgcagcagcaaatactactaccatttagccagctagctgcagcaagccgtgcttgcttcttgacacagcaacagttgctgcctttctaccagcagtttgcggctaaccccgcaaccctcttacaactacaacaattgttgccctttgtccaacttgctttgacaaacccagcagcctnctaccaacaacacatcattggtggtgccctcttttagattgcttattagctggaattcattaataaaggtttttggatgatgtatgtagccaaccagaaataagaagttaca

SEQ ID NO: 6208 - DNA, 304 bp, Zea mays
  Clone ID: LIB3118-028-P1-K1-H8
cttatttacaacagcaacaactaccaccattcagacagctagctgatgtgagccctattgccttgttgacacagcaacagttgttgccgttctacctgcacgctgcgcctaacgctggcaccctgttacaactgcaacaattgctgccattcaaccaacttgctttgacaaacccaacagcgttctaccaacaacccatgattggcggtgccctcttttagattgcttatgagttatagttcaataatgaaggtttttggatgatggtcgtggcttcccaggaataagaaagtacatttctaag

SEQ ID NO: 6209 - DNA, 353 bp, Zea mays
  Clone ID: LIB3118-028-P1-K1-H9
cgtgattattggttgctatgaagagtttaagagcaagaaaataagccgaggtgaactagtgaagaagctgacgcatgcagttggtgatagagtgctaatatcgacgataatgcgtctccaagataagtcacctgcagtggataagcgtgaggaaccagacacattggcgtccaaggtggtggcggaaccatcaaatgggtgttaggagggggccgaggaatgcagaaagggaggaaccagccgacttgacatagaaaaccctgggggaagcagctactatgaagccttttgcatcagtcttgtgcatagaggctgctgtgtgttctctgtatcgaaagtgtctacgtttgcca

SEQ ID NO: 6210 - DNA, 326 bp, Zea mays
  Clone ID: LIB3118-029-P1-K1-A1
gctggcttctcctccccctcttatcaagtcctcctcgggttagggttccttagggttttgtggaggggcgatggcggcggctgatgtggagtaccgttgcttcgtcggcggacttgcctgggccaccagcaacgagtcgctggagaatgccttcgcctcctacggcgagatcctcgactccaaggtcatcaccgaccgggagacggggaggtcccgcggcttcggcttcgttaccttctcctccgagaactccatgctcgacgctatcgagaacatgaacggcaaggagctcgacggccgtaacatcaccgttaaccaggcccagt

SEQ ID NO: 6211 - DNA, 392 bp, Zea mays
  Clone ID: LIB3118-029-P1-K1-A10
ctgaagaaggccagggacccgaagtacccaagaatcagcactactggaagaaacaagcttgatcagtaccaaatccttaagtaccccctcaccacagaatctgcaatgaagaagattgaagataacaacactctggtctttattgttgacctcaaggcagacaagaaaaagatcaaggctgcagtcaagaagatgtatgacattcaagcaaagaaggtcaacaccctgatcaggcctgatgggaagaagaaggcttatgtgaaactgacacccgactatgatgcccttgatgtggccaacaaaattggcatcatctaagttaataggcaactggattcgacatctatgtcctactagttctgagcataccaacaaatttttctatgttacta

SEQ ID NO: 6212 - DNA, 332 bp, Zea mays
  Clone ID: LIB3118-029-P1-K1-A11
cccacgcgtccgcccacgcgtccgcccacgcgtccgcccacgcgtccgcaagctatgatgccaccacacattttgagacaactgtaacagatgttctgaacatgtatacaatgatcaccggaaagactgtagaccttagtgtggatttgagtgctgctagtgctgccgaagaatactgatttcagtcatagtgtcatgtttatcaaagatcacatcgttggcgacagcacatgacccacattaatgaatggctggaatgcgtttattcggttccagattatatcatgccacatgtactgttctgcgtaatgtctactgggctggcagaacta

SEQ ID NO: 6213 - DNA, 379 bp, Zea mays
  Clone ID: LIB3118-029-P1-K1-A12
cggacgcgtgggccgtggtggtcctcgtggtgctcccggtgactttggtggcgataagagtggagctcctgctgagttccagccatctttcaggagttctggcgcgaggcctggctttggccgtggtggtggcagcggctttggcgctggcccgacctcttcttccatggagtgaacagtgaagctgcccttagtttggacatgatgtttcccctcccgtgaggcgtttaattttgaagaacggttattatgtactagtaatgttttccgtttcggctagtgctgacatgcaaaaaaattgttccatatttatacattggttccgacttccagtatagtagtctttgcaaaacgtttggattttcaagttagtacgttt

SEQ ID NO: 6214 - DNA, 364 bp, Zea mays
  Clone ID: LIB3118-029-P1-K1-A3
gctttctggaagtatggcaccttgcccaggtgcagaaataccaacatctgaaaaaatgagtgaacttgctgaagatagcagacttcaatgtatggagtttgcatctcccgttctggcaaattttgcgagtaaggaatgtggagaaacaccagaaccacaagttcttaatgagattgttgaagatagcaggcttcaatgtattgaattcaactccccggctcacacaaatctcccagataaaacaggcgccgaaaactttgcatccccaagttttgatgtggttgcaaaagatagtaagcctccgtctttggaattcacatcccctgctcatacagttgcaacattccaaccgtatgcagatggc

SEQ ID NO: 6215 - DNA, 58 bp, Zea mays
  Clone ID: LIB3118-029-P1-K1-A5
tacacctacgcatttgaccaagtgttcgaatagccatccaccaacaagtatacgtaat

SEQ ID NO: 6216 - DNA, 396 bp, Zea mays
  Clone ID: LIB3118-029-P1-K1-A6
cccacgcgtccgcggacgcgtgggaaccgacaactacatgttgcgtttgttctgcatcggcttcacgaagaggcgcccaaaccaggtcaagagaacctgctatgctcaggcatcccagatccgtcagatccgccgtaagatggttgagattatgatcaaccaggcttctacatgtgacctgaaagaacttgtttcgaagttcattccagaagttattggtaaggagattgagaagtctacctccagcatgtttccacttcaaaacgtttttatccgccaggtgaagatactcaaggcccccaagttcgatcttgggaagctcatggaggttcatggcgactacaaagaggatgttggtgtgaaatctgggtaggcctgctagggagatgaggcttt

SEQ ID NO: 6217 - DNA, 302 bp, Zea mays
  Clone ID: LIB3118-029-P1-K1-A8
tcgcactcatcttttcgcgtttagaacctctaaaatttcccccactcgccagtcgcagcagcacctgtagccatggacgccagcggagccggtagcaaggggaagaagggtgcggccgggcgcaaggcaggcggccccaggaagaagtcggtgacgcggtccgtcaaggccgggctgcagttccccgtcggccggatcgggcgctacctgaagaagggccggtacgcgcagcgcgtgggcactggcgcccccgtctaccttgccgccgttctggagtacctcgccgccgaggttctggagtt

SEQ ID NO: 6218 - DNA, 353 bp, Zea mays
  Clone ID: LIB3118-029-P1-K1-A9
tgccaatccttgccgctcggatcatcgtcgtcgtggtgcgagtcttcaatcgttttggtggagggaagaagggaggaaggaaagggggagaatccaaggtggtggacttccggatcgtacttagggatttgcccgaacttccggtaaaggtacttgatacatgttgggaatgaggggagtagcagcacgtccactttcactctcacaataacgctgcctaggcgcagccatgatttaattagaaacttattgttaaaggaagtttgtttatttttttatatggtcgtgcgcactggttaattcagttcaggtcgcatgtttatcttttcttgctagccgattaaaaatactta

SEQ ID NO: 6219 - DNA, 350 bp, Zea mays
  Clone ID: LIB3118-029-P1-K1-B10
ggcagcagtgcagccctttggtaatgccttttctccaatcacgtttgatacaaccaagtagctgccaggtattgcagcaacaatgttgtcatgatcttaggcagattgagccacaatacattcaccaagcaatctacaacatggttcaatccataatccaggaggagcaacaacaacaaccatgtgagttatgtggatctcaacaagctactcaaagtgcggtggcaatcttgacagcagcacaatacctaccatcaatgtgcggcttgtaccactcatactaccaaaataatccatgcagcagcaatgacattagtggtgtttgcaattgaagaattgtgtctacctag

SEQ ID NO: 6220 - DNA, 390 bp, Zea mays
  Clone ID: LIB3118-029-P1-K1-B11
cgcaaattgcaccaagaaatccatcgagaggccgtcgacaggggaattaatggcgtcgtcgtctagcagcagccaccgccgcctcatcctcgcagccgccgtcctgctctccgtgctcgcggctgccagcgccagcgccgggacctcctgcgtgccggggtgggccatcccgcacaacccgctcccgagctgccgctggtacgtgaccagccggacctgcggcatcgggccgcgcctcccgtggccggagctgaagaggagatgctgccgggagctggcggacatcccggcgtactgccggtgcacggcgctgagcatcctcatggacggcgcgatcccgcctggcccggacgcgcagctggagggccgcctagaggacctgcccggctg

SEQ ID NO: 6221 - DNA, 351 bp, Zea mays
  Clone ID: LIB3118-029-P1-K1-B12
gcaacatagaaagcacaatagtgtaccaacaatggcagccaaaatattttgcctccttatgctccttggtctttctgcaagtgctgctacggcgaccattttcccacaatgctcacaagctcctatagcttcccttcttcccccgtacctctcaccagcggtgtcttcggtatgtgaaaacccaattcttcaaccctataggatccaacaggcaatcgcagctggcatcttacctttatcacccttgttcctccaacaatcatcagccctattacagcagttacctttggtgcatttattggcacaaaacatcaaggcacaacaactacaacaacttgtgctagcaaacct

SEQ ID NO: 6222 - DNA, 330 bp, Zea mays
  Clone ID: LIB3118-029-P1-K1-B2
gtcgacaggggaattaatggcgtcgtcgtctagcagcagccaccgccgcctcatcctcgcagccgccgtcctgctctccgtgctcgcggctgccagcgccagcgccgggacctcctgcgtgccggggtgggccatcccgcacaacccgctcccgagctgccgctggtacgtgaccagccggacctgcggcatcgggccgcgcctcccgtggccggagctgaagaggagatgctgccgggagctggcggacatcccggcgtactgccggtgcacggcgctgagcatcctcatggacggcgcgatcccgccgggcccggacgcgcagctgga

SEQ ID NO: 6223 - DNA, 273 bp, Zea mays
  Clone ID: LIB3118-029-P1-K1-B5
accgccgccggtgcatctgccaccttcggttcacctgccacctactgtgcatttaccaccgccggtgcacctgacgacgccggtccacctgacaccgccggtccatgtgccgtcgtcggttcaatctgtcgccggcaccatgccactaccctacttaaccgacccgggctgagcctcatccccagccacacccatgcccgtgccaacagccggatacagcccgtgccaggtgcatggaacctgaggcgatggcagaaccccaatgctgggcca

SEQ ID NO: 6224 - DNA, 393 bp, Zea mays
  Clone ID: LIB3118-029-P1-K1-B6
cccacgcgtccgcccacgcgtccgtactaccgttacttggctgaatttagcactggaactgaaaagaaagctgcctctgatcagtcacttatggcctatcagcatgccatggttgtcgcctccagtgagctctcacctgctcaccaaatccggcttggccttgccctcaatttgtcggtcttcttttatgagataatgaactctcatgagagagcttgccaagtggcaaaacaagcatttgatgaggctcttactgagataaattctggtgagggaggttacaaggatagcacacttatgatgcagcttctgaaggacaacttagcattgtggacatcagaactaactggaggtgaagcatccaagggtaacgacgatgtcgacatggagggt

SEQ ID NO: 6225 - DNA, 353 bp, Zea mays
  Clone ID: LIB3118-029-P1-K1-B8
cccacgcgtccgtgaggttctccggggttcggtttcgtgggtgagcggatcgagatggcggcgtcggatgttgagtaccgctgcttcgtcggcggcctcgcctgggccacggacgaccactccctccacaacgccttcagcacctacggcgaggtcctcgagtccaagatcatcctcgatcgggagacgcagaggtcccgcggcttcggcttcgtcaccttctccacggaggaggcgatgcggaacgccatcgagggcatgaacggcaaggagctggacggccgcaacatcaccgtcaacgaggcccattcccgcggcggccgttgaggcggccgcggtgggtaccgtggtgg

SEQ ID NO: 6226 - DNA, 391 bp, Zea mays
  Clone ID: LIB3118-029-P1-K1-B9
ggcagcagtgcagccctttggtaatgccttttctccaatcacgtttgatacaaccaagtagctgccaggtattgcagcaacaatgttgtcatgatcttaggcagattgagccacaatacattcaccaagcaatctacaacatggttcaatccataatccaggaggagcaacaacaacaaccatgtgagttatgtggatctcaacaagctactcaaagtgcggtggcaatcttgacagcagcacaatacctaccatcaatgtgcggcttgtaccactcatactaccaaaataatccatgcagcagcaatgacattagtggtgtttgcaattgaagaattgtgtctacctagccgttatactcctataacggtgttaagcaataaagtaccat

SEQ ID NO: 6227 - DNA, 288 bp, Zea mays
  Clone ID: LIB3118-029-P1-K1-C1
cgcagatgaagtgttaggttaatcagcgtcgcttgaccgtcagggataaggactattacagggattacctttggggcatttattgtctcagtacatgaggggacaacaactagagcaagttatgctagaggacacttgttgactactctgagtaagaggaggagcttggattcagacgactagctgcgttggactctgatgcttatttgtagcaacaactaccattaacgcaggtagctgttgactacctcctacagtatgttgcattgatccaacttcgagcattgc

SEQ ID NO: 6228 - DNA, 285 bp, Zea mays
  Clone ID: LIB3118-029-P1-K1-C10
ccgggcaccgatccgcaagtcgcgccacgccccacgctttctggttggatatgaggcactgacaggttccctagatgattttggttttgaggattatcttaacatgcctcaagattctgaagggttccgtcaacctgacatgcaccacggaatggaggtgcgccttggtttgtccaagggacctatctgccctagctttagttgaggcagggaatgtagttctgcggtttttccgcacgttgatgcacctcattccagtacactcgggttaataaataaccacat

SEQ ID NO: 6229 - DNA, 373 bp, Zea mays
  Clone ID: LIB3118-029-P1-K1-C12
ggggtcttggacacactacaccggcgtccatggcagacgatgccaaccgagcggcctttatggagctgcagactctgatgatagataccaccgggtatatcaagcagatacaaacccaaatgcgctttaaagaaggggaaaagaagcgttcctaccttactttggaggaacttggccagatgtcagatgataccaacacctacaagactgtcggaaatagtgactattatggagacgtagtcagctctgttcaatgagcaggagcaaaagcttaatgacagtgagagtgcgatagcttcaatgcagacatccaaagactaccttgagaaacagcagggcgaagtggagaacaatattagggagctgctttaac

SEQ ID NO: 6230 - DNA, 390 bp, Zea mays
  Clone ID: LIB3118-029-P1-K1-C2
cccacgcgtccgcccacgcgtccgcctcccccacttttgctgctgctggttggttggtttgcgtttgttcgggcagctagcgtttcctggattggggacgcttccgtttcgggaagccgtgaagggatcggccacgacgatggtgcgggggaagacggagctgaagcggatagagaacgcgacgagccggcaggtgaccttctcgaagcgccgcaacgggctgctcaagaaggccttcgagctctccgtgctctgcgatgctgaggtcgggctcgtcgtcttctccccgcgcggcaagctctacgagttcgccagcgccgccagccttcagaaaacaattgaccgctacaggacatacacaagggaaaatgtcaataacaagactgttca

SEQ ID NO: 6231 - DNA, 369 bp, Zea mays
  Clone ID: LIB3118-029-P1-K1-C3
cccacgcgtccgctgatttcatctagccctctcgctgtggttaatgcacctacatacctgcaacaacagttgctgcaacagattgtaccagctctgactcagctagctgtggcaaaccctgctgcctacttgcaacagctgcttccattcaaccaactgactgtgtcgaactctgctgcgtacctacaacagcgacaacagttacttaatccactagcggtggctaacccattggtcgctgccttcctacagcagcaacaattgctgccatacaaccagttctctttgatgaaccctgccttgttgtggcagcaacccatcgttggaggtgccatcttttagattacatatgaaatgtactcgataatg

SEQ ID NO: 6232 - DNA, 363 bp, Zea mays
  Clone ID: LIB3118-029-P1-K1-C4
catctctgcttggatatgaggcactgacaggttccctagatgattttggttttgaagattatcttaacatgcctcaagattctgaaggtttccgtcaacctgacatgcaccacggaatggaggttcgccttggtttgtccaagggacctatctgccctagcttcagttgaggcagtgaatgtagttctgcggttctgccgcacgttgatgcaccttagtccagtacactcgggtcaataaaagaccacattaggatggtgaaacggtgaaaactgatggcttgcatatgttcagagtgttatgttgtaatgaacagtgttatgttgtaatgaacgcatatatcgcatgattgatagcttggct

SEQ ID NO: 6233 - DNA, 318 bp, Zea mays
  Clone ID: LIB3118-029-P1-K1-C5
cgtactcattatcgtgtactaaacaggcttgctacaaccaggatgtacagccatgtgtgttgaatatagatgcaccaacttttgatcctcatggctatactggtactggctggtgcttgaaggatctacaccctgcacaaatttgtatatgaatgtgcaccaagttagtgaggggtgaatattgtacctagatcggatgacagaaacttgagcttttggtgtgatgcggctatatttatattaaactgctattggtaaagtgaaatggctgatagaaaggaatagaaaaaagggcgattcgtttttaaaggatccaag

SEQ ID NO: 6234 - DNA, 345 bp, Zea mays
  Clone ID: LIB3118-029-P1-K1-C6
gttcgcttgtgctccttctttccatggcggcatacgccggaatcctagttccaccgctccccgtccgcctctcggtctctcaccttagatccgttaccccggcttcctactccctgaaccaccgtcccccccgccccgcggtcgcccgtgcggcttcccgcggcaacggcaacggcgggccaccggtggagggggagaaggagcggccacactcgttcttcccggcgctgtcggagatccggttgggagagcttctgtccccggaccccggcaatgccagggctgtggtgctcacgggcgcgctcgtatgggctggcgcctcactgctgctgcagcttacgctca

SEQ ID NO: 6235 - DNA, 175 bp, Zea mays
  Clone ID: LIB3118-029-P1-K1-C9
cggacgcgtggggttttccagtggatcgataaaccgttcaaggttgaggtggagccttgtgatgtatggaagcaacagtcacaagatgtgcttgtgcgatgagaatagaggagaccttgagcgtatccgctatcgttgttattgcgacaagcatcttatggatgaatgtgttgtt

SEQ ID NO: 6236 - DNA, 357 bp, Zea mays
  Clone ID: LIB3118-029-P1-K1-D1
cagcaagcggcaagcgcgcgcacacaccaaacgcaactgcaactgcaggtgcaagagcacgccacagcagaaaccaacagttccacacgaagcaagaaaaggggacccccacctctgccgatttccatccgccggggcgtcgtctgtgaccgaccagaccatggacaagatcctggccttctccatcctgagctcgtcgccggcggacatctccgcggccggcctctcctcctcctcgtccgcccggctctcgtggcggcctcggccccaggcggctgcggccgacgcggcgccaacgccgaggcaggagaaggcggccgaccagcgggccccggcggccgagcgccggcgggaggc

SEQ ID NO: 6237 - DNA, 348 bp, Zea mays
  Clone ID: LIB3118-029-P1-K1-D10
cggacgcgtggggttcctacatctgctgctatagacggcccccttgaacctccgccagcgtctgccgctgtagtccttgatacccctgatgaatcattaatcagttacttcagtggcgctgctagcattggaagtgtatcaaacgcacaaccgtctggaagagtgcacccatctactgagagcatcccatcttcccatgtgccattgatcgttccatctgctgcttcaacacatcaactgcccccttcagtagcttcaacagcttcaccattgcccgtccatggaactaatgcccacactagccggccaacaaatcttgtgacaccagatttctttgcgccttcacca

SEQ ID NO: 6238 - DNA, 342 bp, Zea mays
  Clone ID: LIB3118-029-P1-K1-D11
cccacgcgtccggcacacggccaccgaaccaagcaagcagcatcggaccagcaggcgcatcgatcgagccagtactcctcgaccggcccggccatagaagcataataacactaccgggggtgtggagcggagaggtagatggcgagcgggagcggcaaggcgaaggcgtcgtcgtgggcggcggcgatgagcgtcggcaccgtggaggcgctcaaggaccaggccggcctgtgccgctggaactacgcgttccggcaggcggcgcagcagcgcgccaggaggccagcggcaggcgcgagcggctcagtcggccccggcagcggcagcggcagctcgcacgcg

SEQ ID NO: 6239 - DNA, 139 bp, Zea mays
  Clone ID: LIB3118-029-P1-K1-D2
aaaaaagaaaaaagaacaaaaaaaaaaaaaaaaaaaaaaaaaaaaaaaaaaaaaaagagaaagaaaaaaaaaaaaaaaaaaaaaaaaaaaaaaaattaaaaaaaggagtaaaaaaaaaaaacccaaaaaaaaaaaaagg

SEQ ID NO: 6240 - DNA, 313 bp, Zea mays
  Clone ID: LIB3118-029-P1-K1-D7
cccacgcgtccgcccacgcgtccgcccacgcgtccgcccacgcgtccgcggacgcgtgggattgcaccaagaaatccatcgagaggccgtcgacaggggaattaatggcgtcgtcgtctagcagcagccaccgccgcctcatcctcgcagccgccgtcctgctctccgtgctcgcggctgccagcgccagcgccgggacctcctgcgtgccggggtgggccatcccgcacaacccgctcccgagctgccgctggtacgtgaccagccggacctgcggcatcgggccgcgcctcccgtggccggagctgaagag

SEQ ID NO: 6241 - DNA, 112 bp, Zea mays
  Clone ID: LIB3118-029-P1-K1-E1
ctgttagagataaggttaaactcacccttaatggacttgcatcaggaactagtaagaggaaagtgtggtaaaaaataaccgtatgacaaaaaatatgtaaggaggcactctg

SEQ ID NO: 6242 - DNA, 381 bp, Zea mays
  Clone ID: LIB3118-029-P1-K1-E10
cggacgcgtgggcttccgttctcaaaccaacctaggcaattcgccgcagcctctcaccctcgcgagtcccgacctcccgcagccgccgcacagatggcacccaaggcggagaagaagccggcggccaagaagcccgcggaggaggagcccgcgacagagaaggtggagaaggctccggcggggaagaagcccaaggccgagaagcgcctcccggcgggcaagtccaaggagggcggcgagggcaagaaggggaaaaagaaggcgaagaagtccgtggagacctacaagatctacatcttcaaggtgctgaagcaggtgcaccccgacatcggcatctcgtccaaggccatgtccatcatgaactccttcatcaacgacatc

SEQ ID NO: 6243 - DNA, 110 bp, Zea mays
  Clone ID: LIB3118-029-P1-K1-E12
gcgctgatggtccgctccggcgcccgagctctggattcaccgttcgccgtggggcttctgtcgttggccaacgtgctgacctgcggcgcgctatatgacaactttataaa

SEQ ID NO: 6244 - DNA, 247 bp, Zea mays
  Clone ID: LIB3118-029-P1-K1-E2
cgctgaactctttcctcaaatacatcactgtccagtccctaacagaggaagggctgagaaagctggggccgtacgtcgcgaagatggccgaagtggaggggctagaggcgcacaagagagccgttacccttaggctgcaagaggttgaggccaatgttactgtctagctgctgtccatggtctattgtaatgttcagactcgatgtgggatgctggagttcttccctaggaaacctaggggaactgg

SEQ ID NO: 6245 - DNA, 331 bp, Zea mays
  Clone ID: LIB3118-029-P1-K1-E3
cccacgcgtccggggttggcttctcctccccctccggttcgggttcgggttcgtgaggttctccggggttcgggttcgtgggtgagcggatcgagatggcggcgtcggatgttgagtaccgctgcttcgtcggcggcctcgcctgggccacggacgaccactccctccacaacgccttcagcacctacggcgaggtcctcgagtccaagatcatcctcgatcgggagacgcagaggtcccgcggcttcggctttttcaccttctacacggaggaggcgatgcggaacgccatcgtgggcatgaactgcaaggaactgtacggtcgcaacat

SEQ ID NO: 6246 - DNA, 322 bp, Zea mays
  Clone ID: LIB3118-029-P1-K1-E9
ggcaactgggagctggcgggcacgacactcgcagacgggatcccgcctcggcggcccgccagcgcgggctctggtcgatgtccggcgttagtgcgtgcgcgtacctgatgaagtgatgatgggttttgatcgaccagctcgtcagcgtagtgcggacacggagtttacagtgttattcgaactgacctgtgtgcttcctcgtgctagtactggtggctgccatgtgtgtgagctgctggtagagaactagggattcttttttctttctatctgacgcttgcttggttatatgtcccggcgtgttaagcttgtgttactatgc

SEQ ID NO: 6247 - DNA, 351 bp, Zea mays
  unsure at all n locations
  Clone ID: LIB3118-029-P1-K1-F1
cgaggaacaaacccgagtacggcgagccaaccgaagctgaactgaacgggggaaacgggaaagggaagaaacgacacgatgcggcggaacctgcccgagaccccgagtcaggctggctggagggtggggggaacacagcctggcgacgctgtccgccgggtcccaccaaccagccggcaaagactcacatcggttggtgtgttgattgggccgagctgtggcaggtttgggcttgggccgtgtttttttgtaaaatataatgtagacccataaaatatatgaccagacctagacccatcagccnnaanaaaaaaaaaaaaaaaaaaaaaaaaaaaaaaaaaaaaannnaag

SEQ ID NO: 6248 - DNA, 234 bp, Zea mays
  Clone ID: LIB3118-029-P1-K1-F10
tggcgcttccgctgctgaccaaaaacatcgctaagaagctgttcaaggggtggaagacgcccaagctcggccgttacaagtgcctcaagccaagctggcgcaggccatagggtattgactcccgcgtcaggaggaagttcaagggatgcacctcgatgcccaacattggttatggttctgacaagacgaccaggcactaccttcccatcaagttcaagaagtttgtggtccaca

SEQ ID NO: 6249 - DNA, 230 bp, Zea mays
  Clone ID: LIB3118-029-P1-K1-F12
gcactactgaccgttgtactgtcctggctctactccaccggtccaaccagcaaccagccccgacgaatttcaaggtttcccggtgcggagcgagcgggcgggacgtgccgggacggtggttgggttggattggattggatcggattggagcctaccgacggccagctcgtttacccgacatggccaagggcggtttgtgcgttcgcagcccgaggggccaggcgattggc

SEQ ID NO: 6250 - DNA, 328 bp, Zea mays
  Clone ID: LIB3118-029-P1-K1-F2
cggacgcgtgggtgcgaccgcaggaaccactaagaggccaacttgttgcgtcctggttctgaccaaaccaaacaagggggagctcagtgacgaggtgaaggataaactgaagtcagactatgaccaagttgtaacggaagttgctgaggctacatctgcaatgttctaaggaccattcagggaccacatcatctgagaatcatgcagctacattcttggcgtactatgtaacctgatccctgtcagtctgccctgcttgcgtgaaccgcaccagtatgctttgcatggtggctggagggatatgactatatgagtttacctatatatt

SEQ ID NO: 6251 - DNA, 170 bp, Zea mays
  Clone ID: LIB3118-029-P1-K1-F3
cccacgcgtgcgttctatacaaataaccactatatggctatctagctgcttcctgggtgtggccaaaccaaacagggtggtgctaattccctccttgaatgttccacttgatctatttctatgattattttgtaacggggttggttaaggtttcctcttcaatgctctaa

SEQ ID NO: 6252 - DNA, 336 bp, Zea mays
  unsure at all n locations
  Clone ID: LIB3118-029-P1-K1-F4
cccacgcgtccgcttgttagtactgaaaaccagaggcactcctacctttttgcaatcagtagccactaaaatgtggcagattccactgtttaccttgcatctatctaaattatatgcgtttcatggtttcaaaaaaaaaaaaaaaaaaaaaaaaaaaaaaaaaaaaaaaaaaaaaaaaaaaaaaaaaaaaaaaaaaaaaaaaaaaaaaaaaaaaaaaaaaaaaaaaaaaaaaaaaaaaaaaaaaaaaaaaaaaaaaaaaaaaaaaaanngggggggggcccttttagaggatcaaagtttacttcccggggctggcaaggaaaaattttttttttg

SEQ ID NO: 6253 - DNA, 400 bp, Zea mays
  Clone ID: LIB3118-029-P1-K1-F5
cccaggtcgcccccgagatcgagctccccaccctcgacggcaagactcacaagatgtaccgcggtgggaagatctgcctcaccgtgcacttcaagccgctgtgggccaagaactgcccgaggttcggcctggcgcacgcgctgtgcctcggcctcgcgccgtggctcgcggcggaagtcccgattctggtcgactcgggcatggtgaagcacaaggatgacgaggcggctccggctgaggcatctgcctctgctgctcctccttcgtagttgccacttgcaacaactgagtgtccggtgagctaagggcgatatcggaaatcaactcggcggtgaaccgtgaaccgccaaataagagagatacctgcaaatctaaacatcatgtgaaacatgttccatac

SEQ ID NO: 6254 - DNA, 167 bp, Zea mays
  Clone ID: LIB3118-029-P1-K1-F6
cgcccaggtcgccccctagatcgagctcctcacccttgacggtaagactcacaagagggaccgcggcgggaagatctgtcttaccccacacttcaagccgttgtgggccaagaactgtccgaggtttgggctggcgcacgcgctgtgcctctgtctcgcgccgtggc

SEQ ID NO: 6255 - DNA, 386 bp, Zea mays
  Clone ID: LIB3118-029-P1-K1-F8
ggatgaacaagagaaagagcggatgcttttgtattgggcagcatatggatcttttagcattgctgaagtgtttgcagataagcttctttcaagtgttcctctctattatcatgtgaagtttgctatccttgtgtggctccagttcccttcaaacagtggatcaaagcatgtatacaaaagatacctgcgcccatttttcctgaaacatcaagcaaaaattgataggtttctgaatattctgtcaaaggaacttacgaagtttgtgagcagccatgaagatgaaattcgttttatagaaaatatggctatcagaggggctacaacagcaaaccacatcgtaaatggcctcgaccaacctgaagaaacacaagcggttaatacaattg

SEQ ID NO: 6256 - DNA, 329 bp, Zea mays
  Clone ID: LIB3118-029-P1-K1-F9
atggcggtgccgctgctgacgaagaagatcgtgaagaagcgggtcaagcagttcaagaggccccacctcgaccgctacaagtgccttaagccaagctggcgcaggccaaagggtattgactcccgtgtcaggaggaagttcaagggatgcaccttgatgcccaacattggttatggttctgacaagtcgaccaggcactacctccccaacaagttcaagaagtttgtggtccacaacgtttctgagctggagttgctcatgatgcacaacaggacctactgcgctgaaattgctcacaacgtgtccactaagaagcgcaaggagatcgt

SEQ ID NO: 6257 - DNA, 81 bp, Zea mays
  Clone ID: LIB3118-029-P1-K1-G1
atggaggtttttgttcatgacgaagaagatcgtgaagaagcgggtcaagcagtttaagaggccccacctcgaccgttacaa

SEQ ID NO: 6258 - DNA, 397 bp, Zea mays
  Clone ID: LIB3118-029-P1-K1-G10
cggacgcgtgggcaatgctcagagcttagatgatcagtttagtactactgtgtctactgatcctataaatggttttaaattggagactgaaattgcaaccaagacagttgaaacatctcaagtacacaggctgcaagatgagtttgagcaaccattagttgatgctagctatgatgggcaagaaaactctgatagcccagtttctcatccagcattagatacaaaggggctgttgcacacagaagatcagcacaatgtggtacaggtagatgaaagtgaattcaagaactcaacatctgggatcacaaaggaagaggtccatgcagccgatttcaggcatgaacaaggaattaacaccacaatggcgatcagcagtcgaactttaaaagcttagcag

SEQ ID NO: 6259 - DNA, 302 bp, Zea mays
  Clone ID: LIB3118-029-P1-K1-G12
ccactcctcgccctctgtactgtcctgtctactcactatagcggtatcagcccaacaaccaggcccgtcggattacaaggtttcccgcgtgcggaggcgagcggggcagggacgtgccggggacggtggttgggttggattggattggatcggatcggtgccgcccgttgaccagagcgtataccagatatgggcaagggcggctgctgcgttcccagcaagaagcgccagccgccggccgtcgcgccttcttcgtcgtccgccgcggcggcggtgccgcgcgaggctcccgaggagggagc

SEQ ID NO: 6260 - DNA, 345 bp, Zea mays
  Clone ID: LIB3118-029-P1-K1-G2
catggatgagctccgcaagcgtgccgcggctgacaagaatgacaagtcagtcaaggatctggcgatgctgttgttcgagactgctctcctgacctccggcttcagcctggatgaccccaacaccttcggcaaccggatccaccgcatgctcaaactcggtctgagcatcgatgaggacgagcctgttgaggcagaggccgagatgcctcaacttgaggacgacgctggtgaaagcaagatggaggaggtccactaagtgtcccatcgcatgcttgccgcttatcttatccctagctaagctacctgtgatagcttaattttcactattgttcgaggtttatggca

SEQ ID NO: 6261 - DNA, 343 bp, Zea mays
  Clone ID: LIB3118-029-P1-K1-G3
ggtgggttggcttctcctccccctccggttcgggttcgggttcgtgaggttctccggggttcggtttcgtgggtgagcggatcgagatggcggcgtcggatgttgagtaccgctgcttcgtcggcggcctcgcctgggccacggacgaccactccctccacaacgccttcagcacctacggcgaggtcctcgagtccaagatcatcctcgatcgggagacgcagaggtcccgcggcttcggcttcgtcaccttctccacggaggaggcgatgcggaacgccatcgagggcatgaacggcaaggagctggacggccgcaacatcaccggcaacgaggcccagtc

SEQ ID NO: 6262 - DNA, 379 bp, Zea mays
  Clone ID: LIB3118-029-P1-K1-G4
cccacgcgtccgagctcaaatacctagtcagcttcaatagcaaaggatgtaagcagtgatcttgcttccatagtcccaagtgagtttcaggattttggactcgagtgccacagaaagctcaaaatcagagttgcttatctatctagatgaagcaaatgtgtccatggatgacaagaagttcaacttggtgaactattggaaagtgaattctcatagattccctgttgtggcgagtatggcaaagagattcttggttgttcctgctggaagtgtatcatcagaatcaacttttagttgtggaggaaggattcttgatgattataggagttctttaaagccggcgatagttcagtcactagtttgtgcatctagttggata

SEQ ID NO: 6263 - DNA, 306 bp, Zea mays
  Clone ID: LIB3118-029-P1-K1-G5
ccacgcgttcaccccgcgttcgagctaaatacctagtcagcttcaatagcaaaggatgtaagcggggggggggcttccatattcccaagtgagtttcaggattttggactcgagtgccacacaaagctcaaaattagagttgcttatctatttatatgaatcaaatgtgtccatggattacacgaagttcaacttgttgaactattgtaaagcgaaattttcatagaatccctgttggggcgaggatggcaaaatgatttctttgttgttcctgcttgaagttgtttttccagaatcaacctcttt

SEQ ID NO: 6264 - DNA, 119 bp, Zea mays
  Clone ID: LIB3118-029-P1-K1-G6
acgtaccaacaacccatcattggtggtgccctcttttagattgcttatgagttatagttcaataatgatgttttttggatgatgtttgtggcttcccagaaataagaaagtacatttct

SEQ ID NO: 6265 - DNA, 318 bp, Zea mays
  Clone ID: LIB3118-029-P1-K1-G7
cggcgacggcagggaccagctggaggtggagggcgacgacatcgacaccgtctgcctcgtcaactgcctgcgcaagaaggtcggccgcgccgacatcgtcaaggtggaggaggtgaagcccgcggagaagaagccgcccgaggagaaggagaaggagaagcccgccgaggccgtgccgctgccctactgctggtaccccaatcccaattactaccactactaccactaccagtggtagctagcggtgctggtgaccagctaagttgttcatgcttggtagtaacaaccgttttgaaagattgggagcttgccattcag

SEQ ID NO: 6266 - DNA, 63 bp, Zea mays
  Clone ID: LIB3118-029-P1-K1-G8
gacccacgcgtccgcggctactgcaggaaccagctggaggtggagggcgtcaacaacgacacc

SEQ ID NO: 6267 - DNA, 288 bp, Zea mays
  Clone ID: LIB3118-029-P1-K1-H1
agctggccgaggtatttctgcagcccgacaccggcgaggtacagtaccaggtgtgctctcctgaggcgctggggaagctgcttgcaaagtccggcctgacacagccaacacccgaggcataatgtactggtttgctgtggcatgtgatgccttctactgctcttagacatggtttaagcagttatgcttctgttgtgtgaacttaaatattcgacaattatgtgttctatttttgtgttgagcatccttgatccgttaatgtttcatctgtaatagtgcattgcattg

SEQ ID NO: 6268 - DNA, 376 bp, Zea mays
  Clone ID: LIB3118-029-P1-K1-H10
cttccgattggttttggacggggggcggccgcctttttttttttttttttttacggaggagccggattaggttggaccttcccaaccggcccttaacatacactgaggctgccccatccaaccggacccccccccttcctgggggccccaggcttgtcgccccacccatccgaccttattttttggggggcttccccactaaaccgaccccttgacatccaggaaattaacctaggttaaaatggctaattttccacgagacgaaccacgagcacggaaaatggcaggacaggagagcgacaccaccaaacatgcatgcatgggtatgctagttcacatgacactgcacgagggcccgccgccctgcctggggttg

SEQ ID NO: 6269 - DNA, 272 bp, Zea mays
  Clone ID: LIB3118-029-P1-K1-H11
gcattaccatattcacgaccgcccagacatagtcattcaccaggagtaaggaggaacttttatagatatacaagagggaagagaacgtctacataaacaagctggctgagcagtaccaaaggcatgaagagaacgtggcgatattgagaaggaggctaacactgaacatgtggaatatgctactgttgcggaccgaaacctttaggtggtctcatacaaaaatgcgagtggcactggctgagcttgacggggcaacgcgtcttgtattgaac

SEQ ID NO: 6270 - DNA, 51 bp, Zea mays
  Clone ID: LIB3118-029-P1-K1-H12
cggacgcgtggggcttgtccgatttcgaaatcagctagttcatcgggcagg

SEQ ID NO: 6271 - DNA, 334 bp, Zea mays
  Clone ID: LIB3118-029-P1-K1-H2
catggatgagctccgcaagcgtgccgaggctgacaagaatgacaagtcagtcaaggatctcgtgatgctgctgttcgagactgctctcctgacctccggcttcagcctggatgaccccaacaccttcggcaaccggatccaccgcatgctcaaactcggtctgagcatcgatgaggacgagcctgttgaggcagaggccgagatgcctcagcttgaggacgacgctggtgaaagcaagatggaggaggtcgactaagtgtcgcatcgcatgcttgccgtttatcttatccctagctaagctacctgtgatagcttaattttcactattgttcga

SEQ ID NO: 6272 - DNA, 373 bp, Zea mays
  Clone ID: LIB3118-029-P1-K1-H3
gccaacctgctgtaaatggagagaaatccgactcgcctactgttggttggggtggtcctggaggctacgtttatcagaaggcctacctcgaattcttctgcgcaaaggagaagttggaccaactaattgagaagatcaaagcattcccttctctcacttacattgctgtgaacaaggatggagaaacattctccaatatttcaccgaacgccgtgaatgctgtcacgtggggtgttttccctggcaaggagattatccagcctacggttgtggatcatgcaagttttatggtttggaaggacgaagcatttgaaatctggactcgggggtggggttgcatgttccctgagggtgattcatcgagggagctact

SEQ ID NO: 6273 - DNA, 228 bp, Zea mays
  Clone ID: LIB3118-029-P1-K1-H6
acgcgaactgcttgtccaagtacgaaatcagctaattcatcgggcagggtaggttaggcaaggtctacctcgaccgcgagaagcagagcgggtacttgttagcgctcaaggtgatatttaaggcgaaactgcagaagtaccactttcacgcgcacctgcggcgggagatcgagatccagcagagtctcgaccaccctaacgtgctccgcctcttcacctgaatacacg

SEQ ID NO: 6274 - DNA, 289 bp, Zea mays
  Clone ID: LIB3118-029-P1-K1-H7
cggacgcgtgggctgctgcgatgtgtgcgagaagtgcttccatggcaagggtgtgcggatgacccctgtcaaggcgtagcacattaagctgtacaagtgtcccagctgcaccaccaagcggagccgagaatgaccgcaccctgggaacaggacctgcttccagttaacggaggcatttcagaatcattaggagctatgaagccttgtcattagaaccgccttacctgattagcgtaccggtgcgcgtgccaactgttgtatcttatgtcgacgtgtgttgttatctgta

SEQ ID NO: 6275 - DNA, 339 bp, Zea mays
  Clone ID: LIB3118-029-P1-K1-H8
atggatgagctccgcaagcgtgccgaggctgacaagaatgacaagtcagtcaagggtctcgtgatgctgctgttcgagactgctctcctgacctccggcttcagcctggatgaccccaacaccttcggcaaccggatccaccgcatgctcaaactcggtctgagcatcgatgaggacgagcctgttgaggcagaggccgagatgcctcagcttgaggacgactctggtgaaagcaagatggaggaggtcgactaagtgtcgcatcgcatgcttgccgtttatcttatccctagctaaactacctgtgatagcttaaatttcactattgggcgaggtttt

SEQ ID NO: 6276 - DNA, 317 bp, Zea mays
  Clone ID: LIB3118-029-P1-K1-H9
cggacgcgtgggctgctgcgatgtgtgcgagaagtggttccatggcaagtgtgtccgcatcacccctgccaaggcggagcacatcaagcagtacaagtgtcccagctgcagcaccaagcggagccgagaatgacggcaccctgggaacaggacctgctcccagttaacggaagcattttagaatcattaggagctatgaagcggtgtcattagaaccgtttcacctgtttagcgtaccggtgcgcgtgccggctgttgtatcttctctcgacgtgtgttgtaaactgggcagggacatggtagctagtggtgatgtg

SEQ ID NO: 6277 - DNA, 67 bp, Zea mays
  Clone ID: LIB3118-030-P1-K1-A1
ccaagggagagtatgacgaaactggtccgggcattgtccacatgaagtgcttctaagtttttttggg

SEQ ID NO: 6278 - DNA, 391 bp, Zea mays
  Clone ID: LIB3118-030-P1-K1-A10
tggtgatcgggcacgagtgcgcgatcgtgagcgaggaggtgggccccagcttgacgcacctgtccgccaactacctcttggtgcttgagccgggcgttatctgttgacgctgtggtcactggaaggtttttccttactacctacacgatgacattaatttctttttcaccccatccgttccatgatttatggctaaacaattggtaaacccagcccttctatcctttaagcttcaacaaggcaattgcataaggacatacctttatcggccttgttgagtgaacaatcgccagccctatctttggtgcaggtattggtacaaaccatcatggcacaactggtggaagaactcgtgcttcctgtgattaaccaagtagctttgggaaaactt

SEQ ID NO: 6279 - DNA, 378 bp, Zea mays
  Clone ID: LIB3118-030-P1-K1-A11
cggacgcgtgggcaacaagcaacatagaaagtggaatccagtagcaacaatagagcaacaatggagaccaagatattttccctccttatgctccttgctctttctacatgtgttgctaacgcgacaattttccctcaatgctcacaagctcctatagcttccctttttcccccataccttccatcaattatagcttcagtatgtgaaaacccagctcttcaaccatataggcttcaacaagcaatcgcagcaagcaacatacctttatcgcccttgttgtgtcaacaatcgccagccctatctttggtgcagtcattggtacaaaccatcagggcacaacagctgcagcaactcgtgctacctgtgatcaaccaagta

SEQ ID NO: 6280 - DNA, 335 bp, Zea mays
  Clone ID: LIB3118-030-P1-K1-A12
catcaattgctgccattcaaccaacttgctgtgtcatactgaacagtgttctaccaacaacccatcatcggtggatccctctttcagatggctcatgagctatatgccaatgatgatagcgcttcagatgatgtctcgaggcgtcaccagatatataaaagttcatttgtagcttcttcattccatcaattatagcttgagtatgtgaaaacccatctcttcaaccatattggcttcaacaagcaatcgcagcaagcaacatacctttatcgaccttggggggtcagctttaagggagccatatttttggtgcagtgattggtacaaatcatttt

SEQ ID NO: 6281 - DNA, 422 bp, Zea mays
  unsure at all n locations
  Clone ID: LIB3118-030-P1-K1-A2
gcctgcggtgccggtaccgaatcgcagtttcggcccaggcctacgagaccaactgggagacatacaaagcacatgtagtgtaccaacaatggcagccaaaatatttcgcttccttatgctccttggtctttctgcaagcgatgctaccgcaaccattttcccacaatgctcacaagctcctatagctttcctttttcccccatacctctcaccagcggtgtnttcagtgtgtgaaaacccaattgttcaaccctacaggatccaacaggcaatcgcaacaggcatcttaccattatcacccttgttcctccaacaaccgtcagccctaatacaagagttaccttgggtccattggggggcccaaaacttaagggaccaacacctccaacaactggggctagcaaaccttgctgttactttaa

SEQ ID NO: 6282 - DNA, 416 bp, Zea mays
  Clone ID: LIB3118-030-P1-K1-A6
cccacgcgtccggattcagaaaaggtgcaagaactatgtgatgctgctaatgacgaagtagatgaaaacgatagagttcaaatagcaaactttctgtgccctgggaattatgcagtttctggtggtgtaaaaggtattgaagtagtcgaagccaaagcaaagtccttcaaggccagaatgacggttcgcctagctgttgctggcgctttccatactagcttcatgcaaccagctgtttcaagattggaatctgcgttggctgccactgagattagaacacctagaattccggtcatctccaatgttgatgcgcagccccactcagatcctaacaccatcaagcagattttagctcagcaggtaacctctccggtgcaatgggaaaccactgttaagaatcttatgggcaaggggct

SEQ ID NO: 6283 - DNA, 440 bp, Zea mays
  Clone ID: LIB3118-030-P1-K1-A7
gcggtaccggtaccggatcgcagtttcggcctcaggcgtacgcagtaccgaatgaagggcgccgacgtccatgtggcaactccacacccagcaaaaggcaagaccattgtaaacaatgacaaatcggtcaagtctccaaaatctgcgccaaaatctggtgtcccttgcaaatcgcgcagcaagtcattcatcagtgagacggcactttaagctcactcgaaggcgaagcatgggggcaagtgagtcgcatgtccaatagagtcaacaacaaatgcgaaacatgggagaggagggtaagcgagagtctcgaaagagtgtcggtggaagtaggcctaaccttattttgtttagagacgggctatgcgttcgatgtaacaaaacaaggctgtggtttgtgtacttcaatatttggggtgtgtggttcgaatttttttttgaac

SEQ ID NO: 6284 - DNA, 181 bp, Zea mays
  Clone ID: LIB3118-030-P1-K1-B10
cagaaacacacctagcgaagcgcactagcaacgacctaacaacaatggctgtcaagacattatccctccttgcgcttcttgccctttttgtgagtgcaacaaatgccgtcattattccacatttcttaattgctccgagttccatttttccacaagttccttcacttcagattacctttaa

SEQ ID NO: 6285 - DNA, 368 bp, Zea mays
  Clone ID: LIB3118-030-P1-K1-B11
ctagaactgggtcacaaacatatacaagatcaggattaactgatcgcaatttctcaacaacttgtagcacagtatctaaaaaggaaactgagcctatataacctgttaataaatgggtataatgaagcaactgattttcctccagtccttcaataaggtcccagagctgtttgccattaagaacctgacctctaaatgttgggtatcctgtatgattagaaaactgtacagagtttattggatccacatcaaagccaaggagctgcaggggaaagacggccgatttgttgccaacatacccctggacggtgtgggactggatgctgagcacacggccggtgtcagacggcagcgcgacggataggatc

SEQ ID NO: 6286 - DNA, 85 bp, Zea mays
  Clone ID: LIB3118-030-P1-K1-B12
gttctagatcgcgagcgccttcttttacttgaatattggtgactgcattggtctttcactttaaaatcggtgactgcattgatcg

SEQ ID NO: 6287 - DNA, 332 bp, Zea mays
  Clone ID: LIB3118-030-P1-K1-B2
cgggcggtggcaatcctggctaccctggtggcagccctggctaccagggtcaaggaggcaactccaacttccagtgaacatgaccacgagttctaagttggcacccctgtttcagagtagccttctgcaagagatggtgcgccgtagcctagcataaatcgaacccttgttgctatcggattttcatggattgtcgctgtttgcacttaatgttctatatatagtactcaaaactatgcttggtgtctgagtgatgtacgtggaattctgaaactatggatcagctcttgtgtgcacttgctgaaccagatacccagcagtaagcttttgtt

SEQ ID NO: 6288 - DNA, 336 bp, Zea mays
  Clone ID: LIB3118-030-P1-K1-B3
cccacgcgttcgattcaaaaacacaccaagcgaagcgcactagcaacgacctaacaccaatggctaccaagatattagcccttcttgcgctttttgcccttttagtgagcgcaacaaatgcgttcattattccacagtgctcacttgctcctagtgccagtattccacagttcctcccaccagttacttcaatgggcttcgaacatccagccgagcaagcctacaggctacaactagcgcttgcggggagcgccttacaacaaccaattgcccaattgcaacaacaattcttgggacatctaaccctacaaaccattgcagcgcaacaacaacaac

SEQ ID NO: 6289 - DNA, 184 bp, Zea mays
  Clone ID: LIB3118-030-P1-K1-B5
gtcagtagcaagcagtgtcataccatatatcttgtttgaaggacgcaagttgattatcctgccctgttgtaaaatgtaaccagaacaattgctggcgtatttcttaagcaccagttttagcccctttctgtaagcagtcgacatttcagttcaactcatgtatgtatattttgatcttgtatac

SEQ ID NO: 6290 - DNA, 395 bp, Zea mays
  Clone ID: LIB3118-030-P1-K1-B6
agaggaccaatgtgatccccattattgaggatgccaggcatccggcaaggtaccggatgttggtaggcatggttgatgttatcttctctgatgttgcacagccagaccaggctaggatcttagcacttaatgcttcatacttcttgaagaatggtggccactttgtcatttcaatcaaggctaactgcatcgactccaccctgcctgctgaggccgtgtttgctgcggaagtggagaaactcaaggcggatcagttcaagcccgcggagcaggtgacgttggagccctacgagcgtgaccatgcatgtgttgtgggtgggtacagggtgcccaagaagcagaaggccacctcttagatccgaatccgtgctcgtcttgcctaccaaagatgcttc

SEQ ID NO: 6291 - DNA, 96 bp, Zea mays
  Clone ID: LIB3118-030-P1-K1-B7
gaacacacacgcgcatggggggtgatagatcttttatagagtcaactaaatttatgttgaatgggcggcgttggacaacgtcatagactgataaaa

SEQ ID NO: 6292 - DNA, 204 bp, Zea mays
  Clone ID: LIB3118-030-P1-K1-B8
cccacgggtacagtatataagaacactcgtggaccaacactcgcggacagggggtagagccatcgtttcctagttgagtatccctgcttgcgctgctagcccaaccagtgagcgacacagatgacatgatgatatagctgggctcacttgcccatagcgcccacctgccgcgggttcatgggccggaaacccaaatgggcaccc

SEQ ID NO: 6293 - DNA, 354 bp, Zea mays
  Clone ID: LIB3118-030-P1-K1-B9
cccacgcgtccgattcaaaaacacaccaagcgaagcgcactagcaacgacctaacaccaatggctaccaagatattagccctccttgcgcttcttgcccttttagtgagcgcaacaaatgcgttcattattccacagtgctcacttgctcctagggccagtattccacagttcctcccaccagttacttcaatgggctttgaacatccaaccgggcaagcctacaggctacaactagggcttggggggagcgccttacaacaaccaattgcccaattggcacaacaattcttgggacatttaaccctaccaaccatttggacgcaacaaccacaacaacagtttttggcattac

SEQ ID NO: 6294 - DNA, 168 bp, Zea mays
  Clone ID: LIB3118-030-P1-K1-C1
agcatagccatcttcttcgtcgacaagcaggggagttaggtctcacatgcatgcttcatcacattgttgactgcataacgaaacacatcgtcgtcggatcggagatgatgagttccgtcgtcggggatgctgctgctaccagcagcagcgagaagaaaacgtcgtggc

SEQ ID NO: 6295 - DNA, 401 bp, Zea mays
  Clone ID: LIB3118-030-P1-K1-C10
atccgggtggccaaggccagggaggcgttcgccgccgtcgcggacgccagcgggtaccctttcgccgtcatgccggccgccaagggcctggtgccggagcaccacccgcgcttcatcggcacctactggggcgccgtcagcaccaccttctgcgccgagatcgtggagtccgccgacgcctaccttttcgccgggcccatcttaaacgactacaggtgcgtcggctactccctcctgctcaagcgggagaaggccgtcatcgtgcagcccgaccgcatggtggtcggcgacggcccggcgttcggctgcattctcatgcccgagttccttcgcgcgctcgccaagcgcctcaggcgcaacaccacggtgtacgacaactaccgccgcattttcgttcccga

SEQ ID NO: 6296 - DNA, 275 bp, Zea mays
  Clone ID: LIB3118-030-P1-K1-C11
atactagtgggccagaaccatatagaagatgaggactaactgatcgcaagttgttaacactttgtaagacatgactgtcaacaggggactgaggctatataaccagccgcgcttgatgggaacgaatggtgcgacgtttgtacacaaccttcaataaggtgccatagaggccggccattaaaaacctgtcctcgaaacgttgggtatccagtacgattagaaaactgtacagagcctactggatccacaataaggccaaatagctttatcggaaa

SEQ ID NO: 6297 - DNA, 85 bp, Zea mays; identical to SEQ ID NO: 6286
  Clone ID: LIB3118-030-P1-K1-C12

SEQ ID NO: 6298 - DNA, 367 bp, Zea mays
  Clone ID: LIB3118-030-P1-K1-C2
cccacgcgtacgattggtaaggtgttgctcaaaaagggcgacctaagtcttccagttgcctggaattgcagtgttatggacatatggttgggtgtgtctaattttgctgtgaaggatatgatatgtctttgaccccaactagacctagatcaaggagttatgacggctgcttgttgtcgctcctgaaatatttatgctctatgtgcttaggtgctaacttatgtctatttgtcatgccatccctatgtttctgcttaatgttagtcacttcattgacttaattatctgattgtattttccatttactgcatgtgtaaatataaacatcgccatttcatcaggatgtaatccagcttgatattgccag

SEQ ID NO: 6299 - DNA, 138 bp, Zea mays
  Clone ID: LIB3118-030-P1-K1-C3
cggtcgcgttggcggacgcgtgggcggacgcgtggcgacaaacccaacactgttgtaccaacaacccatcattggtggtgccctcttttagattgcttatgagttatagctcaataatgaagttttttggatgatgtt

SEQ ID NO: 6300 - DNA, 370 bp, Zea mays
  Clone ID: LIB3118-030-P1-K1-C4
gtcatggagccggttgttgctggcagcaacacggtagtagctgttgcccaagtcgagttgcaaacaatgaacgtgcagcagcccgctgatgttgccggacccagcgagggggtggcggcgatctccaaaggggggaaggtagggccgaaccggtgcagcgcctgcaggaagagggttgggctcacgggattcaactgccggtgtgggaacttgtactgcgcgctccaccgctactccgacaagcacgactgcaagttcgactaccggactgctgccagggacgccattgccaaggctaatccggtggtgaaggcagacaagctcgacaagatctagggggggttccctacggttgggtgtcaggaagatt

SEQ ID NO: 6301 - DNA, 155 bp, Zea mays
  Clone ID: LIB3118-030-P1-K1-C5
acggtcatggagccgggtgcaggtggcagcaagacggtagcagctgttgcccaagcagaggggaaaacattgaacgtacggcagcccgctaaggcctggcggacccagacagagcggggttgatatctacaaaggggggaagggagggccgcacc

SEQ ID NO: 6302 - DNA, 142 bp, Zea mays
  Clone ID: LIB3118-030-P1-K1-C6
gtcatggatccgattgttgatggcagaaacacagtagtagctagggcccaagtcgagtgggagacagtgaacgagcagcaggcctctgaagttgacggacccaaagagggggcggctgtgatccccaaaggggggaaggttg

SEQ ID NO: 6303 - DNA, 349 bp, Zea mays
  Clone ID: LIB3118-030-P1-K1-C7
agcagaattgagtgacaggctcaaacacaagctagaagataggtgcttagtgagttaaccagtgggatgtcgctggaagatagtttgaagaagagggtggccaagtgccgcagggagtatgacattatttacaagcagctaccggtgctgctagagaagatggaaattctatttcctacggggaagaagatggagagctccgagccggagaacaaatccgaagcaaagggggagccggtcgacccgctgcgagccatgacgccggcagaaataggggagcgctacaaggatctggcggacaccgtcaagggattcctcaaggatctggacgaggccgagaaggagatcg

SEQ ID NO: 6304 - DNA, 279 bp, Zea mays
  Clone ID: LIB3118-030-P1-K1-C8
gctctgccttcccagaaataagaaagtacatttctagaaaaaaaaaaaagagaaagaaaaaaaaaaaataataatgctacaaagaaaaaaaagaaaaagttgataacgaagaccataaaaaatgttatggtcttaatgctaatattaattatctattatttcattatctttttaataaggggggggccgtttttggggatccaggctttcttccgcgggtttgggatgcattattttttttttgggggcccctaatattatttcccgggcgggggtttt

SEQ ID NO: 6305 - DNA, 406 bp, Zea mays
  Clone ID: LIB3118-030-P1-K1-C9
attgagaccaactagcaacatagaaagcacaatagtgtaccaacaatggcagccaaaatattttgcctccttatgctccttggtctttctgcaagtgctgctacggcgaccattttcccgcaatgctcgcaagctcctatagcttcccttcttcccccgtacctctcaccagcggtgtcttcggtatgtgaaaacccaattcttcaaccctacaggatccaacaggcaatcacagctggcatcttacctttatcacccttgttcctccaacaatcatcagccctattacatcagttacctttggtgcatttattggcacaaaacatcagggcacaacaactacaacaacttgtgctagcaaaccttgctgcctactctcagcaacagcagtttcttccattcaacc

SEQ ID NO: 6306 - DNA, 333 bp, Zea mays
  Clone ID: LIB3118-030-P1-K1-D1
agcataggcacattatttgtagacacgcgggcgagctgggttcaacatgcttgctttatcacatcgttgtccgtactatgaaacacatcagtttctgatatgagatgatgagttccactgaacgcttgttgttatttccagcaacaactatgaccattcagccagctagctacgtggtactctcatgcacaacaaatggttgcattttaccaattagggcgcactgaaccccgctgattatttggaggagcatttactactaccatttagccagctagctgcagcacaccgtgctttcttcttgtcacagcaacagttgttgtctttctacca

SEQ ID NO: 6307 - DNA, 245 bp, Zea mays
  Clone ID: LIB3118-030-P1-K1-D12
cggacgcgtggggtcaagcccgccctgaccaacatggtctcggccaccaagctcatccgcacccagcttgccagcgcgaaatgaggtcgtttgatagctccatggtctgatagcgcggaatgagccagttgttttgaataatttgggtgttaccccctgttccatggtgttagtgttaggttagcctctcattggtgagatacgccgtttcaagatgtgttctaagtttggagtgtgtgttttcc

SEQ ID NO: 6308 - DNA, 342 bp, Zea mays
  Clone ID: LIB3118-030-P1-K1-D2
gggacgcgcccgcgaccgctgcgcttttgcgacgaggatgccatggcatggcgcgctccttcaggagggaggttttgcttcattcatcccctttactgttttcgaggaccttagtatacagggtgcgtcactttggagaaggtactttggcgcacatacctttggtgactgtgccagacagaaaaaactcaccacgacagtgtcgactaaagagcctttttgaacgagcggtgatcaaaacggtccgagcctgagaaaatttataccaaaccccccagagaatctggtgctttgggggtgggtctggggccttaaccacacacaaaaaaaagtttgtttttt

SEQ ID NO: 6309 - DNA, 216 bp, Zea mays
  Clone ID: LIB3118-030-P1-K1-D3
tcgcccacgcgttcgcccacgcgtacgcccacgcgttcgcggacgcatgggtcgatgaaggcaagtgaatgtttcggcggctacttctcttctgacctgtcatttctattgcctacactttaatatttagaagtatgagattctttcataattggactctttggtgatgctttaattgcttgcattatactggtgcttaattatatattgatgatg

SEQ ID NO: 6310 - DNA, 412 bp, Zea mays
  Clone ID: LIB3118-030-P1-K1-D4
gaaaatgtccgctctctttttggtagtgtggctccatatgttgtatcgcaggtatctagcagttcacttaagaaggccattggattcaaaacagaggtatcttactgtgatgcattgatggtcctgaagtcttggataacgtcaaaggttccctttagagcaagtatgagccagatgtggaaattctataccttattgtctgaaggcgtggcagacgcaaagattgacattaaacgggagttcatgtcgtctccctctatatttacaccactacagcgtcctcgggcaatttaaagacatcccatctattggacgctccatcactagctgcaatagacaaaacttagaggagccatttccactatttcatctattaaaacaagtaagaaaatagaaaggcttggaagcaatg

SEQ ID NO: 6311 - DNA, 413 bp, Zea mays
  Clone ID: LIB3118-030-P1-K1-D5
ggaatttgtattgtgactgcaacaatcttctcgtcataaatgttcaagtgatttcgtgtttcaagctctatttgcttgtgtttatttcaagctgtaaccaggccattcgatctcgtgtatgccgtatgcggcggatctgctcggttataagcgttgccctagaattttacagcgacatgggaggtggctggtatctaaatcagggctagtttggaaactcaaatccccttcgggattgaaggagattagagagaaaattagttcatttccaccccaatcccctctagtcccaaagggaatttgaggttccgaaagtagccataatatctgtaatgcgctacacatttgctcacgtacattgatacctagtggcacctgcgtagttttgctaaatatagagaaatgcagtgttt

SEQ ID NO: 6312 - DNA, 384 bp, Zea mays
  Clone ID: LIB3118-030-P1-K1-D6
cccagctcttcaaccatataggcttcaacaagcaatcgcagcaagcaacatacctttatcgcccttgttgtttcaacaatcgccagccctatctttggtgcagtcattggtacaaaccatcagggcacaacagctgcagcaactcgtgctacctctgatcaaccaagtagctctggcaaacctttctccctactctcagcaacaacaatttcttccattcaaccaactgtctacactgaaccctgctgcttatttgcagcaacaactattaccatttagccagctagctactgcctactctcagcaacaacaacttcttccatttaaccaattggccgcactgaaccccgctggttatttgcagcagcaaatactactaccatt

SEQ ID NO: 6313 - DNA, 302 bp, Zea mays
  Clone ID: LIB3118-030-P1-K1-D7
ctgaccaggaggcgtacgaggaggacgacgagatgccgggcggagcccagagagtgcagtgcgcgcaacagtaagcagactatcatcaaggcaattgggaggggtggtgcccttaaagcatgggagtgatctctggttttgctgtcgccgagctgggaaataggaagctgaatcgacctcgcaagcggggaatgtatccttttttgctgcaacataaaaaatgctacccacgcatagctgggtaccttttaacttctgtttgtgggatttgctagagtgatggtttcgatatttcatactgc

SEQ ID NO: 6314 - DNA, 317 bp, Zea mays
  Clone ID: LIB3118-030-P1-K1-D8
cggacgcgtgggcgaggaggaatatggaggccatggggcgcttcttcaggagggtcttttcgcttcattcacccttttcctgctttcgtggactctagtatacagtctggctcacttctgagaagctcctttggcgcacatacctttgttcactgtgccagacagaaaagactcaccaggacagtgtagactaaggagcattttagaacgagcgttgtatcaaaacggttctgagctgtaatgttatttcccaacccccagtgtaatcttggtgctatgggattagttcggtgctaagcagaacaaaaatgttgcat

SEQ ID NO: 6315 - DNA, 347 bp, Zea mays
  Clone ID: LIB3118-030-P1-K1-D9
tgaaggcaagtgaatgtagcggtggttacttccgttctgacctgttatttctattgcctacactctaatattcagaagtatcagattctttcataattggactctatggtgatgctttacttgcttgcattatactgatgctcaatcatatattgatgatgattatgatttgagtatgactcacgagattaattcacatatctgaaggtaaatgaagtattatttgaggttggtattgcatctgaagataaatgaagtattatttgaggtttgtgttgtatctgaaggaagtgaagtctattgatatatgtaccatgccatatacattgcatgactcatttgcatat

SEQ ID NO: 6316 - DNA, 378 bp, Zea mays
  Clone ID: LIB3118-030-P1-K1-E1
catcagggcacagcagctgcagcaactcgtgctacctgtgatcaaccaagtagctctggcaaacctttctccctactctcagcaacaacaatttcttccattcaaccaactgtctacactgaaccctgctgcttatttgcagcaacaactattaccattcagccagctagctactgcctactctcagcaacaacaacttcttccatttaaccaattggccgcactgaaccccgctgcttatttgcagcagcaaatactactaccatttagccagctagctgcagcaaaccgtgctttcttcttgacacagcaacagttgctgcctttctaccagcagtttgcggctaaccccgcaaccctcttacaactacaacaatt

SEQ ID NO: 6317 - DNA, 357 bp, Zea mays
  Clone ID: LIB3118-030-P1-K1-E10
cccacgcgtccgcaaggatttccttctcaccgcgaggaggaaggatgcccgatcagtgaagatcaagaggagcaaggatgttgtcaagttcaaggtccgctgctccaagtacttgtacaccctctgcgtattcgacgctgagaaggcaaacaagttgaagcaatctctccccccaggcttgagcgtccaggaggtttgattggatacatggcaacgtcgggtcgaacctctagggcatctttatcattagcagagcatgctgtttatgtagttttggaccttaagctattagacatgtcagtgttggatttgtggatcttgaatttttggagaaataccaatttgcctcgttcaagg

SEQ ID NO: 6318 - DNA, 320 bp, Zea mays
  Clone ID: LIB3118-030-P1-K1-E11
gctatagatgagccaagattaccttctcgcgcgcaggacggaagatccacgagtaggtggcatccaaactcgcctcgctggccgcaggcttagatgctgccgcactaaggaaccgctgaccctcggcgtgttaggatgccagcaacccaaccgccggtagctaggcctcggctaaggatgaagagaccactggggcgggctacataaaagctaagaccatcatgaggccactgggcagctttatgaagaggaaggctcagcctcatttgttgatcaagaaacacaagagtaaagcttgtgagaccggaaagttttctttt

SEQ ID NO: 6319 - DNA, 79 bp, Zea mays
  Clone ID: LIB3118-030-P1-K1-E12
acgttcctttgctcatgtagtatagatgatagactcgaacaacatcaataaacgacattcaaaggccatgcagttagct

SEQ ID NO: 6320 - DNA, 129 bp, Zea mays
  Clone ID: LIB3118-030-P1-K1-E2
gtggcagcaacccatcgttggaggtgccatcttttagattacatatgagatgtaatcgataatggtgccctcataccggcatgtgtttcctagaaataatcaatatattgattgacatttatctcgcac

SEQ ID NO: 6321 - DNA, 347 bp, Zea mays
  Clone ID: LIB3118-030-P1-K1-E3
cgcaaattgcaccaagaaatccatcgagaggccggcgacaggggaattaatggcgtcgtggtctagcagcagccaccgccgcctcatcctcgcaggcgccgtcctgctctccgtgctcgcggctgccagcgccagcgccgggacctgctgcgtgccggggtgggccatcccgcacaacccgctcccgagctggcgctggtacgcgaccagccggacctgcggaatcgggccgtgcctcccgcgggcggagctgaagaggagatgctgccgggagctggcggacatcccggcgtactggcggcgcacggcgctgagcatgcttatggacggagcgaccccgccgggcc

SEQ ID NO: 6322 - DNA, 321 bp, Zea mays
  Clone ID: LIB3118-030-P1-K1-E5
acgcgagaagcggcttcggacgttgcgccgggagatagcagagccgttctacgacaagaaggaggccgccaagctcgccgcgcaggccgcagccctagctgctgccccgctcccggtccgcgggcccccgccgtcccaggatgccggcaccccccgcgccgttagctcggcctcggctatggatgtggagatgtctggggccaggaacaacaaggcttagaccattttgagggcccttggccggatttagaagaagaaagggccagtttatttggaggtccaggaaggccagggaaaaggcttggaagaagggaaggtttt

SEQ ID NO: 6323 - DNA, 288 bp, Zea mays
  Clone ID: LIB3118-030-P1-K1-E6
cccacgcgtccgagcggtcgcacctgcgtccttgtgtccgaggaggacgaggaagcaacgttcgtggaccctaagctgcgtggaaggtactgcgtttgctttgatcccctcgacggttcctccaacatcgactgtggcgtctccatcggaacgatctttgggatttacatcatcaaggacaaggacaacgtcactctggaggacgtgctgcaacctggcaagaacatgctcgccgccggatactgcatgtacggcagttcctgcacgctcgttctgagcactggaact

SEQ ID NO: 6324 - DNA, 315 bp, Zea mays
  Clone ID: LIB3118-030-P1-K1-E7
cccacgcgtccgggtctgctgagccgacaaccgtatgcctcctgtaaaattctggtatttttttttaatttttttttttgcatatgtgggcttacgtgggtgtaactgaaatttgaaagtaccgcttgcacagcaagaattgccggtgggggttgaaagtggtaaatgaatgtaactgtaaagcgttgttacatgaagacaaaaatttccacccgttgcgtcgttagatttttttttttttattattaaaaatattttaaaaaatttctgcaagttttaaaaaaaaacgtgctttctttttgacacaacaacagt

SEQ ID NO: 6325 - DNA, 396 bp, Zea mays
  Clone ID: LIB3118-030-P1-K1-E9
gccacctttctcggcgatgacgtcgtgcggcaacgagccaatcttcaaggacggcaaaggatgcgggtcctgctaccagatccggtgcaaggcccaccctgcgtgctccggcgtggcggagacggtgatcatcacggacatgaactactacccggtggccccctaccacttcgacctgagcggcactgccttcggcgccatggcaaaagacgagcacaacgacgagctaaggcacgcaggaatcatcgacatccagttcaagagggttccctgccagtaccctggtctgacggtgaccttccacatcgagcgcggctccaaccccaactacctggcggtgctggtggagtacgagaacggcgacggcgacgtggtgcaagtggacctgatggagtc

SEQ ID NO: 6326 - DNA, 356 bp, Zea mays
  Clone ID: LIB3118-030-P1-K1-F10
tcgcccacgcgttcgcccacgcgtccgatagccgctggctagctagctagttgagtcatttagcggcgatgattgagtaataatgtgtcacgcatcaccatgggtggcagtgtcagtgtgagcaatgacctgtatgaacaattgaaatgaaaagaaaaaagtattgttccaaattttaaaaaaattccttaagtagattttaatgtttcgaaaaaaataaagtacaattaactacaaaaactttttacttagttaaacggggtgggtaaaataaaaaactttaataaaaataaggggggggccgctttaggggttccaagttttcttcccgtttgtttgcaacataaaagtttttt

SEQ ID NO: 6327 - DNA, 318 bp, Zea mays
  unsure at all n locations
  Clone ID: LIB3118-030-P1-K1-F11
ctgatgctggagtgaagaacatcaaggatctgaaggccctgacgttgctgaatctttctcaaaatgctattctgacagacaaaacctcggagctgatctctggcctgactgctttgatcaacttgaacgtgtcaaactcacgggtgtccaatgctggtctcaaacacctgtatgacctgcacaacctgcgttcactgtctctagattccacccgggtgacggcaaacgagatgaggaagcttagagcaacagggctgcataatctgatcagcatgcggncagagtagttcccatttgggacccgctgttaataatcat

SEQ ID NO: 6328 - DNA, 408 bp, Zea mays
  unsure at all n locations
  Clone ID: LIB3118-030-P1-K1-F2
cccacgcgtncgccgaagccatcgtccccgtcccagccttcccggaatctaggggcagaagctgcagcgtcgagatggtgaaggggcgcacggggcagcgcgtgaggctctacgtccggggcaccgtccttggatacaagcggtccaagtcgaaccagtacgagactacgtcgctggtgcagatcgagggggtgaacaccaaggaggacgtcgcgtggtactgcgggaagcggatggcctacatctacaaggccaagaccaagagcagcggcacccactaccgctgcatctggggcaaggtcgcccgcccgcatggcaactccggcgtcgtccgcgccaagttcaggtccaacctgccgccggaatccatgggccgtaaggtcagggtgttcatgtaccccagcagca

SEQ ID NO: 6329 - DNA, 406 bp, Zea mays
  Clone ID: LIB3118-030-P1-K1-F3
cggacgcgtggggcctgctgtggctgctgctgctgccacagaaggtgagaaaaagaagaagaaaaagaagtctgacgcggacggtgtgggtgttacaacgcaaaccgaagagtctggtaagaaagataagaagaaaaagaagaaaaggcatgccgatgatgagtgagacattcttcggaagagaatgtgcgggtaccaaatgctgggactcagctgttctgtaaaatgggtatcacggggttagaaaacatattgagatcagtttttggggttacctggtttttttgggggacctggcttgtattcaacaattacttgctcggtctagatgatgatggaatttttaacttttgcttgtgtgaccccataaatttagtatggtgattggtattgttactctgcaact

SEQ ID NO: 6330 - DNA, 380 bp, Zea mays
  Clone ID: LIB3118-030-P1-K1-F4
ccattttcccacaatgctcacaagctcctatagcttcctttcttcccccatacctctcaccagcggtgtcttcagtatgtgaaaacccaattcttcaaccctacaggatccaacaggcaatcgcagcaggcatcttacctttatcacccttgttcctccaacaaccgtcagccctattacagcagttacctttggtgcatttgttggcacaaaacatcaaggcacaacaactacaacaacttgtgctaggaaaccttgctgcctactctcagcaacagcagtttcttccattcaaccaactggctgcattgaactctgctgcttatttgcaacaacaactaccattcagtcagctagctgctgcctacccccagcaattt

SEQ ID NO: 6331 - DNA, 318 bp, Zea mays
  unsure at all n locations
  Clone ID: LIB3118-030-P1-K1-F5
cggnccggaatccagttcgagcccgcgtacgcctcttcccacaatgctcacaagctcccataggttgctttcttctcccatacctgtgaccagaggtgtcttgattgtgtgaaaacgcaattcttttaccctacagtatccaacatggtatgggagatggccttttatctttatcaccctggttagtacaacatccggttgccctattacagtagatacctttgttgcatttgttgggacaataacatgaagggtcaacatcttctacaacttgtgcttggaaaccttgctggcttctctcagaaatcatccattttt

SEQ ID NO: 6332 - DNA, 63 bp, Zea mays
  Clone ID: LIB3118-030-P1-K1-F6
aaaaaaaaaaaaaaaaaaaaaaaaaaaaaaaaaaaaaaaaaaaaaaaaaaaaaaaaaaaaaaa

SEQ ID NO: 6333 - DNA, 161 bp, Zea mays
  Clone ID: LIB3118-030-P1-K1-F7
ggcgattggagtacggagatgggcgtgtctggtggagaaaagcttgagtactcttgtggagagatcttgcacatgtatcgttattattggcgctcgtgctagcatagtgtgtgtgcaaagcgactggtggtgactacagcgggcttttcaacgaccccttc

SEQ ID NO: 6334 - DNA, 233 bp, Zea mays
  Clone ID: LIB3118-030-P1-K1-F9
gtttgagttgcaattttgtgagactgaatgtgaaccctttttctcattccttaaatagttgactgccagtgttcgtggtttcaaacgaaatttagtcttattaactgaatttgcgtattcaaatggattgcgtggctgcctggttatgttttgaattttgcgtcgcggtccaataattcgatggactggacccaaggaaatttgaatgcgaatggactgatacgttgtatttt

SEQ ID NO: 6335 - DNA, 367 bp, Zea mays
  unsure at all n locations
  Clone ID: LIB3118-030-P1-K1-G1
cccacgcgtncgccaactagcaacatagaaagcacaatagtgtaccaacaatggcagccaaaatattttgcttccttatgctccttggtctttctgcaagtgctgctaccgcaaccattttcccacaatgctcacaagctcctatagcttcctttcttcccccatacctctcaccagcggtgtcttcagtatgtgaaaacccaattcttcaaccctacaggatccaacaggcaatcgcagcaggcatcttacctttatcacccttgttcctccaacaaccgtcagccctattacagcagttacctttggtgcatttgttggcacaaaacatcaaggcacaacaactacaacaacttgtgctaggaaa

SEQ ID NO: 6336 - DNA, 149 bp, Zea mays
  unsure at all n locations
  Clone ID: LIB3118-030-P1-K1-G10
aagcgaaatagcaactggattcggttccaaattataataatgnntaatatgaaaggattgggggggccctttatagagaaccaaatttcactcacgtgcatgcgaagtgataaatctttatagaggacccaaaataaatactggggcgg

SEQ ID NO: 6337 - DNA, 394 bp, Zea mays
  Clone ID: LIB3118-030-P1-K1-G11
ctgatgctggagtgaagaacatcaaggatctgaaggccctgacgttgctgaatctttctcaaaatgctaatctgacagacaaaaccttggagctgatctctggcctgactgctttgatcaacttgaacgtgtcaaactcacgggtgtccaatgctggtctcaaacacctgaatgacctgcacaacctgcgttcactgtctctagattccacccgggtgacggcaaacgagatgaggaagcttcgagcaacagtgctgcataatctgatcagcatgcggccagagtagtacccatttggcacctgctgtaaataatcattaggttcgagcaggttgttctgttggaaagactggcttcgtctcgaatattttcgtcgctagttctttttgaacta

SEQ ID NO: 6338 - DNA, 250 bp, Zea mays
  Clone ID: LIB3118-030-P1-K1-G2
cggataaatgcgacaattgctaagctttttgacaacgacttcatttgtctgtcatcaaaaactgtatattgactctttagaaataatttgcgcaacactgagaatggctatgaaagcgaaatgcgaccttgggccatttctaagcaatttggtgctttactgcactcacaggtgccagtatatgaaaatatgcccatggatggacaaggtgcaaatcacaagtaaagggatgtttgtaagccttaacaca

SEQ ID NO: 6339 - DNA, 383 bp, Zea mays
  Clone ID: LIB3118-030-P1-K1-G3
gagattgttgagctcatagaggaaattggcatgaagaaaaagaaagaagaagatccaaagaagaaaaagccaaagaggaagcctctttttgtgaagaacggtgcaattgttgtttgccgcattcaggtgaataacttgatatgcatagagaagttctctgatttccctcagcttggaaggtttacacttagaactgaaggaaagacggtagctgtaggcaaagttgttgatattccgcctgctggtagcccaacattctgagcttaagtcaattttgaacaggatggataatcatgaagcagtgcgttcgcttaagatacttttttttgggaagtgagattagttgttgaggttagattttttttcagtccatcttgagaatg

SEQ ID NO: 6340 - DNA, 351 bp, Zea mays
  Clone ID: LIB3118-030-P1-K1-G4
accaactagcaacatagaaagcgcactagtgtaccaacaatggcagccaaaatattttgcctccttatgctccttggtctttctgcaagtgctgctacggcgaccattttcccgcaatgctcgcaagctcctatagcttccctttttcccccgtacctctcaccagcggtgtcttcggtatgtgaaaacccaattgttcaaccctacaggatccaacaggcaatcacagctggcatcttaccttgataacccttgttcctccaacaatcatcagccctattacatcagctacctttggggcatgtattggcacaaaacatgagggcacaacaactacaacaacttgtgcta

SEQ ID NO: 6341 - DNA, 353 bp, Zea mays
  Clone ID: LIB3118-030-P1-K1-G5
ctaactggtattgttggtggagtagccagtggatatttgggagactgttcaaggagagtggctatacgagatgaaacacacaagagtaatgcttttataatgtttgacgagaggaataaacgtgctgcctttgcagacctctttgcttctgttactttcactgctcaatacgggaattttcagaggctttttctggatttgactaaggcaagtgcccgatttgatatcacctctggttcattgttcttatgtggtgcttctcgccttgcacaagatttcttcttctctagaagacctgatgtagagacattctgcgatatttgtcctgatgtgactgtttccttttcaacaac

SEQ ID NO: 6342 - DNA, 309 bp, Zea mays
  unsure at all n locations
  Clone ID: LIB3118-030-P1-K1-G6
cggacgcgtgggttttggctaagatcaagtgtagtatctgttcttatcagtttaatatctgatatgtggaccatgtgtttacttcgatattaaatttatttttcgtgggggagggtccactacagtggcttgccactgggctcctcaagcgtcgctcggccgttgcactactgtctgagcctggcgcaccccttaaaaaaaaatagataatttaataaaaattttattaaaattaaaaaaataattttttaaaaattcaaaaaattatatattaataaataactttatttttaaaaaaaattttttntg

SEQ ID NO: 6343 - DNA, 373 bp, Zea mays
  Clone ID: LIB3118-030-P1-K1-G7
tgaagttgtctccggtgcgagacaacaacaatctaaagagaggtccagtatggacaatggtggtagagccaagcctgtaaagatagaaaataatggaaaagtcacagacgaagcatacgaagatgacagtgatcacggtgaaaccctatgtggaacctgtggtgggatatacaacgcggatgagttttggatcgggtgtgacatgtgcgagcgatggtaccatggcaagtgtgttaagataactcctgccaaggcagagagcataaagcattacaaatgcccgagctgcagcttcaagagggcgaggcagtagcaaaacccatgaacgcaggaagcctccgaatgtgggatgtatggtgcagaagaggcgcat

SEQ ID NO: 6344 - DNA, 367 bp, Zea mays
  Clone ID: LIB3118-030-P1-K1-G8
gggacgatgattgagattcccagggcagctctagtggctgacgagatcgcggagcaggctgaattcttctcctttggaacgaacgacctcacgcagatgacctttggctacagcagggatgatgtggggaagttcatccccatttatctggctcagggcatcctccagcatgaccccttcgaggttctcgaccagagaggagtgggcgagctggttaagcttgctacagagaggggccgcaaagctaggcctaacttgaaggtgggcatttgtggagaacatggtggagagccttcatcggttgctttcttcgccaagactgggctggattacgtttcttgctcccctttcagggtcccgatcgcta

SEQ ID NO: 6345 - DNA, 407 bp, Zea mays
  Clone ID: LIB3118-030-P1-K1-G9
cccacgcgtccgcggacgcgtgggagaccaacaagcaacatagaaagtggaatccagtagcaacaatagagcaacaatggcgaccaagatattttccctccttatgctccttgctctttctacatgtgttgctaacgcgacaattttccctcaatgctcacaagctcctatagcttcccttcttcccccataccttccatcaattatagcttcaatatgtgaaaacccagctcttcaaccatataggcttcaacaagcaatcgcagcaagcaacatacctttatcgcccttggtgtttaacaatcgccagccctatctttggtgcaggcattgggacaaaccatcagggcacaacagctgcagcgacttgtgctttcctttatcaaccaagtagctttggctaaccc

SEQ ID NO: 6346 - DNA, 361 bp, Zea mays
  Clone ID: LIB3118-030-P1-K1-H10
cccacgcgtacggtgtgagcaacagcagtttcttccattcaaccaactggctgcattgaactctgctgcttatttgcaacaacaactaccattcagtcagctagctgctgcctacccccagcaatttcttccattcaaccaactggcagcattgaactctgctgcttatttacaacagcaacagctaccaccattcagccagctagctgatgtgagccctgttgccttcttgacacaacaacagttgttgccggtctacctgcacgctgcgcctaacgctggcaccctcttacaactgcaacaattgctgccattcaaccaacttgctttgacaaaccccacaaacgttctaccaacaacc

SEQ ID NO: 6347 - DNA, 122 bp, Zea mays
  Clone ID: LIB3118-030-P1-K1-H11
ctgacgctggaggtatgaacatcaaggatctgttggattcaaccagctgtgatgtattgtactaaagcgattatgtgcaacaacacctagcatctagtatggtgcctgactgctacgatcaa

SEQ ID NO: 6348 - DNA, 370 bp, Zea mays
  Clone ID: LIB3118-030-P1-K1-H2
tgaataaatgtgacaattgctaagctttttgacaacgacttcatttgtctgtcattaaaaattctatattgactctttagaaataatttgtgcaatattgataatgtttatgaaagggaaatgtgaccttgggccatttctaagtattttggtgattaagtgcaaacacaggtgccaatatgtgaaaatatgcccatggatggacaagttgcaaatcacaagtaaaggtatgtttctaagccttagtacattggttttgtgtactaatatcttgtctaagtgtttagaaacagaaagaagaagaagtagagaagacttggctgtgtacagccaaggggctgcttcggtcttgggcaccggactgtccggt

SEQ ID NO: 6349 - DNA, 297 bp, Zea mays
  Clone ID: LIB3118-030-P1-K1-H4
cacgcgtacgcacgcgcgtacggtgttatcaacaggaggttactgcactcaaccaactggctgcagggaactatggtgcttatttgcaacaacaactaccattcagtcagttaggtgctgcctaccctcaggagtgtggtccattcaaccaactggcaggattgaactctgctgcttatttacaacaggaacagctaccaccattcagccagctagctgatgcgagccctgttgactttttgacacaacatcagtcggtggcgttctaacctgacgctgggcctaacgctggcaccc

SEQ ID NO: 6350 - DNA, 349 bp, Zea mays
  Clone ID: LIB3118-030-P1-K1-H6
cccacgcgtccgcggtaagaagattgccgcctttgtgccgaacgacggctgcttgaactacatcgaggaaaacgatgaggtgctgatcgcggggttcggtcgtaagggtcacgccgtgggagatattcccggtgtccgtttcaaggttgtgaaggtctcgggcgtttccctgctcgccctcttcaaggagaagaaggagaagccgagatcttaaaaaccctattcccctcgccacaaatgaatcatgtaatgcttttggagttctgggacctcatgttgagaacctagcgattgttttgccatagttttgtttagaagattctgaattgaattctatatccgcaaccgc

SEQ ID NO: 6351 - DNA, 368 bp, Zea mays
  Clone ID: LIB3118-030-P1-K1-H7
gtaataatgtgtcacgcatcaccatgggtggcagtgtcagtgtgagcaatgacctgaatgaacaattgaaatgaaaagaaaaaagtattgttccaaattaaaaaaagaaaaaagaaaagagaggggggagcaaaaaaaaaaaatattaaatattaaaaataaaacacaaaacaccaaatatgtgaaaaaaaagacaatagataggacccgttgcaaaataaaagacaaaggtttgtttacaaaaaattaagggggggggggcttttaaagaataaaattttataaggggggagaatcagaaaaaaattttttttatgggggacctaaattaaaacagggggggggggtttttaaaaacggggtggggg

SEQ ID NO: 6352 - DNA, 255 bp, Zea mays
  Clone ID: LIB3118-030-P1-K1-H8
gaaacgaggaccgaggcatcaaggggcacggaagggacagcccgggcaagaggcggaaacccacacaagaggcgaaaaaaaaatcgccctcacccactttaaatggggcaggggagggggggggcgcgcaacaccacatcaagggacgtgcggagggcaaacctccaaacggaaggctggggtacaaagaacaacaactgagaaaccaggaaacaaagacctgctgaccggcgcacagactatgccgggcataac

SEQ ID NO: 6353 - DNA, 396 bp, Zea mays
  Clone ID: LIB3118-030-P1-K1-H9
caattgttcaccgagtgattaaggtccatgaacgtcaggacactgcagaagtggacatcctcaccaaaggtgacaataattttggggatgaccgactattatatgcacatggccagctttggctccatcaacaccacattatgggacgtgcggtgggctaccttccatatgttggctgggttacaattatcatgactgagaaaccatttattaagtacctgctgattggcgcactgggtttgctggtcataacgtcgaaagattagtgatgtcaaacttcagggccatgtagattttgctcttatggtgcaacagcagagatcagcggctttgtggcgtttaagagatgccgttctgttgcgccatgtatcaaacgagaaagattttttatctact

SEQ ID NO: 6354 - DNA, 409 bp, Zea mays
  Clone ID: LIB3118-031-P1-K1-A1
caacaagcaacatagaaagtggaatacagtagcaacaatagagcaacaatggcggccaagatattttccatccttatgctccttgctctttctgcatgtgttgctaacgcgaccatttttcctcaatactcacaagctcctatagctgcccttcttcccccataccttccatcaatgaccgcttcagtatgtgaaaacccagcccttcaaccctacaggctccaacaagcaatcgcaacaagcaacttacctttatcacccctgttctttcaacaatcgccagccctatctttggtgcagtcattggtacaaaccatcagggcacaacagctgcagcaactcgtgctaccagtgatcagccaagtagctctggcaaacctttctccctactctcagcaacaacaatttt

SEQ ID NO: 6355 - DNA, 55 bp, Zea mays
  Clone ID: LIB3118-031-P1-K1-A11
ggtaattgcaggcgacctcgatgactgaggctcatccaactaacacagctgttgg

SEQ ID NO: 6356 - DNA, 371 bp, Zea mays
  Clone ID: LIB3118-031-P1-K1-A12
aggacaagcagccggcctcgctgctgacgaatccacagaatgcctggtttggtgaagactaataacaccaatgcatcttctaaacgttaacaagtgaaagtcataagaatgcggactgccaagacagactacagggccaccataaggcttattaaccatgacagaaacacagtcatcacacccaaatacagattctgtgctcaatctaccaactgggacatacctgcccaaatcatatgtgctagtctagcggatgatatggttcttgcttctgcctactagcatgatttgccacgatctaggtcttgaagatacgatgaccaactactcaaatgcctactgcactggtcttctgaagcttcgacttgtgc

SEQ ID NO: 6357 - DNA, 418 bp, Zea mays
  Clone ID: LIB3118-031-P1-K1-A2
gcgcagcaaagcggcagtgcgtagagaggatcgtcgaacagaacagcatgaagatggtcatcgttctcgtcgtgtgcctggctctgtcagctgccagcgcctctgcaatgcagatgccctgcccctgcgcggggctgcagggcttgtacggcgctggcgccggcctgacgacgatgatgggcgccggcgggctgtacccctacgcggagtacctgaggcagccgcagtgcagcccgctggcggcggcgccctactacgccgggtgtgggcagccgagcgccatgttccagccgctccggcaacagtgctgccagcagcagatgaggatgatggacgtgcagtccgtcgcgcagcagctgcagatgatgatgcagcttgagcgtgccgctgccgccagcagcagcctgtacgagccagc

SEQ ID NO: 6358 - DNA, 291 bp, Zea mays
  Clone ID: LIB3118-031-P1-K1-A3
aaaaacaaacaaaagggaactttggtagctatatcatacactaggaaaaaccacaacacatatataataaaaattatcccaatccataacataaaattaaataaaacttatcgattttttctcttataaaaaatatattaaatgataaacctaactaataaaaacagtgatctaaatcctcaagtaatattttttttttatactataataggtaactatataacaaacactcttatttgtgtttcatttaatattaagtttgacacactattgtcaaataatttaaataaa

SEQ ID NO: 6359 - DNA, 295 bp, Zea mays
  Clone ID: LIB3118-031-P1-K1-A4
caatttgttcccttctgacggacccaaaccctgacgatccgttggtcccagagattgctcacttgtacaagactgatcgcgtgaagtacgaatctactgctaggagctggactcagaaatatgcaatgggctgacaagctattggtctctcatagacccttctgtaactgaaaccagatgtctaaattaatttgtccattcgtgcatcgaacttttgatatataatggaaggagaaacattgatagtacctcggtgttgtctgtggtccaatttaatttaatttaattttggtct

SEQ ID NO: 6360 - DNA, 402 bp, Zea mays
  Clone ID: LIB3118-031-P1-K1-A6
agagaattgaaaatgctggtggtatcgtcatttgggctggcacttggagggtgggtggtgtattggcaatgtcccgtgcatttggcaatcgtttactgaagccatatgtggtggcagaacctgaaattcaggaagaacaggtcagtggtgggctggaatgcctggttcttgctagtgatgggctttgggatgttgtggaaaatgaggaagctgttttccttgggagatcggaggacacgccagagtctgcagctaggaaattgacagagattgcttactctcgcggcagcgctgacaatatcacatgcatcgtggtccaatttcaccatgacaaaaaccgatgagccgtatggctgccaatttcagttgtaccctgcttcaatctattattatcctgcaagc

SEQ ID NO: 6361 - DNA, 108 bp, Zea mays
  Clone ID: LIB3118-031-P1-K1-A7
atgagccgaatagaggctacgtactgttattgtatcagtactagtaccctatatatatgggcgcactacagttctgtgatgtaatggattctgctagtatttgactct

SEQ ID NO: 6362 - DNA, 405 bp, Zea mays
  Clone ID: LIB3118-031-P1-K1-B1
caagcaacatacctttatcgcccttgttgtgtcaacaatcgccagccctatctttggtgcagtcattggtacaaaccatcagggcacaacagctgcagcaactcgtgctacctgtgatcaaccaagtagctctggcaaacctttctccctactctgcggaacaacaatttgtttcattgaaccaactgtctacactgaaccctgctgcttatttgcagcaacaactattaccatttagccagctagctactgcccaccctcttacaactgcaacaattgctgccattcaaccaacttgctttgacaaacccagcagcgttctaccaacaacccatcattggtggtgccctcttttagatttcttatgagttatagttcaataataaagttttttgtctgatgttt

SEQ ID NO: 6363 - DNA, 399 bp, Zea mays
  Clone ID: LIB3118-031-P1-K1-B11
ccgaccccaagctccctttcaaagtgttcagcgtgcccgaggcggcgccctttaccgcggtgctcaagtacgccgcggaggagttcaaggtcccgccccagaccagcgccatcatcaccaacgatggaattggcatcaacccccagcaaagtgcaggcaacgtgtttctgaaacatggttcggagctgcgtctcatccctcgcgatagggttggagctgtagtcatgtcttccggttagaggatatatacagtccaatgcataatgagcaaaacttgagagaaataaagctttgatgttggccttgcttggctgtaggatgttgttacaaggataataagcgaaccttaccgtacatgtctcaagttgtatgctctctgtttgtatgtggagagatttc

SEQ ID NO: 6364 - DNA, 396 bp, Zea mays
  Clone ID: LIB3118-031-P1-K1-B12
gcacagcggtgggaagccgactactagaatctggaaaagttgggctcctaacaaatgctgtcttttcatttggctggtggaatatatcaggtgttggacaacggataaacttactagaaggggtttacaacatccggagtgctgccccctttgtgattagcagcaagaaactatcaaccacttgtctcttgtgtattttctaggcaagtttggtttgagttgctgcggagagccaagttgcaggagctgatgccacagcctaaggagcaaaattttggtgagtggtggaggaacagcttccttaaagtgcaagggcagactagaagagggttcaattccccagtcattcttggggcatggatggtttggaagcatagaaaccaatgcggttttcaa

SEQ ID NO: 6365 - DNA, 388 bp, Zea mays
  Clone ID: LIB3118-031-P1-K1-B3
gtcgttagccccgtctacgaccgcttcggcggcctgccgctcgacgtcctcgccttcgtcgaccgcaaggtggacgacacggtgcacgaggtggacaagcacctcccgggcgcgctgaaggcggcgtcggcgtatgtctacgcggtggttcggggcgtgccggaggtggcgcgcgagctggcggccgaggcgcagcggtcgggcgtgaggggcgcagcccgtgcggcgctcgcgatgacggagccggtggcgcgggacgtgtacggccgcgtggagcccgtggccaaggacctctacgtgcggtacgagcccgcggcggagcacctggccgtctccgcctggcgctcgctgaacggcctgccggtgttcccgcacgtcgcggagatcg

SEQ ID NO: 6366 - DNA, 409 bp, Zea mays
  Clone ID: LIB3118-031-P1-K1-B4
gctaaaccccacgccgccgcggcgacctcctccgccggcaggatggacagcctcaggggagccaagttgccgggcgtgccgaagggcgggagtgcgctcgtgaaggtggcgctgctcggcggcgcggggctctacgccgtcctcaacagcttctacaacgtcgagggcggacaccgcgccatcgtcttcaaccgcctcgaggggatcaaggacaaggtgtaccccgaaggaactcacctgatgatcccgtggatcgaaaggccgatcatctacgacgtccgcgcccgacccaacctcgtcgagagcacctccggaagccgcgacctccagatggtgagaattggtcttcgtgtccttactcgacccatgccagatcagctacctaaaatctacaggaacttgggggagg

SEQ ID NO: 6367 - DNA, 388 bp, Zea mays
  Clone ID: LIB3118-031-P1-K1-B6
ctggtggagcaaagaggaagtgctttgagagttagaggaggcccctgttcatctgagttggttcagagttaagcattgcacaatctgtagacttgatgtctcatgtattgttactgaggtggctcctgaagcactgatgcatttgatgatactattagctgataatatggaaggtttgctcgcggttgtgatgactcttgaatgcttgggcagtttgttggaccgctgcttaaatgcttctttgtagtagttctggatgccttgtaaattgcttacatgttaatatatgtatgggttgaacattgcaaataagatgatctgagctttgcaagttctggcgtcaatttaatacacatgttgccatatgatttttttaaaaaaaaaatat

SEQ ID NO: 6368 - DNA, 91 bp, Zea mays
  Clone ID: LIB3118-031-P1-K1-B7
cccacgcgtccggaaacaagttgcacagtggaaatatttatcttggtccctcaactatccccttgaggcttattttcgaccttgaactttc

SEQ ID NO: 6369 - DNA, 79 bp, Zea mays
  Clone ID: LIB3118-031-P1-K1-B8
aaaaaaaaaaaaaaaaaaaaaaaaaaaaaaaaaaaaaaaaaaaggaaaaaatggggaaaaaaaaaaaaataacgggggc

SEQ ID NO: 6370 - DNA, 348 bp, Zea mays
  unsure at all n locations
  Clone ID: LIB3118-031-P1-K1-C1
cttgctgatactcaaaagcaccatggacatatgtacatatttacaagaagtttctgacttccatgcatggatttgtgcgctcctaaatctttagcatgccttccaacacacgaagaacatcagcacgggcaactatacctgttgatagtgtttagaaccccattaggcttgcaacatactctgtgttgtcaatgttgattaaggataatacaaatcaagtatgtacatgcagttttttttaaaaatantctgtttgtacattcttgatttgttttatccctaatcttcattgacaactcatgagtatgttgtatgcctattggggttcttaacactttcatcaggtat

SEQ ID NO: 6371 - DNA, 124 bp, Zea mays
  Clone ID: LIB3118-031-P1-K1-C10
atccgaggtgtggaagggtaactaaatgcagattattcaccatgagcgaagagatgcgaaagcagagtactgtaagatgtgtacagtgagaacattgttgaaatgtgcaaggcattttactctg

SEQ ID NO: 6372 - DNA, 340 bp, Zea mays
  Clone ID: LIB3118-031-P1-K1-C11
ggcggcgtcggatgttgagtaccgctgcttcgtcggcggcctcgcctgggccacggacgaccactccctccacaacgccttcagcacctacggcgaggtcctcgagtccaagatcatcctcgatcgggagacgcagaggtcccgcggcttcggcttcgtcaccttctccacggaggaggcgatgcggaacgccatcgagggcatgaacggcaaggagctggacggccgcaacatcaccgtcaacgaggcccagtcccgcggcggccgtggaggcggcggcggtgggtacggtggtggccgtggaggcggcggctacggcggtggcgggcgccctgatggc

SEQ ID NO: 6373 - DNA, 328 bp, Zea mays
  Clone ID: LIB3118-031-P1-K1-C4
tcgaagaagggctaccttgggatccacagttccggtttcagagacttcctgctcaagccagttgtgttctgtgctatttatgattgtggttatgagcatccttccgaagtgcaacacgagtgtatccctcaagccattcttggaatggatgtcatctgtcaagctaaatctgggatggggaaaactgctgtttttgttctttcatccctccaacaaattgaccctgttgcggttcaggtagcatcacttgtactgttccacacaagggaactggcttatcatatatgccacgaatttgagaagttcatcttatatcttactgaagtta

SEQ ID NO: 6374 - DNA, 391 bp, Zea mays
  Clone ID: LIB3118-031-P1-K1-C5
cccacgcgtccgggacgccccccctctcccatcttcttcctcctcaaacctttgcagccctcaccacccaaaaccctagccgccccccccccccccccccatttctccccctcctccaaggtgcagccctcccgtgtggttctccgtcgtgtggctgcgatctcaattggagtttggagggaggaagaaggaaggaggaagggaagaacctaaggtggtggacttccggatcgtacttagggatttgcccaaacttccggtaaaggtacttgatttatgttgggaatgaggggagtagcaacacgtccactttcactcttataatagcgcttcccaagcgttgccatgatttaattagaaacttgttgttcaaaagaagttattttttttt

SEQ ID NO: 6375 - DNA, 402 bp, Zea mays
  Clone ID: LIB3118-031-P1-K1-C6
catcatcagacgccttcccatgcaccgcaaggatcacgtgggagcacggtggcggcagcgccatcgcctccctcaccgtgccgtgcgccgtcgagcacctggccggcggatccggtgactatcgcttcatctggaggtttgactccagcagagcgtccatcatctactgcatcgcgtgacaaactagctagctggataagctaggccatttatttacgattcatgctttgtttccatcgcatgggctgttatatatgctggtcgactgaagctgcaaaatagcgttaggtgatggatcgttggttcgcttgtctctagctagcgcgcagcgtgttgattaatttggatgcatgtcaccgaaataattaatgtgcacatccatgcatgtatagggtagtagtt

SEQ ID NO: 6376 - DNA, 370 bp, Zea mays
  Clone ID: LIB3118-031-P1-K1-C7
cctgcccttgcaacgcagctgccggcggtgtctactactgaggaaactatgtactgtagtaataatgtaatggagccgctggctagctacctatagctagttcactcgtttagcggcgatgagtaacggagtgtcacccatcaccatgggtggcagtgtgagcaatgacctgaatgaaccattgaaatggaaaggaataatatatagggaaaaaaaaaaaaaaaaaaaaaaaaaaaaaaaaaaaaaaaaaaaaaaaggttggtcgttataaaaggaatcaaacttaaaaaactcgagcatacaaaagtaattactattgtattgtggcacccaaaattaaattctttgggccgggggggggccccttttt

SEQ ID NO: 6377 - DNA, 98 bp, Zea mays
  unsure at all n locations
  Clone ID: LIB3118-031-P1-K1-D1
gaaaaaacaaaanaaaaaaaaaaaagaagaaaaaaaaaaaaagaaaaaagaagaagagaaagaaaaaaaaaaaaagaaaaaaaaagaagagggggggg

SEQ ID NO: 6378 - DNA, 367 bp, Zea mays
  Clone ID: LIB3118-031-P1-K1-D2
gccaccaccttgcagcgcgccatcaaggtggtcggcacgccggcgtacgaggagatggtgaggaactgcatgatccaggatctctcctggaagggccctgccaagaactgggagaacgtgctgctcagcctcggggtcgccggcggcgagccaggggtcgaaggcgaggagatcgcgccgctcgccaaggagaacgtggccgcgccctgaagagttcggcctgcagggcccctgatctcgcgcgtggtgcaaagatgttgggacatcttcttatatatgctgtttcggttatgtgatatggacaagtgtgtgtagcttcttgcttgtgctaagtgaatgtagtgtagtggtggcagtggcacaacct

SEQ ID NO: 6379 - DNA, 410 bp, Zea mays
  Clone ID: LIB3118-031-P1-K1-D3
attgagaccaactagcaacatagaaagcacaatagtgtaccaacaatggcagccaaaatattttgcttccttatgctccttggtctttctgcaagtgttgctaccgcaaccattttcccacaatgctcacaagctcctatagcttcccttcttcccccatacctctcaccagcggtgtcttcagtgtgtgaaaacccaattgttcaaccctacaggatccaacaggcaatcgcaacaggcatcttaccattatcacccttgttcctccaacaaccgtcagccctattacaagagttacctttggtccatttggtggcacaaaacatcagggcacaacaactacaacaacttgtgctagcaaaccttgctgcatactctcagcaacatcagtttcttccattcaaccaact

SEQ ID NO: 6380 - DNA, 409 bp, Zea mays
  Clone ID: LIB3118-031-P1-K1-D4
gctagaggtggcccgcaagcagatgcaggtgggcgctgtgggcgggaggcaggtgtaccagaacgtcctccacgctatctactgcatcctcaagaaggagggcgccggcggcctgtaccgaggtctcggccctagctgcatcaagctcatgcccgccgccggcatcgccttcatgtgctacgaggcgtgcaagaagatcctcgtcgacaaggaggatgaggaggaggaggacgaagccggcggcggagaggatgacaagaaaaaggttgaatgatcaaagttcttggccaagaaggtagcaatgtcgtgaagcgtacgtgaactggaaacggatggacaagtatatttggagtttgatgtggtgtttcccggatcgtgtgtttgtcttagatgaaaaaaattcaatttt

SEQ ID NO: 6381 - DNA, 333 bp, Zea mays
  Clone ID: LIB3118-031-P1-K1-D6
aaccctcgagataacaatagtgatggcagggtaaacccaacttcaatggagaacctgatggacagctcttaagatgatttcacgatgtcgctgtaatctgcatgtcgcggaagtaaacctgctcggtgccgcggtgcaccgaatacttatccggtgtttaggtttcagggaggttttgccttgtcgcgtgagaaatggttctctggaaaccgatctttgctttagaatgactgtgtgaaatagatgtttgtggctcatccaaccagaaagaagctccctagatcccttggcccgaattagctggttaatattaagatagctgtattcgtctgg

SEQ ID NO: 6382 - DNA, 402 bp, Zea mays
  unsure at all n locations
  Clone ID: LIB3118-031-P1-K1-D9
ccgggagattccaggtccagggctaaaaaaacacaagaacctgttattgacatattgcctcagctctatgatattggttccagtgacagcagaggaccttcaactggaatgtggtctcgaactcttcgactaaagattacaggaagagatgggatccagaaaatcgatgccaggatacctgctgggttcttagaagggatgacaagaattattccaggcttggctggagctaatattatggaaaggcttcggaatgctcctgttgatacagacaacccccagaatggtcaaatactgcttgattttgaggacgccatgggagataggatccaggtgtttattgcatgagctgacggtgtctttgctagaatgctcgtgcacagcanactctggaagcatggt

SEQ ID NO: 6383 - DNA, 210 bp, Zea mays
  Clone ID: LIB3118-031-P1-K1-E10
ggatgttgctgcttctgagttcttctgagagaaagacaagacttatgatcggaatttcaaggaggtgaacaacgatggctcaaagaaaagttcaggcgacagcctgaaagacctgtacaagttctttgtttctgagtaccctatcgtgtcgagcgaagacccattagatcaggacgactgaagcacttatgccatactcactgatgatat

SEQ ID NO: 6384 - DNA, 391 bp, Zea mays
  Clone ID: LIB3118-031-P1-K1-E11
ccaacaagcaacatagaaagtggaatccagtagcaacaatagagcaacaatggcgaccaagatattttccctccttatgctccttgctctttctacatgtgttgctaacgcgacaattttccctcaatgctcacaagctcctatagcttcccttcttcccccataccttccatcaattatagcttcaatatgtgaaaacccagctcttcaaccatataggcttcaacaagcaatcgcagcaagcaacatacctttatcgcccttgttgtttcaacaatcgccagccctatctttggtgcagtcattggtacaaaccatcagggcacaacagctgcagcaactcgtgctacctctgatcaaccaagtagctctggcaaacctttctccctac

SEQ ID NO: 6385 - DNA, 363 bp, Zea mays
  Clone ID: LIB3118-031-P1-K1-E12
gaaccagaagcttcttgcccagaggctgaaggaacagagggaccgccggagcgagagcttggccaagaggaggtccaagctttctgccgccgtcaaggcttttgctgccacctttgcttaagaatattcagtgttttgggatctttgtaaggtctatctcgttacagcgaaagtgcctctctacttagatttatgagtaattgttgcttttttgtatgaacatggtaatggcttgtcggtgtaccagaggtctactatgttggtttatgctgtgaacgtaagccagccatattctttgttatgcactctgatctatatgttaacgtttgggattttttgtaacatgaagtatcctgcttggtt

SEQ ID NO: 6386 - DNA, 391 bp, Zea mays
  Clone ID: LIB3118-031-P1-K1-E2
cggacgcgtgggcgatcactctctcatgaaaagtctgaactcactttgcgactcgagcatctagttcatgtctgcagtgacgtactagatggaaaggctaaccatgaaaggctcactgatgaagtttgcttgatcctagagtggatggtgagacgatgccttttgtgtcctgatggaatagacattgtggagtacacaacaaataattctgatggaaatgagtcccagaggacattaagcattcatgaaaaagatatggtgcagagtataataaattcgaaaatggtttcaggaacgcaaaaggagaacgcaacaggatatggtgctgaagaccttatccctgctgtaatattagaaaaacattctcaaattgagttgatcagttctaagc

SEQ ID NO: 6387 - DNA, 379 bp, Zea mays
  Clone ID: LIB3118-031-P1-K1-E3
cccacgcgtccgcccacgcgtccgcccacgcgtccgcggacgcgtggggggtgagcggatcgagatggcggcgtcggatgttgagtaccgctgcttcgtcggcggcctcgcctgggccacggacgaccactccctccacaacgccttcagcacctacggcgaggtcctcgagtccaagatcatcctcgatcgggagacgcagaggtcccgcggcttcggcttcgtcaccttctccacggaggaggcgatgcggaacgccatcgagggcatgaacggcaaggagctggacggtcgcaacatcaccgtcaacgagggccagtccccgcggcgccgtggagggcggcgcggtgggtacggtggtggccgtggaggcggcggc

SEQ ID NO: 6388 - DNA, 318 bp, Zea mays
  Clone ID: LIB3118-031-P1-K1-E5
caacaagcaacatagaaagtggaatccagtagcaacaacagagcaacaatggcgaccaagggatttaccctacttatgctccttgctctctctgcatgtgatgctaacgcgacaatttcccctcaatgctcacaagctcctatagcttccctgcttcccccataccttccatcaatgatagctacagtatgtgaaaacccagctcttcagccctataggctccaacaagcaatcgcagcaagcaacataccttaatcaccctagagggttcaacaatcgacaagccctatctacggtgcagtaaaccggtacaaacca

SEQ ID NO: 6389 - DNA, 369 bp, Zea mays
  unsure at all n locations
  Clone ID: LIB3118-031-P1-K1-E6
gtaccagaagcttcttgcccagaggctgaaggaacagagggaccgccggagcgagagcttggccaagaggaggtccaagctttctgccgccgtcaaggcttctgctgccacctctgcttaagaatattcagtgttttgggatctttgtaaggtctatctcgttacagcgaaagtgcctctctacttagatttatgagtaattgttgcttttttgtatgaacatggtaatggcttgtcggggtaccagaggtttactatgttggtttatgctgtgaacgtaagcgagccatattctttggtatgcagtctgaactatatgttaacgtttgggatttttgntaacatgaagtatcctgcttggttgccttg

SEQ ID NO: 6390 - DNA, 123 bp, Zea mays
  unsure at all n locations
  Clone ID: LIB3118-031-P1-K1-E7
gaaccgacccggaagacccgggacgacccacgcgcccgcccacgcgaccgggacaccaccccacncccagaaaagaacaagggaaacacgggaagcccaaaccacccaaaaccccagccgccc

SEQ ID NO: 6391 - DNA, 403 bp, Zea mays
  Clone ID: LIB3118-031-P1-K1-E8
catcatcagacgccttcccatgcaccgcaaggatcacgtgggagcacggtggcggcagcgccatcgcctccctcaccgtgccgtgcgccgtcgagcacctggccggcggatccggtgactatcgcttcatctggaggtttgactccagcagagcgtccatcatctactgcatcgcgtgacaaactagctagctggataagctaggccatttatttacgattcatgctttgtttccatcgcatgggctgttatatatgctggtcgactgaagctgcaaaatagcgttaggtgatggatcgttggttcgcttgtctctagctagcgcgcagcgtgttgattaatttggatgcatgtcaccgaaataattaatgtgcacatccatgcatgtatagggtagtagttt

SEQ ID NO: 6392 - DNA, 403 bp, Zea mays
  Clone ID: LIB3118-031-P1-K1-E9
ggatgttgctgcttctgagttcttcggtgagaaagacaagacttatgatcttaatttcaaggaggagaacaacgatggctcaaagaaaatttcaggcgacagcctgaaagacctgtacaagtcctttgtttctgagtaccctatcgagtcgatcgaagacccatttgatcaggacgactggagcacttatgccaaactcactgatgagattggacagaaagtgcagattgtaggagatgatcttctcgttaccaaccccaccagggtcgccaaggccatcaatgagaagacctgcaatgctctcctcttgaaggtgaaccaaatcgggtctgtgaccgagagtatcgaagctgtcaggatgtccaagcgcgccggatggggagtgatggcaagccacaggagt

SEQ ID NO: 6393 - DNA, 322 bp, Zea mays
  Clone ID: LIB3118-031-P1-K1-F11
gccctgtctcagggactaaaggtcattgcatgtgttggtgagacccttgagcagagggaggctgggtctaccatggatgttgttgctgcacaaacaaaagcaattgctgagaagatcaaggactggagcaacgtagttgttgcctatgaaccagtttgggctattggaactggtaaagttgccaccccagctcaggctcaggaagtgcacgcctccctgagggattggctaaagaccaatgccagccctgaggttgctgaatctactaggatcatctacggaggctctgtaactgctgcgaactgcaaagagctagcagcac

SEQ ID NO: 6394 - DNA, 276 bp, Zea mays
  Clone ID: LIB3118-031-P1-K1-F12
gacgcgtgggggcgataacataaaatggaacttttccaaattcttggttgacaaagaggggcatgttgtggagcgttatacaccaacaactttctcactgagcatcgaaatggacatcaagaaactactatggagtttttaaaccttgttattggattcagatgctcctacaaactggttgctttgtttgagcacctgttgccttaagaagtgttataataaagttgtttttataaccgaatatgctttgtatttcttttaggattcttctgtttt

SEQ ID NO: 6395 - DNA, 292 bp, Zea mays
  Clone ID: LIB3118-031-P1-K1-F2
aatctctcttcgtcactagctcgtggtaataagggaagcttgatcatctttccttacggcggtgatgaagagcagcacaatcgtcgcgcttctattggctggtgccattctgtccttactggctccatgctacgaaacccgcggctggatcgggaaacccaagaaggcacccgccgccgccggaagggccatccttttggtctttttccggggcccaccaaagggccaaccagaatggccgttggtcttgtacttccaggggtttaagggccgggggttgtgttaccaaagg

SEQ ID NO: 6396 - DNA, 314 bp, Zea mays
  unsure at all n locations
  Clone ID: LIB3118-031-P1-K1-F5
atgcattacttaattagtgagaattcacacatccattattcggcatgcccgcgttatttcatcgtatatatatttatttcaagttctggggcaaggaaaggaaatagcggctagcttatatattatcagccgatgtggggcgtctgggcgacgatgtcgacgaagatgcggacacggttagggcgataatccgcggtcaccacggagccgacgggcagcaccacgatgtcggcgtccggcttgtccttgaggatcaccttcttggcgtcctccacgctcagcccgaccacctnaggccacgacgtcttggcgcc

SEQ ID NO: 6397 - DNA, 356 bp, Zea mays
  Clone ID: LIB3118-031-P1-K1-F6
cggacgcgtgggggcgataacataaaatggaacttctccaaattcttggttgacaaagaggggcatgttgtggagcggtatgcaccaacaacttccccactgagcatcgagaaggacatcaagaaactactagggagttcttaaaccttgtaattggattcagtagccctaccaaactgctgctttgcatcgagcacctgatgcctcagtagcgttttaataaagttgtttttataaccgagatgttttgtatttcttctgtattccctgctttgtggtaaatgtcatgtaataaaaatgatgcaatccacgatttatcttgaaaggttatgtatccaggttggttgttatgagat

SEQ ID NO: 6398 - DNA, 390 bp, Zea mays
  Clone ID: LIB3118-031-P1-K1-F8
gctggtgaagaacggtaagaagattgccgcctttgtgccgaacgacggctgcttgaactacatcgaggaaaacgatgaggtgctgatcgcggggttcggtcgtaagggtcacgccgtgggagatattcccggtgtccgtttcaaggttgtgaaggtctcgggcgtttccctgctcgccctcttcaaggagaagaaggagaagccgagatcttaaaaaccctattcccctcgccacaaatgaatcatgtaatgcttttggagttctgggacctcatgttgagaacctagcgattgttttgccatagttttgtttagaagattctgaattgaattctatatccgtaaccgcttgccagtgcgtgttctgtgttaatattatctttccgtggt

SEQ ID NO: 6399 - DNA, 90 bp, Zea mays
  Clone ID: LIB3118-031-P1-K1-F9
agagaatagaaaatgctagaggtatcgtcatttgggctggaactaggagggtgggtggtatattgacaaaatccattgcataatagaaaa

SEQ ID NO: 6400 - DNA, 395 bp, Zea mays
  Clone ID: LIB3118-031-P1-K1-G10
cagcaacagagaagacagagcagcttgccatgtttttgggcacactcatttctgttgggattctgtggttgatgagatcaggtacgtgcaggctcctctggcataccctcgagaaagaaaacgccggatgaacggtgaaggctggctgccattttgtgtataccgtgacggtttcaacccagaaatttatccagcactgtggtcagattactacaacaagaacaaaagggaacccgagaacactcagctcgcgccttgggttgccagccattacgcaaagtaccacaagttccactgaccctttctgagttgccttggctttttgccgaattgatgcagatcgtcccttcaggatggtgttgaattagctgggaaaaggagatattgacgtttta

SEQ ID NO: 6401 - DNA, 96 bp, Zea mays
  Clone ID: LIB3118-031-P1-K1-G11
tcgcagaaacagagaagacagagcagcttgccatgtaaaagggcacactcattggtggtgggattctgtggttgatgagatcaggtacgtgcaggc

SEQ ID NO: 6402 - DNA, 365 bp, Zea mays
  Clone ID: LIB3118-031-P1-K1-G12
agaaagcacaatagtgtaccaacaatggcagccaaaatattttgcttccttatgctccttggtctttctgcaagtgttgctaccgcaaccattttcccacaatgctcacaagctcctatagcttcccttcttcccccatacctctcaccagcggtgtcttcagtgtgtgaaaacccaattgttcaaccctacaggatccaacaggcaatcgcaacaggcatcttaccattatcacccttgttcctacaacaaccgtcagccctattacaagagttacctttggtccatttggtggcacaaaacatcagggcacaacaactacaacaacttgtgctagcaaaccttgctgcatacttttagcaaca

SEQ ID NO: 6403 - DNA, 403 bp, Zea mays
  Clone ID: LIB3118-031-P1-K1-G2
gggatgcaccttgatgcccaacattggttatggttctgacaagtcgaccaggcactacctccccaacaagttcaagaagtttgtggtccacaacgtttctgagctggagttgctcatgatgcacaacaggacctactgcgctgaaattgctcacaacgtgtccactaagaagcgcaaggagatcgtggagcgtgctgcgcagcttgacattgtggtcacgaacaagcttgctaggctccgcagccaggaggacgagtagtctggtttcttgtcttaacgacgaactggatgttgccattcctttctgtaggaaactactttgcttgtgtcttgttagtactggaaaacagagtcacttctacctttttgcaatcagtagctactaaaatgtggcagatttcac

SEQ ID NO: 6404 - DNA, 253 bp, Zea mays
  Clone ID: LIB3118-031-P1-K1-G3
cgtcctcgacgaccggatggtcggcgggcgggagggcggtgcggcgagggttttggccttttgggtacgttgtggataagcacgaaggcagcaggccagcagcagcaggggcggcgtggcgggcgggcaggcaggggcagggcaggcggagacggagggaggcggccacaagcggcggtctttccaaaatgtcaaaaaggacagctgtaacagcgataagaaaaacaagtcatcatcaccctctctcactact

SEQ ID NO: 6405 - DNA, 344 bp, Zea mays
  Clone ID: LIB3118-031-P1-K1-G4
gaaccgcgccggaacggccgggacgacccaggcggacccacgcatccgcaaaaacagaggaagcacagagcagcacagccagaggagggagcacacgcaaacaggtagggagacagcgggagatgaaaccaggaacagacaagcgccagaggcataccctagggaaagaaaacgccggacgaacggtgaaggcaggctgccaccagggaaaccgtgacgagtgcaacccaagaggaggaccagcacagaggacaggctacagcagcacgaacagaagggaacccgacaacacagagtcagcgcaccgaggcgccagccataacggaaaggaccaaaggagccac

SEQ ID NO: 6406 - DNA, 215 bp, Zea mays
  Clone ID: LIB3118-031-P1-K1-G5
cagcaacagagaagacagagcagcttgccatgtttttgggcacactcatttcggttgggattctgtggttgatgagatcaggtacgtgcaggctcctctggcataccctcgagaaagaaaacgccggatgaacggtgaaagctggctgccattttgtgtataccgtgacggtgtcaacccagaaatttattcagcacttgggtcagattactaca

SEQ ID NO: 6407 - DNA, 403 bp, Zea mays
  Clone ID: LIB3118-031-P1-K1-G8
cccacgcgtccgattaattcacaaaagctgagaagacggggggtcacacatcatacttcttttgccattgcaatggaaaacaactacgcgtgcccaccacccagcaagggaaacctgatcacagtcttgagcatcgatggtggtggggtcaagggtgtcatccctgctaccttccttgcattccttgagtctaaacttcaggccgttctgtgagcaactcttggtataattggttgcaatggcgatatcacaagctcttcatggatatgtgacgatggttcgggttacaggtctctccgttactcatcaagaagttttcacacgaagagcaagcaaatttagtatggcagttcttatgtagcatccctgttaacatgatgggcaaaatttctttcatggattt

SEQ ID NO: 6408 - DNA, 248 bp, Zea mays
  Clone ID: LIB3118-031-P1-K1-G9
aaaaaaaaaaaaaaaaaaaaaaaaaaaaaaaaaaaaaaaaaaaaaaaaaaaaaaaaaaaaaaaaaaaaaaaaaaaaaaaaaaaaaaaaaaaaaaaaaaaaaaaaaaaaaaaaaaaaaaaaaaaaaaaaaaaaaggggggggccgtttttagggatccaagtttaccttcccgggctttgaaaattattgttttttttttggggcaccaaaattaaattgctggggcgggtttttaaaaggttgggatg

SEQ ID NO: 6409 - DNA, 262 bp, Zea mays
  unsure at all n locations
  Clone ID: LIB3118-031-P1-K1-H10
aaaccccnccgaccggccgcggagacccagggcggacccacgcatactgattacctgttatagctcaataataaagacccttgtgccgacgctcgtgcttgtgtcaaaagacaaaatgcgcgtacgttagatagaacgaagcaaacggcgcggatgtacacggtcgaagaggacgtccggaagcatgcggcgaccaaggtggtgtatagggtgacctaaagttaacggaggtgggcataaatctacaacggttgcgactggg

SEQ ID NO: 6410 - DNA, 165 bp, Zea mays
  Clone ID: LIB3118-031-P1-K1-H11
cagacgcgtgggtttagcggcgatgattgagtaattatgtgtcacgcatcacgatgggtggcagtgtcagtgtgagcaatgaccctaatgaacaattgaaatgaaaagaataatgttttgctccatataataaatatttttactaaatatcatttaagaaaattt

SEQ ID NO: 6411 - DNA, 392 bp, Zea mays
  Clone ID: LIB3118-031-P1-K1-H12
cagctagctacagcaagccgtgcttccttcttgacacaacaacagttgctgccgttctaccagcagtttgcggctaaccccgcaaccctcttacaactacaacaattgttgccctttgtccaacttgctttgacaaacccagcagcctcctaccaacaacacatcattggtggtgccctcttttagattgcttattagatgtaattcaataataaagttttttggatgatgtatgtggccaaccagaaataaaaagttacatttccagattctaatgtgatattggtctccaagggtgttcgataattacttttcctaagattgggagtaacaagctttaaatcatccttacagtgtgataaccgattcatgatgaggatggtatagtcttc

SEQ ID NO: 6412 - DNA, 373 bp, Zea mays
  Clone ID: LIB3118-031-P1-K1-H2
aagaagggctacgtcgggatccacagttccggtttcagagacttcctgctcaagccagagctgctccgtgctatccaggattgtggttttgagcatccttccgaagtgcaacacgagtgtatccctcaagccattcttggaatggatgtcatctgtcaagctaaatctgggatggggaaaactgctgtttttgtcctttcatccctccaacaaattgaccctgttgcgggtcaggtagcagcacttgtactgtgccacacaagggaactggcttatcagatatgccacgaatttgagaggttcagcaaatatcttactgaagttaaagttgctgtcttctatggaggtgttcacatcaggaagcataaagatt

SEQ ID NO: 6413 - DNA, 404 bp, Zea mays
  Clone ID: LIB3118-031-P1-K1-H3
aacaagcaacatagaaagtggaatccagtagcaacaatagagcaacaatggcgaccaagatattttccctccttatgctccttgctctttctgcatgtgttgctaacgcgacaattttccctcaatgctcacaagctcctatagcttcccttcttcccccataccttccatcaatgatagcttcagtatgtgaaaacccagctcttcaaccctataggctccaacaagcaatcgcagcaagcaacatacctttatcacccttgtttcaacaatcgccagccctatctttggtgcagtcattggtacaaaccatcagggcacagcagctgcagcaactcgtgctacctgtgatcaaccaagtagctctggcaaacctttcttcctactctcagcaacaacaattt

SEQ ID NO: 6414 - DNA, 87 bp, Zea mays
  Clone ID: LIB3118-031-P1-K1-H4
cttttagattgcttatgagttatagttcaataataaagtttttttgctgatgtttgtggcttcccaaaaataagaaagtgcatttct

SEQ ID NO: 6415 - DNA, 216 bp, Zea mays
  Clone ID: LIB3118-031-P1-K1-H6
cggacgcgtgggtttagcggcgatgattgagtaataatgtgtcacgcatcaccatgggtggcagtgtcagtgtgagcaatgacctgaatgaacaattgaaatgaaaagaaaaaagtattgttccaaaaaaaaaaaaaaaaaaaaaaaaaataaaataaaaaaaaaaaaaaaaaaaaaaaaaaaaaaaaaaaaaaaaataataaaaaaattaaatat

SEQ ID NO: 6416 - DNA, 405 bp, Zea mays
  Clone ID: LIB3118-031-P1-K1-H8
cagagcctcattcatctccattcgaaacaccctcgcacccacactctcccttcgtccccagcctaaatccccgcaacgatggctcgcacgaagcagacggcgcgcaagtccacgggcggcaaggccccgaggaagcagctggcgaccaaggcggcgcgcaagtcggcccctgcgaccggcggcgtgaagaagccgcaccgcttccgcccgggcaccgtggcgctgcgcgagatccgcaagtaccagaagagcacggagcttctcatccgcaagctgcccttccagcgcctggtccgcgagatcgcgcaggacttcaagaccgacctccgcttccagtcctccgccgtcgccgcgctgcaggaggccgccgaggcctacctcgtcggcctgttcgaggacaccaac

SEQ ID NO: 6417 - DNA, 351 bp, Zea mays
  unsure at all n locations
  Clone ID: LIB3118-033-P1-K1-A10
cggacgcgtgggtgcagccagcgttgcagcaaaggcatatgaacttggtttggcaagtaggcgccctcggccaaaggacctggtgaaatatgcagagagctgcatgtacagccccatctaccgcaactaccgttgaattcggatcaactccagttatgtgcaaatcagcagcagccttgcgtcaactgcaagatttcctaagaatacaactcggttcagtctttcatactgtaataccctaagctctctagcaaaagctgtttcacgtnctcttctgcccctacatattccgcagtgtttatctcttgcgatgtcatgtaaatcaagctcngttaggcttttggatgctag

SEQ ID NO: 6418 - DNA, 309 bp, Zea mays
  Clone ID: LIB3118-033-P1-K1-A12
gggataatctccaaccaaaaactctatacaaaacaagtccgagagcaacccaaagtcaaacacaaactctcgatctcactaataagaaacacggcaaggctacttgatcctggccgccggcgcggcggccggaggcgcgaagaacccgacggcgcggcacttgacgtccagccctgcgccgccgggcatcgacattaccccaccagcagcggacgaggtggagcgcttgtagggcccgagccacttggcgagcatgtagcgcgtcttgcgccagggcgggacgtggaggccgtgggcgcggagcgagcg

SEQ ID NO: 6419 - DNA, 320 bp, Zea mays
  Clone ID: LIB3118-033-P1-K1-A3
cccttcttatcgtgctcacatcattcactgttgctgatttatttgcaagtgcacttgcttttatagcaaccggctggtgtgtcttgtgtctggccgtaacatggaagagggtagtgaaagtccttgggctatgggattcagtccgtgagattgcaaggatgtacgatgcaggaatgggagccatcatctttgtgcccatcgtcgtcttctcatggttccccttcgtgtcaacattccagtcacgtttcctcttcaatcaagcgtttagtcgaggtctggagatctccctcatccttgcagggaacaaggcgaatcagcag

SEQ ID NO: 6420 - DNA, 339 bp, Zea mays
  Clone ID: LIB3118-033-P1-K1-A6
cactgaccccgctgtttatttgcaggacaaatctaccacatataccagctagctgagcacaccgcgctccttgttgacacaaaacagttgctgcctttctaccagcagtttgcgggtaaccccgcaaccctcttacaactacaacaattgttgccctttgtaccaacttgctttgacagacccagcggcctcctaccaacaacacatcattggtggtgccctcttttagattgcttattagctgtaattcaataataaagttttttggatgatgtatgtggccaaccagaaataagaagttacatttccagattctaaaaaaaaaaattacaaagtttc

SEQ ID NO: 6421 - DNA, 201 bp, Zea mays
  Clone ID: LIB3118-033-P1-K1-A9
cttcgcccacgcttatgcggccacacgatatccgcctgcagagccaatttgcaagtgcacttgcttttatctccccccggctgaggcttgcgcatctcccctgcacagccaaagagctggacaaagagctggggcttttaagcacgccccaaaatgaggctgtgcttggccaatactttgagggggcctactgtttttggg

SEQ ID NO: 6422 - DNA, 381 bp, Zea mays
  Clone ID: LIB3118-033-P1-K1-B1
cccacgcgtgggcagcgatcgttttctgcctgacaaagccattgacttgattgatgaagctggatctcgtgttaggctgaggcatgcgcagctccctgatgaagccaaagagctggacaaagagctgcggcagataagcaagcagaaaaatgaggctgtacgtggccaagattttgagaaggtatactgttgtttggcacagcggtgacaaagccgatccggtcccacctctctagcaacgtcgatatgggtaataccaagcattatgttgtttccttttgagataaatattttgttactggttttaccttttgtctccttttctttggtttttgtttaaaatctgtagcaaatgggctacgatgaggatatccctttctt

SEQ ID NO: 6423 - DNA, 342 bp, Zea mays
  Clone ID: LIB3118-033-P1-K1-B10
gtgaagggagggcaaccgagagcgatcggcgatgggctccttcctctcgagcttagtcacgccccctccggccgccgacgaccccaactgcgccgtggtggccgcccactccaaggccacctacgacgagcagtgggcggcccacaagagcagcagcaagctgatggtgatcgacttctcggcctcctggtgcgggccctgccgttttatcgagccggccttcaaggagctggcctcccgtttttccgacgccattttcgtcaaggtcgacgtcaacaagctcgcggaggtcggaaggacatggaaggtagaggcgtatccaactttcttacttttcaaggt

SEQ ID NO: 6424 - DNA, 302 bp, Zea mays
  Clone ID: LIB3118-033-P1-K1-B11
ggaaaccctagcgagcgagagtgcccgtagccaaaagaccatccagccatggcgctgggtgccctgtacaacgagatccgtagcgtgaaggtccgcgacgtgccgtcttacctgaagccgtttttgacctggcacaactgtaagaagagcgcccaccagcgccggccaccgctacatagagaagttcatcgacacgagctcggcgaaccctctataccaggtgtgtatggggggggtgatcttctcctactgggtcaatctgccctgggagcgcgcccacctggcccacctggaggagatgg

SEQ ID NO: 6425 - DNA, 285 bp, Zea mays
  Clone ID: LIB3118-033-P1-K1-B2
ttttttttttgtttcattttttgactcaactgggtggggtgttccttgtttcttatttgtacagctgcttccatttaaccaagttgtctttgcgtactttgttgtgttcctacgcaaaagcggggggggcttttttcattggggagggggggggaatgcccgaaaacgggggcaaggacctaaaatgttggcgttcttccagaccattttgatgaaggggggcggggcccctcaactagcgaggggaatatttttcagctcggagataacaaatgatacgtgccc

SEQ ID NO: 6426 - DNA, 391 bp, Zea mays
  Clone ID: LIB3118-033-P1-K1-B3
cggacgcgtgggcaaattgcaccaagaaatccatcgagaggccgtcgacaggggaattaatggcgtcgtcgtctagcagcagccaccgccgcctcatcctcgcagccgccgtcctgctctccgtgctcgcggctgccagcgccagcgccgggacctcctgcgtgccggggtgggccatcccgcacaacccgctcccgagctgccgctggtacgtgaccagccggacctgcggcatcgggccgcgcctcccgtggccggagctgaagaggagatgctgccgggagctggcggacatcccggcgtactgccggtgcacggcgctgagcatcctcatggacggcgcgatcccgccgggcccggacgcgcagctggagggccgcctagaggacct

SEQ ID NO: 6427 - DNA, 352 bp, Zea mays
  Clone ID: LIB3118-033-P1-K1-B4
cactgaaccccgctgcttatttgcagcagcaaatactactaccatttagccagctagctgcagcaaaccgtgcttccttcttgacacagcaacagttgctgcctttctaccagcagtttgcggctaaccccgcaaccctcttacaactacaacaattgttgccctttgtccaacttgctttgacagacccagcggcctcctaccaacaacacatcattggtggtgccctcttttagattgcttattaggtggaattcaataataaagttttttggatgatgtatgtggccaaccagaaataagaagttacatttccagattctaaaataaaaatataataaaatataaaggg

SEQ ID NO: 6428 - DNA, 361 bp, Zea mays
  Clone ID: LIB3118-033-P1-K1-B5
gcaaaccctagcgagcgagagagcccggagccgagagaccagccagccatggcgctgcgtgccctgtacaacgagatccggagcatgaaggtccgcgacgtgccggcttacctgaagccgcgtttgacctgggacaacgtcaagaagagcgccgaccaggccgtcgaccgctacatcgagaagtacatcgacacgagctcgccggaccctctctaccacgtctgcatcggagggatgatcttctcctacttcgtcaatctgccctgggagcgcgcccacctcgcccaccttgaggagatggagaggaccggtgggaagcactagatccgctgccccgtcccttgccggcagggcgggaaga

SEQ ID NO: 6429 - DNA, 257 bp, Zea mays
  Clone ID: LIB3118-033-P1-K1-B6
ggtgacagaaaaggattttctcgatgctgtcaacaaggtcatcaagggctaccagaagttcagtgcaacacccaagtatatggtgtacaactagtcggcgtgtcttcatgggatctgttgtttctagaaactctggatctttttcatggttgtatcatcatgagattctctatgcaaaggttgttgtttgtttagcaaattggatgccgagtgatttgtgacctgtaccgcatgtttttaagataacaaggttcttc

SEQ ID NO: 6430 - DNA, 247 bp, Zea mays
  Clone ID: LIB3118-033-P1-K1-B7
cagacgcgcggacgcacacctgtgcggaatcgtgtggtcttcctaagacccaccccaagcttgattttcgcgatcatggatacggctatgtaggtgacggaacggtccacggattcgatggtagcaccaccccgacctccaaacagagcgtttatacggcgctcccagctcagctgtcatgggctatacagaagaaaacaccgtcgtgcttgatccatcctccccgcgggcgctttaggggattcta

SEQ ID NO: 6431 - DNA, 127 bp, Zea mays
  Clone ID: LIB3118-033-P1-K1-B8
ctatatttttttatagagtccttcttatggggggttaatagtctttttgttttacaataacaccttcttttaattctcttagtcctcgtccttttttttttctcgtcccagcaaaaacaaggccgat

SEQ ID NO: 6432 - DNA, 324 bp, Zea mays
  Clone ID: LIB3118-033-P1-K1-B9
acgcgtcctcatgcgaccgtgggaccaagaaatccatcgagaggccgtcgacaggggattcaatggcgttgtcgtttagcagcagtcaccgtcgcctcatgctcgcagtcgccgacctgctctacgtgcttgcggatgccagcgccagcgccgtaaccttctgcgtgccggggtgggccatcccccacaatctggtcccgagctgccgctgggtcgtgaccagccggacctgctggatcgggccaggcctcccctggccggggctttagaggagatgctttcgggagctggcgtacattccggggtactgtccgggcacggggc

SEQ ID NO: 6433 - DNA, 394 bp, Zea mays
  Clone ID: LIB3118-033-P1-K1-C1
gcaccacaagcgagcgagggacccggggcggaagaagagagagaagacgtctctctcctctcggcgtccccgttccccaacctctcgtctgctgcctgcctgcctgcctgcctgcaaaaaggagtttgtcatggcgtctaagcgcatcctcaaggagctgaaggacctgcagaaagacccccccacatcatgcagtgcaggtcctgctggtgaggacatgtttcattggcaagcaacaattatgggaccacctgacagtccctatgctggcggtgttttcttagtgaacattcatttcccgccagattaccccttcaaacctccaaaggtttctttcaagacaaaggtcttccatcctaatatcaacagcaatggaagtatatgccttgacatt

SEQ ID NO: 6434 - DNA, 129 bp, Zea mays
  Clone ID: LIB3118-033-P1-K1-C10
gggaaatctcctctatccatccctctctatctatatctgtaataatgcagtaagaggacacacattatcatgtgtggtatgaccaataatatatgcatgatcataataaagttttggttttaatgaagt

SEQ ID NO: 6435 - DNA, 371 bp, Zea mays
  Clone ID: LIB3118-033-P1-K1-C11
cccactcgttagtcgtatgcgtttttttttaatggtccagtagttcgattgaggcactactgagtctttgtagcaaacatcatttaactcatgtgaaaccaacattaaaggctggtgctgatgctgatggatatgggtggccatgctttggcctagggtgtagagtactaaggtgtgcgcagaaactgatgggagggccgtcggtgctgtttagtatattcgtctaattgggcagactgagagagacaagatatcttttgccatcacgagagacatataatttatcctttcgaagggatgggatctacacaacagattcaagtaccctgggaaagctcgcaacacgcgcgcgcgctggcgccgatatttct

SEQ ID NO: 6436 - DNA, 315 bp, Zea mays
  Clone ID: LIB3118-033-P1-K1-C12
gttattatctaacaactgtaaatcaaatagctgcatagaacatgcaacaggcgtgggggaggatgagattgttcctttaaaactttctaaaggagtctcaactatgtcacttgctgataataaaacaaaggagaacaagtatcttcttgatatgcttgagagctatgaatcaacgattggcgagccgaacaccaaaactccatggcgcattgctcaatacccacctccttttcaagcagttccatgcaatcctattgtgcttgatatggcttacaacttaattgagtttcccaaaccttgagaaccgcttgaaaa

SEQ ID NO: 6437 - DNA, 390 bp, Zea mays
  Clone ID: LIB3118-033-P1-K1-C2
ccaacaagcaacatagaaagtggaatccagtagcaacaatagagcaacaatggcgaccaagatattttccctccttatgctccttgctctttctacatgtgttgctaacgcgacaattttccctcaatgctcacaagctcctatagcttcccttcttcccccataccttccatcaattatagcttcaatatgtgaaaacccagctcttcaaccatataggcttcaacaagcaatcgcagcaagcaacatacctttatcgcccttgttgtttcaacaatcgccagccctatctttggtgcagtcattggtacaaaccatcagggcacaacagctgcagcaactcgtgctacctctgatcaaccaagtagctctggcaaacctttctcccta

SEQ ID NO: 6438 - DNA, 144 bp, Zea mays
  unsure at all n locations
  Clone ID: LIB3118-033-P1-K1-C4
gngaaatctcctctatccatccctctctatctatatctgtaataatgcagtaagacgacacacattatcatgtgtggtatgaccaataatatatgcatgatcataataaagttttggttttaatggannaaaaaaaaaaataaa

SEQ ID NO: 6439 - DNA, 362 bp, Zea mays
  Clone ID: LIB3118-033-P1-K1-C5
cccacgcgtccgcccacgcgtccgtttttttttaagtcgccaatgatttcattcaaaaatgtcaacatcttgtgcaaacatcatttaactcatgtgaaaccaacattaaaattattcgtcaatagctgttttaaacaccaaaaccatgccatgtaacgttaaaattattaagtcttctcgaaatcctaacgaggaaactagctattgttgggtaatttcttcgaactttgcttgtggaagaaatgccataatagcttttattcccccaaaagacacatcatttatcctttcgaaaggatgggatctacacaacagattcaagtaccctgggaaagctcgcagcacgcgcgcgcgctggcgcc

SEQ ID NO: 6440 - DNA, 381 bp, Zea mays
  Clone ID: LIB3118-033-P1-K1-C6
gccacgcgtccggccacgcgttcgtttttttttaagtcgccaatgatttcattcaaaaatgtcaacatcttgggcaaacatcatttaactcatgtgaaaccaacattaaaattattcgtcaatagctgttttaaacaccaaaaccatgccatgtaacggtaaaattattaagtcttctcgaaatcctaacgaggaaactagctattgttgggtaatttcttcgaactttgctggggaagaaatgccataatagcttttattcccccaaaagacacatcatttatcctttcgaaaggatgggatctacacaacagattcaagtaccctgggaaagctcgcagcacgcgcgcgcgctggcgccgggatgcgccgtgagacgcg

SEQ ID NO: 6441 - DNA, 373 bp, Zea mays
  Clone ID: LIB3118-033-P1-K1-C7
cccacgcgtccgccgacgcctccgtttttttttaaggcgtccatgattttattcaaaaatgtcatacattttgtgcaaacatcatttaactcatgtgacaccaacattaaaatatattcgtcaatagctggtttaaacaccaaatccatgccgtgttacgttaacattattaagtcctctcgacatcctaacgaggaaactagctattggtgggcattttcttcgaactttgctgtggaagaaatgccataatagctcttattcccgcaaaagacacatcatttatccttttgaaaggatgggatctacacagcagattcaagtaccctgggaaagctcgcaggacgcgcgcgctctggcgcctggatgcgcc

SEQ ID NO: 6442 - DNA, 385 bp, Zea mays
  Clone ID: LIB3118-033-P1-K1-C8
tttcagcattcaaaaacacaccaagcgaagcgcactagcaacgacctaacaccaatggctaccaagatattagccctccttgcgcttcttgcccttttagtgagcgcaacaaatgcgttcattattccacagtgctcacttgctcctagtgccagtattccacagttcctcccaccagttacttcaatgggcttcgaacatccagccgtgcaagcctacaggctacaactagcgcttgcggcgagcgccttacaacaaccaattgcccaattgcaacaacaatccttggcacatctaaccctacaaaccattgcaacgcaacaacaacaacaacagtttctgccatcactgagccacctagccgtggtgaaccctgtcacctact

SEQ ID NO: 6443 - DNA, 370 bp, Zea mays
  Clone ID: LIB3118-033-P1-K1-D1
caagcagcagttacctgctgtagaataagagctgtgctctactctgatgcgcccgccttcctactagcagtacctcgaggctataactccatgattccgtaaccgtacgtgttcgttctcttgcaaacgagatgtttgtaaataacgctgtatttctgggttctgagatatgcaacttggatggaggtacaaccggtgaaggggggtgaggaagcagcaacaatggtaagagttctactactgagtgggggaaaaacaacttgcggctgggttagtgaagcttagtagctaccactattcaagagttaaagggagttcgtatgacagttcctctggagatgttatcttcaaagtcttatatcactgctac

SEQ ID NO: 6444 - DNA, 293 bp, Zea mays
  Clone ID: LIB3118-033-P1-K1-D10
tcgcccacgcgtacgcccacgcgtacgatccggacctctatccatctccctgctgctgcggcttgttattgatccagccaagccagggatcgccatgtcggactcggaggagcaccactttgaatcgaaggccgacgccggagcgttcaagacctacccgcagcatgcttgcaccgttcgtaagaacggcttcatcgttatcaaaaaccgcccctgcaagggtggggaggtttctacctcaaagaccggtaagcatgggcatgccaaatgccacatcgctgccatagatatat

SEQ ID NO: 6445 - DNA, 307 bp, Zea mays
  Clone ID: LIB3118-033-P1-K1-D11
cacacacatccgaacacgcgtccgatcttaacctatatccatctccatgggggtgcccttatatttgatccagccaagccacccatcctcatgtcggactcgcaggagcaccacttctacttgaaggccgacaccacactcgacaacacctaccctcacgagaccggcaccgttcacaagaacgacttcatccccatcaagaaccggcccttcaaagttgtggagtttcctactctcaaagactggtaagcaatgtcatgccaaatgccactttgtagacatagatatatgcaacggtaaaaagctc

SEQ ID NO: 6446 - DNA, 213 bp, Zea mays
  Clone ID: LIB3118-033-P1-K1-D12
gacgtatacgacaacgtcgcgcacgcgttagtgaagatactacgcgacgagggccgcgttgagttttaccgtccactgacacccagcctgaccggagtggagccgttcgcgctctgtaacttgtaccactaccatacgctgaagcggctctaccgtcgcgcgaccgggcggtgtccacggggcagacctgggccccgtggcgaccctgctcat

SEQ ID NO: 6447 - DNA, 311 bp, Zea mays
  Clone ID: LIB3118-033-P1-K1-D2
accggatttcgtggtagcagcggcacccgtagtagtaccatctgtgcctgtcacaggaaggagaaaccgagtgacatatttgtggctgatcaccgtaaaaaaataggtttgacctgatccaactcgtactccatccgtttgtcaaaaatgctttactatgcgtgcctaagattgtaaaagatttgcaagtgtaggcttctgatttggctcaaagatgctgagctacttttcttatttctagaagtgcttgagaatcatgtgtggtcactgatgctctcgcatgaagcctaacatgaagggaatcagctgaa

SEQ ID NO: 6448 - DNA, 330 bp, Zea mays
  Clone ID: LIB3118-033-P1-K1-D3
gctatatgtcggagatgcattgttgcatacatacgtggggattcacgctgccggaggtcacgcacgctgcggcgccctttgaacaaccatctgtgcctgttacaagaagggcaccccgcgtcacgtatttgacctgatcaccggagacaagtggctttgtcctgagagaacctgatcttacatcacgcctgtcaaaaatgtttacgattcgtgcttatgattccaaaatattttcaagtgcacgtctctgattaggctcaaagatgctaagctacttctcttattcatagaagggcttgagacatatggctggtcactcatgctcttgta

SEQ ID NO: 6449 - DNA, 366 bp, Zea mays
  Clone ID: LIB3118-033-P1-K1-D4
gttattatctaacaactgtagatcaaatagctgcatagaacatgcaacaggcattatggaggaggagattgttcctttaaaactttctaaaggagtctcaactatgtcacttgctgataataaaacaaaggagaacaagtatctccttgatatgctagagagctatgaatcagcgattggtgagccgaacaccaaagctccatgtcgcattgctcaattcccacctcctttccaagcagttccatgcaatcctattgtgcttgatatggcttacaactcagttgagttcccaaaccttgagaaccgtatgaaaaaagaaaagaagggtcttctgagcaaggttctggggttgaaagatggcatatg

SEQ ID NO: 6450 - DNA, 56 bp, Zea mays
  Clone ID: LIB3118-033-P1-K1-D7
gctgtatgattgtgagcggtggatctacagagatcaagcttcagtaggcgggcatg

SEQ ID NO: 6451 - DNA, 270 bp, Zea mays
  Clone ID: LIB3118-033-P1-K1-D8
ctctccctccctccctccctccgtcgctcgcaccggcaggatgagctccacgggggccgacgtgctccgggcgctgccgccgatcaggacgacggcacgggcgccggagcccgcctgctcgtcggcggcctcgtcgtcgccgtcgccggcgccggcgccggacgcggagtcggtggcggcggccccgccgccggcggaggagcagaagcagggggagaccggcgggtcggaggccccgcaggaggcggaggcggagcccgcgacgccgac

SEQ ID NO: 6452 - DNA, 380 bp, Zea mays
  Clone ID: LIB3118-033-P1-K1-E1
gctgataggactggagactcgatgcgccgcaggaacgacgagaattccgtccgtgtgaccaacctctcggaggacacccgcgagcctgacctccttgagctcttccgtgcctttggccctgtcagccgtgtctacgtcgcggtggatcagaagactgggtcgagcagggggtttgggtttgtcaactttgttcacagagaggacgccgagaaggccatcaacaagctcaacgggtatggttatgacaaccttatcctccgagtcgagtgggcgacaccaaggcccaattagttttgccgctacctgctaaaaatcgcatatttctgttgaattatatcaagattgttggttgaattactggtacctgagtcatgaattta

SEQ ID NO: 6453 - DNA, 233 bp, Zea mays
  Clone ID: LIB3118-033-P1-K1-E11
cccacgcgtccgcccacgcgtccgggagatccggatggtccaacagaacagcgtgaagatggtcattgtttctcgtcattttcctgtctttgtcatcttccagcgcctcttcaatgcaaatgcccttccccttcgcggggcttcaagtcttgtacagctcttacgccgtcctgactactattatggtctccggcggtctgtacctctacgtcaattaccttacgcagtcttat

SEQ ID NO: 6454 - DNA, 356 bp, Zea mays
  Clone ID: LIB3118-033-P1-K1-E12
atccagatcagcaaagcggcagtgcgtagagaggatcgtcgaacagaacagcatgaagatggtcatcgttctcgtcgtgtgcctggctctgtcagctgccagcgcctctgcaatgcagatgccctgcccctgcgcggggctgcagggcttgtacggcgctggcgccggcctgacgacgatgatgggcgccggcgggctgtacccctacgcggagtacctgaggcagccgcagtgcagcccgctggcggcggcgccctactacgccgggtgtgggcagacgagcgccatgtaccagccgctccggcaacagtgctgccagcagcagatgaggatgatggacgtgcagtccgtcgcgc

SEQ ID NO: 6455 - DNA, 341 bp, Zea mays
  Clone ID: LIB3118-033-P1-K1-E2
gcggtctcgttcaagggactgcagggagaggtctcgctcaagggaccgccggagggagcgctcacgctcaagggaccgcagaagggagcgctcacgctcaagggaccggaggggcagttcaccccatggcagaaggcatagagatcggtccaggtcacccaccagcaatgggaaccataaggcagactaggaagcgcttttatggacttgtcgttgattgcgtgaacaaaggaacttgtaacactacctataaactggtcagactgagacggttagcatggatttttagtagtgttgctgtattttgttgtttcatacaagtactctattctgttagcttt

SEQ ID NO: 6456 - DNA, 341 bp, Zea mays
  Clone ID: LIB3118-033-P1-K1-E3
gcggtctcgttcaagggactgcagggagaggtctcgctcaagggaccgccggagggagcgctcacgctcaagggaccgcagaagggagcgctcacgctcaagggaccggaggggcagttcaccccatggcagaaggcatagagatcggtccaggtcacccaccagcaatgggaaccataaggcagactaggaagcgcttttatggacttgtcgttgattgcgtgaacaaaggaacttgttacactacctataaactggtcagactgagacggttagcatggatttttagtagggttgctgtattttggtgattcatacaagtactctattctggtagcttt

SEQ ID NO: 6457 - DNA, 379 bp, Zea mays
  Clone ID: LIB3118-033-P1-K1-E5
cccgctcgctatgggcaatgcacctacatacctgcaacaacagttgttgcaacaacagttgctgcaacaaattgtaccagctcttactcagctagctgtggcaaaccctgctgcctacttgcaacaactacttccattcaaccaactgactgtgtcgaactctgctgcgtacctacaacagcgacaacagttacttaatccactagcggtggctaacccattggtcgctgccttcctacagcagcaacaattgctgccatacaaccagttctctttgatgaaccctgccttgtcgtggcagcaacccatcgttggtggtgccatcttttagattacatatgagatgtactcgataatggtgccctcatagcggcatgtg

SEQ ID NO: 6458 - DNA, 351 bp, Zea mays
  Clone ID: LIB3118-033-P1-K1-E6
cccgctcgctatgggcaatgcacctacatacctgcaacaacagttgttgcaacaacagttgctgcaacaaattgtaccagctcttactcagctagctgtggcaaaccctgctgcctacttgcaacaactacttccattcaaccaactgactgtgtcgaactctgctgcgtacctacaacagcgacaacagttacttaatccactagcggtggctaacccattggtcgctgccttcctacagcagcaacaattgctgccatacaaccagttctctttgatgaaccctgccttgtcgtggcagcaacccatcggtggtggcgccatcttttagattacatatgagatgtactc

SEQ ID NO: 6459 - DNA, 364 bp, Zea mays
  Clone ID: LIB3118-033-P1-K1-E7
cggacgcgtgggcgcgccgccgccgccgccgccgccgcagccgcaacaatgccgtcgcacaagaccttgcggatcaagaagaagctggcgaagaagatgcgccagaaccgccccatcccctactggatccgcatgcgcactgacaataccatcaggtacaacgccaagcgcaggcactggcgccgcaccaagctcggcttctgagcgtcgggattggccggctgctgcgtcggaaggctagggtctaagagctatcttccttctgttttatcaatgtgtcagtttttctgtaagctagcaagtgttgctatgacgcttttattaagattctggtgggcggtgatgttaaaagaaaattggccct

SEQ ID NO: 6460 - DNA, 382 bp, Zea mays
  Clone ID: LIB3118-033-P1-K1-E8
cccacgcgtccggttggaatgctttacctttcccagttcgctcatagcctgcgtcagataaacttgtcttactgttcagtcaccgatgttgggctcctttccctttctagcatatccggcctgcagaacatgaccatcgtccatttagcgggtataacgcccaatggcttgacagcaactcttatggtttgcggtggtttgacgaaagtgaagcttcatgaagcattcaaatccatgatgcctcctcatacgataaaaaatgttgaggcacgtggctgtgttttccagtggatcgataaaccgttcaaggttgaggtggagccttgtgatgtatggaagcaacagtcacaagatgtgcttgtgcgatgagaatagaggagac

SEQ ID NO: 6461 - DNA, 341 bp, Zea mays
  Clone ID: LIB3118-033-P1-K1-E9
gcggtctcgttcaagggactgcagggagaggtctcgctcaagggaccgccggagggagcgctcacgctcaagggaccgcagaagggagcgctcacgctcaagggaccggaggggcagttcaccccatggcagaaggcatagagatcggtccaggtcacccaccagcaatgggaaccataaggcagactaggaagcgcttttatggacttgtcgttgattgcgtgaacaaaggaacttgtaacactacctataaactggtcagactgagacggttagcatggatttttagtagtgttgctgtattttggtggttcatacaagtactctattctgttagcttt

SEQ ID NO: 6462 - DNA, 300 bp, Zea mays
  Clone ID: LIB3118-033-P1-K1-F10
cccacgcgtccgcccacgcgtccgcccacgcgtccgggagattgttactcgccaaaagtgcgtctcttccccacgggatcgaaatatcccctgttcgctttgatttgatatacagatctttgctcctagctttttattcgcccgattcatcggctgtcgtctctgccattggcgtgcatacgcgtacagttggggatcgaacagccagctgctggacgaggatggatcggaggatgcatgcatggatcgagcagcggggtgtccaaatcgcgcgcctgggagcggctcacgggatgcgca

SEQ ID NO: 6463 - DNA, 243 bp, Zea mays
  Clone ID: LIB3118-033-P1-K1-F11
cccacgcgtccgcccacgcgtccgcccacgcgtccgagacaatacaattcctatgcacatacctcctggaagtatgcagatacaccaaaaaagtgaagttctggtcctggaaaccttgtagcaatcacaggcgtatgcaaatgttgaactatttccctgcatttgagctggaatcgtacgatgatgcatcttgtgaacatggggcactaataaatcgagacaaagaataatgtgttttccatc

SEQ ID NO: 6464 - DNA, 254 bp, Zea mays
  Clone ID: LIB3118-033-P1-K1-F12
gaaactatgtgctgtagtatagccgctggctagctagctagttgagtcatttagcggcgatgattgagtaataatgtgtcacgcatcaccatgggtggcagtgtcagtgtgagcaatgacctgaatgaacaattgaaatgaaaagaaaaaagtattgttccctaaaaaaaaagcaaacaaaagtacaaaaaaataaaaaaacaacaaaaaaaaaaaactaacgctacctgtagatcaaccaaataaaatatggg

SEQ ID NO: 6465 - DNA, 380 bp, Zea mays
  Clone ID: LIB3118-033-P1-K1-F3
cccacgcgtccggggcagacgagcgccatgtaccagccgctccggcaacagtgctgccagcagcagatgaggatgatggacgtgcagtccgtcgcgcagcagctgcagatgatgatgcagcttgagcgtgccgctgccgccagcagcagcctgtacgagccagctctgatgcagcagcagcagcagctgttggcagctcagggtctcaaccccatggccatgatgatggcccagaacatgccggacatgggtggactctaccagtaccagctgcccagctaccgcaccacctcctgtggcgtctccgctgccattccgccctactactgattcatgatatttgggaaatctcctctatccatccctctctatctatatct

SEQ ID NO: 6466 - DNA, 122 bp, Zea mays
  Clone ID: LIB3118-033-P1-K1-F4
accacgcgtacgaacacgcgttcgcccacgcgtgcgggagattgttactcgccaaaaatgcgtcttttccccacgggaacgaaatatcccctgttcgctttgatttgatataaagatctttg

SEQ ID NO: 6467 - DNA, 348 bp, Zea mays
  Clone ID: LIB3118-033-P1-K1-F5
tacgtttgttgctccactttcagggtcccgatcgctaggctagctgcagctcaggtgcttgtctgaggggctgcctcctcgttggcagcctgctgttggtgcatctggtgattaataatactactatgacagagccatatgctctgtgaagagtattagtagcagcgctcataaaagctacagttccatctattttctcagctatgtaaaacttccaaactgttcatgcttaaaactgagggttttcgcggtgtgagatgtgcatgtcgatgctgaggccattgctgcacattccacctattgaggccctactcaaattaagcctcgaaaaagctgatatcttttacg

SEQ ID NO: 6468 - DNA, 260 bp, Zea mays
  Clone ID: LIB3118-033-P1-K1-F8
gctacgagagagaggtgagggtactgatagcgctctgtgcgcgctggacagcggagtgcatgaactcacagcgactgctgggttcttgcggcatcatgacgaaggtcgtcggcacactatggcgaatgaccagctgccacacacctctgcccgtctattggttacaataagcaacttcgggatgtacctcacagcagagaactactacatgcgtttatacctgctttgcggatataaccatcaatagattggcatcggaa

SEQ ID NO: 6469 - DNA, 397 bp, Zea mays
  Clone ID: LIB3118-033-P1-K1-F9
agccgtcggcgacgccttgggagaaaaaaaacgtcatgtaccaattcggttctgtaacattgggggcatcatcatatgagggttattgacttgcaatccgttgcgcaaaaaatgtagatgatgatgcagcttgagcgtgccgttgtcgacagcagcagcctgtacaagccagctctgctgcataagtacaacagctgttggcagctcagggtctcaaccccatggtcatgatgatggcccaaaacatgccgggcatgggtggactctaccagttccagctgaacaactaccgtaccacctagtgtggggtcttcgctgccattccgccctactactgattcatgatatttggggaaagctcctctatacatccctctctatctatatctgtaataat

SEQ ID NO: 6470 - DNA, 380 bp, Zea mays
  Clone ID: LIB3118-033-P1-K1-G1
ccttccgttccggttccggatttccgggttggcacccacgcttccgcggccgcgtgggaaaaaaaaaaaaaaaataaaaaaaaaaaaaaaaaaaaaaaaaaggaaaaaaaaaaaaaaattataaaaaataaaaaacttaaatacacttgaatgcaaaaaaaatttttcttttttagtgacacctattttaaattcacttgtcttatttttggggggggcctttttgggggttccattttttttcccgctttttttcgacattttttttttttttttttggcccctattttatattagttggggggggtttttcaatgttgttttttttgaaaaaccccgtgtgtcccccttttttttttttttgggattttctctttttt

SEQ ID NO: 6471 - DNA, 365 bp, Zea mays
  unsure at all n locations
  Clone ID: LIB3118-033-P1-K1-G10
gtttccgctccatccccggcccccacttccccgttcgagagacgaaaaccgaccattcattccttcttccatggcgaggagggcgacggtgatggtgctcgcggcggcgctcgcggtcctcctgctggcgtcgtcgtcgtcgaagacggaccccgtggccagcgccgtccgggacgacccctcggcagcggcggcgggggccagcacttgttctcgcgacctgcagaatgatggatcggcggcggcggcggaagggaaggggaaggagaaggagtgcgagggcgccaacgacgaggacgagtgcatgatgaggcgcacgctggccgtgcacaccgactacatntacacccagcagcaccacggct

SEQ ID NO: 6472 - DNA, 386 bp, Zea mays
  Clone ID: LIB3118-033-P1-K1-G11
ctctgatgatgttcaaatcgcggagatagagattatgatagctgaacatacgagccgtgttatgggtattggtcaataagcaattttactgatgatggcaattgcagtagaaaaatatggaattcacacgttcagggcaaaaattagcgaatcaaatatggcatcgcttaagctcttcaggaagttgggcttcaaggatgcttcatacagtgtggtgttcatggaggtgactacttgagcacccgttgactctctgctgatgagatttcctgtgtccattggagactggtgtcttgtgacatgccccaagctaatttcatgcagactacacaagaagctaatgctgcatgtctgtactatgtgaccaaaatttactcaagctgata

SEQ ID NO: 6473 - DNA, 387 bp, Zea mays
  Clone ID: LIB3118-033-P1-K1-G12
cggacgcgtgggtggaatgggctttcccaaatacaggggtggtcttgtcttctgggctgacactgttggagcgccttacatacattcgaagctaagcaagtgggccgaaatgtatggtcccttcttcaaaccttcatcgtatttggaacaacgagctaaaagtggtgtaccattgagcgcaccaggaacatcacagcaaggttcggcgaggtcgcgcatgtgaggtgctgtccagcattgggaagaagaattcagaatacttgcggccgggatgagccataaacggctgcttcgcaaatcaaaaacacctccttgaatacaaataggaggcacagaaatgatgaaaaataaatggttttgcatagctgtaacagttttggtgccttg

SEQ ID NO: 6474 - DNA, 327 bp, Zea mays
  Clone ID: LIB3118-033-P1-K1-G2
aagccgcatggatagagataggcagagtcatcagaccatcatcattggacaccaagagatttaccatggttacgctacacggtgtatctacatgtgttggtaacgcaacagtttggcgttaacgatgacacgcttctatagattccgttcgtgcgacatacctttcatgaattatagagcgaatgcgcgataaccaaggtctcgaacgatatacggtaaaacatgcagccgaacgaagctgcatacattaatagcggttgcagccttaagaatctccagtcctactatcggtgcagtcatatgggcatacgcatagggcacaacaag

SEQ ID NO: 6475 - DNA, 256 bp, Zea mays
  Clone ID: LIB3118-033-P1-K1-G3
gatggatgagagatgctatggagaaaaggttcattcgggttgccaaaggttgacgtagtcgggggtgttcggctggggatgtctactgcgactttctgtggcatacagaaccttcttatcgatactcgtggagtacatgatgtattcaacattgccgctgctggctctgctactgcagctgcttttggccttatattgccagggtcaatgatgtggcgtgcaaggaatgcattggtgggatctgctcttggtgctg

SEQ ID NO: 6476 - DNA, 392 bp, Zea mays
  Clone ID: LIB3118-033-P1-K1-G4
cccacgcgtccgacaagctcctatagcttccctttttcccccataccttccatcaattatagcttcagtatgtgaaaacccagctcttcaaccatataggcttcaacaagcaatcgcagcaagcaacatacctttatcgcccttgttgtgtcaacaatcgccagccctatctttggtgcagtcattggtacaaaccatcagggcacaacagctgcagcaactcgtgctacctgtgatcaaccaagtagctctggcaaacctttctccctactctccgcaacaacaatttcttccattcaaccaactgtctacactgaaccctgctgcttatttgcagcaacaactattaccatttagccagctagctactgcctactctcaacaacaacaac

SEQ ID NO: 6477 - DNA, 381 bp, Zea mays
  Clone ID: LIB3118-033-P1-K1-G5
gccatttgcaccaacaaatccatcgcgaggccgtcgacaggagaattaatggcgtcgtcgtatagcagcagccaccgcccactcatcctcgcaggcgtcgtcctgctctccgtgctcgcggctgcacagcgccagcgccgggaccttctgcgtgccggagtgggccatccagcacaacccgctcgcgagctgccgctggtacgtgaccagccatacctgccgcatcgggccgcacctcccgtggccggagctgaagaggagatgctgccgggagctgacgcacatgcccgcgtactgccggagcacggcgctgagcatcctcatggacggcgcgatcccgccggtcccggacgcgcacatggagggccgtctagaggacct

SEQ ID NO: 6478 - DNA, 388 bp, Zea mays
  Clone ID: LIB3118-033-P1-K1-G6
gcaaattgcaccaagaaatccatcgagaggccgtcgacaggggaattaatggcgtcgtcgtctagcagcagccaccgccgcctcatcctcgcagccgccgtcctgctctccgtgctcgcggctgccagcgccagcgccgggacctcctgcgtgccggggtgggccatcccgcacaacccgctcccgagctgccgctggtacgtgaccagccggacctgcggcatcgggccgcgcctcccgtggccggagctgaagaggagatgctgccgggagctggcggacatcccggcgtactgccggtgcacggcgctgagcatcctcatggacggcgcgatcccgccgggcccggacgcgcagctggagggccgcctagaggacctgccgggct

SEQ ID NO: 6479 - DNA, 346 bp, Zea mays
  Clone ID: LIB3118-033-P1-K1-G7
cccacgcgtccggaccgactattatatgcacatggccagctttggctccagcaacaccacattatggggcgtgcggtgggctaccttccatatgttggctgggttacaattatcatgactgagaaaccatttattaagtacctgctgattggcgcactgggcttgctggtcataacgtcgaaagattagtgatgtcaaacttcagggccatgtagattttgctcttatggcgcaacagcagaaatcactggctttgtggcgtttgagagatgccgctatgttgcgccatgtatcaaacgagaagatttctttatctactgcgagggcacctgcccattgatcggat

SEQ ID NO: 6480 - DNA, 96 bp, Zea mays
  Clone ID: LIB3118-033-P1-K1-G8
gacgcttgcgccaacaaatcgaacgcgtggccgaagacagtacaattaatggggccgtcggatatgaaccgtcggctgacactcatcctgataggc

SEQ ID NO: 6481 - DNA, 106 bp, Zea mays
  Clone ID: LIB3118-033-P1-K1-H10
gatgtccctgtctccctgtgagtgtgtgcaaccggtaatagcagtagcactactgcagagaacctgaatgtatttttcatgctgccagcctgccagtctatgaact

SEQ ID NO: 6482 - DNA, 167 bp, Zea mays
  Clone ID: LIB3118-033-P1-K1-H11
gttgcccgtggctccctgggagtgtcttcaacccgtgatagcagtagggctgcggcctagcacttgtttgggtccttaatgcccccagccggtgaggctatgggctgaaataaaaaatgctacgcttacgagacggtgaagcggttcttccgttgtgcgaccgggcg

SEQ ID NO: 6483 - DNA, 391 bp, Zea mays
  Clone ID: LIB3118-033-P1-K1-H12
cggacgcgtgggtggaatgggctttcccaaatacaggggtggtcttgtcttctgggctgacactgttggagcgccttacatacattcgaagctaagcaagtgggccgaaatgtatggtcccttcttcaaaccttcatcgtatttggaacaacgagctaaaagtggggtaccattgagcgcaccaggaacatcacagcaaggttcggcgaggtcgcgcatgtgaggtgctgtccagcattgggaagaagaattcagaatacttgcggccgggatgagccatagacggctgcttcgcagatcaaaaacacctccttgaatacaaataggaggcacagaaatgatgaaaaataaatggttttgcatagctgtaacagttttggtgccttgaact

SEQ ID NO: 6484 - DNA, 355 bp, Zea mays
  Clone ID: LIB3118-033-P1-K1-H2
tagcaacatacacagcacatttgtgtaccaacaatggcagccaaaatactgagggtgctcatgctatttgcggtttgtgaaagcgctgctacctataccatcatgccgctttgctcacaagctcctatagcttccgttcgagcgcagacgccctacacgctggtgtcattaaacgtgtggaaacccaattcttcaaccttatatgatccaacacgcaatcgcagctggcatcttacctttatcacccttgttccttcaacaatcatcagccctattacagcagttatgttgggtggctttatgggcacaaaacattatggcgcaacaactacaacaacttgtggggccgtccctt

SEQ ID NO: 6485 - DNA, 352 bp, Zea mays
  Clone ID: LIB3118-033-P1-K1-H4
cagacgcctgagaggaatggacttttccaaatacaggggcggacttgtcatgggggatgacactagtgtggggcctcacatacattcaacgctaaacacgtgaaccagaaagtatggtacgttatataaacctttatcgcatttggaacaaccaattaaaagcggtataccatttaccgcaccaggaacataacatcatggctcagcaagggcacgcatttgaggtgcctgccagcattggaaagaataattcaaaattctttccgtactgatgagacctacacggttgtttattaaatcaaaaacacacacttgactacacatattaggcacagaaacgactaaaaacaaa

SEQ ID NO: 6486 - DNA, 376 bp, Zea mays
  Clone ID: LIB3118-033-P1-K1-H5
gacgcgtgcggcaacgtcacgcacgcgttcgcgaagatcctacgcgacgagggcccgtcggagctgtaccgtgggctgacacccaacctgatcggcgtggggccgtacgcggactgtaacttctacccctacgagacgctgaagcggttctaccgttatgcgaccgggcaagttcactgcgcggacgtgggccccgaggcggcgctgctgaaaaaccctggggtggcgcaattacagctctggcacgttaccctagatgtggccctcaagcaaatgcaagtgggcgctgacggctggaggttcgtataccagaacgtccttgactgtatatagtgcctccccatgaaggagggcatcaaccgcctgtaccgtggtg

SEQ ID NO: 6487 - DNA, 382 bp, Zea mays
  unsure at all n locations
  Clone ID: LIB3118-033-P1-K1-H6
gacgcgtacggcaacgtcgcgcacgcgttcgtgaagatcctacgcgacgagggcccgtcggagctgtaccgtgggctgacacccagcctgatcggcgtggggccggacgcggactgtcacttctacgcctacgagacgctgaagcggttctaccgttgtgcgaccgggcgagtgtactgcgcggacgtgggcccagaggcgacgctgctgataaaactccggggggacgcaattacagctcgggcacgtttccgcttgtgtggcccgaagcaaatgcaagtgggccctgtcggctggaggttagtataccataacgtncttcaaggtatatagtgcatccccatgaaggagggcaccaaccgcctgtaccgaggtctttgcc

SEQ ID NO: 6488 - DNA, 326 bp, Zea mays
  Clone ID: LIB3118-033-P1-K1-H7
gaaaaacgtgcacgtagtatcttgcagtcgctggtacacagatagatactgaagtgttgcaattaattccggtctgtcagttacctggctacgatccgtgcagcgaccattacgtcagatcttacctcaatagcgtcgaggtgcaagaggccctgcacgctcggatcagaaactggtcagcctgcatgtaagttcatctgctgcctttggttcctctactctgcaatctgcattctcactcaccctactgagactattcttgttttttttctctctcccccgaatgtctaatgacttaaagttgatttatgctatttatgcttttc

SEQ ID NO: 6489 - DNA, 367 bp, Zea mays
  Clone ID: LIB3118-033-P1-K1-H8
tagcaacatagaaagcacaatagtgtaccaacaatggcagccaaaatattttgcctccttatgctccttggtctttctgcaagtgctgctaccgcgaccattttcccgcaatgctcacaagctcctatagcttcccttcttcccccgtacctctcaccagcggtgtcttcggtatgtgaaaacccaattcttcaaccctataggatccaacaggcaatcgcagctggcatcttacctttatcacccttgttcctccaacaatcatcagccctattacagcagttacctttggtgcatttattggcacaaaacatcagggcacaacaactacaacaacttgtgctagcaaaccttgctgcctactctc

SEQ ID NO: 6490 - DNA, 318 bp, Zea mays
  unsure at all n locations
  Clone ID: LIB3118-033-P1-K1-H9
cggcaacacagaaagcacaagagcgcaccaacaagggcagccaaanaagggggggcgttatgctccttggtcatactgcaagtgctgctaccgcgaccatttcccgcaatgctacaagctcctaagcgttccttgttgcccggacctattaccagcggagtcttcggaatgtgaaaacccaattcttcaaccctataggatccaacaggcaatcggagctgtcatcttacccttatcacccttggtcctacaacaatcatcagccctattacagcagttagccttgggggcatttattggcacaaaacattagggcac

SEQ ID NO: 6491 - DNA, 428 bp, Zea mays
  unsure at all n locations
  Clone ID: LIB3118-034-P1-K1-A1
acccttccgccaacccgtccggcgtttcctgagccagcctttccatgtccgctggagagtttttaacaagggtgcctccaagggaaagtatgtgggagctgaaagaaaagtgggaaagaggtttccaggggtggttttgggatgggcaggtatgatgaacctcctgagcagtcattctacatggttggaggcattgaggaagtcattgctaaggccgagaaaatcgccaaggagtctgcttcataaggcggcttcttgcttgttgaatcctgtacaatcaagttccatttttggatttaagcgattgtttatgcttttcgcagttaggcagcacgagttggaggtccatctcctgctgagatgnctngttttctctttgttggtcaaacactttacacccaaataagcaactgcagtgacattaattt

SEQ ID NO: 6492 - DNA, 460 bp, Zea mays
  Clone ID: LIB3118-034-P1-K1-A10
gccggtacgccggctgcagccaccgctcagtaattgctgggtcgaccaatcgtccgaccacgcgtccgggaagcattagaatccgttaccgccgagcagaagtacctaaaagcacgcgaagctcgtcaccgacacaccaatgagagcaccagaaagcgtgtcatgttctatacgatggcggagtacctggctttcatggctgctagcgcgttgcaggtcctctacatccgccgcttgttcagtaaaaatgtgggatacaacagagtgtaggatagaaatctacttcaaaggcgacggtggaagcaccttatatggtcggaacgggaaacattctctgccagtttgacaaattgtagttctgcaccctcttttttttttgttagtttataagaaacactttaatttatcatcatgtacttttagcaaccaactgggtattgtaaagtgcaattggtggctg

SEQ ID NO: 6493 - DNA, 309 bp, Zea mays
  Clone ID: LIB3118-034-P1-K1-A12
cttgaggagaaggggagagggtctgagctggagtttcgggtggtaatgcagcagggtgcagtgaggccaggattgatgacagctgtgccatatgatatgctggattgtggtgaggggagtggctgctatgtttttctgcagaaggctgacgaggagcttgacagacagatatgatctccctggagggtgattcatgattgtggtgcgaaaaaaaagtcttaattatgctgtttgcacacaatttaaagtgatgactgctgttttttttacctgctactgtgctacataatagtagtgtcctcctttttt

SEQ ID NO: 6494 - DNA, 135 bp, Zea mays
  Clone ID: LIB3118-034-P1-K1-A2
cccacgtgatgccaccctggaccgcacgcgtgtcgttttatagcaggagaggggcgccccctttttttttttttttgtcctcctcgtcgtctgtgcgtatcactagagaaagatggcctggttcagtcacaggct

SEQ ID NO: 6495 - DNA, 68 bp, Zea mays
  Clone ID: LIB3118-034-P1-K1-A4
tggtccaacccttccgcccactcgtccgcccacgcgttcggaggaagtctgccaggggtaccacacca

SEQ ID NO: 6496 - DNA, 359 bp, Zea mays
  Clone ID: LIB3118-034-P1-K1-A5
cccacgcgtccggtttttgaacggagaagtcgtacccatgaccattcatgttggtactggggagaagctttctgtttttgatgcggtcatgaaatacaaaatctgaggccatgctactataattcctcgctggcgcttaatatggaagcggcagttctcgtgatcgatctgataacggcccgtgctccttggagattaagctcgtatttgccaagagctttgagcgtatccacagaaccaacttgggggggcttgggaatcattcctctgagctccaaagctggtgaggatgctgattcacttggcctcactggacatgagcggtacagcatctatctccctaccaacctcagggagat

SEQ ID NO: 6497 - DNA, 424 bp, Zea mays
  Clone ID: LIB3118-034-P1-K1-A6
tgctcacttgcaaaagaatcaagcatgtggctatctcttgggggttttcaaggaaagggacccgatgattcttaccagtacaatactcatgtattaattgatgacactggaaaagttaggagctcatatcgaaaaatacatttgtttgatgttgatgtacctggcaatatggtgtacaaggaaagtcgtttcacagccgcaggtgatactattgttgctgtggatagcccttttggacggttggggcttactgtttgctatgatttgagattcccagagctttatcaaattttgcgttttaagcatcaagcacaggtattactagtgccatctgcattcacaaagataacgggagaggcacactgggaaattctcctccgagctcgtgcaattgagacacaatgttatgttattgctgctgctc

SEQ ID NO: 6498 - DNA, 341 bp, Zea mays
  Clone ID: LIB3118-034-P1-K1-A7
ttggcggggggacccacgcgtccgggacaagatgtggacctggaccgcgcgtggggcgcccaacgccagcagagatgggcgtcctcccacggcaggctgagcctcctcgccgacagcgcgtagcacttggcgccgctggcctggtccagccacagcctgcaccagccgtcgccgtcgacgtcgacggggacgccgacgacgccggcgtctcaaagcgcaaggtacgcgttctttctcggcccacggtcccggccggcggcatgcagatgcagggcgatggcgcggcggtgatccttcgggacgaagcggccccagacgtaatcggagtcggcggcggcgcg

SEQ ID NO: 6499 - DNA, 344 bp, Zea mays
  Clone ID: LIB3118-034-P1-K1-A8
caggctgaccggggcgcataaatcagacaagccagtgacggtcgcggaagagaaggagaggttgatagctgtgggcaatgccgcagcagatgccatcaacgaggcgaggcatggagagggtaagtaggtggtagaggagagagacgagtaagttgatggtgcatcatctcagactcgtttgctggttcttggacatagaccaagaaactcacctagtcacctgtagagttggttggaataaggagtggagtgaggttcagaacttcttttttaaaactctgtttgtggtttatcggtgttgatgatgacatgcttagtgatgttagaataaagttttttctctc

SEQ ID NO: 6500 - DNA, 143 bp, Zea mays
  Clone ID: LIB3118-034-P1-K1-A9
cacaggatgtggcaaacaatgtcgccttcttacaacaacaacaattgctgccatttaaccaacttgctttgacgaatcctaccaccttattgcagcagcccaccattggtggtgccatcttctagatttttttatccttttta

SEQ ID NO: 6501 - DNA, 424 bp, Zea mays
  Clone ID: LIB3118-034-P1-K1-B10
gcaagttacattattacacagttcctcccaccagttacttcaatgggcttcgaacacccagctgtgcaagcctataagctacaacaagcaattgcggcgagcgtcttacaacaaccaatttcccagttgcaacaacaatccttggcacatctaacaatacaaaccatcgcagcgcaacagcaacaacaattcctaccagcactgagccacctagccatggtgaaccctgccgcctacttgcaacagcagttgcttgcatcaaacccacttgctctggcaaacgtagttgcaaaccagccacaacaacagctgcaacagtttctgccagcgctcagtcaactagccatggtgaaccctgccgtctacctacaacagcaacaactgcttttatctagcccgctcgctgtgggcaatgcacctacat

SEQ ID NO: 6502 - DNA, 426 bp, Zea mays
  Clone ID: LIB3118-034-P1-K1-B11
ccaagttccattattacacagttcctcccaccagttacttcaatgggcttcgaacacccagctgtgcaagcctataggctacaacaagcaattgcggcgagcgtcttacaacaaccaatttcccagttgcaacaacaatccttggcacatctaacaatacaaaccatcgcaacgcaacagcaacaacaattcctaccagcactgagccacctagccatggtgaaccctgccgcctacttgcaacagcagttgcttgcatcaaacccacttgctctggcaaacgtagttgcaaaccagccacaacaacagctgcaacagtttctgccagcgctcagtcaactagccatggtgaaccctgccgcctacctacaacagcaacaactgctttcatctagcccgctcgctgtgggcaatgcacctacatac

SEQ ID NO: 6503 - DNA, 317 bp, Zea mays
  Clone ID: LIB3118-034-P1-K1-B12
ctaaccttccagacccgaccgcagcagcccggggcaacaagcgaaccggcggcggcgatggggatcggtgagcacttcgagggcgtcaagcagcactgggcgagcaacttcgccttcctcgactacttcaagaaggtctacggccgcaccgagcccctccccaagtggtccgacgccgacgtcgacgagttcatcgcctccgacccggtctacgggccccagctcaaggccctgcgggagtcgaggaagttcgcgctcgccggggccctcgtcggcgccgcccacctcggcggcgtcgcgctcaagtactccaaggc

SEQ ID NO: 6504 - DNA, 287 bp, Zea mays
  Clone ID: LIB3118-034-P1-K1-B3
cccacgcgtccgcggacgcgtgcgttagaaaaagggcaggtgaatttagcagggagtctgtgcagcacaaaggtgcatcaatcaacgcgtgtgtgacggacaggacacacatgattgatgaagctcgtgagcatttacagaagagcatgatgatctgactgggatgatgaattatgagggcaactctaggggatgcttacttgagggacaatggccctgtacaactaatggaggatgctatatctttaaggccctagcttgatcttatactggaatagaaagaggtg

SEQ ID NO: 6505 - DNA, 342 bp, Zea mays
  Clone ID: LIB3118-034-P1-K1-B4
cttgaggagaaggggagagggtctgagctggagtttcgggtggtaatgcagcagggtgcagtgaggccaggattgatgacagctgtgccatatgatatgctggattggggtgaggggagtggctgggatgtttttctgaagaaggctgacgaggagcttgacagacagatatgaactccctggatggtgattcatgattgtggttcgaaaaaaaagtcttaattatgctgtaggcacacaatttaaagtgatgactgctgttttttttacctgctactgtgctacatactagcagtcacctcctttcttaaaattgctatgcagtctcttgccatttatact

SEQ ID NO: 6506 - DNA, 387 bp, Zea mays
  Clone ID: LIB3118-034-P1-K1-B5
cgaggagaatacaactggtggaatcttgctccctacgactgctcattccatacctgaaggtggcgaggtagttgctgttggagaaggaaggataattggggataagaaagctgctgtcagcattcaagttggagctcaagttgtgtattctaagtacgctgcaaccgaggtcgcgttgaacgatcacagccatctggctctcatagaggacgtcgccataggtatctctgacaccgatgtcgtgaaagacatgaatgctctgaaccaccgtgttctaatcaaggttgctgaagctgaacacaaaactccaggtggcctactgtttacgggctctgtcaaggagacgccatgtatcgtgacggtcatctacaataagaacaacctttt

SEQ ID NO: 6507 - DNA, 396 bp, Zea mays
  Clone ID: LIB3118-034-P1-K1-B6
ccaagttccattattacacagttcctcccaccagttacttcaatgggcttcgaacacccagctgtgcaagcctataggctacaacaagcaattgcggcgagcgtcttacaacaaccaatttcccagttgcaacaacaatccttggcacatctaacaatacaaaccatcgcaacgcaacagcaacaacaattcctaccagcactgagccacctagccatggtgaaccctgccgcctacttgcaacagcagttgcttgcatcaaacccacttgctctggcaaacgtagttgcaaaccagccacaacaacagctgcaacagtttttgccagcgctcagtcaactagccatggtgaacccttgcgcctacctacaacagaaacaactggttttatttatc

SEQ ID NO: 6508 - DNA, 208 bp, Zea mays
  Clone ID: LIB3118-034-P1-K1-B8
cccacgcgtccgcccacgcgtgcgttagaaaaaggacagatgaaatcagcagggggtatgtgctgcaaagggtacatcaatcaaagcgtgtgtgacgagcaagacacacatgatcgctacgctgtgagcatctacagaagagcagatgatctgactgggatgaataataaaggaggagcaacaccaggggatgcttacttgagggaca

SEQ ID NO: 6509 - DNA, 302 bp, Zea mays
  Clone ID: LIB3118-034-P1-K1-B9
cccacgcgtccgcccacgcgtgggtttgaaaaagggcaggtgaaatttgcagggggtctgtgcatgacaaagggtcatccaacaaaccggtttgtcggccagacacccatgtttgtgacagctttacctttacaaaataccaggtgactgactttgagggatgtattaagggggcaactccaggggatgcattacttgtgggacaactgccctgttccactaatggatgatgctatatctttaaggccctaccttgatcttatactgggatagaaagaggtgaggggagttacgggaggaat

SEQ ID NO: 6510 - DNA, 208 bp, Zea mays
  Clone ID: LIB3118-034-P1-K1-C1
cccactcatgcagttaccattaagctggttagatgccctgtaactaatgctgggataccttaattacactgagctttgcacggattgttcgatgttctcttgacctcttagggccctgccacggatacatataaggaaaacgcggagcctgatgagcgtgccaagtagtcggtgagcatctacgagttgctgactcctgctgaaggag

SEQ ID NO: 6511 - DNA, 427 bp, Zea mays
  Clone ID: LIB3118-034-P1-K1-C2
gtggtttgaagtccattgaggagttccatcatattgagattcctcctaatgctccaccggcaattgacaaagagatgctagaggatggcagcaaaccaagtgaacccgctcaggaaaaccgggaggagcaaatgtctgacgcgaacgacccacaaggaagcaagccagccaccgtcagcacacagaacgacaagttgtacaccgccgagggcatactcgaccctcgcaagaggaaagcagagaagaaacggcgcaaggcgaacaggttcagtgtgctgaacgacatggacgcggactacgatttcaaggtggattaccagatggaggacgccgcggatggtgaagacgaagacgctggggatgaagccaaggaggataatgagccgatgactggcgtcgacgattcgtgaaattttggccccttcgt

SEQ ID NO: 6512 - DNA, 125 bp, Zea mays
  Clone ID: LIB3118-034-P1-K1-C3
aggagggaaaaaggggcggccgccaagggccggcggccaaggaagaagtcgttgacggcgtcaagaccgggccgctcatgcccttcaagcccctgatcgggcgccctaatgaagggggggtcctc

SEQ ID NO: 6513 - DNA, 411 bp, Zea mays
  Clone ID: LIB3118-034-P1-K1-C4
aaaccgacccttacatacactgatgctgacacatacaaacagacacacgcacatactgagagacacaagcatgtcgacacacacatacgaccataatatataggaggcatacacactaaaacgaacacatgacatacaggaaattaaactaagtttaaattgcttattttccacgagacgaaacacgagcacggaaaatggcaagacaagagagcgacaccaccaaacatgcatgcatgggtatgctagttcacatgacactgcacgagggcccgccgccctgcctgggttggtggtggtggcagccatgctgctgctgctgcgcgcgctggcagtcggcgtcggcgtcgtcctcggtgccgatggaacagccaagctcgcactggtcgccaccagcgtcggcgtaagcgg

SEQ ID NO: 6514 - DNA, 341 bp, Zea mays
  unsure at all n locations
  Clone ID: LIB3118-034-P1-K1-C5
gcccaactagcaccatagaaggcacattagtgtaccaacaatggcagccaaaatattttgcctccttatgctccttggtatttctgcaagtgctgctacggcgaccattttcccgcaatgctcacaggctcctatagcttcccttcttcccccgtccctctcaccagcggtgtcttcggtatgtgaaaccccaattcttcaaccctacaggatccaacaggcaatcgcagctggcatcttacctttatcacccttgttcctccaacaatcatcagccctattacagcaggtacctttggttgcattattggcacaaaacatcanggcacaacaactacaac

SEQ ID NO: 6515 - DNA, 165 bp, Zea mays
  Clone ID: LIB3118-034-P1-K1-C6
aatatttctcctattgatgtgattacacacgttccaatactatgtgagggatctaatgttccttacatatatgttccatcaaaagaggatcttgcgaccgcgggaaccactaagaggccaacttgttgcgttctggttctgaccaaaccaaacaagggggagctc

SEQ ID NO: 6516 - DNA, 393 bp, Zea mays
  Clone ID: LIB3118-034-P1-K1-C7
gaaaatgatgaagttttcattaagctggttagtctccctgtaattaatgctttgataccttaagtttgctgagctttgcacgggttcttcgatgatcttttgctctcttagggctctgacacggataagaagaaggaaaatgctgtgcgtgatgagcgtgccaagaagtcgctgagcatcaacgagttcctgaaacctgctgaaggagaaaggtactaccgcggccgaggccgtggaaggggccgtggggatcgtagtggttttagaggcggatacagagggagatacagtcgcagcccagctgctgctcctccatgcattgaagatcaagctgagttcccaagactcggtggcaagtgtacggcccccagctgctgctgtcaccgagcgttg

SEQ ID NO: 6517 - DNA, 259 bp, Zea mays
  Clone ID: LIB3118-034-P1-K1-C8
catctgcgtacacggtctccctcttcctgtcagtagtagagtgagagtgaggcagcgagtgtgagacaaggggaaatggggaagggagcgcaagggagcgatgcggtggcggctggcggcgaggtggaggagatcatggcggcgtggctggttgccaagaacaccctcaagatcatgccctttaagctcccgtgcgcccgcccttatgatgtccgcctcctcatgaaagcagtggggatttgcagcagcgatgtgcact

SEQ ID NO: 6518 - DNA, 417 bp, Zea mays
  Clone ID: LIB3118-034-P1-K1-C9
cggacgcgtgggttcctcccatctcccaagacctcctcagacccgagaagcgcagctgcggccatggacgccaccggcactggagctggagggaaggcgaagaagggagcggccggtcgcaaggccggcgggccgaggaagaagtcggtgacgaggtccgtgaaggccgggctccagttccccgtcggccgcatcgggcgctacctcaagaagggccgctacgcgcagcgcgtcggcagcggtgcccccgtctacctcgcggccgtcctggagtacctcgccgctgaggtcctggagctcgccggcaacgctgtcaaggacaacaagaagacgcgcatcgtcccgcgccacgtgctgctggcgatccgcaacgacgaggagctcggaagctgctgacccgcgtgcccatctgccacg

SEQ ID NO: 6519 - DNA, 390 bp, Zea mays
  Clone ID: LIB3118-034-P1-K1-D10
tagccatgaacaagttcgactgggaccacccgatgcacctgcagccgacgagcccgacggccgtgaagcaggtgagctgcgtgtgggacgcgtacgaggccaccaagggcgcccacgggctgtgcatcctgaccgagtgggacgagttcaagaccctggactaccagaagatcttcgacaacatgcagaagcccgccttcgtcttcgacggccgcaacatcgtcgactccgagaagctgagggagatcggcttcatcgtctactccatcggcaagccgctcgacgcctggctcaaggacatgcccgcggtcgcctaatcccacccccctcacccatggattggattccgggaaggaagaggagagaagctggttgaccgttctttattac

SEQ ID NO: 6520 - DNA, 136 bp, Zea mays
  Clone ID: LIB3118-034-P1-K1-D11
atcaggcctgggtacatataaccgtacagacgattgcaccgcatcatcagcagcaaaagtttgtgccataactgagccacctagccgtggtgaaccctgtcacctacttgcaccagaagtggttggattccaacca

SEQ ID NO: 6521 - DNA, 421 bp, Zea mays
  Clone ID: LIB3118-034-P1-K1-D12
attggaccaactagcaacatagaaagcacaatagtgtaccaacaatggcaggcaaaatattttgcctccttatgctccttggtctttctgcaagtgctgctacggcgaccattttcccgcaatgctcacaagctcctatagcttcccttcttcccccgtacctctcaccagtgttgtcttcagtatgtgaaaacccaattcttcaaccctacaggatccaacatgcaattgcatcaggcatcttacctttatcacccttgttcctccaacaatcatcagccctattacagcagttacctttggtgcatttattggcacaaaacatcagggcacaacaactcgtgctagcaaaccttgctgcctactctcagcaacaacagttacctttggtgcatttgttggcacaaaacatcagggcaca

SEQ ID NO: 6522 - DNA, 379 bp, Zea mays
  Clone ID: LIB3118-034-P1-K1-D3
atgcaaaatgctgttattgatgaaatatatcgctactactgggtgaggcgttgcaaatggtttaaccactactccttgccagattacctcgctaagggcaatatatctataatattgtcggaatcaatggcgttcttgtacagatcgtagacactggtgattatggtgtcttacaggccgaggaacgtatggaaatggaaaccaagaggctggcttactatctggaaatttcaagtggggatagctacccgctctgtttgcaggctggtaatgctccttggatggaaacatatgtcagctatgtgacagagaaacaaatcggtggtcagctgatgcttgaaacttacaagattgcagaggaggaactgctcggcagatg

SEQ ID NO: 6523 - DNA, 253 bp, Zea mays
  Clone ID: LIB3118-034-P1-K1-D4
cttcggccaagccgtcccccaacccgtccgtcaccccgttcggccacgcgtccgcccacggggtcctggtgccctatgtccaactcgctttgacagacccagcggtctgctaccaacaacacatgattggtggtgccctcttttagattgctcatttggtggacctcaatcataaagtgctctcgatgatgcatgtgggcaaccacaaatgcgcacgtgcatttgcagatcttaacgtgaaaaaaaaaagaag

SEQ ID NO: 6524 - DNA, 121 bp, Zea mays
  Clone ID: LIB3118-034-P1-K1-D5
agagggcaccaccaatgatgggttatagttcaatattaaagttttttgtctgatgtttgtggcttccagaaataagaagttcattttctggacttactaatcatcaagacgaagtacttat

SEQ ID NO: 6525 - DNA, 212 bp, Zea mays
  Clone ID: LIB3118-034-P1-K1-D6
tcggtttgaacaaccaggtggggcaggcttttaggttccaccaggcattgggggggggggtttaccacaaccaattttccaggtggaacaacaattcttggcacatttaacaatacaaaccattggaacgcaacaagaacaacaattcctaccaggactgggccaacttggcatgggggaccctggcggcttcttggaacaagaggtggttg

SEQ ID NO: 6526 - DNA, 410 bp, Zea mays
  Clone ID: LIB3118-034-P1-K1-D8
atccaaaatgctgtgactgatgaaatatatcgctactactcgctcaggcgtggcaaatggtttaaccactattctttgccagattaccttgctaagggcaatatatctataatatcgtcggaatcaatggcgttcttgtacagatcgtagacactgctgattatggagccttacaggccgaggaacgtatggaaatggaaaccgagaggctggcttactatctggaaatttcaagtggggatagctacccgctctgcttgaggctggtaatgcatcttggatggaaacatatgtcagctatgtgacagagaaacaaatcggtggtcagctgatgcttgaaacttacaagattgcagaggaggaactgctcatcagatgcatttgcttgacacttggtttaccgggcagca

SEQ ID NO: 6527 - DNA, 78 bp, Zea mays
  Clone ID: LIB3118-034-P1-K1-D9
atcccaaatgcggggaaggatgaaatatatggctgcgacccagggatacgtgccacatcggaaatggcactaatcctt

SEQ ID NO: 6528 - DNA, 326 bp, Zea mays
  Clone ID: LIB3118-034-P1-K1-E1
gccgcggcgttattggggggtcgaccgactcgtgcgcacacgcttgcgggcacgcgtgctatgacgcgtcgggggcagtgtccatgcgtcagactactagattggcgctattagtcttctacgatatccacggatgctaaagcgcgcagtatctatgctactccgccagatgaaacaggatgctgcatggaggcgcccgacgcgccgtcatggtggcgtggacatcccatacgcgaccccgacggagtcgcgctggcagacaccgccatcgtgggctgtgacgaccgctgaggtggaggcggcggaggagaagaggctgaggatca

SEQ ID NO: 6529 - DNA, 309 bp, Zea mays
  Clone ID: LIB3118-034-P1-K1-E10
ctactatactatactctaggaagcaaggacaccaccgccatggcagccaagatgcttgcattgttcgctctcctagctctttgtgcaagcgccactagtgcgacccatattccagggcacttgccaccagtcatgccattgggtaccatgaacccatgcatgcagtactgcatgatgcaacaagggcttgccagcttgatggcgtgtccgtccctgatgctgcagcaactggtggccttaccgcttcagacgatgccagtgatgatgccacaaatgatgacgcctaacatgatgtcaccattgatgatg

SEQ ID NO: 6530 - DNA, 161 bp, Zea mays
  Clone ID: LIB3118-034-P1-K1-E12
cccacgcgtccgcccacgcgtccgagctcgtggtaataagggaagcttgatcatctttccttatggcggtgatgaagagcagcacaatggtcgcccttctattggctgttgccattctgtcctcactgtctcaatcctacaaagccgcggctgcatgggaa

SEQ ID NO: 6531 - DNA, 188 bp, Zea mays
  Clone ID: LIB3118-034-P1-K1-E2
ccactgcgcatcaaggaccacattgggcgactgcatagcgtaacacatagtattcggatctagttacaacatgtccggaccctaagatgactgggcttccgccctcagcaagttagagagcgttttgccctgggtgcgtgccttctacagctactttggtacggagactattctggaggccaaaccca

SEQ ID NO: 6532 - DNA, 383 bp, Zea mays
  Clone ID: LIB3118-034-P1-K1-E3
acaggaaatgtagtccttgaaggaagcaattgatatcaataactctgttcctcaaggattgagcagttctatatttacaaagaggccagatattatttttaagtggctcgggccccatggtagtgattgtggtctagggaatgtgaacatacctactaatggtgctgaaattggtggagcatttggtggagaaaaagcaactggtggtggacgagaagcaggtagtgattcctggaagcagtacatgaggagggcgacttgtacaatcaactatgggagcgagctacctctagcccagggaatcatatttggttaatcctgcagaaatgttgcgcgtggatctcagtgttttctgcagacgtgaatgccgtatggaaagaact

SEQ ID NO: 6533 - DNA, 420 bp, Zea mays
  Clone ID: LIB3118-034-P1-K1-E6
ccaacctggtaccctacccgaggatccacttcatgctttcttcgtacgctccagtcatctctgctgagaaggcctaccacagcgcagctctctgtggctgagatcaccaacagcgccttcgagccatattgcatgatggccaagtgcgacccacgccatggcaagtacatggcctgctgcctcatgtaccgtggtgatgtgggccccaaggatgtgaatgctgctgtggccaccatcaagaccaaacgcaccatccagttcgtggattggtgcccgactggcttcaagtgcggcatcaactaccaggcccctagcgttgtgcctggtggcgacctggccaaggtgcagcgtgccgtgtgcataatctccaactccaccagtgttgtggaggtgttctcccgcatcgaccacaagttcgac

SEQ ID NO: 6534 - DNA, 281 bp, Zea mays
  Clone ID: LIB3118-034-P1-K1-E7
cccacgcgttcgtccacgcgtatcgcggacgcgtgtggcgagttcctcgcgtaacacatagtattcggatctagttactacatatccgggccctaagacgactggtgtttccgccctcagcaagtttaagtacgttgttgcgctgggtgcgtgccgcgttcggttatttttgtatcgaaccggatcaggatgccaaactttaaacgcacattattttgccccattgtggcctatcccgaccgctgagcttaggcccgaccgcgtacatatctttatgatca

SEQ ID NO: 6535 - DNA, 315 bp, Zea mays
  Clone ID: LIB3118-034-P1-K1-E8
atgaaatttcagtccttgaaggaagcaattgaaatcaataactctgttcctcaaggattgagcagttctatatttacaaagaggccagatattatttttaagtggctcgggccccatggtagtgattgtggtatagtgaatgtgaacatacctactaatggtgctgaaattggtggagcatttggtggagaaaaagcaactggtggtggacgagaagcatggagtgattcctggaagcagtacatgaggagggcgacttgtacaatcaactatgggagcgagctacctttagcccagggaattaattttggttaa

SEQ ID NO: 6536 - DNA, 157 bp, Zea mays
  Clone ID: LIB3118-034-P1-K1-F1
gaggagagggatgatatattgttacaattcgattgcttggacagcgcatttcggcaaggatctgtaacggagcgccccccgcgagggccttcggcgggggtgccgctaatattagaagaacctcggggccgtggcccaagggctgagctcgtgggtt

SEQ ID NO: 6537 - DNA, 403 bp, Zea mays
  Clone ID: LIB3118-034-P1-K1-F10
tcgcggacgcgtgggggactctttgtgaagacaatgacccattggatgtgttggtcctgatgcaggagcctgttattcctggttcgttcctgcgagcaagagcaatcggccttatgcccatgattgaccagggtgaaaaggatgacaagataatagcagtctgtgctgatgatcctgaatatcgtcactacaacgacatcagtgagctgtctcctcatcgcctgcaagagatcaagcggttctttgaagattataagaagaatgagaatatagaggttgctgtcgatgcattcttgcctgcgaccacagcttgagaggccactcagtactccatggatctgtatgcgcagtatattttgcaaagcttgtggcagtagattggaagcaactatttatctgggcg

SEQ ID NO: 6538 - DNA, 365 bp, Zea mays
  Clone ID: LIB3118-034-P1-K1-F11
tcgcggacgcgtgggggactctttgtgaagacaatgacccattggatgtgttggtgctgatgcaggagcctgttattcctggttcgttcctgcgagcaagagcaatcggccttatgcccatgattgaccagggtgaaaaggatgacaagataatagcagtctgtgctgatgatcctgaatatcgtcactacaacgacatcagtgagctgtctcctcatcgcctgcaagagatcaagcggttctttgaagattataagaagaatgagaataaagaggttgctgtcgatgcattcttgcctgcgaccacaagtggagagggcattcagtactccatggatctgtatgcgcagtatattttgcaaagc

SEQ ID NO: 6539 - DNA, 290 bp, Zea mays
  Clone ID: LIB3118-034-P1-K1-F12
cggacgcgtgggggactctttgtgaagacaatgacccattggatgtgttggtgctgctacagcagcctgttattcgttcttctctcctgccagcaagagcattccgtcttattaccatatttcaccgtggataagatgacgagatgataatagcatgctctgctgatcctgaatatcatcaccaccacaaccatcatttgctgccttctcatcacctgctggaagtgaagacgcccttcttcgattattataagaaggatgattataacgttgttgctgtcgcagcattg

SEQ ID NO: 6540 - DNA, 416 bp, Zea mays
  unsure at all n locations
  Clone ID: LIB3118-034-P1-K1-F2
acgaaaaagagcaaccatgtcacgaggaagcttgagaagcgcaaggagggacgtacccttgacccacacattgaggagcaatttgncagtggacggttgctggcatgcatttcttcccgccctggacagtgtggccgagctgatgggtacatccctgaagngaaagagcttgagttctacatgaagaagctacacaggaagaagggcaagagcgcctgagctttagagcattctcatggattgccttgcaccgaaatgtgtgtcctgatgagtacactttttttggttagtcgtctaaagttcagagcgttatgccatgttttcagtcctgattagtacactgtttttaaaaccgatggagctctaggccaatgaatggataatttctgctgttgccctatgcggtgatgtttatt

SEQ ID NO: 6541 - DNA, 199 bp, Zea mays
  Clone ID: LIB3118-034-P1-K1-F4
cttcccggaccccttggccggccccttggttggccatcctgcgattgccatgtggtttaatctccgggtcacaggtgttgtcgatgatccaccactagtagtagggattgcatggagattggtgctcgggtcaataatgatggtgattgtgacggagtgccctgcaaaataattaataattcgtgtgaaaaagttgatt

SEQ ID NO: 6542 - DNA, 423 bp, Zea mays
  Clone ID: LIB3118-034-P1-K1-F5
cgacaacggccgccgggtacggctgctgctgggcggcgattccgcccttcgcgttgttgccgcggattctctcgacccggcgggagactcctcctcctgctcctcctcgcgcttgccttgtcgcctcctcctcgaagctcagggcgctggcaccacggctgagagtttcgaaccgtccaaggaggctcattgtctccgcttcctgctgcggcgaggccaattcggacgcggcgccgtcgccaacggaagccgctattgatataaagcttcctagaagaagcttgcttgttcaatttacatgcaacgcatgtggcgaaaggaccaagcgcttgataaacagagtagcctatgaaagaggcacagtttttcttcagtgtgcagggtgccaggtgtaccataggtttgttgataatcttgggctag

SEQ ID NO: 6543 - DNA, 437 bp, Zea mays
  Clone ID: LIB3118-034-P1-K1-F6
cccccgcccgctggctcctagggccagctttccacagttcctcccaccagttacttcaatgggcttcgaacatccagccgtgcaagcctacaggctacaactagcgcttgcggcgagcgccttacaacaaccaattgcccaattgcaacaacaatccttggcacatctaaccctacaaaccattgcaacgcaacaacaacaacaacagtttctgccatcactgagccacctagccgtggtgaaccctgtcacctacttgcaacagcagctgcttgcatccaacccacttgctctggcgaacgtagctgcataccagcaacaacaacagctgcaacagtttatgccagtgctcagtcaactagccatggtgaaccctgccgtctacctacaactactttcatctagcccgctcgcggtgggcaatgcacctacgtacc

SEQ ID NO: 6544 - DNA, 244 bp, Zea mays
  Clone ID: LIB3118-034-P1-K1-F7
acgccgcacgtccgctaattattggtggaccacccatcctagaacgtaatagataaaccatgtcacgaggatcacatgtgaagagcgcagagggacgcgcatttgacccaaacacggagggatgagttccttcgcagcggatgctgcttatatttcttgccccctaagcagacggccacgagctgatgtgtcatcctttgaaggaaagaggcttgagttctccataggaaaagctacagcagga

SEQ ID NO: 6545 - DNA, 417 bp, Zea mays
  Clone ID: LIB3118-034-P1-K1-F8
acgaaaaagagcaaccatgtcacgaggaagcttgagaagcgcaaggagggacgtacccttgacccacacattgaggagcaatttggcagtggacggttgctggcatgcatttcttcccgccctggacagtgtggccgagctgatgggtacatccttgagggtaaagagcttgagttctacatgaagaagctacagaggaagaagggcaagagcgctgtagcttagagcattctcatggattgtcttgcaccgaaatgtgtgtcctgatgagtacactttttttggttagtcgtctcaagttcagagcgttatgccatgttttcagtcctgattagtacactgttttctaaaagcgattgagctctagtccaatgtattgataatttctgctggtgtcctattgcggtgatgtttatt

SEQ ID NO: 6546 - DNA, 291 bp, Zea mays
  Clone ID: LIB3118-034-P1-K1-F9
cccacgcgttcgcggacgcgtgggcggacgcgtgggcggtggtaaaagtaagggtggcttgaaccgagcatcaagcactagttccaagtcgggtggctcaagccatggcgtggatgatagtaacatatggacgtgcgatcagtggacatattcaaacctcatatatggctgagcctgccaggcttgagatcaccaacatcgatagcgctgtaagtccttgctagagatatgaacccgatttgttgagaatcttatggtgcttcccggtgtaatacactaacatacatgaaa

SEQ ID NO: 6547 - DNA, 60 bp, Zea mays
  unsure at all n locations
  Clone ID: LIB3118-034-P1-K1-G1
cccacgcgtncgcggactcttggtcccaaatgcacagggaatcgcaccatcgtgggaccc

SEQ ID NO: 6548 - DNA, 405 bp, Zea mays
  Clone ID: LIB3118-034-P1-K1-G10
ggacctctttttgatttagagagttttcagattgaaaccgagtccgaagggacaaagctgaggagggatgttttggcggaaggcaatgctggctcaggaccatctactaccggccttgtggcgatattgtctggtcaagaagagatgtttgcgttccgcagggcgatatcacggcttatcgagatgcacaccccgctgtatctggagcgtgtgcaagctgtacatccttcgttccgtcgtcctggtcttgcaagcaataacaggcctgcagttcctcagcctgctccggcggtttgacagcctcgcgctgtaccattgcttttgctttatttcgagtttcgtgtgagaaggcaataaaaccaaccagagatggttacagtgagacattgtaaatgattgtagaaa

SEQ ID NO: 6549 - DNA, 375 bp, Zea mays
  Clone ID: LIB3118-034-P1-K1-G11
cccacgcgttcgcccacgcgttcgggcttctcctccccctccggttcgggttcgggttcgtgaggttctccggggttcggtttcgtgggtgagcggatcgagatggcggcgtctgatgttgagtaccgctgcttcgtcggcggcctcgcctgggccacggacgaccactccctccacaacgccttcagcacctacggcgaggtcctcgagtccaagatcatcctcgatcgggagacgcagaggtcccgcggcttcggcttcgtcaccttctccacggaggaggcgatgcggaacgccatcgagggcatgaacggcaaggagctggacggccgcaacatcaccgtcaacgaggcccagtcccgcggcggccgtgga

SEQ ID NO: 6550 - DNA, 99 bp, Zea mays
  Clone ID: LIB3118-034-P1-K1-G12
cccacgcgtccgcggacgcgtgggaaaaaaaaaaaaaaaaaaaaaaaaaaaaaagaaaaaaaaaaaaaaaaaaaaaaaaaaaaaaattctagatcgcga

SEQ ID NO: 6551 - DNA, 431 bp, Zea mays
  Clone ID: LIB3118-034-P1-K1-G4
tcgcggacgcgtgggggactttttgggaagaccattacccatttgatgtggttgtccctgttccaggaccctgtttttcctggttcgttcctgcgagcaagagcaatcggccttatgcccatgattgaccagggtgaaaaggatgacaagataatagcagtctgtgctgatgatcctgaatatcgtcactacaacgacatcagtgagctgtctcctcatcgcctgcaagagatcaagcggttctttgaagattataagaagaatgagaataaagaggttgctgtcgatgcattcttgcctgcgaccacagctcgagaggccattcagtactccatggatctgtatgcgcagtatattttgcaaagcttgaggcagtagattggaagcaactatttatctgggcgtcttggaatgagtgtgattttaataag

SEQ ID NO: 6552 - DNA, 194 bp, Zea mays
  Clone ID: LIB3118-034-P1-K1-G5
aggtacccccccaattcccgggggacccacactcccccacccttccccaacgtacttttttttctccccctccggttcagggggggttttgaggtctgcggggctcggtttcggttgatcgaatagacaagcggcttctgatgttgagtaccagtgctttgtcagtggactcttctgggccacggactaccact

SEQ ID NO: 6553 - DNA, 303 bp, Zea mays
  Clone ID: LIB3118-034-P1-K1-G6
cccacgcgttcacccacacgttcggtttttttctccccctgcagttctggtggggtgttttgaggatatacagagttacattttttctggttcgcggatctagattgtggcttctaatgtttagtaccgctgctatttaggtcacttttctgggccatggactaccacttcaatcaaatcgccttgattacctacttccatgtcctttagacccatataattctctttctttataccctaaggtcccccccctttagtttcttaaccttttccatagtagagttatagctaaaatccctttac

SEQ ID NO: 6554 - DNA, 412 bp, Zea mays
  Clone ID: LIB3118-034-P1-K1-G7
cccacgcgtccgcggacgcgtgggcccaaaggcacagggaatcgcaccatcgtgggacccgtacagcgcaccgcccagccgccggatctgcgccggcgacgcgcccggacgtcggatctacgccgccgcaggaggggggaggcggcgctgtggccgttctctgcccgtgagcgcccggatccgtcccgccgatgcagaattattaccggtatggggagttcgacacctgcttcggcaagtggggcgatcttatgggctgcctcgctctcaagacaaagcggaaggcagaggtggaggagatcctcatcgcgcgggagaaggccaaaccacatatctggacctaccggacggtcgatgaggcatcggagaattggtggcggatgtacaagcatgctgtgatgatgtcaccact

SEQ ID NO: 6555 - DNA, 94 bp, Zea mays
  Clone ID: LIB3118-034-P1-K1-G9
cagcgtgcaggtagaacggcaataactgttgttgtgtcaagaaggcagcagggctcacaccagctagctgtttttttctctcatcatctgtttt

SEQ ID NO: 6556 - DNA, 213 bp, Zea mays
  Clone ID: LIB3118-034-P1-K1-H1
atcacagagacctccgaacatatgaaccacgtccacagcagctagctacaccgctagatacactatgcaaacatcgcatctctgcacgctgtgctctacgaagcgctgcgcgcgcacatggatcgactgcataaatcgcgacctggcaacgataccgacctagcatgtgggacatgacggtatcatcgcggacggtgtatagcatcacgcaca

SEQ ID NO: 6557 - DNA, 338 bp, Zea mays
  Clone ID: LIB3118-034-P1-K1-H10
tgctcacttgcaaaagaatcaagcatgtggctatctcttgggggttctcaagagaagggacctgatgattctcaccagtacaatactcatgtattaattgatgacactggaaaagttaggagctcatatcgaaaaatacatttgtttgatgttgatgtacctggcaatatggtgtacaaggaaagtcgtttcacagccgcaggtgatactattgttgctgtggatagcccttttggacggttggagcttactgtttgctatgatttgagattcccagagctttatcaaattgtgcgttttaagcatcaagctcaggtattactagtgccatttgcatt

SEQ ID NO: 6558 - DNA, 314 bp, Zea mays
  unsure at all n locations
  Clone ID: LIB3118-034-P1-K1-H11
attgactggcaagaccatcaccttggaggtggagagctctgacaccattgacaatgtgaaggccaagatccaggacaaggagggcattcccccagaccagcagcgtctgatctttgcgggcaagcagctggaggatggccgcactctcgcggactacaacatccagaaggagagcacccttcaccttgttctccgnctcagaggtggtatgcagatctttgtaaagaccctgactggaaaaaccataaccctggaggttgagagctcggacaccatcgacaatgtgaaggcgaagatccaggacatggagggca

SEQ ID NO: 6559 - DNA, 420 bp, Zea mays
  Clone ID: LIB3118-034-P1-K1-H12
attgaccgtcaagaccatcaccttgtatgtggagagctctgacaccattgacggtgtgaaggccaagatccaggacaaggagggcattcccccagaccagcagcgtctgatctttgcgggcaagcagctggaggatggccgcactctcgcggactacaacatccagaaggagagcacccttcaccttgttctccgcctcagaggtggtatgcagatctttgtaaagaccctgactggaaaaaccataaccctggaggttgagagctcggacaccatcgacaatgtgaaggcgaagatccaggacaaggagggcattcccccggaccagcagcgtctgatctttgccggcaaacagctggaggatggccgcaccctagcatactacaacattcaaaaggagagcaccctccaccttgtgct

SEQ ID NO: 6560 - DNA, 295 bp, Zea mays
  unsure at all n locations
  Clone ID: LIB3118-034-P1-K1-H5
tcaaaggttggtaccaaaaaaaccagggggccaccgcttgtggccaagaagggttggaagtttgcccggcagccatccgatcaaaataccaaatgaagccagaagtccttgtggagacctgactggctgccgcgcccctgtaatagtnctgctcttactggactagcccgccggtgccgcccttgaaacggccttttctgtagcttgcangcgactggtgtctcatcaccgagcaggcaggcactgcttgtatagcttttctagaataataaatcaggatggatggatggtgtgt

SEQ ID NO: 6561 - DNA, 329 bp, Zea mays
  Clone ID: LIB3118-034-P1-K1-H6
tcgattgactggcaagaccatcaccttggaggtggagagctctgacaccattgaggtgtgaaggccaagatccaggacaaggagggcattcccccagaccagcagcgtctgatctttgcgggcaagcagctggaggatggccgcactctcgcggactacaacattcagaaagagagcacccttcaccttgttctccgcctcagaggtgggatgcagatctttgtaaagaccctgactggaaaaaccataaccccggagggtgagagctcggacaccatctacaatgtgaaggcgaagatccaggacaaggagggcattccccccggacc

SEQ ID NO: 6562 - DNA, 421 bp, Zea mays
  Clone ID: LIB3118-034-P1-K1-H8
catacgcccggatgaacaatggacatattatccttgccagacgttgctagcacgaatgcttgtaacaaactcaatgacatgtttatcagtaccataaatatcagaggacgagtggttgaaacaggtgcatacaggctcacacaatttgatggacacgctgacaacacattggatgatgtgactgaccgtttgcatgattcaaaggagcacgactttgcatggaagaatgacgaagctcgcttagctctggacgcattaaaactgatttttgatgtgtgggtcctaaaccatgaaagcttatgcgacttagagcgagcacccaaaagcgtaacaggtggtacatgaaaatgtgacgccaaagatattgtgcagatgatcgacgtagctgcgcaagctgtatgatgtgatggtcagaagaaaa

SEQ ID NO: 6563 - DNA, 103 bp, Zea mays
  Clone ID: LIB3118-034-P1-K1-H9
cccacgcgtccgagcggatcgcgcgcgagatctccgcgcaggtcgccaagaagcaccaggctctcccgccctccaagaaggtaccggagatcgagatcatcga

SEQ ID NO: 6564 - DNA, 286 bp, Zea mays
  Clone ID: LIB3118-035-P1-K1-A1
cccacgcgtacggtgaaggactccaatgtgcctgctgcacttgatggaaatcctcggcctatggaccaaactgaagacaattctatgccctcagcacagcaacaggaagaagcaatcaagaagcaagttgtaggacgactatcaagaacgtggatgggaatgtaaaaggatcatgagcgggcctactacgatactgttgactgacctctagggaagcaaggtgttgccaaaccaaaaggaccgctggaggcacttaagaccaagactgagccaacacgagaagaaa

SEQ ID NO: 6565 - DNA, 166 bp, Zea mays
  Clone ID: LIB3118-035-P1-K1-A4
cccacgcgtacgttaacacgcgaagaatcgaccatgagggccaattggaagaaggggctcatgatgaggcttatgaggaatctcaaaaagatgaggcataaattcaagtatgcatatcgagatgtattgtggacgtgatgacatgcgtgggtacatacatttcttt

SEQ ID NO: 6566 - DNA, 213 bp, Zea mays
  Clone ID: LIB3118-035-P1-K1-A5
cgcgtccgggggataaaagaaagcaatcctcatctccgcctatttacagattcagctgcgtgtgctcagtattctcattattactccacgatgcaggagtccttgaaattaggcgagattggggtggggataaaaagaaggcatcaaaggattggctttacctgggggaaactgatgttttggccggatttttggagggttggtgactatgct

SEQ ID NO: 6567 - DNA, 257 bp, Zea mays
  Clone ID: LIB3118-035-P1-K1-A6
ctggggacataaactgaactttgaaacactgcacagatattttggaggatggtttgggccgttaatggcataatgggggggaaaggttccatggcttgctttggggaaggcctttttctttacattgagcattggatttatagtttgctctctaaaaaaaggaaacttgaaaacacgccaggtttgtgcatttgttggattgcaagaaccggctatttttttgtaaaaaaaaaaaaaaaaagggcgggcggtttata

SEQ ID NO: 6568 - DNA, 246 bp, Zea mays
  Clone ID: LIB3118-035-P1-K1-A7
gcgtcgatctgtttgctttatctgaagaaagctgctgtagtgattttctgttggacgaggcgtggaagggaacctttccttggtggcttttcttgcaaaaaaaccgtagaggctgcactttcaaatatttccaggcctatcatgtccttggatgggaatgaaaatgccattgttggagctctgaaacaaagcttgagacaactggaatctcttggagcgcataaggcaggtcttgaagacatgctc

SEQ ID NO: 6569 - DNA, 353 bp, Zea mays
  Clone ID: LIB3118-035-P1-K1-A8
gggttggcttctcctccccctccggttcgggttcgggttcgtgaggttctccggggttcgggttcgtgggtgagcggatcgagatggcggcgtcggatgttgagtaccgctgcttcgtcggcggcctcgcctgggccacggacgaccactccctccacaacgccttcagcacctacggcgaggtcctcgagtccaagatcatcctcgatcgggagacgcataggtcccgcggcttcggcttcgtcaccttctacacggaggaggcgatgcggaacgccatcgaaggcatgaacggcaaggagctggacggcctgaacatcaccggcaacgaggcccagtcccgcagtggccgt

SEQ ID NO: 6570 - DNA, 384 bp, Zea mays
  Clone ID: LIB3118-035-P1-K1-A9
gacgcatcgaggttagcacgcgaagaagcgaccatgagggccaagtggaagaagaagcgcatgaggaggctcaagaggaagcgcagaaagatgaggcagagatccaagtaggcagatcgagatggattgtggacgtgatgacatgcgtgggtacatacatttcttcggatgcgttggtgtgcctgtggagagatgtcaacctgccatggagtcagggtccgccatcagttgaacgtcttgcctgcacttcagtaggccacttttcatggttctagttgtatttgaatccagcgtttgccactaagataaatcagacagtcgttttgtgaacctattatgatggagctttatttgctgataatatctagctacctatttgagctg

SEQ ID NO: 6571 - DNA, 326 bp, Zea mays
  Clone ID: LIB3118-035-P1-K1-B11
cccacgcgttcgaagcaacatagaaagtggaatccagtagcaacaatagagcggcggtggcgaccaagatattttccctccttatgctccttgctctttctacatgtgttgctaacgcgacaattttccctcaatgctcacaagctcctatagcttcccttttttccccataccttccatcaattatagctgcaatatgtggaaacccagctcttcaaccatataggcttcaacaagcaatcgcagcaagcaacatacctttatcggccttgttgtttcaacaatcgccagccctatctttggtgcagacattggtacaaaccatc

SEQ ID NO: 6572 - DNA, 393 bp, Zea mays
  Clone ID: LIB3118-035-P1-K1-B12
cccacgcgtccgagatgatgcactttgggaaattacctaactgattacatacggggcaacatcgcaacgtgtgttgccatgcataaccgacaagctgttgctacatgtgttgctaacgcgacacttttccctcaatgctcacaagctcctatagcttcccttcttcccccataccttccatcaattatagcttcaatatgtgaaaacccagctcttcaaccatataggcttcaacaagcaatcgcagcaagcaacatacctttatcgcccttgttgtttcaacaatcgccagccctatctttggtgcagtcatttggtacaaaccatcagggcacaacagctgcagcaactcgtgctacctctgatcaaccaagtagctctggcaaacctttt

SEQ ID NO: 6573 - DNA, 404 bp, Zea mays
  Clone ID: LIB3118-035-P1-K1-B2
cagcgctcaagttctcgcgcccagagccaaatttttctccactcaatcactgcaggcatggacgccagcggagccggtagcaaggcgaagaagggggcggctgggcgcaaggctggcggccccaggaagaagtcggtgtcgcggtccgtcaaggccgggctgcagttccccgtcggccggatcgggcgctacctcaagaagggccggtacgcgcagcgcgtgggcaccggcgcccccgtctatctcgccgccgtgcttgagtacctcgccgccgaggtgctggagctggccggcaacgcggggaaagacaacaagaagacgcgcatcgtcccgcgccacgtgctcctggcgatccgcaacgaccttgaactcggcaagctgctggctggcgtcaccatcgcgca

SEQ ID NO: 6574 - DNA, 228 bp, Zea mays
  Clone ID: LIB3118-035-P1-K1-B4
cggacgcgtggccggacccgtgggctgttaaaaggacaagcatagcctttgggggggctcctaataaaatgcctgctttgatgatggcacaatcgctcgacaattataaatctgggacttattattattcccattccctctgttagacgccggcgtaaaaaatgccagacctggagttgatgtattatttgttttgtagtcaaataaaggtgtgattatctggcacac

SEQ ID NO: 6575 - DNA, 324 bp, Zea mays
  Clone ID: LIB3118-035-P1-K1-B5
aagacacgtacccatactcatatacatgttaaaggacaagcctagcctcaaggcgggctcctcatcaaatggctggtctgataatagcacaatcgctccacaattatacatcggggacgcattattatcaccattccctctgatactcgcacttcctaaaactgccacacctggaatcgatgtattatttgctacaacgagaaataatacagtgattatctggcccaccttatccaacccatgaacagaaccaacttaaattaataacgccgggtcttttatacgaccaagttttcttactcttgcatgcaaaataatacctct

SEQ ID NO: 6576 - DNA, 381 bp, Zea mays
  Clone ID: LIB3118-035-P1-K1-B6
cccacgcgtccgcagctagttgctgcctacccccaacaatttcttccattcaacggactagcagcattggactttggtggttatttaccggaagaaccacttctaccattcaacccagttggttgtgggaagccttgttgctttttggccacaccaccagtggtggcggtctacctggacgctttgcctaacggttgcacccttttaccactggaacaattggtggcatttcaaccacttggtttgacaaaactaacaagtggtctaccaccacccattattgggggggcccttttttaaaatggttatgaagtataagtcaataatgaaagtttttggatggtggttgggggggtccaaaaataaaaaaggacatttctt

SEQ ID NO: 6577 - DNA, 402 bp, Zea mays
  Clone ID: LIB3118-035-P1-K1-B7
cccacgcgtccgcccacgcgtccgcggacgcgtgggagccgctgcaccggtaccaggcgacatacggtgtggtcctgcagtccttcctgcaacaacagccgcatggcgagctcgcggcgctgatggcggaccacgtagcgcatcatctgacagcaatgtgcggtctgcatctacatgaaccatatgcctgaccttgcaacgcacttacaactggagcatactactgaagaaactatattctgttggacaaacgtaacagagccgtagcatcaatacataattggctaggccatttattaaacggcgtataagtactaggtgaataatataaccatgtgtatgatggttggggcggaccagaaataacaatggacatggctaggaataatatataaggaaaaa

SEQ ID NO: 6578 - DNA, 408 bp, Zea mays
  Clone ID: LIB3118-035-P1-K1-B8
cggacgcgtgggtgaaaacccagctcttcaaccatataggcttcaacaagcaatgggagcaagcaacatacctttatcgcccttgttgtttcaacaatcgccagccctatctttggtgcagtcattggtacaaaccatcagggcacaacagctgcagcaactcgtgctacctctgatcaaccaagtagctctggcaaacctttctccctactctcagcaacaacaatttcttccattcaaccaactgtctacactgaaccctgctgcttatttgcagcaacaactattaccatttagccagctagctactgcctactctcagcaacaacaacttcttccatttaaccaattggccgcactgaaccccgctgcttatttgcagcagcaaatactactaccatttagcca

SEQ ID NO: 6579 - DNA, 409 bp, Zea mays
  Clone ID: LIB3118-035-P1-K1-B9
ctccggcgacagccgcggcatttcaacacccaactatacaatcctacatgctacatgaggccatcgtagcaagcattttacggtcattagcattaaccctccaacagtcatatgccctattgcaacaaccatccttagtgcatctgtatctccaaagaatcgcgacacaacaactacaacaacagttgctaccaacaatcaatcaagttgttgcagcgaaccttgctgcttatcttcagcaacaacaatttctttcattcaatcaactagctggggtgaaccctgctgtctacttgcaggcacaacaactactaccatttaaccaactcgacgggagccctgatgccttcttactgcaacaacagcttctgccattccatctgcaagctgtgcgaaaacattgcttctt

SEQ ID NO: 6580 - DNA, 284 bp, Zea mays
  Clone ID: LIB3118-035-P1-K1-C11
cggacgcgtgggcggacgcgtgggcgctcatcgtctccacggtggctgggatgggctacttcatcgccgccgacaagaagatcctgtcgctggcgaggcgccactcgttcgagcaagcccctgagcacctcaagaacaccttcttccagggcaccggccgtccccacccagccttcttcaggccgtgagacgagacctccgtccagagctagctacctacctctttttccagtttgccaatgcaagcaccaaatgcccaccgatgcatgcctgaaataactact

SEQ ID NO: 6581 - DNA, 402 bp, Zea mays
  Clone ID: LIB3118-035-P1-K1-C12
tgcacacatagacagacacggatgcattgaccacacacattatcatgggtggggtgcacacatatattatatgcatgaacataatacagttgctggcgtagcgccactcgttcgagcaagcccctgagcacctcaagaacacctccttccagggcaccggccgtccccacccagccttcttcaggccgtgagacgagacctccgtccagagctagctacctacctctttgtccagtttgcaaatgaaacaccaaatgccccccggtgcctgccttaataaacttctgttattgccaggcttcttaacgtcgatgcgctagtataactactactactacgaggctagctgcgcgctgaacacaaagctgttaagtagagttggtgtgctaaattcagaatgtg

SEQ ID NO: 6582 - DNA, 271 bp, Zea mays
  unsure at all n locations
  Clone ID: LIB3118-035-P1-K1-C2
gatggtcatcgttctcgtcgtgtgcctggctctgtcagctagccaacgcctctggatgcgaaataccctgcccctgcgcggcgctgcaaggcttgtacggtgctgacgccggnctgacgacgatgatgggcgccatcgggctcgacccctacgcggagtaccttgggcagccacagtgcaacccgctggcggcggggccctactacgccgggtgtgggcagccgaacgccattgttccatccgctacagcaacaatgctggcagcatcaga

SEQ ID NO: 6583 - DNA, 402 bp, Zea mays
  Clone ID: LIB3118-035-P1-K1-C3
atgccatccttgcggtttcacttgcggtgtgcaaagctggagctatggtgaagaagatgcctctttaccagcacatcgcaaatcttgctggaaacaaaactctggtgctccctgtacctgcctttaacgtgattaatggagggtcacatgctggaaacaagcttgccatgcaggagttcatgatcctcccaactggtgcctcctcgttcaaggaggccatgaagatgggagttgaggtgtaccacaacctgaagagcatcatcaagaagaagtacggtcaggatgcgacaaatgttggggatgaaggtggttttgcacctaacattcaggaaaacaaagaaggccttgaactattgaaggcagccatagaaaaggctggctacactgggaaggtggtcattg

SEQ ID NO: 6584 - DNA, 390 bp, Zea mays
  unsure at all n locations
  Clone ID: LIB3118-035-P1-K1-C6
ccttaagttccaaggagctttaaatgcagacgctgaacgtgaaaagctaaagaagagaaaagatgagattcaaaagctacagaatgcactggcgcagaaaatggacgcctctggctatcgcgagaaggctccacagagcgtacaggaggaggacatgaggaagctcaccgctttgttggagcaactagaggtcatcagtgaagctgagaagaaattagacgcgaactgagtttgacctctgtttcgaagaggccttgcttgtaccgaagctgaccccatatttttcttgtttgcaaaaaagctcagttatgtgcctgtacgctcgggctcaggtttacagatggatggttcaaatggaagccacatttttgcaannnntnatttgttttt

SEQ ID NO: 6585 - DNA, 144 bp, Zea mays
  Clone ID: LIB3118-035-P1-K1-C7
cctacaccttcacttacctttaaatgcttacgcttaacgtgaaaagctaaagggggggaaatattagttgtggtggctacacaatgcactcgcacacaaaatgcacgcctctgtctatcgctagaaggcttcacatatcttaca

SEQ ID NO: 6586 - DNA, 400 bp, Zea mays
  Clone ID: LIB3118-035-P1-K1-C8
cggacgcgtgggctcccggcggcggcggcggcggcgcagcagcggcagcagcatgcgaagatggtgaagttcctcaagcccggcaaggccgttatcctcctccagggccgcttcgccggcaggaaggcagttatcgtgcgcgtgttcgaggagggcacccgcgaccgcccctatggccactgcctcgtcgcaggcctcgccaagtacccaaagaaggtgatccgcaaggactccgccaagaagactgcgaagaagtcgcgcgtcaagtgcttcatcaagctcgtcaacttcactcacctcatgcccacccgctacaccctcgacgtcgatttcaaggatgtcgccaccggtgggcccgacgcactctctacccacgacaagaaggtcgccgcctgcaaga

SEQ ID NO: 6587 - DNA, 412 bp, Zea mays
  Clone ID: LIB3118-035-P1-K1-C9
cggacgcgtgggctcccggcggcggctgcggcggcacagcagcggcagcagcgtgcgaagatggtgaaggtcctcaagcccggcaaggccgatatcctcctccagggccgcttcgccggcaggaaggcagttatcgtgcgcgtgttcgaggagggcacccgcgaccgcccctatggccactgcctcgtcgcaggcctcgccaagtacccaaagaaggtgatcctcatggactccgccaagaagactgcgaagaagtcgcgcgtcaagtgcttcatcaagctcgtcaacttcactcacctgatgcccacccgctacacccttgacgtctatttcaaggatgtcgccaccggtgggcccgacgcactctctacccactacaagaaggtcgccttctgcaagactgccaaagcgg

SEQ ID NO: 6588 - DNA, 167 bp, Zea mays
  Clone ID: LIB3118-035-P1-K1-D1
cttccgaaggtctgggggtcaaaatgatgatgcaattactgattaggaatgagaaagatggcgttctgtgcccaattcctcagtaccccttgtactcggcctccatagctcttcatggtggagctcttgtcccctattaccttgatgaaaaaaactgggtgggggtt

SEQ ID NO: 6589 - DNA, 376 bp, Zea mays
  Clone ID: LIB3118-035-P1-K1-D12
ttgatggacaagctattagcctgttcggtgtttttgacggtcatggtggatcacgtgctgctgagtatttgagggagcacttgtttgagaaccttctcaagcaccctgatttcttgacggatacaaagcttgctataagcgaaacatatcagaaaaccgatacagatttcttggaatcggaagcaagtgctttcagagatgatggttcaacagcttcaactgcaattttggtgggtgaccgtctgtatgttgcaaatgttggtgattctcgtgctgttatttcaaaagctggcaaagctatggcactttcagaagatcacaaacctaacaggattgatgagcgaaagagaatagaaaatgctggtggtattgtcat

SEQ ID NO: 6590 - DNA, 400 bp, Zea mays
  Clone ID: LIB3118-035-P1-K1-D2
cgcgtccgcaagtcctggggtccacatgatgatgcaattactgattaggaatgagaaagatggcggtctgtgcccaattcctcagtaccccttgtactcggcctccatagctcttcatggtggagctcttgtcccctattaccttgatgaaaaaactgggtggggtttggagatctctgatcttaagaaacaactcgaagatgctcggtcaaaaggcattgatgttagggccttggtggttatcaatccaggaaatccgactgggcaggtttatactgatcatttctcctcttgttaaagaacatctctgcttatccacaccatactctttataattgatgtaataacatgagatgtgtatttattgtactcctattttaagtcagtgaatactttgtat

SEQ ID NO: 6591 - DNA, 221 bp, Zea mays
  Clone ID: LIB3118-035-P1-K1-D4
ataatatattcatcatcataatcaattctcctcttaatgcctcccttttcaatccagcctcctgtgcaccacaagaacaccttcttccaagctcctgtacgtccacccaaccttcctttgccctgagaccaagacctccctccaaagctaacttcccaccttttttttcctctttgtcaatgcaatcactaaaatgcccaccgatgcatgccttaataaac

SEQ ID NO: 6592 - DNA, 274 bp, Zea mays
  Clone ID: LIB3118-035-P1-K1-D6
ccggggtggaccaacgcgtccgccaacgcgtccgcccacgcgtccggtggttttggaataatttggacttcgtcttggggtaaaaaaaaaaaaaaaaaaaaaaaaaaaaaaaaaaaaaaaaaaaaaaaaaaaaaaaggtggggggagataaaaaaaaacaggcgcctgtatgcggggatcagagctaactaacggttggatgggaaggccaaaaaaattgtaaaagggctcacaaacgtaaaaaaagggagaaaagggggagacaacgggaagt

SEQ ID NO: 6593 - DNA, 210 bp, Zea mays
  Clone ID: LIB3118-035-P1-K1-D8
gggctcggcgcgtgcgctgcggccgtgcgccggggtgcgggtgatccacaccaacgggttcgtggaggacttcgagggccccggcgtggtgaccgtggcgcacgtgacgcgctgcctcggcgggcccggcggccccgcctccgccgccaacgccgccgggaaggggtacgtgctgtgctcgtcggcgcacctgctgcagccggggcgcgg

SEQ ID NO: 6594 - DNA, 243 bp, Zea mays
  Clone ID: LIB3118-035-P1-K1-D9
cagatcgttcgtccactcttccccgtctacttgtactatatacacacatacggtgaattatacagttatctttctgacaacctccttacataccaaaacccacgtgaaacccatcttaatcgacttcctacacatacccttttacctaaatgccataataaagaataaccccctacccatctctcttcacaacattttaacatcctgaatttctaatgtgactctccctttatcatcgcatta

SEQ ID NO: 6595 - DNA, 387 bp, Zea mays
  unsure at all n locations
  Clone ID: LIB3118-035-P1-K1-E1
aggtctggggtccattaagattccatttcctgattaggatgaaaaaaagggggctgtgcccaattcctcataccctttgactcggcctcatagctcttatggtgaactcttgcccctttaccttgatgaaaaaactgggggggggttggagatctcttatcttaaaaaaccaactcgaaaattcttggtcaaaaaggcattgatgttaagggccttggggggttatcaaatccaggaanatcccaactgggcaggtttatacctgatcatttctcctcttgttaaagaacatctctgcttatccacaccatactctttataattgatgtaataacatgagatgtgtatttattgtactcctattttaagtcagtgaatactttgtat

SEQ ID NO: 6596 - DNA, 395 bp, Zea mays
  Clone ID: LIB3118-035-P1-K1-E10
cccacgcgtccgcccacgcgtccgcggacgcgtgggagccgctgcaccggtgcgaggcgacatacggtgtggtcctgcagtccttcctgcagcagcagccgcagggcgagctcgcggcgctgatggcggcccaggtagcgcagcagctgacggcgatgtgcggcctgcagctgcagcagccaggtccctgcccttgcaacgcagctgccggcggtgtctactactgaggaaactatgtactgtagtaataatgtaatggagccggtggctagctacctagctcgctagtttactcatttagcggcgatgagtaacgtagtgtcacccatcaccatgggtggcagtgtgagcaatgacctgaatgaaccattgaaatggaaaggaataatatataa

SEQ ID NO: 6597 - DNA, 398 bp, Zea mays
  Clone ID: LIB3118-035-P1-K1-E11
gtggagcccaagttcctcgacaggttccccaacatcaccaagcgcctcaagcgggccgccgtcgcgcttgtctccaccgacggcaactggatcacattcatgaagttaaggctagacagggtcttacaagaccagttcgacgcagaatcagttgaagaggcattggcttctaaccctgttgagttgaaatttgagaagcctgagaaatggacagctccgtaccctaaatatgggtttggatggtgggaacccttcttgcctccaaagttcagcaatggtacggcatagagataagcagcaatccctatgaggcatgtaagattactcccctgtaagtgatgaatgtaattttaattttgatgatgaggatgtagtacttgaggttgtaccagtacagt

SEQ ID NO: 6598 - DNA, 380 bp, Zea mays
  Clone ID: LIB3118-035-P1-K1-E12
gtggagcccaaagttcttcgacaggttccccaacatcaccaagcgcctcaagcgggggccgacgcgcttgtcttcacccaccgcaactggatcacattcatgaaggtaagggttgacagggttttacaagaccaagttgcgccaaatcagatgaagaggcattggcttttaaccctggtgagatgaaatttgagaagcccgagaaaagggcaggttcgtaccctaaatatgggtttggatggtgggaacccttcttgcctccaaaggtcagcaatggtgcggcgtagagataagcagcaatccctatgaggcatgtaagattacttccctgtaagtgatgaatgtaatatttaattatgatgatgaggatgtatgtactt

SEQ ID NO: 6599 - DNA, 327 bp, Zea mays
  Clone ID: LIB3118-035-P1-K1-E2
aattctggcatccaaacgatgatgcaattactgattaggaatgagaaagagggggggctgtgcccaattgttcagtaccccttgtactcggcctccatagctcttcatggtggagctcttgtcccctattaccttgatgaaaaaactgggtggggtttggagatctctgatcttaagaaacaactcgaagatgctcggtgaattggcattgatgttagggccttggtggttatcaatccaggaaattcgactgggcagggttatactgatcatttctcctctggttaaagaacatgtgttgttatccacaccattctttttattatt

SEQ ID NO: 6600 - DNA, 399 bp, Zea mays
  Clone ID: LIB3118-035-P1-K1-E4
cctgctaccgcgacatgctcaccgccggccccaggaagaggcccaagtgcccctgaggccggctcacacacggcgcaacccaagacacgtgctccatgggactgccactgctttgcctgcaactgcgatccgatccatgctgatgggccaggcaacctgttatgctatcccttaccttactactacgaattgtgtacgtacgtatctttgtatgcatcgcgcgtccgtgtgatctataatatataatctgctaccaggtcccgtcagatgtactgttagtgataagctgagcgactagagaggtactgaatcctcagtagttggtagaacgggctgtttcttgggacagtgtgtgtcatggttaggctgcctgtactaattaatgtacatgaactattg

SEQ ID NO: 6601 - DNA, 388 bp, Zea mays
  Clone ID: LIB3118-035-P1-K1-E5
cctacgcgtccggcatcataacccctagcgccgccggtctgttcagcctcgcaggagaccggctccagcccgagtgaccgctgcagactagggttttcggaggggatggcggttaagggagggaaggatctgatggaggccaatgacgacaggcgacaagagcacctatacggacactgacaggaagaatgtccgcgcgtaccgctctttccatgcatggctccacctgctgatggtataatatacaacgccagttcaagttgcgtgcatatgtactcggacggataagctgaaccactagagaggttctgaatccttactagatgatctaaccggctggggcttggaacagtgcgtgtcatggttaggctgcctgtactaattaatg

SEQ ID NO: 6602 - DNA, 162 bp, Zea mays
  Clone ID: LIB3118-035-P1-K1-E6
aaatacccgcgcggaccaacgcgtccgcctacgcgtccgacatcataaccgctagctccatcattattttcagcctcacagtggtccgacttcagcttttttgacccctacacactagggttaacggactggatctcatgtaactgaaggaaggatatgatc

SEQ ID NO: 6603 - DNA, 407 bp, Zea mays
  Clone ID: LIB3118-035-P1-K1-E7
gtttctgccattcaaccaactagctgcattgaactctgctgcttatttgcaacagcaacaactactaccattcagccagctagctgctgcctaccaccagcaatttcttccattcaaccaactggcagcattgaactctcctgcttatgtacaacaacaactactaccattcagccagctagctgctgtgagccctgctgccttcttgacacagcaacagttgttgccgttctacctgcacgctgcgcctaacgttggcaccctcttacaactgcaacaattgctgccattcaaccaacatgctttgacaaacccaacagcgttctaccaacaacccatcattggtggtgccctcttttagattgcttatgagttatagttcaataataaagtttttttgctgatgt

SEQ ID NO: 6604 - DNA, 407 bp, Zea mays
  Clone ID: LIB3118-035-P1-K1-E9
ggatgagaagaagaagagggttgaaaagcaagaaaaaaacagactggataacttaaagaaagctgcaaaggttggcgctttgccaagtcatatacagcttgctgcgaaggcgttgcccatcacaggaacaaaagctgaccttccaaaaaaatctagaaaagaggatcttgagagtgttgtcggcatggcttcatcagcaacagcaagtggtgggaagtttgatgagaagttgcctggcgagaaacctccaaagcaccctggcaaacacagaaagttcctcccagttgccgaagggaagggaatgggcagcctggagaaacagcagaatgacaaaatcctgaactctctacttgccagaaactctgatgaaccacttgatgtcggcaaggcaattacaatgtacaagg

SEQ ID NO: 6605 - DNA, 228 bp, Zea mays
  unsure at all n locations
  Clone ID: LIB3118-035-P1-K1-F1
caagagcgtcggcggtggcggccctaacattccggcgggatcccaccccgcaggcgggagccaggcggcggcaggaggaggcgcgacgcancggacgcagtatccgtatgtgactggtaattcagtcattgccttgaaatacaaggatggtgtgatcatggcatgtgacactggagcctcttatggatcaactttgagatacaagagtgtggaacgcattaaggcagt

SEQ ID NO: 6606 - DNA, 154 bp, Zea mays
  Clone ID: LIB3118-035-P1-K1-F10
cccacgcgtccgcggacgcgtgggtccgccctcaggacggtggcagtctgcggggggctatatagatacaacaccggctctccattacgacgctacgagggggccgtgtcgtaataagatatcgtccgatagtactatgatgtgggacggttga

SEQ ID NO: 6607 - DNA, 312 bp, Zea mays
  Clone ID: LIB3118-035-P1-K1-F12
gaactctcctgcttatttacagcagcaacaactactaccattcagccagctagctggtgtgagccctgctgccttcttgacacaacaacagttattgccgttctacctgcacgctgcgcctaacgctggcaccctcttacaactgcaacaattgctgccattcaaccaacttgctttgacaaacccagcagcgttctaccaacaacccatcattggtggtgccctcttttagatttcttatgagttatagttcaataaaaaggtttttggctgatgtttgtgggcttcccagaattataaaagtccattttt

SEQ ID NO: 6608 - DNA, 262 bp, Zea mays
  Clone ID: LIB3118-035-P1-K1-F4
cccacgcgtccggagatggattgtggacctgatgacatgcgtgggtacatacatggtgttcggatgcgttggtgtgcctgtggagagatgtcaacctgccatggtgtcacggtccgccatcagttgaacgtcttgcctgcacttcagtaggccacttttcatggttctagttgtatttgaatccagcgtttgccactaagataaatcatacagtcgttttgtgaacctattatgatggagctttatttgctgataatatcta

SEQ ID NO: 6609 - DNA, 371 bp, Zea mays
  unsure at all n locations
  Clone ID: LIB3118-035-P1-K1-F7
caagagcgtcggcggtggcggccctaacattccggcgggatcccaccccgcaggggggagccaggcggcggcaggaggaggcgcgacgcancggacgcagtatccgtatgtgactggtaattcagtcattgccttgaaatacaaggatggtgtgatcatggcatgtgacactggagcctcttatggatcaactttgagatacaagagtgtggaacgcattaaggcagttggcaagcatagcatcattggagcaagcggagagttcagtgacttccaagagattttgcgctatttgggatgaactaactctgggtgatcatatgtgggatgatggaaacttgctgggccccaaagagatccccagttttttg

SEQ ID NO: 6610 - DNA, 405 bp, Zea mays
  Clone ID: LIB3118-035-P1-K1-F9
cccacgcgtccgcccacgcgtccggtgcgttttcccacctcaactgcctttctgcgtataaaaaaacgcgctcgtcgatcaccaccaaagaacacagtaactagcagctagcacatcaaacaagtggcgacagacaaagatttgtgagggtgatccgcgctgagaagagatggctaagatcgccgcggcggcggcggcggcgctgtgcttcgcggccctggtggccgtggccgtctgccaaggcgaggtcgagcggcagaggctcagggacctgcagtgctggcaggaggtccaggagagcccgctcgacgcgtgccgccaggtcctcgaccggcagctaaccggcggcggcggcggcggcggcgttggcccgttccggtggggcaccgggctccggatgcggtg

SEQ ID NO: 6611 - DNA, 158 bp, Zea mays
  Clone ID: LIB3118-035-P1-K1-G11
attaaaatatctctgatgtgcttcgttattgggtggaatcatgtgtcccagcggtgctgggaaatcaagatcaagatgtatctttctttgcagtaatgaaatgttaaaatcgagatcaagatgtatctttctttgcagtaaagaaactttgctattgc

SEQ ID NO: 6612 - DNA, 393 bp, Zea mays
  Clone ID: LIB3118-035-P1-K1-G12
aggacctcggtcttatttgcaagaaaggcaacatcaacagcggacgcgctagccaggtccagggaggcgccggcgctaagaaggacgacgacgagtaggcctcgccgcctcggctcgcccgcccggtcccgtcgatcgccagcaagaaccaacaagcccttctgtctgtttaattccagtatcagctcgattctcatgttgaataatcatgatcatgtgggtttaggtgtcgtgctcacgagtatgtagtgtagctcctgctagcacagagcacagtacagagcccctgggcgatcgacgggccgagcatggcctgtagataccatcttatatggtcaccactgatactttgctcatgttggggggcctctccctgaactgggttcctggatg

SEQ ID NO: 6613 - DNA, 407 bp, Zea mays
  Clone ID: LIB3118-035-P1-K1-G2
gtttgatgctccagacgacgcctacatccttgacgcagccgagactgccggtgtggagttgccatactcgtgccgtgctggggcttgctccacctgtgccggcaaaatcgagtctggttcggttgaccagtcggatgggtccttccttgatgacgggcagcaggaggaaggttatgtgctgacatgcgtcttctacccaaagtccgactgcgtcatccacacccacaaggaaggcgacctgtactagggctagggattttcaatttggcgagggaccaaaaatgctctcgagtggtgctttgtcaagcaaagctccatctgcgcgccctaccccgttgtgcgaactgtttggcatcaaacttgtgtggttgctgtcttctatgttctgctagtttatgttcggagtc

SEQ ID NO: 6614 - DNA, 408 bp, Zea mays
  Clone ID: LIB3118-035-P1-K1-G3
acctaacgcaggcgcatcggttggtcccgtcaccgtggcggagaatgaaaccgcgcctccagagagcaagaaaggagagaagaaaaatgcagacgcagaaaagaaaaatggcgacgcggagaggagaaatgccgaagcagatgcacaggaagacggcgacaagggtaagaagggcaaggactccaagcagctgaagatgttcaaggttgcgctcgcggacttcgtgaaggaggcgctgaagccgacgtggaaagacgggcagatgagcagggaggtccacaagaccatcgtgaagaaggtcgtggacaaggtgacgagcaccgtggagaacacccctccgaccaaggagaagatcgacgtctacatgacctactccaaggagaaactgaacaagctcgtgcaggcgta

SEQ ID NO: 6615 - DNA, 398 bp, Zea mays
  Clone ID: LIB3118-035-P1-K1-G4
cccacgcgtacgtgctgaatatgttgttgagtctactggtggtttcactgaccaggggaaggctggaagttaattggaagggggggcccaaaaaggtggcattttttcttctaacaagggtgcccccatgtttgtcggtggtgtcaacgagaaggagtacaagtctgacattaacattgtctccaatgctagctgcacaaccaactgccttgctccttttgctaaggtcatcaatgacaagttcgggattgttgagggtctgatgaccactgtccatgccatcactgctacccagaaaactgttgatgggcccttatctaaagactggaggggtggaagggctgctagtttcaacattatttccagcagcactggaactgctaaggctgttggcaaag

SEQ ID NO: 6616 - DNA, 219 bp, Zea mays
  Clone ID: LIB3118-035-P1-K1-G5
ctgtggacataaactgagcttcgaaacactgtacagatattttgtaggatgtttgagacgttaaatggcacaatggtgtgtaaagctcccatgactgccttggtagatgccctcttcctttacattgtacattgtatttatctttactcttcaaaaaaagaagcttgaaaaccgtaagttctgtacattctggaattgaaagaaccggaaattttcttc

SEQ ID NO: 6617 - DNA, 54 bp, Zea mays
  Clone ID: LIB3118-035-P1-K1-G7
cccacgccttcaaccacgcttccaaacactcttccgatttgtggtcggacggtg

SEQ ID NO: 6618 - DNA, 306 bp, Zea mays
  Clone ID: LIB3118-035-P1-K1-G8
gctggcttctcctccccctcttaccaagtcctcctcgggttagggttccttagggttttgtggaggggcgatggcggcggctgatgtggagtaccgttgcttcgtcggcgggcttgcctgggccaccagcaacgagtcgctggagaatgccttcgcctcctacggcgagatcctcgactccaaggtcatcaccgaccgggagacggggaggtctcgcggcttcggcttcattaccttctcctccgagaactccatgctcgacgctatcgagaacatgaacggcttggagcttgtcggtcgttacat

SEQ ID NO: 6619 - DNA, 315 bp, Zea mays
  Clone ID: LIB3118-035-P1-K1-G9
aagcatcagcggcaggagctctgggcagcgtgcgcacgtggggtacctagctcggtctgctagcctaccatggctgatcaccaccggggtgcgacgggaggtggcgggggctacggcgacctccagcgcgggggcggcatgcacggcgaggcgcagcagcagcagaagcagggcgccatgatgacggcgctcaaggccgcgacggccgcgaccttcggcgggtcgatgctggtgctgtccgggctgatcctggccggcaccgtgatcgcgctcacgggggccacccccgggctggtgatcttcagcccggtgctg

SEQ ID NO: 6620 - DNA, 83 bp, Zea mays
  Clone ID: LIB3118-035-P1-K1-H1
agtatatcaaatcaaaattccctcccattcactaatcccaaagccaccatggcggggcaccaaaacttcctcggaatcctcct

SEQ ID NO: 6621 - DNA, 393 bp, Zea mays
  Clone ID: LIB3118-035-P1-K1-H10
cggacgcgtgggctctatctctttcgccgagctcctcgaaaccctaggagcgtgcttgaccggcggcggcgaggtgatggcgatggaccctgacgcggtagcgaaggccttcgtggagcattactaccgaacgttcgacaccaaccgcgcggcgctggttgggctgtaccaggagacctccatgctcaccttcgagggccagaagttccagggcccgtccgccattgccggcaagctcggatctctccctttccaggcctgcgagcatcagatcgtcaccgtcgactgccagccatcgggtccccagggaggcatgctcgtcttcgtctccggttccatacgcaccggccccgaggagcaccccatcaagttctcccaggcattccatttgct

SEQ ID NO: 6622 - DNA, 390 bp, Zea mays
  unsure at all n locations
  Clone ID: LIB3118-035-P1-K1-H11
atccgatttccaatttcaaatccttcgatcgcgcagcgccgcccgccctctcgcgagctctctccgatggcccgcacgaagcagacggcgaggaagtcaactggcggcaaggcgccgcggaagcagctggccaccaaggcggcgcgcaagtcggctccggccaccggcggcgtgaagaagccgcacaggttccgccccggcaccgtcgctctccgcgagatccgcaagtaccagaagagcacggagctgctcatccggaagctgcccttccagcggctggtgcgtgagatcgcgcaagacttcaagaccgaccttcggttccagtcctccgctgtcgccgcgctgcangaggccggcgaggcgtatctggtgggtctntttgaggacacc

SEQ ID NO: 6623 - DNA, 296 bp, Zea mays
  Clone ID: LIB3118-035-P1-K1-H12
accacgcgtccgacaacgcgtccgttaaaccggggcggactcttcgtccagcacggttgtttatccagttccggccacaccacttgctcctctactccgccacaccgatggtgtacgtggattcctgggacgagttcgtggagcggaccgtgcagctcttccgcggcgaccccaacaacacccgctacgtgatgaagtaccggcactttgaggggaagatcgtgcttaaggtcaccgacgaccgctagtgcttgaagttcaagactgatcaaggttaagacgcaaagtagattgga

SEQ ID NO: 6624 - DNA, 405 bp, Zea mays
  Clone ID: LIB3118-035-P1-K1-H2
gtttgatgctccagacgacgcctacatccttgacgcagccgacactgacggtgtgggggtgccatactcgtgccgtgctgacgcttgctccacctgtgccggcaaaatcgagtctggttcggatgaccagtcggatgggtccttccttgatgaccgacaggaggaggaaggttatgtgctgacatgcgtctactacccaaagttcgactgcgtcatccacacccacaaggaaggcgacctgtactagggctagggattttcaatctggcgagggaccaaaaatgctctcgagtgctgctttgacaagcaaagctgcatctgcgcgccctaccacggtgtgcgaactgtttggcatcaaacttgagtggttgctgtcttctatgttctgctagttcatgttcggag

SEQ ID NO: 6625 - DNA, 405 bp, Zea mays
  unsure at all n locations
  Clone ID: LIB3118-035-P1-K1-H3
gggagttggacgtccaaggctacccgaccttgtacttcgtgaccccgagcgggaaggtgacatcctacgacagcggcaggacggcggacgacatcgtcgacttcatcaagaagagcaaggagaccgcagccgncgncgccaccaccacccatgtgccaccggcatccgagaaggcagccgccgccgagcccgtcaaggacgagctgtgagcatccaaggtgtggacggctgtggctgcgtatgcgggaggaaaacctggcgctaacgtgcctacaacgcctagtttttgcggcggaccagagggagagagagagagggacggagttagagagagaggggatctgcgacgtgttttgcttttggggcggcatgttgtgtatcccattgaggttatgtacacaatta

SEQ ID NO: 6626 - DNA, 293 bp, Zea mays
  Clone ID: LIB3118-035-P1-K1-H4
ccgaggcgtacgaccaaggctacctgaccttgtgctatgtgacaccctacgagcgtggggtgactcgtaggacgggaggtgatggcgatggaccctgacgcgagtagataaagacttcgtggagcattactaccgaacgttcgacaccaaccgcgcggcgctggttgggctgtaccaggagacctccatgctcaccttcgagggccagaagttccagggcccgtccgccattgccggcaagctcggatctctccctttccaggcctgggagcattaaatcgtcacccgtggac

SEQ ID NO: 6627 - DNA, 266 bp, Zea mays
  Clone ID: LIB3118-035-P1-K1-H5
cccacgcgtccgcccacgcgtccggtcatgccgccgtccaccgctgcaccgccggcgtcgacttcatgcaggagaagctccgcccgtacccagccaccgtgaacgacgaagggatgtaccgtcacgccagagaagtggcagaggccatgcttgggcaggacaaggtgagtgtaggcgcacaaatgatgggcgccgaggatttatcgttgtactccgagagattcgcaagggccttattaatgatcggatgttgatacaagagcttg

SEQ ID NO: 6628 - DNA, 365 bp, Zea mays
  Clone ID: LIB3118-035-P1-K1-H6
aaaaccgggggggacccacgcgtccgcgcgcaggcccccacccacagacgactggggcggccttcactgctacttcggccccggggccgtcgacgagaaccaccgcgtgctggttggaatggcaagtacagcatgctttgtgattgtcagtaagaatgacatcccaatctatgaggcagaagttggatctgcacccaaaaaaagaagatttgtcttatcaccatcagtttattctgcatgctgcattagatgttgttcaggatctagcatggacaacaaatgcaatgttcctgaagtcagttgatagattcaatgaccttgtggtgtctgtttatgtaactgctggtcataccagattcatgctg

SEQ ID NO: 6629 - DNA, 238 bp, Zea mays
  Clone ID: LIB3118-035-P1-K1-H7
cgcgtacgacatctaactgccctccgactgacgaatcccaaagccatcatggcgacgcaccgacactgcctaacaatcgtcctcttagtgggacggcgccctccccgacgtccctgctcgcgcggcgctcgacggcggccgcgacccgctgctgggctgatggaacccgacccctgacgtaggcgactcgcacatacaagagcttggcaggtggacacggtgacaagcacaacaccag

SEQ ID NO: 6630 - DNA, 84 bp, Zea mays
  Clone ID: LIB3118-035-P1-K1-H9
cccacgcgtacgttaacacgaaaacaaactattataaggatcaactactggatggggggcattaagaggtttacgatgcaatgc

SEQ ID NO: 6631 - DNA, 221 bp, Zea mays
  Clone ID: LIB3118-036-P1-K1-A10
gaagttcaccatcaaccatcacacgggcctgcacggatgcacctttaacaaaaaggcaccgaatgctctcaaggagatcaagaagtttgcccagaagaccatgggtaccacccaatgtcggatcgatgtgaagctcaacaagcacgtctggagcagcggtattcggagtgtgcccaggcgagttcgtatcaggattgcccgcaagaggaacgacgaggaat

SEQ ID NO: 6632 - DNA, 392 bp, Zea mays
  unsure at all n locations
  Clone ID: LIB3118-036-P1-K1-A4
tattactcaaatncctaattacctgaattaccctacccggaaatatcagctaaccccagaccgcccaacaccagctccaccctcgccaccgggttcctcgacgaggaggacggggaaggcgagatgttcttcgccccgcaccgcgcggcccgcggcggcgctggcgatgcccgcgggcccctccccttttccgggttcttcaacagcttcgacggcgccgatttcgacgacgacgacctcgcctgagggaactgccgcccggttcggtaacggatgttgttcgtggatcgcgaatcgtgttatgtcgataccgtgatggggtctcttaattagcgcatcgattcagactcgtttgggcaatctgaagatgtttagggatcaacattaccttt

SEQ ID NO: 6633 - DNA, 379 bp, Zea mays
  Clone ID: LIB3118-036-P1-K1-A5
ttaggagaagggccactcttactcagagataattaatgagagcctgatcgagtccgtggactcgttgaacccgttcatgcatgctcgcggtgtggccttcatggtcgataactgctccacaactgctcgtttgggatctaggaagtgggcaccacgcttcgattacatcttgacccaacaggcgtttgtgactgttgacaagaaagcaccgatcaaccaagacctcatcagcaacttcatgtctgaccctgtccacggtgccatcgaagtctgcgctcagctgaggcccactgttgacatttcagtgaccgctgatgctgatttcgtgcgtccagagcttcgacagtcttcataagcttgtatggatccgcagtgtgac

SEQ ID NO: 6634 - DNA, 400 bp, Zea mays
  unsure at all n locations
  Clone ID: LIB3118-036-P1-K1-A7
acccacgcgtccgcggacgcgtggnnnatgtagatatctactatactatactctaggaagcaaggacaccaccgccatggcagccaagatgcttgcattgttcgctctcctagctctttgtgcaagcgccactagtgcgacccatattccagggcacttgccaccagtcatgccattgggtaccatgaacccatgcatgcagtactgcatgatgcaacaggggcttgccagcttgatggcgtgtccgtccctgatgctgcagcaactgttggccttaccgcttcagacgatgccagtgatgatgccacagatgatgacgcctaacatgatgtcaccattgatgatgccgagcatgatgtcaccaatggtcttgccgagcatgatgtcgcatatgatgatg

SEQ ID NO: 6635 - DNA, 177 bp, Zea mays
  unsure at all n locations
  Clone ID: LIB3118-036-P1-K1-B1
cttcnnnnccccctccggttcgggttcgggttcgtgaggttctccggggttcggtttcgtgggtgagcggatcgagatggcggtgtctgatgttgagtaccgctgcttcgtcggcggcctctcctgggccactgacgaccactcccttcacaacgtctttagcacctacggcgaggt

SEQ ID NO: 6636 - DNA, 358 bp, Zea mays
  unsure at all n locations
  Clone ID: LIB3118-036-P1-K1-B10
atgaccanttgccagatcctcttcttcggaaagaagtacggttccggcggtgcttaaatggagaaatatgatgacgaacaagagcagtgtgtgttcccggtcctttccaatcaggatctggtgaagtttttgcctttcatatcgaagaaattaataattcatgtagagggaggattcttccaacaatttgttttggatggagacttagatctccaaacactcgtaactatcctactaggtggtgacatcagtccccaaaaacgtttatggtcatagagtctgcccttcgtttgtcagtcgggcaattcttcttgcatacaatgccttcgtttaagtatcggatgagttgctgcgactt

SEQ ID NO: 6637 - DNA, 388 bp, Zea mays
  Clone ID: LIB3118-036-P1-K1-B11
cccacgcgttgtcttcagcccaaacgtgactcagaaaggcatgctgtcttccgccctgcagtccttgctcggcgtgtacgcgggcaggacccagcaggtcatcacccagagatttgagcaactggctagaagcgtcgcttgaatggtgagcagcgacgagcagtcaggtgtggtctccactccagcctccattaacaagcagcgatatattggtcgtcgtctacccctcatgacggacagcgcgtcaggcagtggatccttaaattctggcgaatcccatgagctccaggcggcacttgtctcggatcttggctggtatcatgcacaggctctgcaagcctggcttgggcggtgtttttcgtggttgtttacttgaaacaacgttact

SEQ ID NO: 6638 - DNA, 381 bp, Zea mays
  unsure at all n locations
  Clone ID: LIB3118-036-P1-K1-B12
cccacnnnnacgcccacgcgtccgtgaattttggaataatgtatatggatttgatatgagctgcataaagaaacaggcgatgatggagccactggtagatacagtggatgcaaatcagattgtcactaactgccagttactgaagacaatggatatctccaaaatgaccccaggtgacgcgtcctttactgtaccattcaagctggtagcagagcggaatgattacattcatgctcttgtcgcatactttgacgtgtcgttcaccaaatgccataagctgatgggcttctcaacaggcccgagatcgaaagccactcactggaagcaactgttctctacctggaggatgttataactatctgtcagggggaaagcctgagt

SEQ ID NO: 6639 - DNA, 390 bp, Zea mays
  unsure at all n locations
  Clone ID: LIB3118-036-P1-K1-B3
ctgannnnnaaggtgaagtctgttgagatgcaccacgaggcgcttcaggaggctcttccgggcgacaatgttggcttcaacgtgaagaacgttgctgtcaaggatctcaagcgtgggttcgtggcctccaactccaaggatgaccctgccaaggaggctgccagcttcacctcccaggtcatcatcatgaaccaccctgggcagattggcaacggctatgccccagtgctggactgccacacctcccacatcgccgtcaagtttgctgagctcattaccaagatcgacaggcgatctggcaaggagctcgagaaggagcccaagttcctgaagaacggtgatgctggtatggtgaagatgattcccaccaagcctatggtggtggagaca

SEQ ID NO: 6640 - DNA, 264 bp, Zea mays
  unsure at all n locations
  Clone ID: LIB3118-036-P1-K1-B4
gggttggnttntaaaaggcctccggttcgggttcgggttcgtgaggttctccggggttcggattcgtgggtgagcggatcgagatggcggcgtcagatgttgagtaccgctgcttcgtcggcggcctcttctgggccacggacgaccactccctacacaacgccttgagcacctacggcgaggtcctcgagtccaagatcatactcgatcgggagacgcagaggtcccgcggcttcagcttcgtcaccttctacacggaggagg

SEQ ID NO: 6641 - DNA, 410 bp, Zea mays
  unsure at all n locations
  Clone ID: LIB3118-036-P1-K1-B5
gacccacgcgtccgcacctggccgnnnttgggctctggccctcctggtgaccgcccaaggggcccaggtcgttttgacggcgacaggccaaggtttggtgacagggatgggtaccgtggtggtcctcgtggtgctcctggtgactttggtggcgataagagtggagctcctgctgagttccagccatcattcaggaggcctggctttgggcgtggtggcggcagcggcttcggcgcaggcccaacctcttcttccatggagtgaagttgcccttggtttggacatggtgtttcccttcgcatgtggcctttagttttgaaggacagttattatgtactagtaatattactcggatcggccagtgctgacatatgcaaaaaaatgttcctgtcggtatacattggttccag

SEQ ID NO: 6642 - DNA, 396 bp, Zea mays
  unsure at all n locations
  Clone ID: LIB3118-036-P1-K1-B6
cggacgcnttnnntccagcaccgcaccacggtgcggcggaccacgccgtcgctgctcggaatgctcacccaggtgaagcgcctcgtcgccgtcgagaccgaggagatgtacaacgcgcgcaagcaggccgaggcggagaggcgcgcgcccagacccccgctcgtcgtctcccaccaccagccaccgccgtcggctctgaagccggcagccgccgccgtggagggtgccgctgccactgcgccatagcctctgggcatcagaagactttcattacagttcagcaggataataattaaactgccctgttgtttgggtctgctggtctccactctccagacgatcgcattggatcctcttgctcacaagatctgacaaccgatatgtctctagatcggt

SEQ ID NO: 6643 - DNA, 344 bp, Zea mays
  unsure at all n locations
  Clone ID: LIB3118-036-P1-K1-B8
gacgcggctgggntttggcacgctagcgagcgagagagacgcacatctatctgtcaagcgacgccgcggcctcgatcagagtcggaggcgaacacccccatggcggcggctggcggcggcgcaggagggaaggtatccttcaagatcatcctcacctccgaccccaagctccctttcaaagtgttcagcgtgcccgaggcggcgccctttaccgcggtgctcaagtacgccgcggaggagttcaaggtcccgccccagaccagcgccatcatcaccaacgatggaattggcatcaacccccagcaaagtgcaggcaacgtgtttttgaaacatgggtcggagct

SEQ ID NO: 6644 - DNA, 288 bp, Zea mays
  unsure at all n locations
  Clone ID: LIB3118-036-P1-K1-B9
acgcgcatacccttnagccggtcccggttgccattggaggccctggccttcaccctggagtgaaattccggaacgacatccaaacccctgggctcgccaacgtagccgcaaccgtgatgaacctccacggatttgaggctcctgctgactacgagcaaaccctcattgaagtggctgacaactaaacactggccacctgtgtccaattttggttatatgtagttctgagaatggacattcaataatttatgtttgcaagcacgttgctcaaactcaccaaaacatcga

SEQ ID NO: 6645 - DNA, 359 bp, Zea mays
  unsure at all n locations
  Clone ID: LIB3118-036-P1-K1-C4
aaataaatgaaannttatatcaagtgaaattaaattcgctattttggaagtcaacatcagagagtttatgaagggtaactggggagctcagtaacccccctacatggtcatatgcgttgatggtgaatatacaatgaacagagcatctttcccctcataggaccccttcccttttaatttattccatttgtatcatagctcatgaaattgtgatattgtttaggatggatcttttgtattcgatggagcaatatatgagttgaattgatggtagtcccatcattattgtaattgattaagagtatacacagttcatgtgaaaagcatggattttgattattgcaaagcaaaccttgtat

SEQ ID NO: 6646 - DNA, 335 bp, Zea mays
  unsure at all n locations
  Clone ID: LIB3118-036-P1-K1-C7
cttctcctcacgnnccggttcgggttcgggttcgtgaggttctccggcgttcggtttcgtgggtgagcggatcgagatggcggcgtcggatgttgagtaccgctgcttcgtcggcggcctcgcctgggccacggacgaccactccctccacaacgccttcagcacctacggtgaggtcctcgagtccaagatcatcctcgatcgggagacgcagaggtcccgcggcttcagcttcgtcaccttctccacggaggaggcgatgcggaacgccatcgagggcatgaacggcaaggagctggacggccacaacatcaccgtctacgaggtccagtccc

SEQ ID NO: 6647 - DNA, 156 bp, Zea mays
  Clone ID: LIB3118-036-P1-K1-C8
ctaacgcttgcaccctcttacaactggcaacaattgctgccattcaaccaacttgctttgacaaactcaacagtgttctaccaacaacccatcattggtggtgccctcttttagattgcttatgagttatagttcaataatgaagttttttggatg

SEQ ID NO: 6648 - DNA, 382 bp, Zea mays
  unsure at all n locations
  Clone ID: LIB3118-036-P1-K1-D1
cccacncttccgcccacgcgtccgctggcaggtgcttatggtgtgcttggtgctcatgctgcacagccaatgttgtatgttccaggtgctcctccaggttcgacaatgatcccaatggttctaccagatggtcgtcttgtatacgtaccgcagcctgcggggcagcagcctgtgcccatgacttcgcctccgccgccacagaaaggtgatcgtcattatggtggcagcggtggatcgagctccggtggaaggcgacaacagaggagagatgacagtggtggtagtaacaccaacagccgcaggggtcggcgccgtccctattgatgcttgtcgctgttagcgcttagaagttagaacctagtaggcatattcagagtatctc

SEQ ID NO: 6649 - DNA, 379 bp, Zea mays
  unsure at all n locations
  Clone ID: LIB3118-036-P1-K1-D10
cactgctnnagcatttggtggtgtatgcattggcgcattgaccgtcctggctgatttcatgggtgcgattggttcaggaactggtatattgctcgctgtgacaatcatataccaatacttcgaaacctttgagaaggaaagggcgactgagcttggtttctttggtttttgattagtagctgtggaaccttaacttggctatagctgaattttcttgtaagtccctgtagtgcttagccagttgtaacttaaagagttctgtttaggttgccttcttgcggccacaatcatgtagcagaatgtgcgtgtgtttcaggttagcgtgggggtatgtgcatctgtccaaagagaggttgcaatttggcaacccggttatttt

SEQ ID NO: 6650 - DNA, 308 bp, Zea mays
  unsure at all n locations
  Clone ID: LIB3118-036-P1-K1-D11
gacccacgcgtccgcanangngtatgaccggcgtggtcgtgctctgccacctcgcccaacgtgtcgcagccttcgctcagggacatacaacagatgcagcagaagaggcaccatggcggcgttttccacagccccaaaacccagacatgcggcttttctataccgccccacagcggagcgccagaggctgctggtggtggcggcgtgaaggacaacgtgcccaaccggtggttcaggccggagaccgacgccccgtacttcatacgttccattcagatcgaggagcaggctatgaaggactttaggcg

SEQ ID NO: 6651 - DNA, 390 bp, Zea mays
  unsure at all n locations
  Clone ID: LIB3118-036-P1-K1-D12
cccannnnnccggttaggtctcacatgcatgcttcatcacattgttgactgcataacgaaacacatcgtcgtcggatcggagatgatgagttccgtcgtcgtggatgctgctgctaccagcagcagcgagaagaagacgtcgtggccggaggtggtgggcatgtccatcaaggaggcgacggagactattctcaaggacatgcccaacgcgtacatccaggtgctgcctgttgggtcgcccgtgacgctggaccttcgccccgaccgggtccgtatcttcgttgacaccgtcgccatgactccgacagttgggtggtacataccaaatgctataaacaaaccctactttttattttatgtttccagttaataataaaccaggccttagct

SEQ ID NO: 6652 - DNA, 361 bp, Zea mays
  unsure at all n locations
  Clone ID: LIB3118-036-P1-K1-D4
cggacgcgtgggnnnaggattgcctcgctcgcctcctccaccaccggtccaaccaacctcgccacctccctctgcctcccctccctcctcccccaccgcatcacgcagctccaccggttttcacgacttggagcagatctgctacgccaccgccacgtagaccaacttggaggagggatcccatctgaatccgattcccatcccgtccgaatctcccttcccactcgcggacgggatgaccttgtgttgcctctcccgcgcaggcgtcagatctccaggacaagtttgaggccaaccgccatgtggatgttgaccttgaggagaagtttgatgtaataatatcataatggatgggctatat

SEQ ID NO: 6653 - DNA, 393 bp, Zea mays
  unsure at all n locations
  Clone ID: LIB3118-036-P1-K1-D6
gcggagcggcnnnnnacggccgccgggcgaggtgcgcgtacctgccgtcgatcgtcgccggatccatccaccatgggcggtggcaacggccagaagttcaagatggcccgcgagcgcaacttggagaagaacaagggggccaaggggagccagctcgagaccaacaagaaggccatgagcatccagtgcaaagtgtgcatgcaaacattcatgtgttccacgactgaagtgaagtgcagggagcacgccgaggccaagcatcccaagacagacgtgtaccagtgcttcccccatctgaagaagtgaaaggcctgaacttatcaaccagtgctggtttggccagggggcgttccttgtgttgagggtggtcattccgtgttatcttcccgtcag

SEQ ID NO: 6654 - DNA, 340 bp, Zea mays
  unsure at all n locations
  Clone ID: LIB3118-036-P1-K1-D8
ggccaaccctnnntttgtgtgaaacatacaggttccggggtcactcccttgcagacccagatgagctcaggaagcctgatgagaaaacacactacgccgcaagggattctatcacggccttgaagaagtacatcatagagcagaacctcgcaaccgaatccgagctgaagagcatcgagaagaagatcgacgatgtcgctgaggaggctgtcgagtttgctgacgcgagcccgcattcgccgcgcagccagcttgtgggagaacgtgtttgccgaccccaaaggctttggcatcggcccccgatgggaaggacaggggcgaggaacccaagggcacccaa

SEQ ID NO: 6655 - DNA, 292 bp, Zea mays
  unsure at all n locations
  Clone ID: LIB3118-036-P1-K1-E1
tctttcacnncttcgcccacgcgttcgccaacaagcaacatataaagtgggattcagttgcaacaacagagcaacattggcgaccaatatattttcccttcttatgctccttgctttttttgcatgtgttgctaacgcgacaattttcccttaatgcttacaagctcctatagctttccttctttccccatacctttcattaatgatagcgttagtatgtgaaaacccagcttttcagtcctattgggttcaacaagcatttgctgcaagtaacatacctttatctcccttt

SEQ ID NO: 6656 - DNA, 394 bp, Zea mays
  unsure at all n locations
  Clone ID: LIB3118-036-P1-K1-E10
gaaggacnnnagctattgaaaactgcaattgagaaggctgtatacactggcaaggttgtcatcggaatggatgttgctgcttcgtagatttacagtgacaaggaccaaacctattacctcaacttaaggtggagaataatgatggttcacagaagatatctggcgatagcttaaagaatgtatacaaatcttttgtgagcgaataccccattgtttcgattgaagatccttttgaccagcatgactgggttcactatgctaagatgactgaagaaattggagagcaagtgcagattgttggtgatgaccttctcgtcaccaaccccactagggttgctaaggctatcaaggagaaatcatgcaatgcccttttgctgaagttaaccaaatcgga

SEQ ID NO: 6657 - DNA, 118 bp, Zea mays
  Clone ID: LIB3118-036-P1-K1-E11
gtatgagaaaaggataaatggtattcctgacaaaaattatatgtataggccggggcaccaaaggattacaaaaacctttctcataacaaaataacacatttatatataaggggtcacg

SEQ ID NO: 6658 - DNA, 378 bp, Zea mays
  unsure at all n locations
  Clone ID: LIB3118-036-P1-K1-E2
gcaaattggggnnngggatccatcgagaggccgtcgacaggggaattaatggcgtcgtcgtctagcagcagccaccgccgcctcatcctcgcagccgccgtcctgctctccgtgctcgcggctgccagcgccagcgccgggacctcctgcgtgccggggtgggccatcccgcacaacccgctcccgagctgccgctggtacgtgaccagccggacctgcggcatcgggccgcgcctcccgtggccggagctgaagaggagatgctgccgggagctggcggacatcccggcgtactgccggtgcacggcgctgagcatcctcatggacggcgcgatcccgccgggcccggacgcgcagctggagggccgcctagaggac

SEQ ID NO: 6659 - DNA, 238 bp, Zea mays
  unsure at all n locations
  Clone ID: LIB3118-036-P1-K1-E3
tccacgcgttcgncccgacgttcgtaactagcaacattgaaagcacaatagtgtaccaacaatggcagccaaaatattttgcctccttatgctccttggtctttctgcaagtgctgctacggcgaccattttcccgcaatgctcgcaagctcctatagcttgccttctttccccggaccttttaccagcggtgtcttcggtatgtgaaaacccaatttcttcaacccttacaggatcc

SEQ ID NO: 6660 - DNA, 399 bp, Zea mays
  Clone ID: LIB3118-036-P1-K1-E4
cccacgcgtccggttaaagaagggggcgagactattttccctgatgcaaatgtgaacgtcagttctttaccatggtacaatgagctttcagagtgtgccaagagaggcctttctgtcaaaccaaagatgggagatgcacttcttttctggagcatgaaaccagatgccaccctggacccattaagtttgcatgggggttgtcctgtgattagaggaaataaatggtcgtcaaccaagtggatgcatatccacgagtacaaagcttgagccttcaagactcgagagtcgagcgtaccaaagatggatctctatgcatgtgacttggggctgtctactgggttgacacccatgtatgctttacagacccactgaagctgtattctttgctcctttgttgga

SEQ ID NO: 6661 - DNA, 387 bp, Zea mays
  unsure at all n locations
  Clone ID: LIB3118-036-P1-K1-E8
cccttncccaggaagaggcagccttctcaccgtcgcacccggcgatgcagcggcacgtcgcctccggccggccgtcgggcacggacggctccgacttttcttaccgcatggtcgtcgaatcccggtaccagagggtcgccgagggcagatcccgcctcgcgcgcctcatcctcgtgcaggcgctgcacctagtggccggaggcttgcttctattgctgtcgttgtccaagggggcggcggtgaacaagttcgccgtgctgtccatggccgcgggattcctggctatagtggtgggggaattagggcgaatgcggaccatgtcagtgctgcttcggctctacacaagcttgtcattaattgcggttgcattctctgtgacgtgcatta

SEQ ID NO: 6662 - DNA, 177 bp, Zea mays
  unsure at all n locations
  Clone ID: LIB3118-036-P1-K1-E9
nccacnnatccggggatcgccatttgtctatcttttcaatcaggaaaactgaaggaggagcagagcatcgtctggttgcgaagctcgaagcacacaaaagaattatatgggcatgctcatggaaccccttcggctatgaatttgcaactggatcaagggacaagagtgtcaagatat

SEQ ID NO: 6663 - DNA, 393 bp, Zea mays
  unsure at all n locations
  Clone ID: LIB3118-036-P1-K1-F1
ggccaaccctagtncagtgtgaaacatacaggttccggggtcactcccttgcagacccagatgagctcaggaagcctgatgagaaaacacactacgccgcaagggattctatcacggccttgaagaagtacatcatagagcagaacctcgcaaccgaatccgagctgaagagcatcgagaagaagatcgacgatgtcgttgaggaggctgtcgagtttgctgacgcgagcccgcatccgccgcgcagccagctgttggagaacgtgtttgccgaccccaaaggctttggtatcggccccgatggtaagtacaggtgcgaggatcccaagttcacccaaggcaccgcccaagtttaaggaggttaatctgcgctctgtaccactgtacttgggt

SEQ ID NO: 6664 - DNA, 386 bp, Zea mays
  unsure at all n locations
  Clone ID: LIB3118-036-P1-K1-F10
cgccaagcnnaccgtctcggagggcaccaaggccgtcaccaagttcacctcgtcctaagctcctttcgagtaggtccttaagcgccgtggcgccttttgactgtatggaatgtttgtcatctgaaagttgatctgagcagtgcaatatataattctggcatactattctcgcaatcgttttggggttcagaatgggactgacatcagagtaatatgtggcataccttctgatcctctgcactcgagaggattttgttgtggataagccacttgctgcctttgtttggtggataattgcttcgagcataagaaacagtgtatgctgctataaacatctatttgctatgtgacggcatctgcctgccagttgaacggttttctcgatc

SEQ ID NO: 6665 - DNA, 320 bp, Zea mays
  unsure at all n locations
  Clone ID: LIB3118-036-P1-K1-F12
cccacgcgttcgcccacncntnaacgcgggcgaccgagctagcatcagctgagagaagagagagggggcaatatataatggtgttgttgtcgctggaggcgttgaggaagaggaacgtggccggtccgctgctgctgttcaaccttgccctctacgtctacatgttggggttcgcgagctgggcgctcaacgccttcgacgaccacataggcgaccaccaattctacgacccacctgcatgcgacgcgtgcacgtgcttggacacgcacacgcttgcaggagcggtgccgctgcacgccgtctacgaggcgatgcttcac

SEQ ID NO: 6666 - DNA, 391 bp, Zea mays
  unsure at all n locations
  Clone ID: LIB3118-036-P1-K1-F2
gcaagaaggaagnntgagctggtgctaccagcgaagcgccatcttctgccactggcaataatggtgctatggaacgcggtacatcatcagacgttctctcggcaaggcgatcaagggctgctgcggacggggatggcgacaaggtggaagcaaagcacgaggccgaggctcaagcggtggcagaggcagccatcangcagctggagatcaattgacttcagaaaatgcgcggcaccatcttcttccagattttgtaattagctgccttgcctcctgtgcacattccgttctgcttagtncgtgtatgtcttggtcgggttagggctgtctgggcaaaagctgcattgtggtaggaacacctaggttttctgttgaggagaaaaaaaaacat

SEQ ID NO: 6667 - DNA, 372 bp, Zea mays
  unsure at all n locations
  Clone ID: LIB3118-036-P1-K1-F6
aggagatcttcctnnnngagctcatctccaactcctccgatgccttggacaagatcaggtttgagagtttgacggacaagaccaagctggatgcacagccagagctgttcatccacattgtccccgacaaggccaacaacacgctgacaatcatcgacagcggcattggtatgaccaagtcagaccttgtgaacaaccttggtaccattgcgcggtcaggcacgaaggaattcatggaggcacttgctgctggtgctgatgtgtccatgattggccagtttggtgtcggtttctactctgcctaccttgttgcagagagggttgtcgtgaccactaagcacaatgatgatgagcagtacgtgtgggagtctc

SEQ ID NO: 6668 - DNA, 332 bp, Zea mays
  unsure at all n locations
  Clone ID: LIB3118-036-P1-K1-F9
gcannnnagttagcacaatagtgtaccaacaatggcagccaaaatattttgcctccttatgctccttggtctttctgcaagtgctgctacggcgaccattttcccacaatgctcacaagctcctatagcttcccttcttcccccgtacctctcaccagcggtgtcttcggttgtgaaaacccaattttcaccctatggatcacaggcatcgagctggatctaccttatacccttgtctcaacatatcagctatacagagtaccttgtgcttattgccaaacataggcacacactacaacactggctagaacctgctgctacttagcacacag

SEQ ID NO: 6669 - DNA, 372 bp, Zea mays
  Clone ID: LIB3118-036-P1-K1-G1
ggtgtctgaccgtgttgtggactcaccgtgctgccttgtcactggtgagtatggctggacagccaacatggagaggatcatgaaggcgcaagccctgagggactctagcatgtcggggtacatgtcgagcaaaaagactatggaaatcaacccggagaacccaatcatggatgagctccgtaagcgcgccgaggctgacaagaatgacaagtcagtcaaggatcttgtgatgttgctgttcgagacagctctcctgacctccggcttcagcctggatgaccccaacacctttggcacccggatccatcgcatgctaaagctcggtctgagcatcgatgaggacgagtctgctgaggccgaagctgagatgcc

SEQ ID NO: 6670 - DNA, 195 bp, Zea mays
  Clone ID: LIB3118-036-P1-K1-G12
cccctccggttcgggttcgggttcgtgaggttctccggggttcgggttcgtgggtgagcggatcgagatggcggcgtcggatgttgagtaccgctgcttcgtcggcggcctcgcctgggccacggacgaccactccctccacaacgctcttcagcacctacgtgcgaggtccctcagagtccaaagatccatccc

SEQ ID NO: 6671 - DNA, 69 bp, Zea mays
  unsure at all n locations
  Clone ID: LIB3118-036-P1-K1-G4
gtttggaaaaaaaanaactaggatttagataagaaatacaaaagatacgggaccacccgtacccatact

SEQ ID NO: 6672 - DNA, 403 bp, Zea mays
  unsure at all n locations
  Clone ID: LIB3118-036-P1-K1-G5
acggggaacttcannnnatattttggctttgccaccgatgtagatgcagtggtttacttgatgctggtaaatgatctaattcatggactttatcctgaggctgtaaccattggtgaagatgttagtggaatgcctacatttgcccttcctgttcacgatggtggggtaggttttgactatcggatgcatatggctgtggctgacaaatggattgaccttctcaagcaaagtgatgaaacttggaagatgggtgatattgtgcacacactgacaaataggaggtggttagagaagtgtgtaacttatgctgaaagtcatgatcaagcattagtcggcgacaagactattggcgtttggttgatggacaaggatatgtatgttttcatggcccttgttagacctt

SEQ ID NO: 6673 - DNA, 355 bp, Zea mays
  Clone ID: LIB3118-036-P1-K1-G7
ttgagaggatcacggagatcgccggtgtggtggtgacgttcgacccgaagccgatcccgggcgactggaacggcgccggcgcgcacaccaactacagcacggagtcgatgaggaaggagggcgggtacgaggtgatcaaggcggccatcgagaagctgaagctgcggcacagggagcacatcgcggcctacggcgagggcaacgagcgccggctcaccggcaggcacgagaccgccgacatcaacacgttcagctggggcgtgggcaaccgcggcgcgttggtgcgcgtgggccgggagacggagcataacggcaagggctacttcgaggaccgccgcccggcgtccaacattgg

SEQ ID NO: 6674 - DNA, 337 bp, Zea mays
  unsure at all n locations
  Clone ID: LIB3118-036-P1-K1-G8
cggnnnnttgggcaaaaaaccaaggacaagacagctgcaaagtaaatctccaggaatggggaagcctagccctgttttgtacactgcgaaaattaattttggtggatggaaaatctaggtgccttgttgagcatttagcatgtgagtttagagattctggacactgaatccctttcacctttgaattgttggaatatcgggaatctgttcccctagttgcttttattatgaattcagatcctatctatgcaaagatcaaccttctggtttgtaacatcttttgtccatgttgctcgttgttgctcttgatgcccattctatatagatatgggtttaa

SEQ ID NO: 6675 - DNA, 377 bp, Zea mays
  unsure at all n locations
  Clone ID: LIB3118-036-P1-K1-G9
tngnggtnnnttgggatccacactaacgaacgaactcttgctccgatcacgagctagctgaggtcgacgatggcggctgtgctgaacagcaggaagacgccgcaggtggtggccgtgctggtggtggtggcgctgctggcttcgtccgcgtcggcggcgatcacctgcgggcaggtggggtcgtcgctggcgccgtgcatcccgtacgcgacggggagggccagcgcgctccccgcgtcgtgctgcagcggcgtcaagagcctcaacagcgcggcgcggaccagcgcggaccgccaggcggcgtgccgctgcctcaagagcctcgccaacagcgtcaagagcgtcaacatgggcaccgtcgccaccatccccggcaa

SEQ ID NO: 6676 - DNA, 403 bp, Zea mays
  unsure at all n locations
  Clone ID: LIB3118-036-P1-K1-H2
tcgcccacgcgttcnnccacgcgtccgcggacgcgtgggtgcagctgatctggtactcacggaagaaacaccaaagaagtcagaattggcttcaaagaagaggaaacataatgaggtggaaactgaaccattagcagagcctgcagaggaagcaatccaggaggatggtgaccaggaggatcggaagaagaagaagaaaaagaacaaggaaagcaaggaggctcctgctggtgaaggtgatggtgagaagaaaaagaaaaagaagtctaaggaggtcgaggaagagcctgttgtggctgctgcttcagaagttaagaagaagaaaaagaagtctgacgctgatggtgaggatgtcgcaatgcaaaccgaagaatcaggttagaaagagaatgaaaagaagaaa

SEQ ID NO: 6677 - DNA, 346 bp, Zea mays
  unsure at all n locations
  Clone ID: LIB3118-036-P1-K1-H8
acgcccactctgttnnnccacgcgttcgctgacgcgtgggtgcttttgttttggtgcggacggaagaaacaccaaagaagtcataattggcttctaagaagaggaaacataatgaggtggaaactgaaccattatcagagcctgcagaggaagcaatccatgaggatggtgaccaggtggttcggtagaagaagaagaaaaataacaaggaaagcaaggaggctcctgctggtgaaggggatggtgagaagaaaaagaaaaagaagtctaatgaggtcaaggaattagcctgttgtggttgctgctttagaagttaagaagaagaaaaagaagtctgacgctgatg

SEQ ID NO: 6678 - DNA, 399 bp, Zea mays
  Clone ID: LIB3118-037-P1-K1-A1
atccatcttcactagctcgtggtaataagggaagcttgatcatctttccttatggcggtgatgaagagcagcacaatggtcgcccttctattggctgatgccattctgtcctcactgtctccatgctacgaagccggcggctgcatcgggaaacccaagaagtcaccgccgccgccgagaaggccatacttctcgtcctattccgaggagcaccagaactgccgcttgatctgtagctccaagggtttcaaggacggtggctggtgtgacgaaagcgtggagcacaaagtgtgctgctgctcccattagaaatataatagcgtatgttatgttgatgcatatatatgcatcatccatctacctgtgtggtgcaaaactttgaataaaacctgaataaaa

SEQ ID NO: 6679 - DNA, 397 bp, Zea mays
  Clone ID: LIB3118-037-P1-K1-A10
cggacgcgtgggcggacgcgtgggctgaaagacctgtacaagtcctttgtttctgagtaccctatcgagtcgatcgaagacccatttgatcaggacgactggagcacttatgccaaactcactgatgagattggacagaaagtgcagattgtaggagatgatcttctcgttaccaaccccaccagggtcgccaaggccatcaatgagaagacctgcaatgctctcctcttgaaggtgaaccaaatcgggtctgtgaccgagagtatcgaagctgtcaggatgtccaagcgcgccggatggggagtgatggcaagccacaagagtggcgagacaaaggacaccttcattgctgacctctcagttggcctgtctacgggccaaatcaagacgggagctt

SEQ ID NO: 6680 - DNA, 399 bp, Zea mays
  Clone ID: LIB3118-037-P1-K1-A11
cggacgcgtgggcggacgcgtgggctgaaagacctgtacaagtcctttgtttctgagtaccctatcgagtcgatcgaagacccatttgatcaggacgactggagcacttatgccaaactcactgatgagattggacagaaagtgcagattgtaggagatgatcttctcgttaccaaccccaccagggtcgccaaggccatcaatgagaagacctgcaatgctctcctcttgaaggtgaaccaaatcgggtctgtgaccgagagtatcgaagctgtcaggatgtccaagcgcgccggatggggagtgatggcaagccacaggagtggcgagacagaggacaccttcattgctgacctctcagttggcctgtctacgggccaaatcaagacgggagctcct

SEQ ID NO: 6681 - DNA, 202 bp, Zea mays
  Clone ID: LIB3118-037-P1-K1-A12
gaaccggacacaaaaacacggggcgacccacgcggccgcggacgcgagggcggacgcggggaccgaaagaaccgaacaagagaacagaaggaggggacgggacggaaaggagagaagacaaaaacaaaacaggacgaagagaagggggcacgcaaaacaaaaaaaagaaaaaggccagacagggcagagggaacaagacgac

SEQ ID NO: 6682 - DNA, 392 bp, Zea mays
  Clone ID: LIB3118-037-P1-K1-A2
atccatcttcactagctcgtggtaataagggaagcttgatcatctttccttatggcggtgatgaagagcagcacaatggtcgcccttctattggctgttgccattctgtcctcactgtctccatgctacgaagccggcggctgcatcgggaaacccaagaagtcaccgccgccgccgagaaggccatacttctcgtcctattccgaggagcaccagaactgccgcttgatctgtagctccaagggtttcaaggacggtggctggtgtgacgaaagcgtggagcacaaagtgtgctgctgctcccattagaaatataatagcgtatgttatgttgatgcatatatatgccatatccatctacctgtgtggtgcaaaactctgaataaaacctg

SEQ ID NO: 6683 - DNA, 389 bp, Zea mays
  Clone ID: LIB3118-037-P1-K1-A3
atccatcttcactagctcgtggtaataagggaagcttgatcatctttccttatggcggtgatgaagagcagcacaatggtcgcccttctattggctgttgccattctgtcctcactgtctccatgctacgaagccggcggctgcatcgggaaacccaagaagtcaccgccgccgccgagaaggccatacttctcgtcctattccgaggagcaccagaactgccgcttgatctgtagctccaagggtttcaaggacggtggctggtgtgacgaaagcgtggagcacaaagtgtgctgctgctcccattagaaatataatagcgtatgttatgttgatgcatatatatgcatcatccatctacctgtgtggtgcaaaactctgaattaaac

SEQ ID NO: 6684 - DNA, 379 bp, Zea mays
  Clone ID: LIB3118-037-P1-K1-A4
gttctcgtcgtgtgcctggctctgtcagctgccagcgcctctgcaatgcagatgccctgcccctgcgcggggctgcagggcttgtacggcgctggcgccggcctgacgacgatgatgggcgccggcgggctgtacccctacgcggagtacctgaggcagccgcagtgcagcccgctggcggcggcgccctactacgccgggtgtgggcagacgagcgccatgtaccagccgctccggcaacagtgctgccagcagcagatgaggatgatggacgtgcagtccgtcgcgcagcagctgcagatgatgatgcagcttgagcgtgccgctgccgccagcagcagcctgtacgagccagctctgatgcagcagcagcagcagc

SEQ ID NO: 6685 - DNA, 402 bp, Zea mays
  Clone ID: LIB3118-037-P1-K1-A5
gttctcgtcgtgtgcctggctctgtcagctgccagcgcctctgcaatgcagatgccctgcccctgcgcggggctgcagggcttgtacggcgctggcgccggcctgacgacgatgatgggcgccggcgggctgtacccctacgcggagtacctgaggcagccgcagtgcagcccgctggcggcggcgccctactacgccgggtgtgggcagacgagcgccatgtaccagccgctccggcaacagtgctgccagcagcagatgaggatgatggacgtgcagtccgtcgcgcagcagctgcagatgatgatgcagcttgagcgtgccgctgccgccagcagcagcctgtacgagccagctctgatgcagcagcagcagcagctgttggcagctcagggtctcaac

SEQ ID NO: 6686 - DNA, 312 bp, Zea mays
  Clone ID: LIB3118-037-P1-K1-A6
gttctcgatgtgtgcctggctctgacagctgccagcgcctctgcaatgcagatgccctgcccctgcgcggggctgcagggcttgtacggcgctggcgccggcctgacgacgatgatgggcgccggcgggctgtacccctacgcggagtacctgaggcagccgcagagcagcccgctggcggaggcgccctactacgccgggtgtgggcagacgagcgccatgtaccatccgcttcggcaacagggctgtcagctgcagacgaggatgatggacttacatgtccgtcccgcatcagctgtagattatgatgca

SEQ ID NO: 6687 - DNA, 360 bp, Zea mays
  Clone ID: LIB3118-037-P1-K1-A7
cccacgcgtccggcctcttatcagactacaaagggagaaactaaaaccagtcttctcttgacttctggatggtggggcttgtcacgtcacttccactatgtcccagagatactatctgcatttttctggactgttccagctcttttcaatcacttcctaccatacttctacgtgatctttctgactatattactgtttgaccgagcaaagagggatgatgaccggtgttcatcaaagtacgggaagtactggaagatttactgcaacaaagtaccatacagagtcattcctggcatttactgagcatctcgagttctggacgactcttgatattaagctcaacagatgccacgatatcca

SEQ ID NO: 6688 - DNA, 321 bp, Zea mays
  Clone ID: LIB3118-037-P1-K1-A8
cccacgcgtccgcggacgcgtgggcagacttcgatccaataaggcaccacaacgattactgtccttgggtgaatggaaatgttgctgctgcatgctgtattagtaccggttcgagcacagctctttcaggctggcagctcacggtagatgccatcgagactctgcagtctcttggtcaggcccaaaatcagacgatgcagtcagactctgcggcttcattatataaggacgatcacgtcccgcctagccggaagctgctgaaaagtgcgaaccacagcaagagctgagctctgggacaagattcttcaatgctcatagaaa

SEQ ID NO: 6689 - DNA, 381 bp, Zea mays
  Clone ID: LIB3118-037-P1-K1-A9
cccacgcgtccgcggacgcgtgggcagacttcgatccaataaggcaccacaacgattactgtccttgggtgaatggaaatgttgctgctgcatgctgtattagtaccggttcgagcacagctctttcaggctggcagctcacggtagatgccatcgagactctgcagtctcttggtcaggcccaaaatcagacgatgcagtcagactctgcggcttcattatataaggacgatcacgtcccgcctagccggaagctgctgaaaagtgcgaaccacagcaagagctgagctctggagcaagattcttcaatgctcatagaaaagttgttttgtcgaggccctaacctgagcaggggcgatggcttgcgtttctgtgaaattt

SEQ ID NO: 6690 - DNA, 219 bp, Zea mays
  Clone ID: LIB3118-037-P1-K1-B1
tgctcattgccaatggagttcactcctgtctttcgagaaccaaaatgccttgggtgttaagtgacgtgttgcatgatttttttcctccgccccgttcagttattatatatgctactatggcgctaccctttttggacgtttttggtgcttgtgacctcactgatcaatgcgagatgtaatcagctcttgtgctgtagctttcagagtgctgtcgctgtc

SEQ ID NO: 6691 - DNA, 304 bp, Zea mays
  Clone ID: LIB3118-037-P1-K1-B10
cccacgcgttcgcccacgcgtgcggactagttctagatcgcgagcagccatggcgccgtaaacggcggcggggaggacagcttcggcaagggcgcggtggacgccgactaggacgaggcgaccatggcgttctcctccagctgcccatcgttccactcggaggacttcgtattctcgccgaccaatcccaaggcgccacctccacctaagcatcggggcaagaggtgcctagcggtgttctcccgactgcgcgcggtgcttgccgcggccatcgtcgtacggaaccgacaggtcgggctctgag

SEQ ID NO: 6692 - DNA, 113 bp, Zea mays
  Clone ID: LIB3118-037-P1-K1-B11
cggacgcgtgggcggacgcgtgggtctggattatctatgttctgtactgaactactgtgttggactgtaagttcagctcgtaatacaatagctcttaagatatctgggcactt

SEQ ID NO: 6693 - DNA, 389 bp, Zea mays
  Clone ID: LIB3118-037-P1-K1-B12
gtgaagctatttgggaagctggaatccaaggttaagaacaagataccaaaaaatgtggcagctgatatcaatccagatgggaacagtaataagcaccagaagaaaggtagaagagagcccaggctaggtacaagctcaagcatgaaggtcccattcagtcgcccgtttttaaggagacatttctccattgggtctcgaccgcctcggtcagtctcagaaactgattcgacgagaaagaagggattctgggcaagacactggagggagtagaatagcctccaattgccattaggtgggctggtttccattagtgtgttttggaagggtcttcgagaggaggtgaactctccagcatgcaagctcacggagttcagactggcacaagggct

SEQ ID NO: 6694 - DNA, 254 bp, Zea mays
  Clone ID: LIB3118-037-P1-K1-B2
agctaattgcaattggtggtgactattgggtatgctggaccaaaatgccttgtgggggaagtgaagagcagcataatggttgtccttctatcggctgaggtaatatatatgctactatggcgatgctatgaatgcacgtgttggatgcttgaaacctaaatgataaatgcgagatgtaataagcctatcgtgctgtagctattcagaggggtgccagtgctgccaattgatctagaactacaagggtataaagg

SEQ ID NO: 6695 - DNA, 411 bp, Zea mays
  Clone ID: LIB3118-037-P1-K1-B3
cccacgcgtccgccgcattgcagaacctcgccgcctccacccgcaccacaccaccggcgatgtccacagcggcggcgcagggcggcagcgacaagccggcgctccggaggcccgtcttcaccaaggtcgaccagctcaggccgggcaccaacgggcacaccctcaccgtcaaggtcgtcagcgccacccccgtgcctgggcgcgcgcgcccaggcgcacccgccgccgccccatcccgcgcgccgcgcatcgccgagtgcctcgtcggggacgagaccggcgccatcgtcttcaccgcccgcaacgaccaagttgacttgctgaagcccaatgcgacagtgatcttgcgcaatgccaaaatagacatgttcaaaggatcaatgaggcttgcagtggacaagtgggggcggg

SEQ ID NO: 6696 - DNA, 389 bp, Zea mays
  Clone ID: LIB3118-037-P1-K1-B4
cggacgcgtgggcggacgcgtggggttcaacatcgtgtctcctggcgcggacctgtccatctacttcccgtacaccgagtcgcacaagaggctgacctcccttcacccggagattgaggagctcctgtacagccaaaccgagaacacggagcacaagttcgttctgaacgacaggaacaagccaatcatcttctccatggctcgtctcgaccgtgtgaagaacttgactgggctggtggagctgtacggccggaacaagcggctgcaggagctggtgaacctcgtggtcgtctgcggcgaccatggcaacccttccaagggcaaggaagagcacgccgagttcaagaaagatgttgacctcatcgagcaatacaacctgaacgggcaca

SEQ ID NO: 6697 - DNA, 403 bp, Zea mays
  Clone ID: LIB3118-037-P1-K1-B5
cggacgcgtgggcggacgcgtggggttcaacatcgtgtctcctggcgcggacctgtccatgtacttaccgtacaccgagtcgcacaagaggctgacctcccttcacccggagattgaggagctcctgtacaggcaaaccgagaacacggagcacaagttcgttctgaacgacaggaacaagccaatcatcttctccatggctcgtctcgaccgtgtgaagaacttgactgggctggtggagctgtacggccggaacaagcggctgcaggagctggtgaacctcgtggtcgtctgcggcgaccatggcaacccttccaaggacaaggaggagcaggccgagttcaagaagatgtttgacctgattgagcaatacaacctgaacgggcacatccgttggatctcc

SEQ ID NO: 6698 - DNA, 340 bp, Zea mays
  Clone ID: LIB3118-037-P1-K1-B6
acgcggacgcgtgggcggacgcgtggggttcaacatcgtgaatccgggcgcgcacctggccgaggacttaccgtgacaccgagtcgcacaagaggctgacctcccttcacccggagattgaggagctcctgtacagccaaaccgagaacacggagcacaagaccgttacgaacgacaggaacaagccaatcatcttgtccatggctcggcgcgaccgagtgaagaacttgactgggctggtggagctgtacggtcgaaacaagcggatgcaggagctggtgaaccttgtggctggctgcggcgaccattgcaaccctactaaggacaaggaggtgcaggc

SEQ ID NO: 6699 - DNA, 92 bp, Zea mays
  Clone ID: LIB3118-037-P1-K1-B8
aaaaaaaaaaaaaaaaaaaaaaaaaaaaaaaaaaaaaaaaaaaaaaaaaaaaaaaaaaaaaaaaaaaaaaaaaaaaaaaaaaaaaaaaaaaa

SEQ ID NO: 6700 - DNA, 392 bp, Zea mays
  Clone ID: LIB3118-037-P1-K1-B9
cccacgcgtccgcccacgcgtccggactagttctagatcgcgagcagccatggcgccgcagccggcggcggggaggacagctccggcaagggcgcggaggacgccgacgaggacgaggcgaccatggcgttctcctccagctgcccgtcgttccactcggaggacttcgtatccccgccgcccaatcccaaggcgccacctccaccgaagcagcggggcaagaggtgccgagcggcggtctcccggctgcgcgcggcgcttgccgcggccatcgccggacggcaccgacaggtcgggctcggagcgcggatcacgggcacgctttacagccgacgccgcggtcacgtgcaccttaagttccaagtggacccgtgcgcctgccccgcgctgct

SEQ ID NO: 6701 - DNA, 346 bp, Zea mays
  Clone ID: LIB3118-037-P1-K1-C1
cggacgcgtggggcactttgtggagatgggctggcatgcaacacacatagcgaaaccacctacaagggctacaccatcccgtacaacaagcgctggcacaccgtatacggcaagggcctctgcgccgagaagtggttatgggttatctacacagctaagcaggatggtgctacgctcttgggtttgactaatacttgaaatggacatgatgaccactctcatgatcatggacacgggcatgaggcattatcatagtaatctgcacattaagttccttactggctgcggacgatgccaggcatgttccaacagctaaagttcgagtgaataaattctatcaccctgc

SEQ ID NO: 6702 - DNA, 360 bp, Zea mays
  Clone ID: LIB3118-037-P1-K1-C10
attcgttactacacagggatggaagaccttggctgtatgctgtccagagcagggcggttgaattccccgatgttatttaccttgagctgcatgcttctgcaatgctctgcctaccttctggagaatgtatgttaccagatgcaacatcatgcacaggttagacaagtgcactatattgcaactgtcagcgaagatgatgagctgcatcgcctgttaaaggtggatgtccaggtctttcatcaagacccctgctgtattgaagaaactcttcgctgtttaacatcagaacgtgatggatatgggcttcatctacaacaacatgggggtacataatgttgctaatttggcttggttaacttt

SEQ ID NO: 6703 - DNA, 396 bp, Zea mays
  Clone ID: LIB3118-037-P1-K1-C11
ggcgcggcaagggcgggaagggcctgggcaagggcggcgcgaagcgccaccggaaggtgctccgcgataacatccaggggatcacgaagccggcgatccggcggctggcgcgcaggggcggcgtgaagcgcatctccgggctcatctacgaggagagccgcggcgtcctcaagatcttcctggagaacgtgatccgcgacgccgtcacttacaccgagcacgcgcgccgcaagaccgtcacagccatggacgtcgtctacgcgctcaagcgccagggccgcaccctctatggcttcggcggctaggctaggccggccgcgcctcgctgtcgtcgctgcggttctattgtttttgcaattcgcaagtagtggctcggtggcgaaaatgctggttact

SEQ ID NO: 6704 - DNA, 364 bp, Zea mays
  Clone ID: LIB3118-037-P1-K1-C12
cccacgcgtccggtgcacccggccgacctgtgcttcaagctccccgacggggtgagcctggaggagggcgccatgtgcgagccgctgagcgtgggcgtgcacgcgtgccgccgagcggcggtgtgaaccgcatatgccgcttatgtacaaggagagccgcggattgctcaagattttcctgtagaacgtgatccgcgacgccgtcacttacactgagcacgcgcgcggcaagaacgtcatagacatggacgtggattactctctcaagcgccagggcctgcactctctatggcttgggtgtataggctaggcacaccgcgccttaatttcttcggttgggttctattgtttttgaaattaaaaa

SEQ ID NO: 6705 - DNA, 321 bp, Zea mays
  Clone ID: LIB3118-037-P1-K1-C2
gaacggagtgaatgcatggagtggcacagcagcctgcattgccacaaataaaatgaacccagaaggatttggtgtctttttcttttgtcagtttggtatcttgggtcctggtagagaaactttgtttcggtttgcttttgatgctttgggctgaactgtgtgtcaaatcagtagactgttatggattcaggaataaaaataagagtgagaacggtttctgtgcatcaaaaaaaaaataaggaaaaataataataataataacaaaaaagattcttactggcttgaaacagaagacaggaatgttaaaaacaaaataaaatg

SEQ ID NO: 6706 - DNA, 308 bp, Zea mays
  Clone ID: LIB3118-037-P1-K1-C3
cggacgcgtgggcggacgcgtggggtcgatgttgatctggtataccttgctatgaactggttaaagtttgtgctggtttgggattttttgtgcatcttgtgataccttaagtcttcatcatttaaatgtttagccgtaataatctggttatttttctaaagaaaaaataagaagactgttatggattcaggaataaaaaataagagtgagaacggtttctgtgcatcaaaaaaaaaataatacaattaaaaaataaataaaaaaaataaaaatttataatctaaaaggggggcccttttaggggtccc

SEQ ID NO: 6707 - DNA, 324 bp, Zea mays
  Clone ID: LIB3118-037-P1-K1-C4
tggacgcgtgggcgcacgcgtggggtcaatgttgatctgctatacctagctatgaactgggcagcttatatcaattcaggctattttcagtgcatgttgccacacccaaagtcttaataatttaaatgagtaacatggttaagcctggttgtcccattcaatcccaccagctagtaatttgaatgggataaaacccaattgattaaccttacatcttccaacattcttattcgacaagaaagaaaggattcttgccaatacacttttaacaactctgtaaaccctattactgctgttacgttgggttcatacttttggcacaat

SEQ ID NO: 6708 - DNA, 399 bp, Zea mays; identical to SEQ ID NO: 5486
  Clone ID: LIB3118-037-P1-K1-C5

SEQ ID NO: 6709 - DNA, 86 bp, Zea mays
  Clone ID: LIB3118-037-P1-K1-C7
atggcacggccttcgggccgggaacacattattgaagatcttgccctatccactgtggatggtaggattggctcctaccacaaggg

SEQ ID NO: 6710 - DNA, 352 bp, Zea mays
  Clone ID: LIB3118-037-P1-K1-C8
gcaacatagaaagcacaatagtgtaccaacaatggtagccaaaatattttgcctccttatgctccttggtctttctgcaagtgctgctacgacgaccattttcccgcaatgctcacaagctcctatagcttctcttcttcccccatacctctcaccagcgttgtcttcagtatgtgaaaacccaattcttcaaccctacaggatccaacaggcaatcacagcaggcatcttacctttatcacccttgttcctccaacaatcatcagccctattacatcaattacctttggtgcatttattggcacaaaacatgagggcacaacaactacaacaactcgtgctagcaaacctt

SEQ ID NO: 6711 - DNA, 359 bp, Zea mays
  Clone ID: LIB3118-037-P1-K1-C9
gttcgttactacgcagggatggaagaccatggctgtatgctgtcgagagcagtccatttgaatcccccgatgttattttccttgagctgcatgcttctgcaatgctctgcctaccttctggagaatgtatgttaccagatgcaacatcatgcacagctttgacaagtgcactatattcaactgtcagtgaagatgatgtgctgcatcgcctgttgaaggtggatgtccaggtctcttctagagacccctgctgtattgaagtcgctcttcgctgcttagcagcagaaggtgatggatatgggcttcatgaaaccaaccatggaggtcttcttgctgcaatcatggctgctggctttaaa

SEQ ID NO: 6712 - DNA, 394 bp, Zea mays
  Clone ID: LIB3118-037-P1-K1-D1
gtgaacgtggccggcgagatggtcggctcgaggaacgtgagggacaggcagccgctgatgggcgccgaggacttcgcgttctacgccgaggcggtcccttccacctactactacttcgtgggcatgtacaacgagacgcgcgggccgcaggcgccccaccactccccctacttcaccatcaacgaagacgcccttccctacggcgcggccgggcaggcggcgctggcagctcgctacctactcgagcgtcagcagcctgctgccgccaccgctgataaggcagaaacccatgatgagctgtagatagtacatgatgtttgcgtccctgtccctgtgttgatggaattagattgagcaataatttcttcgccaagtttattcagcggctgtacat

SEQ ID NO: 6713 - DNA, 346 bp, Zea mays
  Clone ID: LIB3118-037-P1-K1-D10
ccaagggttcaaggaaaactgtttaagcgcgctatttaaccactccaatcgggtgtccaagagagccttgtacttgagtgccttcatgggcagggcaatctctttacttatgaacggggccaacgtgaaggggtacacggtctgggcgtttctggacctgtgtgagatgttggcgggctactacttgcgatacgggctgtaccatgtggattttcaggacccggagatgtggctgacaccaaaacattttgcgctggggtacagcaaggtctttgttaatgaaagcgacataataaagaacgttgtgtgcgatactgacgatgcgcgctcggttgctgctgaacaa

SEQ ID NO: 6714 - DNA, 226 bp, Zea mays
  Clone ID: LIB3118-037-P1-K1-D11
cccacgcgatcaaaaaaaaaccatactactaactctccaaccaaaacaatggtgggcactaaagcgccgtgtactgcatggcatacatggtcagccaactctctgctctcaaggacgtaactctacctgaaggggtacttcctgtgccaggctcctggaccagttttagcttgctgatgtatattactctagaatcggacctttaccatatattttttcaccacca

SEQ ID NO: 6715 - DNA, 369 bp, Zea mays
  Clone ID: LIB3118-037-P1-K1-D12
ctagcaacatagaaagcacaatagtgtaccaacaatggcagccaaaatattttgcctccttatgctccttggtctttctgcaagtgctgctacggcgaccattttcccgcaatgctcacaagctcctatagcttcccttcttcccccgtacctctcaccagtgttgtcttcagtatgtgaaaacccaattcttcaaccctacaggatccaacatgcaattgcatcaggcatcttacctttatcacccttgttcctccaacaatcatcagccctattacagcagttacctttggtgcatttattggcacaaaacatcagggcacaacaactcgtgctagcaaaccttgctgcctactctcagcaacaaca

SEQ ID NO: 6716 - DNA, 395 bp, Zea mays
  Clone ID: LIB3118-037-P1-K1-D2
gtgaacgtggccggcgagatggtcggttctaggaacgtgagggacaggcacccgctgaggggcgccgaggacttctcgtactacgccaaggcggaacattgcacctactactacttgaaagggcatgtacaacaagacgcgcggtccaaaggcgccccaccactcacactacttgaccatgaacgaagacgcccttccctacggcgcgggcggacaggcggcgatggcagctcgctacctactggagcgtcagcagcctgctgccgccaccgctgataaggcagaaacccatgatgagctgtagatagtacatgatgtttgcgttcctgtccctgggttgatggaattagattgagcaataatttcttcgccaagtttattaagcggctgtacat

SEQ ID NO: 6717 - DNA, 337 bp, Zea mays
  Clone ID: LIB3118-037-P1-K1-D3
cccacgcgtacgaggaaaacggctacggggcgctcttcaacgactccatccatgaccacgagagagccgagtacttgagtgcctacatgggcagggcactcgctgcactcaggaacggagccaacgtgaaggggtacttcgtctggtcggtcctggacgtgtttgagctgctggcgggctactactcgcgatacggcctctaccatgtggattttaaggacccggagctgccgaggacgccaaaactctctgcgctgtggtacagcaagttctttgagaatgaaatcgacataataaagaacgttgtgagcgatactgacgatgcgcgctcgcatgc

SEQ ID NO: 6718 - DNA, 388 bp, Zea mays
  Clone ID: LIB3118-037-P1-K1-D4
cggacgcgtgggtgaagctgttgctcttaagcctccggaagttaccatcgacatggctatgcagcagcagcatgaagctgagcttgctgcagcagctgcacaacctcttcctgatgacgatgatgatctgattgagtagaaaggatcatgagtcttgaacttgagcaggagttgtgccttgcgtgttttaagttgttctagggtgaactcttgagttctcattgtctggatcatctttttctccttggatgtgttgcatcttttgagtgtggaaatggatggtactcctcgccatgaatttgctggctactttatacattgctttgtaactctgtttggtgaaaaaaaaaaaaaaaaaaaaaaaaaaaaaaaaaaaaaaaaaaaacaa

SEQ ID NO: 6719 - DNA, 388 bp, Zea mays
  unsure at all n locations
  Clone ID: LIB3118-037-P1-K1-D5
gctggtggtggtcggcggctgggacccggagacgtgggcgccgacggacgcggtgctcgtctacgacttcctgtcgggcgcgtggcggcgcggcgcgcccatgcccggcccgcgcaggtccttcttcgcctgcgcggccgtgggcggcgccgtgtacgtggccggcggccacgacgccgagaagaacgcgctgcgctcggcgctggcctacgacccgggcgccgacgcgtgggcggggctcccggacatggcggaggagcgcgacgagccgcgcgggctctgcgtcgccggacgcttcgtcgtcgtcggcgggtacccgacgcgggcgcagggccgtttcgtcgcctccgcggagtccttcgacccggcggngggggcgtctcccgcc

SEQ ID NO: 6720 - DNA, 370 bp, Zea mays
  Clone ID: LIB3118-037-P1-K1-D6
gctggtggtggtcggcggctgggacccggagacgtgggcgccgacggacgcggtgctcgtctacgacttcctgtcgggcgcgtggcggcgcggcgcgcccatgcccggcccgcgcaggtccttcttcgcctgcgcggccgtgggcggcgccgtgtacgtggccggcggccacgacgccgagaagaacgcgctgcgctcggcgctggcctacgacccgggcgccgacgcgtgggcggggctcccggacatggcggaggagcgcgacgagccgcgcgggctctgcgtcgccggacgctttgtcgtcgtcggcgggtacccgacgcgggcacagggccgcttcgtcgtctccgcggagtcctttgacccggcg

SEQ ID NO: 6721 - DNA, 206 bp, Zea mays
  Clone ID: LIB3118-037-P1-K1-D7
caaaaatgctctcgagtggtgctttgtcaagcaaagctccatctgcgcgccctaccccgttgtgcgaactgtttggcatcaaacttgtgtggttgctgtcttctatgttctgctagtttatgttcggagtccgtgggaatatactagctgattaataaaaagaaaaaactgatgtgatgccataatagtataatttcatggctttt

SEQ ID NO: 6722 - DNA, 358 bp, Zea mays
  Clone ID: LIB3118-037-P1-K1-D8
agcaattctttaaggactggcctatggcttcataagatatatttgtcaatccacttcctgtgaacgatgctttatattgacatttgaaggcctgagcaatgcttttgtattgctggtcccttggcgaaagatgtacgttctgctaaaggagttatcttagagaaagcactcggaaacgccgatgactgacgatataacgatccagttatgaaatacaggtcgtgcatgaaatgtacaaacagagtaacttggtcttcggtttgacgcccatgactcagctcgcggtggcggctgcagattctgcaggatgccatcgtgacgcactactcgcgtggtcatacttcaacttgtctagcca

SEQ ID NO: 6723 - DNA, 399 bp, Zea mays
  Clone ID: LIB3118-037-P1-K1-D9
ggaggacgagcgggtgctggtggtcagcggcgagcggcgccgggaggagcgcgaggacgacgccaagtacctgcgcatggagcggcggatgggcaagttcatgcgcaagttcgtgctgccggacaacgccgacgtggacaaggtcgccgccgtttgcagggacggcgtgctcacggtgaccgtcgagaagctgcccccgccggagcccaagaagcccaagaccatcgaggtcaaggtcgcctgagggagcaagcagtagcccgtgcttctgaaactttgtgtgttttgtgtttgcttcctttgtgacgcaaagcagaatgccctgatgctttctccatagaataaatctctacatgtctcttgtaaccttttctggtgaacgtcgtgccgcgatgaatc

SEQ ID NO: 6724 - DNA, 406 bp, Zea mays
  Clone ID: LIB3118-037-P1-K1-E10
gccgcgacgacgatgacgacggaggaggaggagagtggggtcccgacgtcgagcgacatcaactctctgaggtcgatgaggctggccaacaacagcggtgggagcgagaggagcagcggcagcagtgacgtgaacaacaagagcagcgacgacaggagcgccgccgcggcggggaaggcgaaggggacgatgctgatgccgaagaagatgctgagcaagctctggtccgggaaaacgaacgccggcgagagcagcagctcggacacgtcggatagccctgggtccgccaacccggaggaggcgaagtccacgcagtcgcggatcacatggcgctcggtatcctagtcgcgcgcgcgcggcgggggttcagcggtgtcacaggctcacagccttagttttgttcttg

SEQ ID NO: 6725 - DNA, 403 bp, Zea mays
  Clone ID: LIB3118-037-P1-K1-E11
gccgttggatgttttatgctgtgctggggttttttatcccagccttgaatggcttactgccatttgcttctctttctgactggaataaccatttcactaaggagctaaaatccatcttcattgatgagagaatcgaagcctgaatgaatcatggatgcaacaattggtgcagtgttgtcctttttgtgccagcggtgcagccaaaggaaagcgaggactgaatgatctttaactgcaactagtgcacaatgtcaatgatttctgagaaatgaaatggttctgtttgagaagcgattcagaagttcagcttggtgttgtctcaagagaataatatatgggatggaagttataggcaccgttcaaggaataagttgactgtacactactgcaggagacgctagca

SEQ ID NO: 6726 - DNA, 416 bp, Zea mays
  Clone ID: LIB3118-037-P1-K1-E12
cccacgcgttcgaaaaaaataaaaaaaaaaaaaaaaaaaaaaaaaaaaaaaagaataaataaaaaaaaaattatatatataaaaagaaataacaataaaaaataaagaaaaaaaaaaaaatataaaattggggggggcctttttaggggatccaaattatcgatcccgtgcttgggaggtaatattttttttttggggcaacctaaattaaattaattggcgggggttttacaactgtgagattggaaaaaccctgggtgtccccaatttaatggctttgaaaaaaatccccttttggccgggtggggtattagaaaaaggggccgcaccaatcgccttttcaaaaagttgcgcagtctaaatgggaattgggaccccccttgtatgggcactttaagcgggggggttttgttgtt

SEQ ID NO: 6727 - DNA, 402 bp, Zea mays
  Clone ID: LIB3118-037-P1-K1-E2
gcaagacatacgtgatgttcccagctaatccaaaggtccctccttcggatgcttgctgtggtgtcatcaagaaggcaaacgtttcttgcttgtgctccaaggtcaccaaagaaactgagaaggttgtgtgcatggagaaggttgtgtatgttgctgagcagtgtaagaggccatttgagcatggcttccagtgcggaagctacaaggttccagcaaactgatgatatcgcaagagggaagcgcttgacgtagtctttagatttcaattgttgcagccgatcaaccttcttagggttgtataatatgaagtcaatgttgagactaatggggaggtgggagaggcctattgatgcatcaaaagtattatgagctaataataaagccttctccacagattttatg

SEQ ID NO: 6728 - DNA, 403 bp, Zea mays
  Clone ID: LIB3118-037-P1-K1-E3
gcaagacatacgtgatgttcccagctaatccaaaggtccctccttcggatgcttgctggggtgtcatcaagaaggcaaacgtttcttgcttgtgctccaaggtcaccaaagaaactgagaaggttgtgtgcatggagaaggttgtgtatgttgctgagcagtgtaagaggccatttgagattttgtcgtcatgcatatatacatcgggatttactctgtgcatggccacttatacaaatagaatcgatggactgtttacaagctaggcctggcagccgaagaacctttttagggtagtataatatgaagtctacgtcgaaactgaggtgaggatgggagaggcctattgatacataaaaagtattatgagctgttaattaaggcttctccacagattttatga

SEQ ID NO: 6729 - DNA, 104 bp, Zea mays
  Clone ID: LIB3118-037-P1-K1-E4
gtagtgtttgtgtatcaacaagagcagcgactacaggagcgccgccgcggcggggaaggcgaaggggacgatgctgatgccgaagaagatgctgagcaagctct

SEQ ID NO: 6730 - DNA, 376 bp, Zea mays
  Clone ID: LIB3118-037-P1-K1-E5
acacaaaaggtggggtatggataagattatagatggatggtgacacaacacagcagggcacatggctagcctgctagcgtgcggcacccacacaacacaacacactgctcgccagaagcgccccaggaggccaggggaggacacgacgccgccatcagccatcatcatcatctcagactcagagcatgccatggcacgcaactgactgactgactcgaaacacacacagcgacgccgctatactttattaagctttataattagctagcttcctccggccggcctgcaaggtggagcacctaactcacttgccgcagttgcaggggtcgcactggcagttgccgccgcacttgcacccgccgttctcagctccggc

SEQ ID NO: 6731 - DNA, 345 bp, Zea mays
  Clone ID: LIB3118-037-P1-K1-E9
cccacgcgtccgcccacgcgtccgcccacgcgtccgtggaagtgcgtaagtgcttgttctgcctctccagctttacgcgccttggggtctagaactgatgatcctggagatgctatgtaactgtatgatcttttggctgttgccgcattgggcattccaacgggaacgggacgagattttgtcgtcatccatatatacatcgtgatttactctgtccatggccacttctacaaatagaatcgcttgtctggtttccaacttgggactgacagccaaagccgttttgtttggtatataaaagtgttttcttccccgaaagggtggtaataaagttgctgttgtatc

SEQ ID NO: 6732 - DNA, 403 bp, Zea mays
  Clone ID: LIB3118-037-P1-K1-F1
gttgcataccaacaacaacaacaattgcaacagtttctaccagcgctcagtcaactagccatggtgaaccctgccgcctacctacaacagcaacaactgatttcatctagccctctcgctgtggttaatgcacctacatacctgcaacaacagttgctgcaacagattgtaccagctctgactcagctagctgtggcaaaccctgctgcctacttgcaacagctgcttccattcaaccaactgactgtgtcgaactctgctgcgtacctacaacagcgacaacagttacttaatccactagcggtggctaacccattggtcgttgccttcctacagcagcaacaattgctgccatacaaccagttctctttgatgaaccctgccttgttgtggcagcaaccca

SEQ ID NO: 6733 - DNA, 169 bp, Zea mays
  Clone ID: LIB3118-037-P1-K1-F10
gacccacgccaggggacgcatgcttaacgcgatactaatgaccggcacattgtaaagtgtttgaagaccccgtatgtgaaacacccgaggaacgaatgggcttcgcttcgagctttttacctttataacccttggtactggaacaaaccgcagccctattacagcaatt

SEQ ID NO: 6734 - DNA, 374 bp, Zea mays
  Clone ID: LIB3118-037-P1-K1-F12
actatactctacgaagcaaggacaccatcgtcatggcagccaagatgcttgcggggggggctctcctatctttttgtgcaagcgccactagtgcgacgcatattccagggcacttgccaccaaccatgccattgggtaccatgaacccatgcatgcagtactgcatgatgcaacaggggcttgccagcttgatggcgtgtccgttcctgatgctgcaacaactgatggccttaccgcttcagacgatgccagtgatgatgccacagatgatgacccctaacatgatgtcaccattgatgatgcccagcatgatgtgaccaatggtcttgccgagcatgatgtccgaaatgatgatgccacaatgttactgcgac

SEQ ID NO: 6735 - DNA, 403 bp, Zea mays
  Clone ID: LIB3118-037-P1-K1-F2
gttgcataccaacaacaacaacaattgcaacagtttctaccagcgctcagtcaactaggcatggtgaaccctgccgcctacctacaacagcaacaactgatttcatctagccctctcgctgtggttaatgcacctacatacctgcaacaacagttgctgcaacagattgtaccagctctgactcagctagctgtggcaaaccctgctgcctacttgcaacagctgcttccattcaaccaactgactgtgtcgaactctgctgcgtacctacaacagcgacaacagttacttaatccactagcggtggctaacccattggtcgttgccttcctacagcagcaacaattgctgccatacaaccagttctctttgatgaaccctgccttgttgtggcagcaaccca

SEQ ID NO: 6736 - DNA, 383 bp, Zea mays
  Clone ID: LIB3118-037-P1-K1-F3
agaccaactagcaacatagaaagcacaatagtgtaccaacaatggcagccaaaatattttgcttccttatgctccttggtctttctgcaagtgttgctaccgcaaccattttcccacaatgctcacaagctcctatagcttcccttcttcccccatacctctcaccagcggtgtcttcagtgtgtgaaaacccaattgttcaaccctacaggatccaacaggcaatcgcaacaggcatcttaccattatcacccttgttcctccaacaaccgtcagccctattacaagagttacctttggtccatttggtggcacaaaacatgagggcacaacaactacaacaacttgtgctagcaaaccttgctgcatactctcagcaacat

SEQ ID NO: 6737 - DNA, 409 bp, Zea mays
  Clone ID: LIB3118-037-P1-K1-F4
ggaggctcctgctgctgaaggtgatggtgagaagaaaaagaaaaagaagtccaaggatgtcggggaagagcctgctgtggctgctgctgctgccacagaaggtgagaaaaagaagaagaaaaagaagtctgacgcggacggtgagggtgttacaacgcaaaccgaagagtctggtaagaaagataagaagaaaaagaagaaaaggcatgccgatgatgagtgagacattcttcggaagagaatgtgcgggtaccaaatgctgggactcagctgttctgtaaaatgggtatcacggggttagaaaacatattgagatcagtttttggggttacctggtttttttgggggacctggcttgtattcaacaattacttgctcggtctagatgatgatggaatttttaactttt

SEQ ID NO: 6738 - DNA, 414 bp, Zea mays
  Clone ID: LIB3118-037-P1-K1-F5
gccgcggagccggcagagacagacgctgccgccgtcggccgtgctccgtactacagtccgttgatcgcccgaccggagtgaggcggcgcggaaatggagcacggatcgttgacagactcgacgtggtcgactttctgcataatggacgaggaccacacccttgccaacttcgccagattcgtgctcaaccaggacccacgggttgcattttgtggatataccatccctcatccttctgagaagaaagtgaacataagacttcagacaacaggagatgcagcaaaggatgtactgaaagatgccttgcggaatctgatgattatgtgccagcatgtcagagggacaatggacaccgaggtggttaaccatagagcaaaaaatgctgcagaagaaatggatgttgatcggaactag

SEQ ID NO: 6739 - DNA, 258 bp, Zea mays
  Clone ID: LIB3118-037-P1-K1-F6
gtcgcttattcttcttaaacagactctggcgacgtcgatcaaactgtagactacgggtcgctgatcacccgctggtacagatgctggtcctctaacatacggcggcccaaacaacagactaaacggcttttgatttgtgctgcatgggcgctgcccagaccaccgccaagtctggcgggatcgttctcatctaagacttaaagcgtgcttttggacgcaatacaataacttgtatctaatgaacacaatgggaccata

SEQ ID NO: 6740 - DNA, 390 bp, Zea mays
  Clone ID: LIB3118-037-P1-K1-F7
cgccgacacggggtgccaggaacctccgaatacgctggtggactgggcgctggagatcctctccacagccgatccggacgagaaggcccgcctcggggacctcgccgcgtcgcggtggctgcgcggcgacatcccgctcccctacgacccgtcccgccccgcgcgcccgccgcccgaccgccccgcccggagcgccgaggtgcggctgctcccgccgtcgcggatgccgaagctgggcaagggcggcagcgcgcagagccgtttggccatgctccactcgctggcgcacaccgagagctgggctgtcgacctttcctgggacatcgtcgcccggttcggggcggccatgcggatgccccgcgacttcttcgacgacttcgcgcgcgtcgc

SEQ ID NO: 6741 - DNA, 401 bp, Zea mays
  Clone ID: LIB3118-037-P1-K1-F8
cgccgacacggggtgccaggaacctccgaatacgctggtggactgggcgctggagatcctctccacagccgatccggacgagaaggcccgcctcggggacctcgccgcgtcgcggtggctgcgcggcgacatcccgctcccctacgacccgtcccgccccgcgcgcccgccgcccgaccgccccgcccggagcgccgaggtgcggctgctcccgccgtcgcggatgccgaagctgggcaagggcggcagcgcgcagagccgtttggccatgctccactcgctggcgcacaccgagagctgggctgtcgacctttcctgggacatcgtcgcccggttcggggcggccatgcggatgccccgcgacttcttcgacgacttcgcgcgcgtcgcgcaagacgagg

SEQ ID NO: 6742 - DNA, 116 bp, Zea mays
  Clone ID: LIB3118-037-P1-K1-F9
gaccaaagccagggttgttatgctaaatgtgtttctaatgtttggcacattttaaattgcttgttgtttccgaatgtttaaaaccggtgaaggtatggtatttgcttggagatgtt

SEQ ID NO: 6743 - DNA, 410 bp, Zea mays
  Clone ID: LIB3118-037-P1-K1-G10
cggacgcgtggggcaacatagaaagcacaatagtgtaccaacaatggcagccaaaatattttgcttccttatgctccttggtctttctgcaagtgttgctaccgcaaccattttcccacaatgctcacaagctcctatagcttcccttcttcccccatacctctcaccagcggtgtcttcagtgtgtgaaaacccaattgttcaaccctacaggatccaacaggcaatcgcaacaggcatcttaccattatcacccttgttcctacaacaaccgtcagccctattacaagagttacctttggtccatttggtggcacaaaacatcagggcacaacaactacaacaacttgtgctagcaaaccttgctgcatactctcagcaacatcagtttcttccattcaaccaactgg

SEQ ID NO: 6744 - DNA, 402 bp, Zea mays
  Clone ID: LIB3118-037-P1-K1-G11
ggtaaaagtaagagtggcaagaacagggcatcaagcagcagttccaaatctggcggctcaacccgaggtgtggatgatagtaacatctggacatgcgatcagtgcacatatgcaaaccccaaatctgccagagcctgccaggcctgtgatcgccagcatcgatagagatgtcagtcgttgctagagatttggaccccatttgtcgagaattttctggtgttgcgccgtgcgatacacaacatacatgaaaattgaatattagctgatctctgggggtagtgacgaggaatgctgtgtgcaggtaggttttcgtgtatcctggattgtttgtcgactgactgagcatgtgaagcctcaactcagcatccactcccatttgtgtatataagtatatccatatct

SEQ ID NO: 6745 - DNA, 411 bp, Zea mays
  Clone ID: LIB3118-037-P1-K1-G12
acagtttctgccattcaaccaactagctgcattgaactctgctgcttatttgcaacaacaactagtactaccattcagccagccagctgctgcctacccccagcaatttcttccattcaaccaactagcagcattgaactctcctgcctatgtacagcagcaacaactactaccattcagccagctagctgctgtgagccctgctgccttcttgacacagcaacaattgttgtcgttctacctgcacgctgcgcctaacgttggcaccctcttacaactgcaacaattgctgccattcaaccaacttgctttgacaaacccagcagcgttctaccaacaacccatcattggtggtgccctcttttagattgcttatgagttatagttcaataataaagtttttgtgatgat

SEQ ID NO: 6746 - DNA, 402 bp, Zea mays
  Clone ID: LIB3118-037-P1-K1-G2
ggtgggttggcttctcctccccctccggttcgggttcgggttcgtgaggttctccggggttcggtttcgtgggtgagcggatcgagatggcggcgtcggatgttgagtaccgctgcttcgtcggcggcctcgcctgggccacggacgaccactccctccacaacgccttcagcacctacggcgaggtcctcgagtccaagatcatcctcgatcgggagacgcagaggtcccgcggcttcggcttcgtcaccttctccacggaggaggcgatgcggaacgccatcgagggcatgaacggcaaggagctggacggccgcaacatcaccgtcaacgaggcccagtcccgcggcggccgtggaggcggcggcggtgggtacggtggtggccggggaggcggcggct

SEQ ID NO: 6747 - DNA, 309 bp, Zea mays
  unsure at all n locations
  Clone ID: LIB3118-037-P1-K1-G3
aaaggagccatgtttcgtttgatgtgatgtaaaaaacaactcttaatgtggcctgagatggtgaatgttggcaaaggagccatgtttcgtttgatgtgatgtgacataaatgtgtactttatgcttgagtattatttaactgctccttttaggtgaagaataatcttttagattttgtacttatgccaagttgtacaagcatctatttagaacctgctatctgagtttatttcttgnaaaaaaaaaaaaaaatataaaaaaaaaaaaaaaaaaaaaacaaaataaaaagaaataaatggaaaggaaatg

SEQ ID NO: 6748 - DNA, 414 bp, Zea mays
  Clone ID: LIB3118-037-P1-K1-G4
atactatactctaggaagcaaggacaccaccgccatggcagccaagatgcttgcattgttcgctctcctagctctttgtgcaagcgccactagtgcgacgcatattccagggcacttgccaccagtcatgccattgggtaccatgaacccatgcatgcagtactgcatgatgcaacaggggcttgccagcttgatggcgtgtccgtccctgatgctgcagcaactgttggccttaccgcttcagacgatgccagtgatgatgccacagatgatgacgcctaacatgatgtcaccattgatgatgccgagcatgatgtcaccaatggtcttgccgagcatgatgtcgcaaatgatgatgccacaatgtcactgcgacgccgtctcgcagattatgctgcaacagcagttaccatt

SEQ ID NO: 6749 - DNA, 411 bp, Zea mays
  Clone ID: LIB3118-037-P1-K1-G5
ctcatgctgatatgtgcgaccggtcactaataaaatgtagatctataatactgtattgctgggtggccgagctttttgggcagggcccactcgtgcgacacatatgtgagggcacttgccaccagtcatgccattgggtaccatgaacccatgcatgcagtactgcatgatgcaacaggggcttgccagcttgatggcgtgtccgtccctgatgctgcagaaactgttggccttaccgcttcagacgatgccagtgatgatgccacagatgatgacgcctaacatgatgtcaccattgatgatgccgagcatgatgtcaccaatggtcttgccgagcatgatgtcgcaaatgatgatgccacaatgtcactgcgacgccgtctcgcagattatgctgcaacagcagttacc

SEQ ID NO: 6750 - DNA, 278 bp, Zea mays
  Clone ID: LIB3118-037-P1-K1-G6
ctaccattcatacagctagctgatgtgagccctgttgccttcttgacacaacaacagttgttgccgttctacctgcacgctgcgcctaacgctggcaccctcttacaactgcaacaattgctgccattcaaccaacttgctttgacaaacccaacaacgttctaccaacaacccatcattggcggtgccctcttttagattgcttatgagttatagttcaataatgaagttttttggatgatgtttgtggcttcccagaaataagaaagtacatttct

SEQ ID NO: 6751 - DNA, 389 bp, Zea mays
  Clone ID: LIB3118-037-P1-K1-G7
ccaccattcagccagctagctgatgtgagccctgttgccttcttgacacaacggcagttgttgccgttctacctgcacgctgcacctaacgctggcaccctcttacaactgcaacaattgctgccattcaaccaacttgctttgacaaacccaacaacgttctaccaacaacccatcattggcggtgccctcttttagattgcttatgagttatagatcaataatgaagctttttggatgatgtttgtgcgcttcccagaaataagaaagttcatttctaaaaaaaaaaaaaaaacgggaagcagctggacggccgcaacatcaccgtcaacgaggcccactcccgcggcggccgttgaggcggcggcggtgggaacggtggtggccgt

SEQ ID NO: 6752 - DNA, 278 bp, Zea mays
  Clone ID: LIB3118-037-P1-K1-G8
ccaccattcagccagctagctgatgtgagccctgttgccttcttgacacaacgggggtggttgccttttttcctgcaccctgagcctaacgctggcacccttttacaactgcaacaattgctgccattcaatcaacttgctttgacaaacctaacaacgttctaccaacaacctcatattggcggtgccctttatcagattgcttatgagtcatacttcaataatgaagttttttggatgattactgttgcttcccaaatataaaaaaattcatttct

SEQ ID NO: 6753 - DNA, 164 bp, Zea mays
  Clone ID: LIB3118-037-P1-K1-G9
agaaagcactggaatatatgtcaatggatattcttaagatctgagcacaaaggggggtggatttttcttttcccatctttaaatctaattgcatgtgctccaaacaatatttttgtcatgttctatgcatatacaagggtattgaacacatcgacactattttt

SEQ ID NO: 6754 - DNA, 384 bp, Zea mays
  Clone ID: LIB3118-037-P1-K1-H1
cgcgtccgctgcatgcctcgtggccgtccgcggcgcgggcgagtgcggggcgacgccgccggacaggatggcgctgaagctggcgccgtgcgcgtccgcggcgcagaaccccagctcggcgccgtccaacggctgctgcacggcggtgcacaccatcgggaagcagagcccccagtgcctctgcgccgtcatgctgtccaagacggccaagaagtccgggatcaagcccgaggtggccatcaccatccccaagcgctgcaacctcgtcgaccgccccgtcggctacaagtgcggagattacactctgccatgagctgcgcgagagctgcttgagcacatgtgcatgatcccgtgtcggagttagcacgactttcgcaggaagtg

SEQ ID NO: 6755 - DNA, 319 bp, Zea mays
  Clone ID: LIB3118-037-P1-K1-H10
agaaagcactggaatagatgtcaatggaaattcttatgatctgagcacaaaggtgctccatttggcctggcacccatctgaaaatctaattgcatgtgctgcagccaatagcttgtacatgtactatgcataaacaagtgaaatgaacagagcgacagtatttttggtggttgctcccggtgagaaagacacttttagctcctggtggatttgaagccaggagatgctggggagatggtgtatcttgtgccagtcagatgcagttcttttcggcgccatatagagctggtcagagtccaagaggaagtgactagatcat

SEQ ID NO: 6756 - DNA, 236 bp, Zea mays
  Clone ID: LIB3118-037-P1-K1-H11
gatgaatgtgcaagttggtaatgttagccggcaggaaacttgtctactatgcgcgttagctcgtgtttgactttccacccatttcagtatgaagcgacctcagaatgtaactcgtgtagtagtattttttagtggtagctttcagtactggtttgaacctgttgttggctttattttctgagtaaaatgcaccactcgaactttaaaaaaaaaggggggaaaaggataatttaaaa

SEQ ID NO: 6757 - DNA, 222 bp, Zea mays
  Clone ID: LIB3118-037-P1-K1-H12
aaaaaaaaaaaaaaagacccacgcgcacaaacacacaaacacaaaaaaaaagaaaacaacaaaaaaacaaaaaaaaaaaaaaaacgacggagaagaaaagaaaaccaaaaaaaaaaaaaacgaccacaaagaaacacagaaaaaaaaaaaagagaagacaacaaacagaaaagaacaagaagaaaactggaattgctgaggaaaatgcaccactcgaactgc

SEQ ID NO: 6758 - DNA, 107 bp, Zea mays
  Clone ID: LIB3118-037-P1-K1-H2
gcgcgcgtccgatgcatgccttgtggccgatcgtggtgcgtgcgaatgtggggcgactgccggcggataggatgtctttaaattttggtacaatcgcgttcgtggat

SEQ ID NO: 6759 - DNA, 410 bp, Zea mays
  Clone ID: LIB3118-037-P1-K1-H5
cccacgcgtccgggttgatgccttcggtggttttgctgatgcagctgtggagaagaagttccgaaatcgtgtgaacaggtatgtgggcctatggtgctgtgtggagttccgtgaaattggtcacatatattatgacatgtactgggacgagaaaccagggtggaagccacaccctccagagactagggaacaggaccatccaccttggtcatgactactgacaagaagatgctagaaagatcgtaatgatgaagatctgagatcttccagagcaccctgctccaatcgattcttcaggccaattttgtgctgttctagttctgttctaacatgggtcgctgttgttcacttgtggccccttgttcgcagctcatcggtcgaagcatggggctcaatgatttagttggggc

SEQ ID NO: 6760 - DNA, 341 bp, Zea mays
  Clone ID: LIB3118-037-P1-K1-H6
cccacgcgtccgcggacgcgtgggatcttggccgggtgaacagcttaagaagacaacatggacttgatgaacgggtattgccagaagattttggaacggttgcggcagggctttttatgctacaacttatttataatgcgtatgggctgggggaaccattataataaggcaaatggtttgctatattgggaacctagatatggagaacaactttaatggcggtgagagggtcttttgtcgtgacagtattatattgatagatcaagatcatacgtttaccgtgtggcgatgtgccagactttgtatacccaagtagctaactggatggaacgatgtgtagc

SEQ ID NO: 6761 - DNA, 381 bp, Zea mays
  Clone ID: LIB3118-037-P1-K1-H9
agaaagcactggaatagatgtcaatggaaattcttatgatctgagcacaaagttgctccatttggcctggcacccatctgaaaatctaattgcatgtgctgcagccaatagcttgtacatgtactatgcataaacaagtgaaatgaacagagcgacagtatttttggtggttgctcccggtgagaaagacacttttagctcctggtggatttgaagccaggagttgctggggagatggtgtatcttgtgccagtcagatgcagttcttttcggtgccatatagagctgtccagagtccaagaggaagtgactcgatcattcccgggaagcagctttgattctgatttatttttttgtggggaaaggcttgtctttccccca

SEQ ID NO: 6762 - DNA, 53 bp, Zea mays
  Clone ID: LIB3118-038-P1-K1-A10
gaaacattgttttaaaagaaaattgtgaaataagtcccacaatttatgatgtt

SEQ ID NO: 6763 - DNA, 271 bp, Zea mays
  Clone ID: LIB3118-038-P1-K1-A12
gtgaaggcaagcgaagacggtggcggcgacgcgagattccccactccggcgtcgatggccaccttctccccgattatccctgcatcggttcgagttggagaagacgagcttccaccgtcttgggaccctataccctctcctttaggctttgcatctgtagatcacttctgctattactatctcaggttttgaacttagaagccctagcaactcggtggcaactggtaacaacagcctagaattgtgggttggtggagatgtttgtattttt

SEQ ID NO: 6764 - DNA, 415 bp, Zea mays
  unsure at all n locations
  Clone ID: LIB3118-038-P1-K1-A2
cagcgatttccgaaccctccccacccccacacccacccgatccaaccgagtcccggcggcgatggcggcggcggcgacgaacgccgatgtggaggtggtcgacttcgacctcgatgacgacgacctcatggacgaggacgccgggccggatccagcaccgncccccgccttccgccttcggttcaccatcgngggcgacgacgcgccgcgtaggaccaagggccgcggcttccgcgaggaccctaactcctccgcgacccgcgactcgcgctttggcgcggggggacgcgccgacctcgactcgcttggcggccctggacccatccagtcaattgaaggatggattgtgttggtcacaggagttcacgaagaagctcaagaagatgaccttcaaaatgctttccaagaatttggg

SEQ ID NO: 6765 - DNA, 384 bp, Zea mays
  Clone ID: LIB3118-038-P1-K1-A3
atcgacaatcctgtcaatgcatcattttttgaatcctatgaaagtgcacactccatgcatgatttgactggctctattgcagagaaacttggtgtccaagctcctccagttagaatcgacagccaagcaaaatatggtgctctggcccgaggtgatggcgccatttacctgcgctttccacacaaaggttatagagagaaaatatgggaccatgcagcaggatcaattgtcgtgacagaagctggaggcatagtaacagatgctgcgggaaacgacttggatttctccaaagggagatttctcgatctcgacacaggcatcatcgcaaccaacaaggagttgatgccgtcgctcctgaaagctgtccaagaggctattaaagag

SEQ ID NO: 6766 - DNA, 205 bp, Zea mays
  Clone ID: LIB3118-038-P1-K1-A4
accacgcgtacgctaacgcgtccacgtactcagtgccataacatagatcgccgatcccaggattagaatgtcagaggtgacggtcaccatgatgcaaatcgataccaactcaaaagcgacagcaagagacaaaaatcagggcgcacgacaagaaagggtccacaaaatgttatctaagcatgcgcaggtagcataccgaataaat

SEQ ID NO: 6767 - DNA, 387 bp, Zea mays
  Clone ID: LIB3118-038-P1-K1-A5
cccataccttccatcaatgatagcttcagtatgtgaaaacccagctcttcagccctataggctccaacaagcaatcgcagcaagcaacatacctttatcacccttgttgtttcaacaatcgccagccctatctttggtgcagtcattggtacaaaccatcagggcacagcagctgcagcaactcgtgctacctgtgatcaaccaagtagctctggcaaacctttctccctactctcagcaacaacaatttcttccattcaaccaactgtctacactgaaccctgctgcttatttgcagcaacaactattaccattcagccagctagctactgcctactctcagcaacaacaacttcttccatttaaccaatttgccgcactgaaccc

SEQ ID NO: 6768 - DNA, 388 bp, Zea mays
  Clone ID: LIB3118-038-P1-K1-A6
catttggtggtgtatgcattggcgcattgaccgtcctggctgatttcatgggtgcgattggttcaggaactggtatattgctcgctgtgacaatcatataccaatacttcgaaacctttgagaaggaaagggcgactgagcttggtttctttggtttttgattagtagctgtggaaccttaacttggctatagctgaattttcttgtaagtccctgtagtgcttagccagttgtaacttaaagagttctgtttaggttgccttcttgcggccacaatcatgtagcagaatgtgcgtgtgtttcaggttagcgtgggggtatgtgcatctgtccaaagagagtctgcaatttggcaacacggatattttgttatcaatttcagctactt

SEQ ID NO: 6769 - DNA, 375 bp, Zea mays
  Clone ID: LIB3118-038-P1-K1-A7
gcgaaaagaaaaaaaaagggaaaaggggctggtgcgcaaaaccctagcgcagtcgcatccatcatggcgatgtccatcttcgtcggcggcgactccggtgcgctcatcgcgccgtccgcgtcctcgctccggccgccgttccgtcttgccgctggtcccaagggccatttttgtacttttcctcatggagcatctagcaatcacagccggctatgtgttgaacatcaaaggtgttctcgcagctccacccagaactatgctctttctaggaaggatttttctcctataactcaagatgtgggaggcttccttcacaatgttggtaacatgggttttcttgaccgtctgaaattagcgtggaagataatgttttct

SEQ ID NO: 6770 - DNA, 377 bp, Zea mays
  Clone ID: LIB3118-038-P1-K1-A8
tccaaccacattccgggggcgatggcggtggcgtgctgacgaacgccgatcgtggaggtgcgacgatttcgcacgcatagatgacgacagacctaatggactatggtcgccgtggccggatcgcagcatccgcccctccgcctcgccgctctccgactccacacatatgttgggcgagcaacatcatccgagcatgaccatgggccgaggtttccgcgaggaccctaactccttcgagacaccgcgactcgcgctatgacgcggttttacgctccgaccgagtcttggttggcggccctggacccatccagtcaattgaaggatggattgtgttggtcacaggagttgacgatgaagcttaagaagatgaccctcaa

SEQ ID NO: 6771 - DNA, 204 bp, Zea mays
  Clone ID: LIB3118-038-P1-K1-A9
agaaaaggctgcttttgatgaggccgagaaaaagaaggaagaagaggatgccgccaagggtggggatgatgaggatgatgacctagaggatgaggaagacgatgagaaggcagacgaggacaaggccgactctgatgccgaggatagcaaggattctgatgatgagaagcagcacgacgagctctagatggcgaggatgatgtt

SEQ ID NO: 6772 - DNA, 404 bp, Zea mays
  Clone ID: LIB3118-038-P1-K1-B1
cggacgcgtgggcgccgccgcccaaagaaagacgtcaactccaggagacaagacagtgagaactgaagagaaggatgggcttcgagaagcagatcctgagatccggcaccggccccaagccgataaagggccagaaggtcaccgttcactgcaccggctacgggaaggatcgtgatctgtccaagaaattttggagcaccaaggaccctgggcagcagccattcagtttcagcattggtcagggttcagtgatcaaaggatgggacgagggagttatgaccatgcaagtgggtgaagttgctcgtatccagtgcacgcctgattatgcttatggagccggcgggttcccagcctggggaattcaaccaaactcagtgcttgtgttcgagattgaagtcctcagt

SEQ ID NO: 6773 - DNA, 407 bp, Zea mays
  Clone ID: LIB3118-038-P1-K1-B12
cccacgcgtccggcattacaaaagaaactgcaagcttgttgctgcatgctgcaataagctattcacttgcagattctgtcatgataaagttagtgaccatacaatggacaagtatcttcactacaaccattcattttatcgtccacacctttcctgctgagggatgctttcaaggatttcattttaacatcgaaccaatatcaattaagcatggcattttatttggaaatagaagtttgtggtggtgccatggacctgtgcgtcccttgtgaaatgaattgattttctgtcattgaattttctaactgaagctttttcattcgtttgattcacttgagctcccttaagttgtattgtattatttaatcataaatgtcatccttcctcttatagttatataatcaaaa

SEQ ID NO: 6774 - DNA, 122 bp, Zea mays
  Clone ID: LIB3118-038-P1-K1-B2
agaagatcatgttcgccatgacctcaatcaagggtgtcgggcgccatttctccaacatcgtttggaagtaggcccgcatcggcatttacaatagggccggcgagcttacccctgatgagctt

SEQ ID NO: 6775 - DNA, 201 bp, Zea mays
  Clone ID: LIB3118-038-P1-K1-B3
cggacgcgtgggcggacgcgtggggtcgcggcgggttgcagcctcgttccaccaacccaggcaggcgtggagatggtggacattcaacaagaaccgggggcaccagaaccccatttccaagaaggggtcggccaccccgggcctaaaaaggtcttcaattggccgaagggcttaaggggccgaaaccggcaccggggccgg

SEQ ID NO: 6776 - DNA, 58 bp, Zea mays
  Clone ID: LIB3118-038-P1-K1-B4
gtgaaggcaagcgaagacggtggcggcgacgcgagatttctcaatacggcgtgggtgg

SEQ ID NO: 6777 - DNA, 158 bp, Zea mays
  Clone ID: LIB3118-038-P1-K1-B5
cccacgcgtccgtttccttttccccgttctccgtgcattctcggccgtttccgctcccgccatcgccatggaggaggccaaggttgtggagtccaaggacgggacgatctcagttgcttcagcatttgctggtcatcaggaagctgtgcaagacaggg

SEQ ID NO: 6778 - DNA, 391 bp, Zea mays
  Clone ID: LIB3118-038-P1-K1-B6
gttctagatcgcgagcggtttccagtcagtcagtgagttgtgtgccatggcctgctctgagatctgagaatgatgatgatcagctgatggcgaggtcaatgacctcacctgctctactgctgcactattggctagcaatgtgtaagctgttcaagacaccgaccactaatttttatgaaaggcacccgaggaagcataccgaggagtcgactgtggtgatagacgaccattagctgcagtggttgtccataacgatgaactaatagttagctgccataacatggatgtgaagaacactgatccaactgcacatgctgaagtaactgcgataagagaggcttgcaaaaagcttgccaaatattgatctgtcggattgtgaaatttatgcatc

SEQ ID NO: 6779 - DNA, 381 bp, Zea mays
  Clone ID: LIB3118-038-P1-K1-B7
acgcgtgggcgccaaaggccaaagaaagacttaatggtgcaccgaaaagacagggagaactgataagaaggatgggctatctgaagcatatactgagatcctttaccaggactaaggctttaaagggccagaaggtcaccgttcactgaaccggctactggaaggatagtgatctgtacaaaatatattaaagattcattgacgatggggaatattttaagaggatgttaaaggtcagggttcattaatcaaaggttgggaccagggatttttcgaataaaaatgtagtatgattatggttgggagcaaaattaaatcttgtataggttacttaactatatttaatttacatatctggggtatattaaaaaactcattttt

SEQ ID NO: 6780 - DNA, 259 bp, Zea mays
  Clone ID: LIB3118-038-P1-K1-B8
aagggtgccctttttggcggccgggggggatgacctacatcggctactccaacatctgcgctgcgctggtccggaactgcctaaaggagcccttcaagtctgaggccgcgtcccgcgagaaggttcatttctccatttccaagtggacggatggcaagcaggaaaagccacctgtccgcacagaatcggatgactaagggctggcgccatggcgacatagtccttcctacagatgattggaagcgtcgttgcaggtttt

SEQ ID NO: 6781 - DNA, 265 bp, Zea mays
  Clone ID: LIB3118-038-P1-K1-C1
aggacccgataaagcttgtgccctatattgtgtgcctccacatattggggagcttgaagcatcgacaagttactagtcattgcttacttatataagaacataagtagtatttgctattgtcaagtgtgccttgcttgatgcaagttgtgttttcgtatcattattattatgcacggccatcgtacgtgtatggcttgtatgggttattgccaacttaataaaagcacactctgtttgcctataaaaaaaagaaaaaatataataa

SEQ ID NO: 6782 - DNA, 299 bp, Zea mays
  Clone ID: LIB3118-038-P1-K1-C10
cccactcgttcgtggacgcgtggtcggacgcgtggtgcgactgggcttgcccgttccgcgccccaagggtacacggtctctctcacctgtcctaggtcgtaggagggagcgtttgtcgccctccccttcgttttcttgtgcctggacccgcgctacttttgtcgtcccttttcgtttattgactggcaagtcagctgcttgtttatctactttttattctaggtgaaatggttgagcatctatttgaggaacacattttttgttaatagacttgaccctgtatgaaaaaagtttgatag

SEQ ID NO: 6783 - DNA, 410 bp, Zea mays
  Clone ID: LIB3118-038-P1-K1-C11
acctagccttccgaccacacaagactctccagcaacatcaatggcgaaactatctacctgtagcaacgaaagaaatgaggcacgacgtgttctaatatattcagatatgtcacatgacacagagggtgatgaccagcgcaaaagtgaactcaacaatgaagagttatcgtcgccaccgaatagaataaaacatgaccacactagcaaaggaataccaggtcttgcagaccccaaaaagaaaagctcctagatcgtcatcaacttcatgaaggtatttgcttattgcgcatctatcaagagcaccatcacttttggaccatgaagacttccttatagatatgaaccctatcaagagcaccatcactattggaccataaatactttcctctaaatataaacctactattaga

SEQ ID NO: 6784 - DNA, 407 bp, Zea mays
  Clone ID: LIB3118-038-P1-K1-C12
gtgcttccagtgagatcaaagaatgctcgtggccagcaaggctcatatccaattaagctgttctacacttcaaacatgcccatcatccttcactctgcgctgattaccaacctctattttatatcccagcttctctacaggaagtacagcggaaacttccttgttaaccttcttgggaagtggaaggagtctgaatactctggccattctattcctgttggtggtcttgcttactatgtaactgccccatcaagtttggctgatgtccttgcaaatccattccatgcactgttttatgtggacttcatgctgtcagcctgtgctctgctctcaaagacatggattgaagtttccggttcatcagcaaaggatgttgctaagcagctcaaggaacaacaaatggtgat

SEQ ID NO: 6785 - DNA, 405 bp, Zea mays
  Clone ID: LIB3118-038-P1-K1-C2
cccacgcgttcgcccacgcgttccgaaacttgtgatacacaaaatggtatctattgattcttaccaaaaaaggattactggaaccggctaagtcagtaattgaggatgactcattttacaccttgggcttattaaagaggggggtttgtcatgggtttgccccacagactttcgtatgctgcatatgcaactgttcactttctaaagaaggtgctatttcagccgtacgtttgttcagttgcgggcatgcaacacattttcagtgtgagtctgagcagaccaggtcatccaatcaggaatccaaagagggatgccctgtttgtctctcaatgagtgatacgcaagctcgaagcaaatcacctatgtttgggaatgggctaatgaagtattctggggctgaacatg

SEQ ID NO: 6786 - DNA, 408 bp, Zea mays
  Clone ID: LIB3118-038-P1-K1-C4
agcccatacaattctgagatgcaccaaggtattcaggctcccatgagtagcaggaacctctaccgagcacctgggtcagccgaagcctatgtggcaccttgctatgcagctggaaatctgattgggaggccacatcaggtgttatcaccatcaacttttccagcacatggtccacaaccagctgctcagtgggtgccaaatcaaggtagttcccgctcatggagttctgacagttacaggccttactatggacaatagtctcatgatgtgcaccggccgtcgaatgctgctttggcaccacatcctagctatgctatcgtcacggttctgcaccaaactacatgaatcaatggcggagaccttggtagaattagctttgatggcagcttgtttattttctatataaat

SEQ ID NO: 6787 - DNA, 411 bp, Zea mays
  Clone ID: LIB3118-038-P1-K1-C5
cccacgcgtccgcccacgcgtccgagtttgagtacaaggatcctgttgatggctctgtgtccaagcaccagggcatccgatacctctttggagatggttcacgactggtgttccgcctctctggaaccggttctgttggtgccaccatccgtgtctacatcgagcagtacgagagggactcctctaagaccggcagggattcacaggacgcccttgctccgctggttgatgttgcgctcaagctctccaagatgcaagagtacactggacgctctgcccccaccgtcatcacataaattttgaagagtgttttagaatgagttgaggcgcttacacaaactttcattccggcctcttgttccatagtttttcttgcatgttacatctcaccgatgaataaaatgtatgtat

SEQ ID NO: 6788 - DNA, 412 bp, Zea mays
  Clone ID: LIB3118-038-P1-K1-C6
cccacgcgtccgcggacgcgtgggctgggatgggggccgcctcagcaactgatcccatgcagacgcagctgctggcgagaatgagaatgaacgacgtagcaggtggtgggctccagtgggtgtcatcagagcctgacaactacaccaacgacgacggtggttatgcagcaggaccagcagctggagtgcagcatcagcagcaggttgttggcgatcagcagcagcagcagcaggagaacaaagcgaatcagcgcagcaaaaacaacaacggcggcggcggcggtgggtcgtcggtgtacagctactactggaccaacaccagcaacagcgatggggcagaggggtagtgtgtgcctctgccagtgccagagccacaggagacgaaatcgctgctgcaaactccctcgcgaca

SEQ ID NO: 6789 - DNA, 401 bp, Zea mays
  Clone ID: LIB3118-038-P1-K1-C7
cccacgcgtccggggttctaagggacctgtaaatgcttgtgccctatattgtgtgcctccacatattggggagcttgaagcatcgacaagttactagtcattgcttacttatataagaacatatttttgatttgcggttgtcaagttggccttgcccgacacacgttgggatgctgcatatgcaactgtacactctgtaaagaaggtgctatttcagccgtacgtttgttcagatgcgggcatgcaacacatcttcagtgtgtgtctgagcagaccaggtcatccaatcaggaatccaaagagggatgccctgtttgtctctcaatgagggatacgcaagctcgaagcaaatcacctatgtttgagaatgggctaatgaagtattctggggctgaacatga

SEQ ID NO: 6790 - DNA, 101 bp, Zea mays
  unsure at all n locations
  Clone ID: LIB3118-038-P1-K1-C8
cccacgcgtccggttcaataataaagtttttttgctgatgtttgtggcttcccaaaaataagaaagtgcatttctagtttcttaaaaaaaatacttntnct

SEQ ID NO: 6791 - DNA, 401 bp, Zea mays
  Clone ID: LIB3118-038-P1-K1-D1
gtcgatcgccaaagggttcaacattccagcggtccgtgtgacaaagaagaacgaagtccgcgcagcgataaagaagatgctcgagactccagggccgtacctcttggatataatcgtcccacaccaggagcatgtgttgcctatgatccctagtggtggggctttcaaggatatgatcctggatggtgatggcaggactgtgtactgatctaaaatccagcaagcaactgatctaaaatccagcaagcaccgcctccctgctagtacaagggggatatgttctatctgagcgaagctctcctgtgttctatctttttttgaggcccgcagctatctgttatggtaatccatgtagctccgaccttgtaatgtgtagtctgttgttttcttcctgcatgtgt

SEQ ID NO: 6792 - DNA, 408 bp, Zea mays
  Clone ID: LIB3118-038-P1-K1-D10
gtcagcagcccggatggcaagaagggcttgctgggcaagatcatggacaagatacccggctaccacaagagctcgggtgaagaagaccgcaaggacgccgccggcgagcacaagaccagctcctaaggtcgcagcgtgtgcgtgtccgtcgtacgttctggccggccgggccttgggcgcgcgatcagaagcgttgcgttggcgtgtgtgtgcttctggtttgctttaattttaccaagtttgtttcaaggtggatcgcgtggtcaaggtccgtgtgctttaaagacccaccggcactggcagtgagtgttgctgcttgtgtaggctttggtacgtatgggctttatttgcttctggatgttgtgtactacttgggtttgttgaattattatgagcagttgcgtattg

SEQ ID NO: 6793 - DNA, 406 bp, Zea mays
  Clone ID: LIB3118-038-P1-K1-D12
agcattctcgcagggtctttctacgctattagataagatggatccctctcagagagcgaagtttgttcaggaagtcaagaaggtccttgattgatgataccaacacatccaacacaatgtgtgcatgtcacatctttttgttctagtacatacatagaaggatattgcttggtcttgattgatcatgtctgatttaagtcgactattatttcttggaattttcttttggacctggtgctatggttgatggatgtatattggatatgtgcgttctgccaggtgtaagcacaaaggtttagacagaccgagagcaagagcgagtgaacctgttctggttttgcagtggttcagtaaggcagaaagttgttaaaccgtagttctgagatgtattaccagtggcgccatg

SEQ ID NO: 6794 - DNA, 404 bp, Zea mays
  Clone ID: LIB3118-038-P1-K1-D4
gtcagcagcccggatggcaagaagggcttgctgggcaagatcatggacaagatacccggctaccacaagagctcgggtgaagaagaccgcaaggacgccgccggcgagcacaagaccagctcctaaggtcgcagcgtgtgcgtgtccgtcgtacgttctggccggccgggccttgggcgcgcgatcagaagcgttgcgttggcgtgtgtgtgcttctggtttgctttaattttaccaagtttgtttcaaggtggatcgcgtggtcaaggtccgtgtgctttaaagacccaccggcactggcagtgagtgttgctgcttgtgtaggctttggtacgtatgggctttatttgcttctggatgttgtgaactacttgggtttgttgaataatatgggcagtcgcgta

SEQ ID NO: 6795 - DNA, 252 bp, Zea mays
  Clone ID: LIB3118-038-P1-K1-D5
cggacgcgtgggcgccaccctcgtcacggaggccgagtgcaacctggccaccatcagcggcgtcgccgaatgcccctggattctcggcggcggaacgatgccctccaagtaactgcgaagagcatagtgcatgaggaatgagcttgtagctagctcatatgtctgaataataagcacagcaagaagatgaatgcatttctcggatcgttcatccggaacaataattaaaggggatccggatttgttcttgtg

SEQ ID NO: 6796 - DNA, 252 bp, Zea mays; identical to SEQ ID NO: 6795
  Clone ID: LIB3118-038-P1-K1-D6

SEQ ID NO: 6797 - DNA, 353 bp, Zea mays
  Clone ID: LIB3118-038-P1-K1-D7
cccacgcgtccgaaataataatagtcttttagtagctcctgcctgtatcaagattcaggtgattaaaaccatagatggcgtagtactagtaaaaactagacaactagtcttggcagccagttgtagtgaagtgacatggctgcatacagacatccaaaggaaacggacttggtaggtgccgtggacaaaagccttggccggacagacttggtgctgctgcagctgcagtgctgctgcacaaggaaaagtgatgagaccgagacgagaggggtgtactctgctgggaccagagcactcacgggtgcagagagactccgcttcacctcatgagcaattctgcaaggccccccttt

SEQ ID NO: 6798 - DNA, 379 bp, Zea mays
  Clone ID: LIB3118-038-P1-K1-D8
cggacgcgtggggtcgcggcaaggaagcagtgaagtatgttagcctgctgataatggcatcctttcgaagcattatagccgtagctcttttatgtaccttttcaggctggtaccgataccgtggatctggatttgctatgttttgtactgtgctcgagtgtaaggtcagttcgtaatacaatcaatctgcgtggaacaatttgatatccttgaatatgttagtgagatcatttcgacaatgaaagttgagaacagaagttccaaaaaaaaaaaaaaaaaaaaaaaaaaaaaaaaaaaaaaaaaaaaaaaaaaaaaaaaaaaaaaaaaaaaaaaaaataaaaatatatttataaaattaaaataaaaatataaaaataaa

SEQ ID NO: 6799 - DNA, 232 bp, Zea mays
  Clone ID: LIB3118-038-P1-K1-D9
cgtacgcgtggggtcgcggcaaggaagcagtgaagtatgttagcctgctgaggatggcatcctttcgaagcattatagcctttgctcttttatgtaccttatcaggctggtaccaataccttggatctggatctgctatgttttgtactgtgcttgtgtgttaggtacagatcgttatacaattaatcttggttggacaatttgatttccttgtattagttgtgagaccact

SEQ ID NO: 6800 - DNA, 406 bp, Zea mays
  Clone ID: LIB3118-038-P1-K1-E1
gcagcagcaaagtcaccagcaaccagcagatcccgtcgccggcacgatggccagctcgtcgtcgtcgtcgtcagctctggtcgtcctcgtggtggttctagccgcggcggtggcgtgctccgcgacgcgccccgtccccgcgcggcagcgggcggcggcggcggcggaggaggtgaggcggccggacacgctgcacgagggcacggtgctgatcccggggatggggcgctacgagatcggcagccactacatcccggacatcggcgggctggaccacagcgtccccgccgccacccacgggcagtacatccccggcgccgacgacacctgggtgcccaaccccggctttgaggtccccaaccccttccgccccggcgcggtcactccatgaacacgtacgatcgag

SEQ ID NO: 6801 - DNA, 113 bp, Zea mays
  Clone ID: LIB3118-038-P1-K1-E11
tcgttcacgcgtccgcgcaagcgatagtatctagatcgttagcggttcggcaaggaagactatattgatgaaactatggtcaaaattgaggacaagttagatgagaaagtata

SEQ ID NO: 6802 - DNA, 337 bp, Zea mays
  Clone ID: LIB3118-038-P1-K1-E2
gggtgaagaagggaggtgctttcactggtgaagtcagtgctgagatgctcgtcaaccttggtgttccctgggtcattcttggacactctgaaaggagagctctgctgggagaatcaaatgaatttgttggagacaaggttgcgtatgccctgtctcagggactaaaggtcattgcatgtgttggtgagacccttgagcagagggaggctgggtctaccatggatgttgttgctgcacaaacaaaagcaattgctgagaagatcaaggactggagcaacgtagttgttgcctatgaaccagtttgggctattggaactgggaaagttgccaccccagc

SEQ ID NO: 6803 - DNA, 396 bp, Zea mays
  Clone ID: LIB3118-038-P1-K1-E8
gtcaagggcgtcgttagccccgtctacgaccgcttcggcggcctgccgctcgacgtcctcgccttcgtcgaccgcaaggtggacgacacggtgcacgaggtggacaagcacctcccgggcgcgctgaaggcggcgtcggcgcatgtctacgcggtggttcggggcgtgccggaggtggcgcgcgagctggcggccgaggcgcagcggtcgggcgtgaggggcgcagcccgtgcggcgctcgcgatgacggagccggtggcgcgggacgtgtacggccgcgtggagcccgtggccaaggacctctacgtgcggtacgagcccgcggcggagcacctggccgtctccgcctggcgctcgctgaacggcctgccggtgttcccgcacgtcgcggagatc

SEQ ID NO: 6804 - DNA, 52 bp, Zea mays
  Clone ID: LIB3118-038-P1-K1-E9
tcggtcaaggacgtcgttagccccatctactaccgcattaagtggtactgcc

SEQ ID NO: 6805 - DNA, 360 bp, Zea mays
  Clone ID: LIB3118-038-P1-K1-F1
gagcaggatggcacacttacgcgctggagatggccgattgcgcgagcttgctgaacactctgatcgacaaaagcctactgacgccttccatgacgctgggctagactctgattcagggcatttcggtccaagtagcataggtgtagatttataccgaaaaaaaaaacaaagtggtgggcctgaacttgaagctgaagattaacctcaggctcatggcgaactactgctgttggatcgtgccatctaacttccagtgattgtgatatatatggcgacgtattatatatgaacacgcatgcaatgcatatcgtagtccatcagaagtagatgctgctgtgggcagctgggatgataccgtat

SEQ ID NO: 6806 - DNA, 408 bp, Zea mays
  Clone ID: LIB3118-038-P1-K1-F10
atcatcctcgatcgggagacgcagaggtcccgcggcttcggcttcgtcaccttctccacggaggaggcgatgcggaacgccatcgagggcatgaacggcaaggagctggacggccgcaacatcaccgtcaacgaggcccagtcccgcggcggccgtggaggcggcggcggtgggtacggtggtggccgtggaggcggcggctacggcggtggcgggcgccgtgatggcggcggcggctacggcggtggcggcggctacggtggcggcggcggctacggtggtggtggcggcggctacggcggtggcaaccgtggcggcggctacggcaactccgacgggaactggaggaactgagcggtggggcccgcgcggccaagttatcctgttcgctgccgtgatgtttaccct

SEQ ID NO: 6807 - DNA, 399 bp, Zea mays
  Clone ID: LIB3118-038-P1-K1-F12
cccacgcgtccgcccacgcgtccggttctagatcgcgagcggtccggcgaggaagacggcaaggaggaggtcgaggtagagattgaggccaagtttgttgagaaggaagaggtcaaagactcgggtgacggtgcgggaggaaagggtaccaagaagaaggatacaaagaagaaagacaagaaaaagaaggaaggtggtgacgattcagggaaggcagaggaagacaagaaggataaagcgaaggattcagagggcaaggaccaagtgaagaaggaaaagaaggatggtggtggggacgacggaggcgaggagaagggcaaagaaaagaaagataagaaggacaagggtgagaagaatgacaaggagaagaaagagaagaagaaagacaagggtggagag

SEQ ID NO: 6808 - DNA, 355 bp, Zea mays
  Clone ID: LIB3118-038-P1-K1-F2
tcgcccacgcgttcgcccacgcgtccgcggacgcgtgggttggttttaatgaaaaaaaaaaaaaaaaaaaaaaaaaaaaaaaaaaaaaaaaaaaaaaaaaaaaaaaaaaaaaaaaaaaaaaaaaaaaaaaaaaaaaaaaaaaaaaaaaaaaaaaaaaaaaaaaaaaaaaaaaaaaaaaaaaaaaaaaaaaaaaaaaaaaaaaaaaaaaaaaaaaaaaaaaaaaaaggggggggcgttataaaataaaaaatttaataaagggtgttttggggtgttaaattttttttttgggggaaaaaaaataaatatttgtgggcggttttttaaaaagtttaatggggaaaaaaggggggtt

SEQ ID NO: 6809 - DNA, 300 bp, Zea mays
  Clone ID: LIB3118-038-P1-K1-F3
acgtcatgcgtgacgccgttacctacaccgagctcgcccgaggaaagaccgtcaccgtcacggatgtcgtctacgcgctcaagcgacagggccgcaccctctacggcttccgcgggtagggcgcttcctcatctggtggcgaactgcatctgggtcggcggtggtcgtgttgtgcgcctaatctagtgcagtccgggctctatatcgacgctgtgttctggggtgtcttggatcccattctctgcaataccaacttgccattatcaatggactggagaccatcctcagctgccgatgcct

SEQ ID NO: 6810 - DNA, 361 bp, Zea mays
  Clone ID: LIB3118-038-P1-K1-F4
ccacgagcaacagacaaagtacagtactagtaccaacagtggcgggtaaaatataacgcctccttatgctccttaggtctatcagaaagtgctgatacagggaccatctttcaacattgctgacaagctcgtattgctcccattattcccccggacctctcaccaacacagttttgggtatgtgaaaacccaattcttgaaccctacaggatccaacaggctatcgaagatgtcatcttacctttataacccttgcttctacaacagttataaggcctattacagcaggtaccttaggcgcatatattgtcacaaaacatcatgtcacatcaactacaacaacttgagctagcagaccttg

SEQ ID NO: 6811 - DNA, 409 bp, Zea mays
  unsure at all n locations
  Clone ID: LIB3118-038-P1-K1-F5
gcgatggctgggacagggctgatcgagctcaggaggatcgaggcggccaaggagattgccgcagagctggctcgctcaccgaatgtggcatacattccttctggggaaaacggaaagatgctgcttggtctcaatgctactggatttggccggtgattcactgtttttttagtctgcttgtgctatgtgctgatgcatgactaaaacggaggttcgaactttgaaggacagtgatatctgctatccttgcttatgttaagttttccttgtcttggaactaaatgtgtctgttgtgctccaaataagttttggtttttgactgccnaaaaaaaaaaaaacataaactaaaaaaacaaaaaaacaactaaaaaaaaacaaaaaaataaaacttcctactaaaaaatataaa

SEQ ID NO: 6812 - DNA, 412 bp, Zea mays
  Clone ID: LIB3118-038-P1-K1-F6
ctaccgcctccgttctatatgccgcctccgttctatctgccgccgcagcagcagccgcagccatggcaataccccactcaaccaccgcagctaagcccgtgccagcagttcggatcctgcggcgtcggcagcgtcggcagcccgttcctgggccagtgcgtcgagttcctgaggcaccagtgcagcccggcggcgacgccctacggctcgccacagtgccaggcgctgcagcagcagtgctgccaccagatcaggcaggtggagccgctgcaccggtaccaggcgacatacggtgtggtcctgcagtccttcctgcagcagcagccgcagggcgagctcgcggcgctgatggcggcccaggtagcgcagcagctgacggcgatgtgcggcctgcagctgcagcagccaggtc

SEQ ID NO: 6813 - DNA, 365 bp, Zea mays
  Clone ID: LIB3118-038-P1-K1-F7
gaaaaagagcaaccatgtcacgaggaagcttgagaagcgcaaggagggacgtacccttgacccacacattgaggagcaatttggcagtggacggttgctggcatgcatttcttcccgccctggacagtgtggccgagctgatgggtacatccttgagggtaaagagcttgagttctacatgaagaagctacagaggaagaagggcaagagcgctgtagcttagagcattctcatggattgtcttgcaccgaaatgtgtgtcctgatgagtacacttttttttggttagtcgtctcaagttcagagcgttatgccatgttttcagacctgattagtacactgttttctaaaagcgattgagctctt

SEQ ID NO: 6814 - DNA, 407 bp, Zea mays
  Clone ID: LIB3118-038-P1-K1-F8
ggggaggtcgacgagacagagagagaaggccaagaggcttcctctccccattcctcccttccgtgccctagccgagccagccgcgaggaaggaggcatcccgccgtctcgcctggcgcccgcccgtcggccgaccttctgccgcagcttccaattctaaaaagatcatagttttttgtgcaagagcgagtggatatggaaccatcccctcagcctatgggtgtcgctgccggtgggtcacaagtgtatcctgcctctgcctatccgcctgcagcaacagtagctcctgcttctgttgtatctgctggtttacagtcagggcagccattcccagccaaccctggtcatatgagtgctcagcaccagattgtctaccaacaagctcaacaattccaccaacagctccag

SEQ ID NO: 6815 - DNA, 210 bp, Zea mays
  Clone ID: LIB3118-038-P1-K1-F9
gtggtgtagtttttttttttctctgttttagttggggtgtttgtcagctgacaaacgctctgtccctgcccctgttccagttgttctttctggctaggtgggttcggtgtgtgtgtgtttgtgtgtgtatgtgtgtctgtctgtttcggggtatttttcccttttttttcttcttaatatattgatgcgcagctctcctgcgtgttcgag

SEQ ID NO: 6816 - DNA, 407 bp, Zea mays
  Clone ID: LIB3118-038-P1-K1-G1
cccacgcgtccgcccacgcgtccgcccacgcgtccgcccacgcgtccgagttgtcactatcaacttccgagctgatcgcatggttatgcttgcgaaagcactagagtatgcagattttgacaactttgaccgtgttcgtgtccccaaaatccgatatgctgggatgcttcagtatgatggtgagttgaagcttccaagccgttaccttgtttccccaccagagatagatagaacatctggggagtacttggtgaagaatggcatccgcacctttgcttgcagtgagacagttaaatttggccatgtcacatttttctggaacggtaaccgttcgggatactttgatgcaactaaggaggagtatgtagaagtacctagtgacagtggtattacattcaatgttgcac

SEQ ID NO: 6817 - DNA, 407 bp, Zea mays
  Clone ID: LIB3118-038-P1-K1-G10
cccacgcgtccgcccacgcgtccgcccacgcgtccgctcctctctcgcatccgcagcctctcgagctctactccatcccctcgatctcgaagcgcagcagcagcagtcaggcggccatggacgccagcgcagcaggagccgtcgggaaggcgaagaagggcgcggccggtcgcaaggccggcgggccgaggaagaagtcggtgacgaggtccgtcaaggccgggctgcagttccccgtcggccgcatcgggcggtatctgaagaagggccggtacgcgcagcgcgtcggcacgggcgcccccgtctacctggccgccgtcctcgagtacctggccgacgaggtgctggagctggccgtcaacgctgccaaggacaacaagatgaccctgctcatcccgcgcctcgtg

SEQ ID NO: 6818 - DNA, 374 bp, Zea mays
  Clone ID: LIB3118-038-P1-K1-G11
cccacgcgtccgggccacagctggtgacacccatcttggtggtgaggactttgacaacaggatggtcaaccacttcgtccaggagttcaagaggaagaacaagaaggatatcactggcaaccccagggctctccggaggctgaggaccgcttgtgagagggcgaagaggactctgtcttccactgcccagaccacgattgagattgactcgctgtatgagggcatcgacttctactccaccatcacccgtgccggggttgatgttcttgcacagctccttgccgttgaagaagtcctggagcagttgctgcaccctggggatcctagtggagccaccaacaagtacaacgtcatggacgggttctagatcgcga

SEQ ID NO: 6819 - DNA, 177 bp, Zea mays
  Clone ID: LIB3118-038-P1-K1-G12
tgcgctgcccttcacagacagcacttggatttaacatttgtttgatcaatttcagttcaacgccttttcatcgttccatatgcatgtatggtatccgtgtctggcaaacttattttgaggcttgttaaatatgtaccttttgtctctcaagatgttaaataaagcaaattaacttcc

SEQ ID NO: 6820 - DNA, 391 bp, Zea mays
  Clone ID: LIB3118-038-P1-K1-G3
cgcagaggtcccgcggcttcggcttcgtcaccttctccacggaggaggcgatgcggaacgccatcgagggcatgaacggcaaggagctggacggccgcaacatcaccgtcaacgaggcccagtcccgcggcggccgtggaggcggcggcggtgggtacggtggtggccgtggaggcggcggctacggcggtggcgggcgccgtgatggcggtggcggctacggcggtggcggcggctacggtggcggcggcggctacggtggtggtggcggcggctacggcggtggcaaccgtggcggcggctactgtacctgccaccggtactgagtgcacggccgccgaggtgctcggcggtcaagttatcctgttcgctaccgtgatgtttaccctag

SEQ ID NO: 6821 - DNA, 279 bp, Zea mays
  Clone ID: LIB3118-038-P1-K1-G4
cccacgcgtccgcccacgcgtccggtttgaggacaagctctaaaatttttggctgttggtgatactgtttcatctgccggtttaatcatcaattcgtctactgtaatagcagcgacttcaatattttattttgttttagttgtcaaatgcacctgtttttgaacaatatttgtgatgtagtgccctgccgcgcttagagtctgagactattttgttatctgctgtgatgtttcagatgaaacagagttgatgtctggtttagtaaatggttatattctt

SEQ ID NO: 6822 - DNA, 408 bp, Zea mays
  Clone ID: LIB3118-038-P1-K1-G5
cccacgcgtccggtctacactgaaccctgctgcttatttgcagcaacaactattaccattcagccagctagctactgcctactctcagcaacaacaacttcttccatttaaccaattggccgcactgaaccccgctgcttatttgcagcagcaaatactactaccatttagccagctagctgcagcaaaccgtgcttccttcttgacacagcaacagttgctgcctttctaccagcagtttgcggctaaccccgcaaccctcttacaactacaacaattgttgccctttgtccaacttgctttgacagacccagcggcctcctaccaacaacacatcattggtggtgccctcttttagattgcttattagttgtaattcaataataaagttttttggatgatgtatgt

SEQ ID NO: 6823 - DNA, 411 bp, Zea mays
  Clone ID: LIB3118-038-P1-K1-G6
ggttattccacgccaactttgtgataatgctggatttgatgccactgacgttctcaataagctgaggcagaaacatgcatctggtgaaggtgctaattatggtgtagacataaacactggcggaattgctgattcctttgcaaactttgtttgggaacctgctgttgtaaagatcaatgctataaatgctgcaaccgaagcttcctgccttattcttagtgtggacgagacagtgaaaaacccaaagtcggagagcgcacaaggtgaagctgctgccggtgcgatggctggtcgcggtcgaggtgcaatgcgaggacgtggtggcaggggtatgcgcaggcgataaactgggtcacgtagaccatggtcagatttttttttgcctgtttgcgagtgcttttgtgccttact

SEQ ID NO: 6824 - DNA, 150 bp, Zea mays
  Clone ID: LIB3118-038-P1-K1-G7
atgccacttaagttcgatgtagtaacatggctgtgtatccctcatatactctggggggtacgctcgctacacttatgtatacaactagtatatagccttggccaacaggccttactcttcttgggaaaatgcatcgtgagggggatagat

SEQ ID NO: 6825 - DNA, 263 bp, Zea mays
  Clone ID: LIB3118-038-P1-K1-G8
ctaccgcctccgttctatatgccgtctgcgttgtatctgccgtcgcagcagtagtcgcatccatggctataccccactcaaccaccgtagctaagcccgtgccagcagttcggatcctgcggcttcagcagggtgggcagcccgttactgggccagtgcgtagagttcttgaggcaccattgcagcccggcagcgacgccctacagctcgccacattgccaggtgctgcagcagcagtgctgccaccagatcaggcaggtgga

SEQ ID NO: 6826 - DNA, 409 bp, Zea mays
  Clone ID: LIB3118-038-P1-K1-G9
cccacgcgtccgcccacgcgtccgcccacgcgtccgctcctctctcgcatccgcagcctctcgagctctactccatcccctcgatctcgaagcgcagcagcagcagtcaggcggccatggacgccagcgcagcaggagccggcgggaaggcgaagaagggcgcggccgggcgcaaggccggcgggccgaggaagaagtcggtgacgaggtccgtcaaggccgggctgcagttccccgtcggccgcatcgggcggtatctgaagaagggccggtacgcgcagcgcgtcggcacgggcgcccccgtctacctggccgccgtcctcgagtacctggccgccgaggtgctggagctggccggcaacgctgccaaggacaacaagaagacccgcatcatcccgcgccacgtgct

SEQ ID NO: 6827 - DNA, 405 bp, Zea mays
  Clone ID: LIB3118-038-P1-K1-H1
gcctccgttctatctgccgccgcagcagcagccgcagccatggcaataccccactcaaccaccgcagctaagcccgtgccagcagttcggatcctgcggcgtcggcagcgtcggcagcccgttcctgggccagtgcgtcgagttcctgaggcaccagtgcagcccggcggcgacgccctacggctcgccacagtgccaggcgctgcagcagcagtgctgccaccagatcaggcaggtggagccgctgcaccggtaccaggcgacatacggtgtggtcctgcagtccttcctgcagcagcagccgcagggcgagctcgcggcgctgatggcggcccaggtagcgcagcagctgacggcgatgtgcggtctgcagctgcagcagccaggtccctgcccttgcaacgc

SEQ ID NO: 6828 - DNA, 409 bp, Zea mays
  unsure at all n locations
  Clone ID: LIB3118-038-P1-K1-H10
ttcgctcatgccagcgtatacgaaaataaaaaatcctaaaaaggattaacgaagatcttcaccttgaaacggcgagcgccgagaagcgggtaaaaatcgcccaggtcctcgataacatgaactggaaaagggttttcttttatacctatacgggggaacctaagataaagcccatatcgacttaacggtccacgattgggatcgcgcacgaaaaggctaaacacagcctttttcttgtcctcgggacagcgggctagtcccgtgcctgtttttttgagttggggtacacaatcttccttgtgactgccaaaccagatttccgtttttagggagaaggtgtagtctttttgaacggtggtatcgtcaagaagaacgaggcccgccccatttctggggcggngggaaggag

SEQ ID NO: 6829 - DNA, 406 bp, Zea mays
  Clone ID: LIB3118-038-P1-K1-H11
gccttcgctcgcgccgccgccgccgccgccgctacgccccgcacctcgcttgatttcgtgtcgccaagatgacgaagcgcactaagaaggcaggaattgttggcaaatatggaaccaggtatggtgctagcttgcgtaagcaaatcaagaagatggaggtatctcagcattccaagtacttttgcgagttctgtgggaagtttgctgtgaagaggaaagcagttggaatttgggggtgcaaggactgtgggaaggtgaaggctggtggtgcttacaccatgaacactgctagtgcggtcaccgtcaggagcacgatccgccgcctgagggagcagactgaagcatgatatagctctttatattattggggtttcctgtagttgctcttgtcaggcatgttgtgggg

SEQ ID NO: 6830 - DNA, 407 bp, Zea mays
  Clone ID: LIB3118-038-P1-K1-H12
gctgcatttgcccttgcagctcttatggaaataccttctcagtataaagcaacgcaaggcctccgacctccagaaaagcaagcacaaaggattggctctcctaggattcttcctcctccaaataaagttcttgaaaatgataatgccgccgccgctgcttcgcaccctcctcaaactgcaagctcgaaatcaactggtattggcaaaagtgctgctgacgagcaggtatgccccatatgtctaaccaatccaaaggacatggcttttcagtgtggtcatctgacatgtaaggaatgtggcccaacactatcaacgtgcccattgtgccgcgctctaatcaccatgcgtgtgaggctctactcctaagtcggttggtgtctggagggatgggaccaaacagaaaggag

SEQ ID NO: 6831 - DNA, 293 bp, Zea mays
  Clone ID: LIB3118-038-P1-K1-H3
cccacgcgtccgcggacgcgtgggatggggttgagaccctgggccatgatgatggcgcagaacatgccggccatgggtggactctaccagtaccagctgcccagctaccgcaccaacccctgtggcgtctccgctgccattccgccctactactgattcatgatatttgggaaatctcctctatccatctctctctatctatatatgtaataatgcagtaagacgacacacattatcatgtgtggtatgaccaataatatatgcatggtcataataaagttttggttttaatg

SEQ ID NO: 6832 - DNA, 420 bp, Zea mays
  Clone ID: LIB3118-038-P1-K1-H4
gcaaggaagtcactgacacttgcggtgatcgatgggccactagggcgcctggcgggtctgctctccacgttgtattatgcggactggggcacacggttgcaagcgcgaatgcacgtgtcacacgaacagcgcagagaactatgggcaggcgaagatgctccctcacacccatgaatcgacaagctgctgaatgtgcgcctggaaatactctgcaacaatgtgatgtgggtgacagagaaccgactactgttaatccatgggccaattctgagctggatgtggcatcgcataccacagatgaagcgagggccgtaacacctgccacagaaaaggcaggtcaggatgagaaagtcgctttaggtaaaggaaaggaaaacagggggaaagacatcgtgtgaaactcatacaaaacagaacttg

SEQ ID NO: 6833 - DNA, 416 bp, Zea mays
  Clone ID: LIB3118-038-P1-K1-H5
agatttagttagctctggaagaaacaaaaatgaagaagaaaactcttttattcatgagtatgagctgaaaggcttggctttccgagctgagagatgtttctttttggctaagtcatatagttcagcaggcaaaagagctgaagcatatgcattattctgccatgcccatactctcactggttctgcactgcaacagcattcaaacagtcatgacaaggctttaatacaagatctggagtttctatctaacaactgtagatcaaatagctgcatagaacatgcaacaggcattatggaggaggagattgttcctttaaaactttctaaaggagtctcaactatgtcacttgctgataataaaacaaaggagaacaagtatctccttgatatgctagagagctatgaatcagcgattg

SEQ ID NO: 6834 - DNA, 426 bp, Zea mays
  Clone ID: LIB3118-038-P1-K1-H6
acccacgcgtccgagatttagttagctctggaagaaacaaaaatgaagaagaaaactcttttattcatgagtatgagctgaaaggcttggctttccgagctgagagatgtttctttttggctaagtcatatagttcagcaggcaaaagagctgaagcatatgcattattctgccatgcccatactctcactggttctgcactgcaacagcattcaaacagtcatgacaaggctttaatacaagatctggagtttctatctaacaactgtagatcaaatagctgcatagaacatgcatcaggcattatggaggaggagattgttcctttaaaactttctaaaggagtctcaactatgtcacttgctgataataaaacaaaggagaacaagtatctccttgatatgctagagagctatgaatcagcga

SEQ ID NO: 6835 - DNA, 388 bp, Zea mays
  Clone ID: LIB3118-039-P1-K1-A1
cacagctacgccacaaaatccaatcagacccgcgtggtcaagacccctggtgggaggcttgtgtaccagtacaccaagaagcgcgcgagcggaccgaaatgcccggtcaccgggaagaagatccaaggaattccacacctgagacctgctgagtacaagaggtccaggttggcaaggaaccgcaggactgtgaaccgtccatatggtggtgttctgtctggtaccgcagtgagagagaggatcatccgtgcctttttggtcgaggagcagaagatcgtgaagaaggttttgaagatccaaaaaaccaaggataaggcctccaagaactaggcgatataggcatctttcacaatgtttaaagtccttagaatttgtttcagcaagaaat

SEQ ID NO: 6836 - DNA, 401 bp, Zea mays
  Clone ID: LIB3118-039-P1-K1-A11
gttggtgaaaaggtgcgctcaacccgtccggaaggtgatcttggcccgctccatgccttcactgctggagtgtacattgccctgatgatggctcagattgagatcctgaggaagaaggggcactcctactctgagatcatcaacgagagcgtgattgagtcggtggactcgctgaacccgttcatgcacgcccgtggggtcgccttcatggtggacaactgctccacaacggctcgcctgggatccaggaagtgggcgcctcgcttcgactacatcctgacgcagcaggcctttgtggcggtggacaaggacgccccgatcaaccaggacctcatcagcaacttcttgtcggaccctgtccatggtgccattgaggtctgcgccgagctgaggcccaccgt

SEQ ID NO: 6837 - DNA, 338 bp, Zea mays
  Clone ID: LIB3118-039-P1-K1-A12
ctcgtgtcctggtacgacaacgagtggggatacagcacccgcgtggtcgacctgatccgccacatgaacagcaccaactaagatgaagaactcaaggtctggtgatacgagcgagttgtcttcttcccccccggagaaaagtgcttccgagaataaatttttttccatcggaatgtctgaaactatgttgggtgtatcctagtggttggttgagcattaatggctcatattttgtcaggtctatgtgtcgccgtgaaacttttaatcaaatcagttcactcttttgcctcttgtcaaaaaaaaaaaaaaaacttaaaaaaaaaaaaaaaatataataa

SEQ ID NO: 6838 - DNA, 181 bp, Zea mays
  Clone ID: LIB3118-039-P1-K1-A2
tcgtccctctactccgtacagctactcctcataatccaatctgtccttcgtggtcaagacccctggtgggagggtgtgtgttctagtgcaccgtgatgcttcatcctacctcaagaaagttgggttctaccctgataagtttgcctttttcccaccttatgccttttagggccacgacgtg

SEQ ID NO: 6839 - DNA, 149 bp, Zea mays
  Clone ID: LIB3118-039-P1-K1-A3
gcagggctggctttactccccctctataccaagtcctcctcgagttagggtgcctgtagtgttttgccagagcagcgagaaccgcgcgtgcagtccaatatgctcgctcactgtgtagaatatcctatgacttccacaccttagacctg

SEQ ID NO: 6840 - DNA, 404 bp, Zea mays
  Clone ID: LIB3118-039-P1-K1-A5
gagacccagaagtgtgtattggaagaaaatctttccaggagagctgaacactacttttttgaaatgaagcgggttacaaagggcagggatgcatgggctcatgggaacctacaagaacttggacagctgatctctgaatctggtcgcagctccatactcaactacgaatgtgggagcaaagagatgatccagctgtacgagatcctgctgaaggcccccggcgccctcggcgcccggttcagcggcgccggcttcaggggctgctgcctggccatcgtggagagcgaccgcgcggaggatgcggctgcatacgtccgtgccgagtacgaaaaggcccagcccgagctggtctccaggatccccgcggatcgccgtgttctggtctgcgagcccggtgactccgc

SEQ ID NO: 6841 - DNA, 177 bp, Zea mays
  Clone ID: LIB3118-039-P1-K1-A6
atggccctagaaaaggcagggctagaaaaccaatacaggatagcggggcagcagttttcaaaagtggagcgatactctgcgctcatttatacgggatctggagggcacacacaataactttctgagctgatcgctatatctggcatgggtggcatactcagaccactgataagagtg

SEQ ID NO: 6842 - DNA, 413 bp, Zea mays
  Clone ID: LIB3118-039-P1-K1-A7
tgatttgctgctgcaacaagatggatgcaaccactccaaaatactccaaggcacgttatgatgagattgtgaaggaagtctcatcctacctcaagaaagttgggtacaaccctgataagattgccttcgttcccatttctggttttgagggcgacaacatgattgagaggtccaccaaccttgactggtacaaaggcccaaccctgcttgaggctcttgaccagatcaccgagcccaagaggccttcggacaagcccctgcgtctgcccctccaggatgtgtacaagattggtggtattggaactgtaccggttggtcgtgtggagactggtgtcatcaagcctggtatggtagtcacctttggtccaactggcctgactactgaggtgaagtcttgtgagatgcaccatgag

SEQ ID NO: 6843 - DNA, 403 bp, Zea mays
  Clone ID: LIB3118-039-P1-K1-B10
gtgctagatgtagagatattgatgttaatgctattcatgatcacatgaccttaattaagcaacaaaatgatcatatagctaaacttgatgctaaaattgtcgagcacaacttagaaaatgaaaattttaaatttgctcgtagcatgctctataatgggagacgccctggcatcaaggatggcattggcttccaaaggggagacaatgtcaaacttaatgcccctccaaagaacttatctaactttgttaagggcaaggctcccatgcctcaggataacgagggttacattttgtaccctgccggctatcctgagagcaaaattagaaagattcattctaggaagtctcactctggccctaatcatgcttatatgtataagggtgagacatctagttctaggca

SEQ ID NO: 6844 - DNA, 230 bp, Zea mays
  Clone ID: LIB3118-039-P1-K1-B11
gtcctcgatgtggagattttggcgtcacagccatgcatgatcacatggctggatgtatgaaacaaaaggtcgatatcgctacacttaatgcgtagtattgtcgcccacaatgttgatattgccagttgcaactcggctccgaccatgcttatataatgggggacgccttggcatcaaggatggcattggctttctatggcaggacatggccaaacctcctgcccatgcac

SEQ ID NO: 6845 - DNA, 399 bp, Zea mays
  Clone ID: LIB3118-039-P1-K1-B12
cccacgcgtccgcaactagcaacatagaaagcacaatagtgtaccaacaatggcagccaaaatattttgcttccttatgctccttggtctttctgcaagtgctgctaccgcaaccattttcccacaatgctcacaagctcctatagcttcctttcttcccccatacctctcaccagcggtgtcttcagtatgtgaaaacccaattcttcaaccctacaggatccaacaggcaatcgcagcaggcatcttacctttatcacccttgttcctccaacaaccgtcagccctattacagcagttacctttggtgcatttgttggcacaaaacatcaaggcacaacaactacaacaacttgtgctaggaaaccttgctgcctactctcagcaacagcagtttct

SEQ ID NO: 6846 - DNA, 406 bp, Zea mays
  Clone ID: LIB3118-039-P1-K1-B2
cttctgcgcacagctcatactggcgtcgtccctgagtggcaggttgtggtatgcgggatcctgctgatcgcgatggcaatcggtaactttgcaaacacagtggacaccctggtgaccaagtcccggttcaaggcgaagatgaagaaatccaagggcagacgggacctcgacacatgcccctcgccaacaggttcatcatcgccgatagattcagcgaccaccaaagcatgaacaaggccaagaggaaaaggtgcccgtgtttaacccgggtgtgttaccactgtaaagcgttttagtgttttttttcttggccgtcagctcgtaatcctggccagcgtctgtgtcgaagcttatactcgtgttattaatcattatgcaagtaggctgctgatgggtctaggctgga

SEQ ID NO: 6847 - DNA, 249 bp, Zea mays
  Clone ID: LIB3118-039-P1-K1-B3
agcacgcgtgcgagtacagtagggtaccaacaatggcgggcaaaatagggcgctggctgattgctcctagggcgtacagctagtgaagctaccgccaccatgtaaggacgctgcttacaagctcctatagataggcttattcccacatagctatgacgaggggggtcttctgcgagggaaaggacaattgttaaaccctgcacgatccatcatgatatccatccgggctttttgcccctacccatgttc

SEQ ID NO: 6848 - DNA, 402 bp, Zea mays
  Clone ID: LIB3118-039-P1-K1-B4
agcacgcgtgagagtacagagaggtaccaacagtgtcaggcaaaaaagctcgttggcttatgcttctaggcctaaaaacaagtgatgctaccgaaactatgcaaggacactgctcacaagctgctataactaggcttattcaaagatacctctcacgaggctggtagcctatgagtgcaagcacaattgttaaacactgcactatccatcaagaaatccaaacagggatcgtaccactacaacccttgctatttcaacaaccgaaagggatattacatgaccatcctgtggatcatgtggtggcacataacatcaagggacaacatctacaacatcttgtgctagcacaccttgctgcatactctcagcaacatcagtttttttcattcaaccaactggctg

SEQ ID NO: 6849 - DNA, 400 bp, Zea mays
  Clone ID: LIB3118-039-P1-K1-B5
ccttgacccacacattgaggagcaatttggcagtggacggttgctggcatgcatttcttcccgccctggacagtgtggccgagctgatgggtacatccttgagggtaaagagcttgagttctacatgaagaagctacagaggaagaagggcaagagcgctgtagcttagagcattctcatggattgtcttgcaccgaaatgtgtgtcctgatgagtacacttttttttggttagtcgtctcaagttcagagcgttatgccatgttttcagacctgattagtacactgttttctaaaagcgattgagctctagtccaaaaaaaaaaaaaaaaaaataataccaactaaaaaaagaaaaactaagattattaaattagtaaaaataataattataaaatcaa

SEQ ID NO: 6850 - DNA, 401 bp, Zea mays
  Clone ID: LIB3118-039-P1-K1-B6
attgccctagaaaaggcagcgctgtcagacgaatattttatcaagaggaagctgtatccaaatgtggatttctactctgggctaatttatagggcaatgggattccctacagaattttttcctgtgctgtttgctattcctcgcatgggtggctggctagcgcattggaaagagtcactcgatgatcctgacactaagattataaggccccaacaggtatacaccggcttctggcttaggcactatacccccgtcagagaacgagtgctatcaagccagagtgaggaacttggtcaggttgccacctcaaacgcaactaggcgccgccgtgctggttctgccctgtagaagctgcagcgtataaacgcaccggcatactcaataaacatcgaccacttttg

SEQ ID NO: 6851 - DNA, 358 bp, Zea mays
  Clone ID: LIB3118-039-P1-K1-B7
ccttgacccacacattgaggagcaatttggcagtggacggttgctggcatgcatttcttcccgccctggacagtgtggccgagctgatgggtacatacttgagggtaaagagcttgagttctacatgaagaagctacagaggaagaagggcaagagcgctgtaacttagagcattctcatggattgtcttgcaccgaaatgtgtgtactgatgagtacacttttttttggttagtcgtctcaagttcagagcgttatgccatgttttcagacctgattagtacactgttttctaaaagcgattgagctctagtcccaatctaaaagaaccaactctaagtaccctagcaatggagaac

SEQ ID NO: 6852 - DNA, 416 bp, Zea mays
  Clone ID: LIB3118-039-P1-K1-B8
gcgcaccagagtaccagacccatcagctctgccgatctgccaactgccatggctcgatgacggtggggtcgggaccaggcgtggtacggtacgctatggagtgggacggaacggaggtccacctggctggcctggcctgtggcctcgcaattatcctcggccccctccccacgtgtcctcttccgctgcaggttggcccgggcagcattattagcaatccgggtttcatgcgcccgcccatgtgcagccgtacccgtgcgcggctgacgtgtttacctactcctagcaacgattttgttgggtcctatcgattcttgcaaaaaaaaggaacatcacttccagctcttgttgcgtttgctaggagcatgttactactgctactactaccgtacagtacagtgataataaactgataa

SEQ ID NO: 6853 - DNA, 414 bp, Zea mays
  Clone ID: LIB3118-039-P1-K1-C1
cggacgcgtgggtgaattgcatggtcgccagattaaggtcgccccaaagaggactaatgttcctgggatgaagcagcgtccaccacgtgggtataatccataccatggctacccttatagatcatacggggcaccgtatttccccccatatggttatgggagggctcctagattccgccgccctatgcgctacagaccttacttctgaagtacggggtagggtaatgaagttcaatgcaaaaccagcccatggtcactggtcagtcccgggaataatcaactgtatcgtttgcactgttgcggctcaatgctcctgtatcagctgccttttctgacctttgtttcaagtgccgccataagcgacggacatgttgtattggcttgtaatacaggacgtagtaagtgcacacactt

SEQ ID NO: 6854 - DNA, 387 bp, Zea mays
  unsure at all n locations
  Clone ID: LIB3118-039-P1-K1-C10
cccacgcgtccgctcaattgcccaccataacaccgtttcgctttctcgctccaactcccacagaaacggccgccagcgccgcaggcccgtagcgttgatggccgccgcacctggcgcaccagaggagcgactcggcgtcctcactcctcaatgcctccgggagaagaccggaatctccgagcccaggtcggaggtgcacagggacggaaactaccaccgagcggtgaacgtgtggatctacagcgagagcaccggggagctgctgctgcagcgccgagctgattgcgaggaattgtggcctgggcagtgagacatcattagcgccggccacatctncgncggcgatttctcgcactctccgcagagggaccttctggaagatccagg

SEQ ID NO: 6855 - DNA, 398 bp, Zea mays
  Clone ID: LIB3118-039-P1-K1-C11
gtcgacaagcaggggagttaggtctcacatgcatgcttcatcacattgttgactgcataacgaaacacatcgtcgtcggatcggagatgatgagttccgtcgtcgtggatgctgctgctaccagcagcagcgagaagaagacgtcgtggccggaggtggtgggcatgtccatcaaggaggcgacggagactattctcaaggacatgcccaacgcgtacatccaggtgctgcctgttgggtcgcccgtgacgctggaccttcgccccgaccgcgtccgtatcttcgttgacaccgtcgccatgactccgacagttgggtgatacataccaaatgcaataaacaaaccctactttttattttatgtttccagttaataataaaccaggccttagcttctt

SEQ ID NO: 6856 - DNA, 212 bp, Zea mays
  Clone ID: LIB3118-039-P1-K1-C2
ccgacgcgtgggtgaattgcttggtcgacactttaaggtcgacccaaataggactaatgtttctgggatgaagcatcgtccaccaagtgtgtatattccataccatggctacccttatagaccatactgggcaccgaattttcccccatatggttatggaagggctccaagattctgtcgtcctattctcttcagaccttacttctgaagta

SEQ ID NO: 6857 - DNA, 114 bp, Zea mays
  Clone ID: LIB3118-039-P1-K1-C7
ctgggttgtgctgcgaccagtatttcgtttttgcctacctgtatggtctagtctttgtttgcactggtggatttgcagagatgttatcattcaacaatgttctgtggtcagttg

SEQ ID NO: 6858 - DNA, 415 bp, Zea mays
  Clone ID: LIB3118-039-P1-K1-C8
catggccttcctggaccgcatcttcgccggcgatggggagggatggtccgcgtgcgccagtgcagcctcgtcgcgcgaggacggcggcgtccgccgggggctcgagcagctcatgcgacacttggccgcgtgcggcggcaggaccaggaagcccgccgcctgcccgcgctgcaggcgcgcgctccagctcctccggctccacgcctcagtctgcgaccgcgccggcggcgagccttgcaacgttcccttgtgcagcaacctcaaggccaagatgcaggaggaaggagtgggcaagacatggaagcttctggtgaagaaagtgaccagggctagggtgatgtccgccctggccagcagcagcagcagggaggtgccagaggttgtcaagaagtcttgggcgaaatatagcagcagt

SEQ ID NO: 6859 - DNA, 414 bp, Zea mays
  Clone ID: LIB3118-039-P1-K1-C9
ctcccatccgagtgtttcctcctcctccgccgccgccgccgccgcttccgtcgtctccgcccgccgaagccatgccgtcccacaagaccttccggatcaagaagaagctggccaagaagatgcgccagaaccgccccatcccctactggatccgcatgcgcaccgacaacaccatcaggtacaacgccaagcgtaggcactggcgtcgcaccaaactcggattctgagcggcggaagaaatgctggctaacgacgcctgggggtatagggctctgcaagttaggaagctcttgtttaattttttttttgcttgtgttatttgtcattgtaataccatgttttgtctgatggttaaagaaccgcctttatgctatgttgaatttatttaaccttgcagcgccttaatcagttgat

SEQ ID NO: 6860 - DNA, 316 bp, Zea mays
  Clone ID: LIB3118-039-P1-K1-D1
cctgaacacccgttccgatctttgcccagaaggtctacttgggcatcaataagaaactctttcccctcaaactgattgtggttccatcctcttctgtctggaaaatgttgtcaccaaactaccctatttcctgttccagtttggcatggaagtataagttgtgtacttctattctcaagttgttgtctttgtattatgaaatgtttccaataatcagcagtttttgatgtatggtcgtggatccaaaggtggttctgtgctcggttttgctctgtactatgtgggtgtttgtttggaattataatctgctcatatt

SEQ ID NO: 6861 - DNA, 361 bp, Zea mays
  Clone ID: LIB3118-039-P1-K1-D10
ctcacatgcgagtgtattctcctactatgacaccgcctccgtcgcttgcggggtctccgacacgatctgccatgccctcccacaagaccttgcggatctagaagaagctcgccaagcagatgcgccacaaccggcccatcccattctggatccgcatgcgcagagacaacacctttaggtacaacgccaagcgtgggcactggcgctgcaccaaactcggattctgagcggcggaagaaacgctggctaaccacgcctaggctgttatggctctccaagttaagaagctcgtgttgaattctgttctgggtggcattatttgcgatagccacaccatggtctgtctgatggttaaagaacc

SEQ ID NO: 6862 - DNA, 399 bp, Zea mays
  Clone ID: LIB3118-039-P1-K1-D11
gcgtgaactccaaggcggaggcggcccgcgaccgccgctccgccgcggaggcgcgaccgccgcgaccgtcaggagcgcgccaaggaggagcagtactggtccgaggctgagggccccaagtcccgcgctgcgcgccgccgtgaggaggacgccgagaagcgcgccgaggccgcggctcgcaaggccgagaaccggcgcctaggcgaggcaaagaccgccgacgtcgccgcttgcgcatctacaccgagcaaggccgtcaggcgcatggtgtcccgcgtagtcattgcgaggaacaaggtgactgagtacgatgacattgattagtgccggggagatataggtcagtgattcgtggcactctagggagaggtacctactggaagatccaggcatcaacca

SEQ ID NO: 6863 - DNA, 409 bp, Zea mays
  Clone ID: LIB3118-039-P1-K1-D2
gcgccttcgtgcagcctgctttctacgaggctttcgggctgacggtggttgaggccatgacctgcggcctgcccacgtttgccacagcctacggcggtccggccgagatcatcgtgcacggcgtgtctggctaccacatcgacccttaccagggcgacaaggcgtcggccctgctcgtggacttcttcgacaagtgccaggcggacccgagccactggagcaagatctcccagggcgggctccagcgtatcgaggagaagtacacctggaagctctactcggagaggctgatgaccctcaccggcgtgtacgggttctggaagtacgtgtccaacctggagaggcgcgagacccggcggtacctggagatgctgtacgcgctcaagttccgtaccatggcgagcaccgt

SEQ ID NO: 6864 - DNA, 396 bp, Zea mays
  unsure at all n locations
  Clone ID: LIB3118-039-P1-K1-D3
gcgcctttgcccaccgcgcgatcgatcgatccggggtccggcggcctgccatggtgaagctggcgacggccagggaggcgcggctgtacgggccggcgctggcggcgaggcggtgggagtacatcaacgcggggacatacgtgttcgcggcgctgctcctggtcctggcggcggcgctgtccatgtccgtgtccgcggccaggctggggctcgccgtaggcgccgtggcgctggcggccgtggcggccgtcaacgcacacgacctcgccgcgcacctggctggcgtcgactgccgcgtgggactggcgaggtacgatgcccagctcgggctcgtggagttcctcgtgccggccgtgcacgcagtcgggtgcgcgctcggcgtcgncggcctggcgc

SEQ ID NO: 6865 - DNA, 397 bp, Zea mays
  Clone ID: LIB3118-039-P1-K1-D4
cccacgcgtccgcaactagcaacatagaaagcacaatagtgtaccaacaatggcggccaaaatattttgcttccttatgctccttggtctttctgcaagtgctgctaccgcaaccattttcccacaatgctcacaagctcctatagcttcctttcttcccccatacctctcaccagcggtgtcttcagtatgtgaaaacccaattcttcaaccctacaggatccaacaggcaatcgcagcaggcatcttacctttatcacccttgttccttcaacaaccgtcagccctattacagcagttacctttggtgcatttgttggcacataacatcaaggcacaactactactacaacttgtgctaggaaaccttgcttcctactctcaacaacagcagttt

SEQ ID NO: 6866 - DNA, 403 bp, Zea mays
  Clone ID: LIB3118-039-P1-K1-D6
ggctagatgtagagatattgatgttaatgctattcatgatcacatgaccttaatgaagcaacaaaatgatcatatagctaaacttgatgctaaaattgtcgagcacaacttagaaaatgaaaattttaaatttgctcgtagcatgctctataatgggagacgccctggcatcaaggatggcattggcttccaaaggggagacaatgtcaaacttaatgcccctccaaagaacttatctaactttgttaagggcaaggctcccatgcctcaggataacgagggttacattttgtaccctgccggctatcctgagagcaaaattagaaagattcattctaggaagtctcactctggccctaatcatgcttatatgtataagggtgagacatctagttctaggcaa

SEQ ID NO: 6867 - DNA, 372 bp, Zea mays
  Clone ID: LIB3118-039-P1-K1-D7
aacagccttcgccggccgactcccgagcggaggaggcggccggggagatggacgacataggcggcggcgcaccgggtgcgtgccccaagaacaagaagccccggcacctgtcccgctcgctgacctaccaccaccacccgtaccaggggcgccagctgctgccggcgccggcgcccaacccgcagcgcccgcagtcggtggtcctgtacacgacgtcgctccgcggcgtgcgccgcacgttcgcggactgctgcgcggtgcgcgccgcgctgcggggcctccgcgtcgccgtggacgagcgcgacgtctccatggacgcggcgctccggcgcgagctgcaggggatcctcgcggcccggagccgagggttct

SEQ ID NO: 6868 - DNA, 413 bp, Zea mays
  Clone ID: LIB3118-039-P1-K1-D9
gaaaactagaaaaggctcctcccgaccgcaacgcccctcatctccctcgaccccgacatccccgacccgatggcgcccaaggcggagaagaagccagcggagaagaagccggcggccgaggagaaggcggagaagacgaccgcagggaagaagcccaaggccgagaagcggctgcccgcgtccaagtcctccggcaaggagggcggcgagaagaaggggaagaagaaggccaagaagagcgtggagacctacaagatctacatcttcaaggtgctgaagcaggtgcaccccgacatcggcatatcctccaaggccatgtccatcatgaactccttcatcaacgacatctttgagaagctggccggcgaggccgccaagctggcgcggtacaacaagaagcccaccatcacgtc

SEQ ID NO: 6869 - DNA, 233 bp, Zea mays
  Clone ID: LIB3118-039-P1-K1-E10
gacgagttagttgctaatgactaggtcagatgggatcaccttttagcgagaatgttcaagtgtgatgaaacgcagctgttagatctgcgttttcgcgtatgagaaacttggccttttatttaggttctaccatgaagtcgtgtccagtctccggtggcaaaactcaatgttcaaatctctctgaatataatcttgagagctctacctcaagagctgtgaatatctgttcaggc

SEQ ID NO: 6870 - DNA, 339 bp, Zea mays
  Clone ID: LIB3118-039-P1-K1-E11
gccacacgtaggctagcttccttctttacacaacaactgtgaatgctggctgaccgactatttgcggctgatcgagcatcatcattacatctgcacacatttctggcctatggaccgcatgctttccaactctcatcgacctaagagcatcaacaggggatgctgaagaacctctgtgaaatagcatattaccaccaattgagtattgaagctacctgcatgctgtctggggcgctccagcatcttaaattaactagctctggctttatataagaagcaaaacaggggcaagcatcatttggttccagaccttcgtactctatcttgcgagtttatagt

SEQ ID NO: 6871 - DNA, 401 bp, Zea mays
  Clone ID: LIB3118-039-P1-K1-E12
ggctaagtgtgtgtcgcagtggtatgattatcagaaatgtgttaaaaggattgaggacgatgagactgggcacaagcactgtaccggtcagtactttgattactggaaatgtgttgacaagaatgttgcagagaaactctttgagatgttaaaatgacaatttttccctccatttatccacttaaagttggtaataattgtatcacttgtgaggcctatagactattaaggcacttaatatttgtcagagaacttttgcctcttgggtaacacaaattttccactgccagtttgcatttcatttctgctactagtattgaaccagcaaggtttcctccattgctggataaaaatcaatggaatattcccaagattgtggctgagcgttaaatgctataatg

SEQ ID NO: 6872 - DNA, 410 bp, Zea mays
  Clone ID: LIB3118-039-P1-K1-E2
cccacgcgtccgatccagtttgttctgctggtgggttagctgtgcttaaggttcttgacaaggagaaacgccaggcacattgtgctgatgttggatctcacttgttggagcgtctaaaatcgcttcaggagaagcacgaaatcataggtgatgttagaggaaggggactgatgcttggggtggaactcgttacggacagaataggtgaagacccgtgcgatgtcagaaaccattctactgggcgggtagcccagagagatcaaggttcttgtcgaagggggcgaaacccatgctgccgtctctaaacttaaggcgcttaagaaggttgggcttcacgttgccagcatgatctgagacgctcccgttccatgtaaattaaggctcttaaggaacatgctctgagttgacaa

SEQ ID NO: 6873 - DNA, 209 bp, Zea mays
  unsure at all n locations
  Clone ID: LIB3118-039-P1-K1-E3
tntactctttcgatacaacttattattttatctggtttgttgttgtctaacgtaggggggctgttgattgagagggtgaacttcatgtgcgctggagcctaccaatttctggtgtatttttaggaccagatcttaattgggagtgcatgagccatccaggtgctgctgtagttttagatccagaacttgagtgtgccagggaccaacca

SEQ ID NO: 6874 - DNA, 346 bp, Zea mays
  Clone ID: LIB3118-039-P1-K1-E5
catttaaccaattggccgcactgaaccccgctgcttatttgcagcagcaaatactactaccatttagccagctagctgcagcaaaccgtgcttccttcttgacacagcaacagttgctgcctttctaccagcagtttgcggctaaccccgcaaccctcttacaactacaacaattgttgccctttgtccaacttgctttgacagacccagcggcctcctaccaacaacacatcattggtggtgccctcttttagattgcttattagttgtaattcaataataaagttttttggatgatgtatgtggccaaccagaaataagaagttacatttccagattttaatgt

SEQ ID NO: 6875 - DNA, 304 bp, Zea mays
  Clone ID: LIB3118-039-P1-K1-E6
cccacgcgtccgcccacgcgtccgcccacgcgtccggctgtcgagccaggttgtggtgttgaaaaacctttgtttgtgtcctggcccccctgggtaatgtttgggtgtttccttccatcatcacttgctgaactgctctagtatttgcatttgtaattgaagtctgtcgctttaagcactcttggttctaaaaaaaaaaaaaaaaaaaaaaaaaaaaaatataaaaacaaaaaaataaaaaaaaaaataatataaatagaaaaataatataaaataaaaaataataattatattaaatatattg

SEQ ID NO: 6876 - DNA, 384 bp, Zea mays
  Clone ID: LIB3118-039-P1-K1-E7
agaaagtctgcagagcaggctgtaaaggcgatcaagggcaaagagtccggtgaaccagttccggagtatgactacctgccatacttctactcccgatcattcgacctggcgtggcaattctacggcgacaacgtgggcgaaaccatcctgtttggcgacagtgaccccacctccagcaagcccaagttcggctcgtactggattaaggacggcaaggtcttgggcgccttcctggagggcgggtcaccggacgagaacaaggtcattgccaaggtggcgaaaacccagccgccggtcgctaacctcgaggagctcaagaaggatggcctccagttcgccagcaagatctgagacgctcccgttccatgtaaaattcgtgtcatc

SEQ ID NO: 6877 - DNA, 388 bp, Zea mays
  Clone ID: LIB3118-039-P1-K1-E8
gctgcactcgccgccaacatcatgcagaatctcctcgcaggagccagccaattccagcatcagtttcagaacctgaacttcagtggcgcaggagccaaccaattcccgcagcagtttcagaaccagaacttcagtggcggcgcaggagccaaccagttcccgcagcagtttcagaaccagaacttgtgtggcccagggaccaaccaattccagcagcagtttccgaaccagaacttcagtggcttcccaaaccaaatgcccatgccctttcttcagaccatgcaccagaccggaatgcctgcaaatccaatgccgttcggtggcagaccaccagcgaaccctccatctggtccagcgtttattgcccctatggggcaaggcaactttg

SEQ ID NO: 6878 - DNA, 408 bp, Zea mays
  Clone ID: LIB3118-039-P1-K1-E9
gttcagccccacagccgtggcgatctcacccatgtttttacagcagccctttgttggtgctgcattctagatataagcatttgtgttgtacccaataatgaagtcggcatgccatcgcatgcgactcattgtttaggaataaaacaagctaataatgacttttctctaaaaaaaaaaaaaaaaaaaaaaaaaaaaaaaaaaaaaaaaaaaaaaaaaaaaaaaaaaaaaaaaaaaaaaaaaaaagaaaaaagatataaaaaataaaaaaaaaaaaaaaaaaaataaaaaaaatataaaataaatataatttaaaaaattatataaaattaaggggggggcgtttttatatataatatttcttttcccccttttgtcgttgccatattttttttttttgggggcccaaaa

SEQ ID NO: 6879 - DNA, 408 bp, Zea mays
  Clone ID: LIB3118-039-P1-K1-F1
ggaatggaccggcgacggcgtgaggacggtcatggggcccatcccggcggtgaagtgggacgagagccgggggcggaaggtctggttcaacagcatggtggccgcctacacggggtggaaggacgcccggaacgacccggtgaaggcggtgaccttcggcgacggctcgcccctgcccgccgacgtcgtcgccgcgtgcggccgggtcctggaggaggagtgcgtggccgtgccgtggcggcgcggcgacatcctcctcctcgacaactgggccgtcctgcactcccggcgctccttcgagccaccgcgccgcatccttgcctcactctgtaaatgatgtatgtatgtaagtgccccgccatagcatgggttttatacttttgtggaactaattctggatgggcgcgg

SEQ ID NO: 6880 - DNA, 354 bp, Zea mays
  Clone ID: LIB3118-039-P1-K1-F11
cctacgcgtaggcgaggtacttgctatacacaaacacagcggaggcttgctgactgaatatgagcggctgatggaggatcattagtacatctgcacacagctgctgcctatggaccgctggctttgcaactcttattgaacgaatagcatattcaggggatgctggataacctctgtgaaagagcatgttaccacccaaagagtatggcagctacctgcttgctgactggggagtaccagcatttaaaagtaacttgctctggcattatattgatggcaaaactggcgcgaggcatttgtggtccagaactacggaggctctcttgcgaggttatagctatgcctacgtgttat

SEQ ID NO: 6881 - DNA, 401 bp, Zea mays
  Clone ID: LIB3118-039-P1-K1-F12
cggacgcgtgggttatcacccttgttcctccaacaaccgtcagccctattacagcagttacctttggtccatttggtggcacaaaacatcagggcacaacaactacaacaacttgtgctagcaaaccttgctgcatactctcagcaacatcagtttcttccattcaaccaactggctgcattgaactctgctgcttatttgcaacaacaattaccattcagccagctagttgctgcctacccccagcaatttcttccattcaaccaactagcagcattgaactctgctgcttatttacagcagcaacaactactaccattcagccagctagctgatgtgagccctgctgccttcttgacacaacaacagttgttgccgttctacctgcacgctatgcctaa

SEQ ID NO: 6882 - DNA, 403 bp, Zea mays
  Clone ID: LIB3118-039-P1-K1-F2
cggacgcgtgggcagccacccggttctccctcgctccaggtggcggcgcgctcccctcgttttgttcttactcctcccgtttccctcactagtcgttactgacttctcgcttgcctgctccagatctcccttcgcagccggccagggaccccttcacagcgcgggagatggctgatcaggaggccccagttgcagttgaggcaccaaccccagttcttggagagccaatggacttgatgactgcgctgcagctggtgatgaagaagtcaagtgctcatgatggacttgtgaagggtcttcgcgaggctgccaaggccattgagaagcatgctgctcagctttgcgtccttgctgaggactgtgaccagccagattatgttaagctggtgaaggcgctctgtgc

SEQ ID NO: 6883 - DNA, 103 bp, Zea mays
  Clone ID: LIB3118-039-P1-K1-F3
cgcacgcgtcggtcccgctgtagaacccttataaacggacatctagctgggctgcgggggcaactactatatcatagtctgacgccaacacccccattgcagc

SEQ ID NO: 6884 - DNA, 402 bp, Zea mays
  Clone ID: LIB3118-039-P1-K1-F5
ggctcgcatctatcccgctagagagcgagagaaacgcacatgtatcggtgatgcggcgccggcacctagatcagagtctgacgccaacacccggactgcagcagctggctgcatgccactacgctagtgatgcttgaagatcatactgacctacctccccaagctacctttgaaagtgtttagcgtgcccgaggcggcaccctttaccgaggagctcaagtacgccgtggaggcattcaagagtgccgcccataccagcgccatcatcaccaacgatggacttggcatcaaccccgagcaaagtgcaggcaacgtgtttctgaaacatggggcggagctgtgtataatacctagggatagagtcgcagctgtacacatgtcttccggttagaggatatatac

SEQ ID NO: 6885 - DNA, 284 bp, Zea mays
  Clone ID: LIB3118-039-P1-K1-F6
cccacgcgtctgtcctgctgtacagccagacatacggacatgtagccaggatgcggcggcgaaaactcgatcagagtctgatgccaacacccggattgcagcggctggcttcttgccacgacgcttggtatacttcaagatcatactaacctaagaacgcaatgtccctttcaaagtgttcagcgtgcccgatgcggcaccctttaccgcggtgttaaaggactgccgggtaggtatcattgatcccgtgtcaatatccctgccatcattacctactatggata

SEQ ID NO: 6886 - DNA, 203 bp, Zea mays
  Clone ID: LIB3118-039-P1-K1-F7
gctgctgcgcttgtcttctaccttcaccttcgtttcttccgggtgtcctaaataaatatttacttgatgaaccgcaaattagataatgttctacgttgtggtttattgcggcggtattcatgctgagattgtggtttgagagatcctcgtttgcgagttgaaaaaatgccgaatgaattaatcccaccgctaggtgtgtattg

SEQ ID NO: 6887 - DNA, 405 bp, Zea mays
  Clone ID: LIB3118-039-P1-K1-F8
ctagctgtgcaagcctacaggctacaacaagcgcttgcggcgagcgtcttacaacaaccaattaaccaattgcaacaacaatccttggcacatctaaccatacaaaccatcgcaacacaacagcaacaacagttcctaccagcactgagccaactagatgtggtgaaccctgtcgcctacttgcaacagcaggtgcttgcatccaacccacttgctctggcaaacgtagctgcataccaacaacaacaacaattgcaacagtttctgccagcgctcagtcaactagccatggtgaaccctgccgcctacctacaacagcaacaactgctttcatctagccctctcgttgtgggtaatgcacctacatacctgcaacaacaattgctgcaacagattgtaccagct

SEQ ID NO: 6888 - DNA, 172 bp, Zea mays
  unsure at all n locations
  Clone ID: LIB3118-039-P1-K1-F9
ttttggtaatntccgggcgacctatacatcctatatctctacaaacctacaacctacattcttcactttctcataacatctaacaagaaccaattaacctttttcaccaccatccactataacatctaaccatacaaactactaccacatatcaacaacaacatttcctacc

SEQ ID NO: 6889 - DNA, 406 bp, Zea mays
  Clone ID: LIB3118-039-P1-K1-G1
acccacgcgtccgcccgtgcttctacgtctactgcagcttctcacctgtagcggcgccgcaacaactcgcattcttcagcggcgtagtaagcagacggcggcccagatctaccacggaggagctcgacggcgatggagagggtttcaacagctccagaaatggatgaggctgcctcaactgatcaatcaagcagattaacaaaaagaagggctaaagtttgggattacgttgatacagaggtagtagatgggaaagagaaggcagtctgcaaatattgtaaggtccacttatcttctgctgcgggtaaaggtacaactcatctgaataggcatatttctgtgtattgccatgcaattccacaagaagagagacaaaggtttttagcgacccaaaaaacaaagcctg

SEQ ID NO: 6890 - DNA, 130 bp, Zea mays
  Clone ID: LIB3118-039-P1-K1-G10
cccacgcgtccgcggacgcgttgatttacacatacagttggtaaatcattgggggggggatgtagtgggtgctaatacatggttggtcagtggaacaccttagagagagtggctgcaagtatctgtacac

SEQ ID NO: 6891 - DNA, 143 bp, Zea mays
  Clone ID: LIB3118-039-P1-K1-G11
cccacgcgtccgcggacgcgtgggcggacgcatcgttcgcccaggctttcggaggaagtgtctcattgtggtccatgatcactagcacattcgcacaaatttcataacgatctaccacatgctaagaaacttttatgcaacta

SEQ ID NO: 6892 - DNA, 171 bp, Zea mays
  Clone ID: LIB3118-039-P1-K1-G12
aagaagggcaagagcgctgtagcttagagcattctcatggattgtcttgcaccgaaatgtgtgtcctgatgagtacacttttttggttagtcgtctcaagttcagagcgttatgccatattttcagacctgatttgtacactgttttctaaaagcgattgagctctagtcc

SEQ ID NO: 6893 - DNA, 189 bp, Zea mays
  Clone ID: LIB3118-039-P1-K1-G3
cccacgcgtccgcggacgcgtgggcagcaacccatcgttggaggtgccatctttgagagtacatattagatgtactccataatggtaccctcattccggcatgtgtttcctagaaacaatcaatatattgatcgtgattaatctcattatattctctgcaatatatataatcctaatatataaaatatt

SEQ ID NO: 6894 - DNA, 404 bp, Zea mays
  Clone ID: LIB3118-039-P1-K1-G4
cccacgcgtccgattcagaaacacaccaagcgaagctacctagcaacgacttaacaacaatggctaccaagatattagccctccttgcgcttcttgccctttttgtgagcgcaacaaatgcgttcattattccacaatgctcacttgctcctagtgccattataccacagttcctccgaccagttacttcaatgggcttcgaacacctagctgtgcaagcctacaggctacaacaagcgcttgcggcgagcgtcttacaacaaccaattaaccaattgcaacaacaatccttggcacatctaaccatacaaaccatcgcaacacaacagcaacaacagttcctaccagcactgagccaactagatgtggtgaaccctgtcgcctacttgcaacagcaggtgctt

SEQ ID NO: 6895 - DNA, 401 bp, Zea mays
  Clone ID: LIB3118-039-P1-K1-G5
cccacgcgtccgaatcatcttcattcactcactctcttcgatcactgtactgaagataccatggccaagtcgaccgcgatgtttgtagccgccctggccctggtggtggtgatggcgacgacgagcacaggcggtggcagggcggcagcggcgtgcgatcccaagccgctggtggtgtgcgatccggcgttcatggacggagcgaaacccgcggcagcatgctgctccaccctgcgtgcgcaggaggcatgcttgtgcgtgtacgccaaagaccccaagtttgcaaaatacatcaacaaccccaacaccgccaaaacctttacctcgtgcggcatagccatccccaaatgctaagcaagcgctctgcgtcgtcgcttcgcttgctcttgctcttgtgtgta

SEQ ID NO: 6896 - DNA, 405 bp, Zea mays
  Clone ID: LIB3118-039-P1-K1-G6
cagaaacacacctagcgaagcgcactagcaacgacctaacaacaatggcttccaagacattatccctccttgcgcttcttgccctttttgtgagtgcaacaaatgcgttcattattccacaatgctcacttgctccgagtgccattattccacagttcctccctccagttacttcaatgggcttcgaacacccagctgtgcaagcctataggctacaacaagcgcttgcggcgagcgtcttagaacaaccaattgcccaattacaacaacaatccttggcacatctaaccatacaaaccatcgcaacgcagcagcaacaagcactgagccacctagccgtggtgaaccctatcgcctacttgcaacaacagctgcttgcatccaacccacttgctttggcaaacg

SEQ ID NO: 6897 - DNA, 402 bp, Zea mays
  Clone ID: LIB3118-039-P1-K1-G7
cacaaacacacctagcgaagcgcactatcaacgacctaacaacaatggcttgcgggacattatccctccttgcgcttcttgccctttttgtgagtgcaacaaatgcgttcattattccacattgctcacttgctccgagtgccatttttccacatttcctccctacattttcttaaattgggcttcgaacacccatgtgtgcaagcctatatgctacaacaagcgcttgcggtgtgcgtcttagatcaaccaattgcccaattacaacaacaatccttggcacatctaaccatacataccatcgcatctctgctgcaacatgcactgttccacctatccgtgttgaaccctatcgcctacttacaacaacagatgcttgcatcctacccacttgctttggca

SEQ ID NO: 6898 - DNA, 402 bp, Zea mays
  Clone ID: LIB3118-039-P1-K1-G8
cccacgcgtccgctttaaggatgatgttgttattcagtttgtaaatcctaaagtgcaagcgtcaattggtgctaatacatgggtggtcagtggaactccacagacaaagaagctgcaagatctgcttccgtcgattatcaaccagcttggtcctgacaacctggacaatctgcggaggctcgcagagcaattccagaagcaggcctctggtgcttctggtgcagaggctggtgccagcgctggggctgttcaggacgatgatgatgacgttcctgagcttgtccctggagagacatttgaggaggccgcggaagagaaaaaggagtcctcatgattttgctacatgcctgctgttgttaaaccatgccattagaagggacctgttgagaactctgacctacc

SEQ ID NO: 6899 - DNA, 305 bp, Zea mays
  Clone ID: LIB3118-039-P1-K1-G9
cccacgcgtccgttttaaggatgatgttgttattcagattgtaaattctaaggggcaagctttaattggtgctaatacatgggtggtcagtgtaacttcacatacaaagaagctgcatgatctgcttccgtttattatcaaccagtttggtcctgacaacctggacaatttgtggtggcttgcaaagcaattccagaagcatggcctctggtgcttttgatgcagagtctggtgccagcgctgtagcttgtcatgacgatgtttttgactttacctttatcttgtccctggattgacattttatg

SEQ ID NO: 6900 - DNA, 405 bp, Zea mays
  Clone ID: LIB3118-039-P1-K1-H1
acccacgcgtccgcccgtgcttctacgtctactgcagcttctcacctgtagcggcgccgcaacaactcgcattcttcagcggcgtagtaagcagacggcggcccagatctaccacggaggagctcgacggcgatggagagggtttcaacagctccagaaatggatgaggctgcctcaactgatcaatcaagcagattaacaaaaagaagggctaaagtttgggattacgttgatacagaggtagtagatgggaaagagaaggcagtctgcaaatattgtaaggtccacttatcttctgctgcgggtaaaggtacaactcatctgaataggcatatttctgtgtattgccatgcaattccacaagaagagagacaaaggtttttagcgacccaaaaaacaaagcct

(The sequence listing continues in the following parts.)
